United States Patent Application Publication US 2018/0305689 A1 - sequence listing, part 109

SEQ ID NO: 1562419 - DNA, 4001 bp, Homo sapiens
agagaaaagagagccaggctccttgaacttgactgagaaatgaagccagagttgacagcccagaaggtttcttatcagtaaagcctcctgtgtattattctcatgtgactttgtgtcatcatccattcacgacaagccatatagactgttaagagcctctaatagggtgcaacaaaaaaatcagaaagcatccctccggcttatcccaatttttctttcttttaattttttttaatttttttacttttgtggggacatagtaggtacatatatttatgagttacatgagatattttggtagaggctttcaaagtgtaataatcacatcatgggaaatggggtagccctgtcctcaagcatttatcctttgtgttacaaacaatccaattttactctccaagttattttaaaatgtacaattgaattattattgacaatagtcccctagttgtgctatcaaatactaagtcattatttattctttctattttttttgcacctattaaccagccccagtcccctccccaaatacccttcccagactttagtaactgtccttctattctctacctccatgagttccattgctttgatttttagatcccacaaataagtgagaacatatgacatttgtcctcctgtgcctggtttatttcacttaacacaagaatctcccaggatgttggtctgggcaaaaatttcttgagtaatacccagtaagcacaggcagtcaaggcaaaaatggacaaatgggatcacataaagttgaaaagcttctgcacagcaaatgaaacaatcaacaaagtgaagagacaacccacggaattggagaatacatttgcaaactacctcccattttttgtacaacattgtgccactgggtttcagtgccgcatttcagtgggagttgcctcagtcaaatattggacaatggccttcagggagatgctaaatatagaatgtagttctgagtaggaaatgagtgaaacttcccaatctccttgccgcaacctcaactgaagggtggacaaaaagcaaacacatgcctggccagaacaggggtaccaagaagacgttcagctaacagcaaccaacgttgcacagcagaatatgagaatgacactatccttagtgattccaggaacacttgagggacacttgagaggggctgacatcctaagtaaatagacaggcaagttatttttatctcttgttaatatgatatcttatttgttctcaagcttccgttaacacagtaaactagaaacattttcatcatattccaccatggagccacagatctcactgcctcataagtaaactttttatagtagttgcaaaataaaatgttaaatatgacaatggaaacattgacaagaactaaaatatttatactttacttcatttattagataaaagcaaaatacaagtttttgctaggatcttgatagataacatcaaggtaatggtggtaagaaaaataaagcaaatttagaagaacaacctagagtagttatacatgaatatgatttcaggtgacggactccgaaagtaaaaagacaacaaatattcacagaagcagcttaaatctattttaaagatttaacatagctaaatatctctccattgatgctgaaggcaatagaatggatttttggaatgaaagcacgggacaggaccaaacacatttggaggtttctcctctgcttccaatttcagcaattcatttaataaaagccagagaatccgtatcctccattgtacgatgggcggcagcagccatatccatagcctccaaagccagagccatatccgtagcctccaaagccagagccatatccgtagcttccaaagccagagccatatccgtagcctccatagccacagccagaaccccgtctgcagaagctgccacatccacagccatagccatagcccaggccaccgaagcctccacagctgtagcccaggcctccgtagtagctgccgtagtgactcatggtgtcaggagtggtgagttggtttgttgttcaggcaagatcctgagtgtgaatgccagcatgtataggaggtttatataccctggtcagagcatgtgataaacatgtgcccctctttttgtgtcattccatgaattatacttgcctgaggcagctcgttaatctattgtcccctgacaacactcagtaagattgcctgagcttgtttggctacctagttaggttgtccctgagcttgctgctttaattttattagaagggattgctgcttcttcaaagtctaaaacataccaaaccttaaatagaattctttattaccagtcacttaacatcagtcacattaaaaattcttgaatttctattcaaatatattctcatcactagcatttttggacgtggttatagttgattccacaaaatttcaagaaatagccaaggtcaagactcttactttcatcagtttcttcataaaacacacatattttgtagagtgagaagcaagaaagatttgattcatctgtgtatgtacctgaaagaaacaaatgtcacctaatttgtagacttttaaaactttgatcatgcacaattgttatatttattttgggctttgcacaacagcatacaaaatatttgttttgttttaagaacatagcacaattgtagtcataagtggagagactcttacagggatcaaaagcccatctcatctggtctttccagagttttctatttatatctcaagtcccttctccattatatgttctaacctcactgttaccaaaaaatgaagattataatctgccttcatacagaattgtttctctttctctaccttttgtcattaattcatccctcttgcatcttttgctgatctcacttcaaatttcacccaacttcttttcctccacaattcattactataaccaggtaaaagtttgaagtaggtaaaatgttctggctacaacctatttactcaaatcaacattcattctttccatttagatctccatagtcaatatttgcccttgtctttgcctattctgtgcccatgttttttgttgtgctttgttttaaccgctttctagttatcttttcctgagaaatcaactagatcttctaagatattgattatggtgtttcttgtttaaaacatttttcaactcttcaaattatctgaaatttaaaaaaatatttgtgcaacttagattaacacgaaattctctaaatgtaagggacaattgtgaaaaatatagaaaagaaggagtagctctgtagggagagttgaccagtgagtccctcagctcagcccatagagttagaaatgcccaaggcttacctcatacctgattaagcctcatccagatgtacctatatcttgaaacttggaactccagaaaggtatcagttttatatgactataatcatactactaagatttttttgagatttatgagtaaccgaatgacacattttaaaatttttattttatttaaattttttattgatacatattttacatacttattagatacatatgatatttaattgcatgcatagaatgtataatgttcaaggtagagtaattgaaatatccatcactttaaatatttatcatttctttatgttgggaataaatcaagctctctcttccagctactttgaaatatacagtatattgttgttaactatagtcactctgcaatagaacttatacctttcatccaacttttatctctcctgcacccacacacccattccagcatctgatatctatcactcttttctctacattcataagattaacttttttatctcccacttatgagtgagaacatgtgatacctctctttgtgtgcctgtttatttccctaaacataatgactttctgttcaagtcacactttttttttttttacaatgcggtgtttctctgacctgctgagtgtcaaaacaaagtctcatatttagttggcattcaaaaatattatttgaatgaagcata

SEQ ID NO: 1562420 - DNA, 4001 bp, Homo sapiens
actgttggaggaggggcctggtagaaggtgattgggtatgggggcaatgtctgatggtttggcatcatcctcctactgctgtcttgtgatggggttctcccgagatctgcttatttaacagtgtgtagcacctcccttgacctctctctcctgctgaccatgtgaagatgtgcttgcttctcctttgcctttcaccatacttgaaagtttcctgaggcctctctaggagaagcctgtgcagcccacagaactgtgagccaattaaacttatttactttataaattacccagtctcaggtatttctttatagcagtgtgacaatggactaatacagaaaattggtaccagagaagaaggacattgctataaagatacttgaaaatgtggaacgactttggaactgggtaacaggcagaggttggaacagtttggagagctcagaagaaaagaagatgggagaaagtttggaacttcctagagatttgttaaattgttgtcaccaaaacgctgatagtgacatggacaataaagcccaaatgaggtggtctcagatggaggtgagaaacttattgggaactggagaaaaggtcacacttactatgctttagcaaagagactggcagcaccgtgcctgtgctctagggatccgttgagctttgaacttgagggagacaatttagggtatctggcagaagaaatttctaggcagcaaatcattcaagatgtaatatggctacttctaacagcataccctcatatgcttgaacaaagagattatctgaagctggaacttatatttccagagcataaaagggaaacatagcataaaagtttggaaaatttgcagcccagccatgtcatagaaaatgaaatctcattgtttggggagaaattcaagcctgctgcagaaatttgcataagtagagaggagccaaatgttaatagccaagacaatggaaaaatgcctccaagtcatttcagagaccattgcagcagccctttcaccacaggcctggaggcctaggagggaaaaatgattttgttggccaggcccaaggacccactgctctgtgcagccttgggacatgttgccctgagtcccagacactcaagctccagccatcggtaaaagggctccagatacatctcaggctgatgttcccaagtgtgcaagcgaggagctgccaaggttttcacatggtgttaagcctgtgggtgcacagagggcaagagttgaggcttgggagctcctgcctagatttcagagggagtaagaaaatacctagatttccaggcagaagtctgctacaagtgtggagccctcatggaaaacctctactagggcaatgtggaggggaaatgtgggtttagagcccccacccagagtccctactgagacactgcctagtggagctctgagaagagggtcaccatcctccagaccccagaatggtagatccacagacagcttccactgtgtgccaggaaaagctgcagatactcaatgcaagcctgtgaaagcagccaggagaactataccctgcagagccacagaagtggagctgcccaatgccctgggagtctacccattgcatcgatgtggcctgggtgtgagacatgcagtaaaaggagattattttgaagctttaatatttaatgactgccctgctgggttttggacttgtttggggtcttatagcccctttgttttggtcaatttctccctttggaatgggagcatttacacatttacacctttacccccattgtatcttagaagtaagtaacttgtttttaaatcccttcaaaataacagatgctgcatcactagagcagcagcttagtagaagccagtgaatctatatcttctgtagcatgatgggcagcagcagccatctccacagcctctgtggccacaaccatatctgcatccttcatagccgcagccatagcccagtctgcagaagctgccacatccacagccgtagccatagcacatgccaccaaagcctccacagccatagcccagacctccacagtagctgccctagtagctcacggtgtcagagatagtgagttgggtttgctgtcccaggcaaggtcctgagtgtgaatatagcatgtttagggaacgcttatataccctgagcagaacatgtgataaacatgtggccatccttttgcagcatcccaatttatttatctactctatacaaataatcaatctgtttgttagcacaaggagagacacaaactcattaaaatctttgagctggcttagctgcatggttagaatgcccttgaacttattacattttttttttaagatggagtcttgctcttgtcacccaggctggagtgcaatgttgtgatttcagctcactataaactccacctcctgggttcaagtgattctcctgccccagcctcctgagtagctgggattacaggtgtctgccaccactctcagctaatttttatatttttagtagagacagggtttcaccatgttggccaggctggtctcgaactcctgacttcaggtgatccacacaccttggcttcccaaagtgctggcattacaggcttgcgccactgcgcccagctgatacattctttttaatgataaaatagtctgcatcttcaaagttacacaatttttaaaaaatcctaaattcttcatcactatgcatattgaattatttgtatttgacactgtgtttttattaaatgttttctcatttctcatttttacaccattccttagattgttctattttacctccacctagattcaaataaatcgatcaagtttaaaacttttaaatctagtaaagccttcaaatatcaaatatttttattgcgttgagaaattaaggctattcctccttcaaaagaaaaggaagtttttgaataaataaattttcttatcagctgtggtaaacacaaagtaatggaaaatatgtatgtagacataatataaaactactttaattttctatatcagcttgcaaaacattgttttggcttatcaatgtaacaaaatttattccagaaactgatatattatccaagagaataaactcagttttacaccagcctgaacagcagttcaaagatattctcttcaggtggggcacagtggctcacccctgtaattctggaggccaaggtgagaagatcacttgagatcaggtatattagtttgttttcacactgctgataaagacatacctgagactgggaagaaaaataggtttaattggacttacagttccacatggctctggaggcctcagaatcatggcaggaggtgaaaggtacttcttacatggtggcggcaagagaaaatgagaaagaagcaaaagcggaaacccctgataaacccatcggatctcatgagacttactcactatcatgagaataacaagggaaagaccagccctcatgattcaattacttccacctggatccctcccacaacacatgggaattctgggagatacaattcaagttgagattcggatggggacatggccaaactatatcaccaggagtttgagagtagcctgggcaacatagggagaccttgtctccaccaaaaaatcaaaaaatagccaggtgtgaggtgcacacctgtggttccagctactcgggaggcaaaggcaggaggattgtttgatccctgggaggtcaatgctgcagtgagccatgatcatgccactgcgctccagcctgggtaacagagtgaaactgtctaaaacagacacatacacacacacacacacacacacacacgaaaacaatcaagtctatttttatcgttacacaattttccagaactggctctaaataaagtattacctagaaactcagatgagcttggcttcatgctttacagataccacttttcttccacttcctactcttcctcactatgtatatatcagttctctttatcaaagcttttcattttatgctgcattcattcccaatatgt

SEQ ID NO: 1562421 - DNA, 4001 bp, Homo sapiens
attttgcctgcctcaacatgtagtgcatatctaaggtggaatatgcactcaaaatggctttcaggttttaaatgaatatttaactcaatatttgccatggttgttttctcctttatcaaaattaattccacctttattttcgttctgaaaaagaaaactggacaatgtttaaattctcaatgagtagttgttgaagacaaacaataataagtaagtctaactactttaagaatctcatgaattattgggtaaacctgcaagattttctaaccctcatgaaaggctaatgtacattgctatttccgatgcatataaccatctccaagagaaatataatccaatagattttacaaattaaaggcaaattttattatttattacaaataaaatatatttaataaaatatgccctgcttttcttatgtattttcaaataacaaaataataagatatacttcattgtgatacacaaatacacacatatatatacatgcacatatatgatcatataatgctgtgaaagatatgaaccaaaacaatcaaatacttctgctttttttcctaattgaaaagtagaacaattatagtatcttttggatagcgattaactttggaaactgagaaatgtttatttttcaatttttttctcttaattcagtggactcaatgacttgcacaattatttctctgttatgctattttggggatatttttccaggaagatcatgagttaattgtgaaactcagatcctgtgttggtgtgtgaaataatgaaaataaagttttctactggccaaatgataactttgctatatcatgccatgactttgccatatcataccatgaagaccaagtaagataatagaaaagctagctgaaaaaattatctaaaatattttgagttaaatatgttaatccaatatgaaaaaaaattctatactaatttaatagttatgtacatcagttgttcaatgaaaatgtcaaataaattaatggacagaagagtatgatagggtgaggttataccaattacaataattcttggaaagaaaatacactttcataattaacctaggaatatcatttgatctgtcaccatttgcttgctcttacaataaaaagaaagaaattttgaatggatagaagaattcattacacattcagagtgagttgacaaatgtgatctgaattaaataaaacatatatgcttgatatataaatataaagacatgtttagtaggtattcctttttgttgttgacttaaatctgaatactatctaaataaaaggaaaatgttgaaaaatatcagattactaaccattttgcagttcttttcatttcaatctagaattattcttctttggagctatcgatgtatttatctatctgcatgcatgtttatgaggtatatgaaaaaacatagattctcaaccaaggagatagcttctctcattgacatcatcacttacgtataattgagtttcatgaacaaaacagaaccatattgtgtttgaaaatagaatgttttattggaagataaacagataattcaatcagctttaaaagcaaaagtagagaatactaggattattatagagatgtgggtatacagagaaaaaaaattgcctgaaattctgagatgttaaattcttttgtgcaaatagctccagcatgatctttgttgtccaatgattgaagtcagctctgggaaagtcctcttataatttcacacattgtgttgctggggcagtagtttaatagaatccagagaatccatatcctccatagtatgatgggcggtagcagccatatccgtagcctccgaagccagagccatatccatagcctccaaagccagagccatatccgtagcctccatagccacagccagaacccagtctgcggaagctgccacatccacagccatagccatagcccaggccaccaaagcctccacagccatagcccaggcctccatagtagctgccgtagtagctcatggtgtcaggggtagtgagtttggtttgctgctcaaggcaaggtcctgagtgtgaatgttgacatctgtgcaggcatgcttatataccctgacacatcacgtaacaaaacacttgctgcctattttagtgtagttgtgtatgttacacttacctgacccaatcctgacatctgaagaggccctcaaactcattaaagtgtttgagcttgcattgctgtcttctcatgctgtccctttaacatattgcatcacttttatgagaagaaattgctgtagcttcaaagtctgtgcataccagaccttaaatagacttcttcgtaggcatattgcattacatagttggtaatgctatgttttgaaattaaatattgcttcatctctggctttccttgaattgttttactcatttatgattaaataacagactttggttaaattcaatgctctgaaatttattatattcttccagaggtatctattacctcaggtgaggtccctttttaaagagaagcaaacatttgaaagactggagccatctgctcacctgctatgcctaacagtaaagaatttcatggggttaaaaaagttaaaataaagccatcattcttctattactctagaacattggccatcataaccaatattctctttttttggttttactcgtttaaaaaataaaaaccattttgatttaacaacacaacagtatattgctcaaacattaaagtcaaatcacagtaatcaaaaatctatttcctaagcagctttacaaactgttcaaaattgttttcacatcccgactcccttactggcatattagacatccaaggtgctaccaaaaatacagattgtattgccctcctcccattcattcctttttcctgatccacacaattatcctcttttcttttctttttttttttttttctgagacagaatctcgctctttcgcccaggctggagtgcagtggcgctgtctcggctcactgcaagctccaccacccgggttcacgccattctccggcctcagcctccggattagctgggactacaggcacccgccaccacgcccggctaatttttttttgtatttttagtagagacggggtttcaccgtgttagcccggatggtctcgatctcctgacctcgtgatccacccgtctcggcctcccacagtgctgggattacaggcatgagccacagcgcccggcctcctcttttcaatatattctttcagttcccattagggtctgggactaggtgagatggtgaaatatatgcaattctttttgcctcccatccattttcatttaatacttacttaaattcatatatatatataaataaaatcttcgatttttcagatatttttgcctttatgttacctttacctattgtgtgtttcttttttttcctaaaagaaaatagctaactaagctttactaagatgttaggtatttattaaagtgttagatgttaatagatgccatcgccaaagaccctggggaattcagtaagagactgttagcattgtgaatgtcttaggaatcccctaaaaatatgtataatataaaaagacaggatgaaggaaataataattaaagacaaagagtacctcagctgactctaagaatttagtcacctagacccaaggctgaccccaaaccccacccacatatgcccttaactttaagcttaaatatataatttcttgtttaatttttattactttgaatatactgttaagcttttgatgagtttataagcaattttgaaattgtgcatttctccagatagatttgctggctgcagttcaatgaccagcatgcaatagaaactcaatatataagtgttgaatagatgaatgaattctagttcttacaggtaaaaatcttacatctcatagaaatgaacaatactacgaatgtatccaacaataagaatttaaaagagaaattagctcaaatagctttctttctttagaggaacaaataacctatc

SEQ ID NO: 1562422 - DNA, 4001 bp, Homo sapiens
tttagacctaggctttcctatacctttcttatagctgggataggaattgctaatttatatcatatctatacttattttatacattatatatcataaataacagttatatattatataatatatatttagcttccacagattctaccaatctcaagatgcagttattacatttaccagttgttaaatttactgtaccaacagggacgtatgagagttccagttgcttcacatccttacctacactaatcacttgcaaactctttaaaaaattgactatttttgtgaatacataatgatacctgattattgttttaatatggttttatttgattaataataatattcaacatctttacatatgcttataggccatttagattttttttgaagtaactgttgaagtattttgttcacttttaattgagctagtaatattttattattgattctcaggtgatctttacatatttgggcacaggatttttttcagatttatgtattaaaaatattttcattcactatgtagattttttcatcttaaaatggtgtctatacataaataaaatgcaataatatagtaaactcccattttaaaatctttttgttttatgtttaatgtttttggtcctaatttaaaaaattttgactacctctcacattgttatttaaaacttttgtctgttttctttaaaacttgttctatttttgtgatttttttaaaggcagttgatgatttgaatattacacttttgctaactcaggctaaagcaacataatcgcaaataaacaggtttcagatactgcctatttaagtctaccaaatatgcatctgttttggggcttatggtattgttgtaatgtattcttcctaagaaaagcaaagctattccctgaaagtaaagatattctggaatatttattttaaatccttcagcgatccataaaatcaataaattcaagttctaataatttgatcataccacagtgtactagaagtatcaaatgctttttctaagtagttaaattgattattatacttgttcctagctacagaaggcctttacctgtattgtgagaaaatgccactaacgatcaggaaaatggaagagctattatcatattctgtcaaactaagtagtgtagtcctcaaatggaatcaattgacccagtccatggagagtgttatgtactctcactagtctcactgaaagtgtgggtcttactagctggctgtataaacctattcttatgtttagtaaacaagtctgagtctttctaatgcttcttaattttttataccatttgaatttatcattatttactaataacttttatttagatctagatatgctagaaattaagaggttcaagattcatcaaaatcttaaataaaaagaggcatatactgtgaaaagtagactaatcttcaaaactcagctgtgattgttacacgaatataagaccagaattttaagattattgggaagcatcaagaaaagaaatatgcaatggaattgagagtcagcatttaaacaaatagacaaataaataaacagaagccatgtgtgccatttcaaattgagacaatttattgcaaagggaactaagcaattacacagttaggaaagtataggtagtggatgccagtagacacgatataggcaattataacataatgaatattcctaacatcttagatgctattttttttcatcttggattgatctagtgtgcccttgtttgactcaatatttggttaaattgaatgatcttcttatgacctctgatatcgtgtcctcagggtaggatttcagtagaattgagaatccatatcctccatagcatgatgggcggcagtagccatatccgttgcctccaaagccacagccataacccagtctgcggaagctgccacatccacagccatagccatagcctaggccaccaaagcctccacagccatagcccaggcctctgtaatagctgccatagtagctcatggcgtcaggagtggtgagttgtttggctgctcaaggcaagatcctaagtgtgaatggcagcacgtgtagagggaggcttatataccctgataagagtatgtgatgagtcacatgcgtacctgttttttttgtttttttgtttgtttgttgtgtgtgtgtctgtgtgtgtgttttaaattagttacttaacacaagtcattcatttttccctggcacaaggagaggccctcacaatcgttaaattgtttgagtttgctttgttgctgaattggagtggcccttaaaagttatcacaccacttaatgagaagaaattgctgtatctaaagtcttggcataccagatcctaaatagatttcttcatagctagacatattgcatattacaaatgaaataaaatgaaggttatatgttcctctaaagtcagatgctattggagctcatttctttgtcttctttattttgcccagactggtctcaagctactgggctcaagtgaccctcctccctcgacccccaaagtgctgagattagaggcataagccacctcacccagccttcatttcatctttaaatccctattgttcagatgtagccagagaattactcatgcctttgagaggcatagactttagaatttattcatcctttcagcatttatgtattgtgttgttactacaaggtaattattgcaaagaggcatgcaaattcagttgtgaaagcacaacatttggaaattacttataagactaaaaataactgatcactgtatttgagatcatataaggttaaaaagaacttaaaagctcaaagttgaaattaagggcacagctgaattaacaatatttggggtcacctgtggctgtatgtgactaaattcttggagtcaactgaggacttgcaccctcagttatttcttctgcctgttatcttgtaatattatacctacattttggagattctgaaaacatttctaatgttaatggtatcttattgaatttcaaagagcccttatatttaaattatctttttatatatcctataccttaataaacatttaacaacttagtggactagcatggtatttcctgagaagaaaaaggtgtatgtgtgtgtgtgtgtgtgtgtgtgtgtgtgtgtgtgtgtgtgtgtgtgatgaatttgatgaatttttgcatatgtgcttacactacctacaccaagcacactctaatctccaaaatgtttccattgttccattatggcaaatatcattccctagagataatcttctttccagtttttaacaacagcttcaaaagatcttgtcaatagtattctaaatttacagtctcatcagcaatgtagaaatgtatagtctcatgagcaatgtaagaaaattctagttgttccacatatttgataatgcttgtcatttttagactgtttaattctgactattcttgtgggcatttagtaatatccaagtattgatttaatttagtttttgcctgatgagtaatgatactgaccaccattttatatgtgtattggccatttagatattctctttttaaaagtacctgctcatgtatttcgtccatttttaagtgggtttgttatattctagcactgatttgtgggagctttttacatacttggatacaggtattttgtaaaagtttggttttgaaaatattttctgccaacatgtggtttgttttttcactttcaattaatgtttatatgtaaatagattatcttaatatcagataaaatttgttaatatttgtattttatgtttaatgcttttttgtcctaattgagaaacttttgattacctcacatcttattcttaatttctttgtcttgtcttttcagaacctgttccatttttatgaagcatcctaaatcaaaagacagtggctaacttgaatattaaattctcattatttcagttggaagctataaaatcacaaataaacaggtttaatgttatcacgctgcctattttgctctgtca

SEQ ID NO: 1562423 - DNA, 4001 bp, Homo sapiens
tatattattcttgaaacataataatatgttattgcatatttttcatgggcaagatacttatctgaaataccaacacgaaaaggcccacatttgcttgttaaaggttaaaagagacttggctagagtgtataaagcttcaggtcaatcacagccttaatatgaattacttcacaagtgatggcaatgatttctatatttcctaggtgtgttgcaaaatataaatgtgctgataatatgaaaatacaacttcgtgtcacaccacaatggaccaggaataaaacatgatagaaagtcacaaaagggctgggcgcggtggctcacgcctgtcaacccagcactttgggaggttgaggcgggcggttcaccaggtcaggcgatcgagaccatcctggctaacatggtgaaaccccttctctactaaaaatacaaaaaattggccaggcgtggtggcgggtgcctgtaatcccagctacttgggaggccttggcaggagaatggcgtgaacctgggaggtggagcttgcagtgagccgagattgcaccactgcactccagcctgggtgacagagcaagactccatctcaaaaaaaaaaaaaagtcacaaaaataagttctttttcagtgtatattcagatatatactttgttttatcagcacttttcttaccattaaaggggccatataaacatacattttgaacaaactatagaaatacatactcttcatgttggtctccagttaaatgtgaaagtttatgaagttggtatttcaaggctgaatttaaacactaacatgatctcactgaaagcattgaaatgaaaaagatatggtgaatatggcgcagtgttccaaagaaaaagccttctttttaattgagtgttatggttttcatttgtgcatgtacagtttacctttggacaacatgggcttggactgagtgaatccactcatactgagattttgttctacctctgccactcctgagatagcaagaccatcgtccccgttcctcctcctcctcagcctattcaatgtgaagacaatgaggataaagacctttatgatgagtcgcttccacttaacaaacagtaaatataaattctcttccttattattttcataacattttcttttctcttatttactttattgtaagaatacagtatataatgcatataaaacacaaagtatgtgttaatcaactgtttatgttatcagtgaggcttccagtcaacagtcggctaccagtagttaggtttctggagagtcaaaagttatatgtggattttcaactgcatgggggaatcagtactgctaacccctacattattcaagggtcaactgtgacctttgaatgtgaatatatacatgcacacacatacatacagctatatagataggtgcatgtatatacaaaattattttgttatatataatatacttctatatgtatagtagtttgttcttttttcactggatataattacaaataaccactttgccattttgagtcaagcaaaaaacaaaagtcgtgtatttgctttcagttagcataatttattctaaaaggaacagagaaaccccacagttataaaggtacaagtaagacacatccagagacataaagcaaagaattatggaatgataggtattcttaaacctcttagatgctaactgctcttgatcttggcttgatccagggtgacctcgtttgtttgttattgcagtcaggtttgggtgatcttcttatgtcccctcatgttaggttgtcagggaaggatttcaataaaatccagagaatccatatcctccatagcatgatggacggcagctgcggtatccatagcctccgaagccagagccgtatccgtagcctccgtagccaccgccatagcccagtctgcggaagctgccacatccacagccatagccatagcccaggtcatcgaagcctccgtagccgtagcccaggcctccatagtagttgccgtagtagttcatggtgtcaggagtggtgagttggtatgctgctcaaggcaagatcctgagtgtgaacaccagcatgtgtaggaggcttatataccctggtcagagcgtgtgatgagtcatctgtataccctcctttgctatagttatttgtattacgtttgatgttacaactcatttatctattgtcttctgatgtagggagatgccctcattctcattaaaatatttcagcttacttaatgtcttattcaggacacgattgaacttactgctttgcttttatgaaaagaaagggcttactgttcaaaatatgcacattccaaatgctcaacagaattgcctattaccaggtgtattacatcatctacactttatggtattccttttataatgaataatttcctttgtccgtcatcttccaaactgataacttcatattcaactaaatttacagctgttttttcaatttacagatgttaaatctatagttttaaaaagcaaacttatttatcaaggtgaggtcttcagaaagtgcctatatgcacaatacaggaaaacatttgaaatcaaaatgattttaatgccctgctgtgtacaatcgccaaaggactcaaaaaaagagagtgtatgctgatttttagcattttattcacaataacttttatactatttttgactttgcacaccagcttcagaaccttttggttgcaaaatacataagaattaatttcagaaattgagggcacaaaatccatctcctacgcagacttatcagagtagcactttagttttccattcaagtcctaaaactctcctttataattggttttattcaaagtcctggtaaaattgcagattgcatctgcctctgttttgcacattctagtcaattactttctttctttatcatttttcagtagtgtatatatgacctctatttcctttctcatttcagcttttattcttcttcccattttcttaatgtctatagaaacagccaggtagaagtttattgcatacattccctctgtcttccatcgacttatctcaacgcttttttttttctatctcctctttgtattcactgtaacatctttcctgatttttttgtttgtttgttttttgagacggagtctcactctgtcgcccagtctggagtgcagtggcaccatctcggcttactacaagctccgcctcccgggttcacgccattctcctgcctcaacctccccagtagctgggactacaggcgcccgccaccacgcctggctattttttttggatttttagtacagacggggtttcaccatgttagccagaatggtcttgatctcctgatctcgtgatctgcccgcctcggccccgcaaagtgctaggattacaggcgtgattctgatgttcttctatgtctatcctgtactcatttattctgaggtaatttctaaccactgcctactgatctgttaatagttcattaaaatatcatttttaaagctttctattttttgtacttactaaacatcctcaactccccaccccagcaaaaatacttagaaataatgaataagacctactatttgatagcacaatagagtgactatagtcaataacaacttaattgtacattttaaaatgtcttgagtaaaattagactgtttgttaactcaacagataaatacttgaggggatgggttttttaaaatgtactccaactcctatggctttctgaaatttaaaaggtatcctaaaatagaaattgtcttcaaagttttcaaaataaaggcaccatggtgaaatggcacagaatagagaaacatatgtaaagaaatttgccctgggcttcatagagttcctcagctgactttgttgaattagtgaaacagatacaacattgagaccactcttgattaatctccatgcagcacctgtctcttggcttcgacaactaaaaattcatttaatttacatgactttgaacatgctggtgagtttttgtgagatttataagtattt

SEQ ID NO: 1562424 - DNA, 4001 bp, Homo sapiens
caaatgaccatacctataggcaaaaaaggcagttaaacaacaacaaaaaataataacatataaacagaacagtaccattcccatcattattaatcgcttatttgaaataaacataacatgaactctctagaggaacatggtactattttagtttattattttgtatttagatgttatttttacatcaaatctcctccaaatcatcttccaggtttataacgtcttgtgctaactcttacatgacatagagtggaaagtacctgaaagctactacaaaaacattgttcactggcaagatggtaggagtagaaatgtatgtcaagaattactgaaatttaagaaatttaagagaccttaagtactatctagaatagttattttcaaggaaattttgacgagtagtcagcagaccaatagcaaaactaatgaaaactaattatctaagttatcctccagaaaattaaaaattaaattggtaaaaatgttgtcatggggtttttcttttctttttttttcttttcttttcttttcttttttctttttttaaacagagtttcattctgtcacccaagctggagtgtagtgacataatctcggcccactacaacttctgcctcccaggttcaagcgattctcccacctcagcctcccaagtagctgggaccacaggcacgtgccaccacacccagccaatttttgtttttttagtagagacggggtttcaccatgttgaccaggctggtctcgaactcctgaccctgggtgatccacccgcctcggcctcccaaagtgctggggttacaagcatgagccagcgtgcccggcctctctcggtgtttttaattcagacatccctcaggtttacttttgagaaataatatcttttgggaagcaaggcttgaactctacaggtaggaacacagaaagacaagtaatttaacttgtcaaggaggtagagtagattctcatatgttcaatagtttaaaattgattatacataaaggacattatacatttgataagtcagtgttgggtacatgcgagctttgatagcattctttagaccttacgtattattacaaatattatttatattaactcaatgttttatttaaaattcgctttcattgattaacatagaattactgtgctttgagataaacctcagaatacaaacacactaattggaatgaagattgcaataagttattgtttaaaactaagtcataaaaataatagtgtacataatcatattctaaaaacaaaatcacacacaaaaccactgaaaacagataaaaagtaaagacagatgaaagtacacagtgattttgtccatcttattcttttatatcttcaggacttagaatggtgcccaaatttggagacacacaatgaatatatgttgaataaaatatattattgaggcaaaactgttgaaataaaaacaccaattcagaggaaagaagacaaacagcttgattgaagtctcatcaatgcatttgaaatgtactaaaatgaattgataaagccatgtttgctattcaagttaaacgtgtttatttaaaactattttaaaatacatgtcacaacagatgtcagtgactaaataataataggtgaaaccctgattcaatgtaatgattccagattcttccataaaaactgatggctagttccttctggagcatgaagccaaaaaatggtaggtattttctctacattgagaaaagtgttcgccttgctgaagcatacgggcaagatcttggagttagagtatgagaatcagcaagttttttagtagaatccagagaatccatatccttcacggcatgatgggcggcagcagccatatctatagcctccatagccagagccatatctgtagcctccacagccacagccatagcccagaccaccaaagcctccacagccatatcccaggcctctgtagtagctgccatagtatctcatggtgtcagggactagagattcagttcaatgctaatgatgagtttcctgagtgtaggtgtctctaacttctcagaatgattttatactctaagtagtgggtgtcatgaacaacaatgacaggtgatcttatttccacataacagaataattttaagtctaacaattgtttattttttttcttttcttatgtaacaaagggtccaaactattatttaaagacttttagtctttagtttgcattcctaagaacaaaatattttgaagatgaaaaatgattatagccacttcaaaggccaggctggtgttgtaattaaaatggtctaatcgggttgatagcttccagtaacgctgtaattacataacctcatattgcttttctttttaatttgcagtccatcgtcttggttacttcattcccagaacccaaggacttctcttcatggtagtcagggcatagtcacaaagtcattagtgatttccagtagtcaaatttagaggaaaccttggtttttgactcatttgaactttaattgacctttgacattgctaaccttccatccattcattcttttgtaaagctttcttgccttaatttctatgagaaaccttcaattagcttcctctgccaattttttgttaggcttcttcccaattttttattcatccattaacttcaaaagtgtaccttttcctctgcatacacttttcccatgaagttccattaaatattatttttcttttttcaaattttatttttaagaatacatagtagagtatatatatctatggggtatatgaaatacttttatacagacatgacaatgcatactaatcactggttaatggagtaataatcactggtaaatgataaatagggtatccatcccctcaagcatttatcctttgtgttaaagcaattcaattacactctcttattttaaaatgttcgattaaatcaataatttaatttaaatgcaatttaattatacattttaaaataactaagagagtataacttagtatggccacacttttgtgctatcaaatactaggtcttattcatcatttctattcctttgtacccattaaccacccctactcctccatcactcacatccctccccacccctaccctgcacccacctactcccctttccattctctgttaaccatccttctagtctctatctccatgagttcaattgttttcaatttttagctcccacaaataagtgagaacatacaaagtttgtttttctgtgcctgacttatttcacttagcataatgacgaccagttccatccattctgttgcaaatgacaggatctcattattttttatggttgactagtactccattgtgtatacataccacattttctttatccattcatctgttggtggaaaattaggttgcttccaaatctttgctattatgaacagtgctgcaacaaacatgggagtgcacatatctctttgatatactgttttcccttcctttggatgtataccaggcctccatagtagctgctgtagtagctcatggtgtcagggactagagattaggtttgatgctaaagatgagtttagcaccagcagtgggatttctgtgtcatatggtagcttcattctttgttttttgagaaacctccaaactgttctccatagtggttgtactaatttccatccccactaatagcgaatgaggattccaaaacatctatttggttcttttgtccatttctaatcagattattagattttttttttccgtacagatttgtttgagctccttatatattctggttattaatcccttgtcagatgcatagtttacaaatattttcttccattctgtgggttgtctcttcattttgttgattgcttcctttgctgtgcagaagctttttaacgtgatgtaatcctatgtgtccatttttgctttggtggcctgtgcttgtggaatcttactcaaggaatttttgctgagaccaatgccctagagagtttccccaatgttttcttatagc

SEQ ID NO: 1562425 - DNA, 4001 bp, Homo sapiens
ctccctttttggaatgggagtatttacccattgcctataccctcattgtttcttggaagtaactaatttgtttttgagtttacaggctcataggtggaagagactagccttgtctcaaatgagattttggactgagaacttttgagttaatgctggaatgagttaagattttgggggatgttgagaagaaatcattgtattttgcaatgtgagaagggcatgagatttgggaggggcagggggcagaatgatattctttggattagtgtccccatccaaatctcatgtcgaattgtaatccccagtgctggaggtggggcctggtgggagatgattagctcatgggggcagtttcttatggtttaacactgtccgccttggtgctgtcatgacagtgagtgagttcccatgagatctggttgtttaaaagtgtatagcacctccactttctctctcttcttcctgctccaccatgatttcttgtttgcccttcaccttccacctgcttccccttcctcttccaccattattgtaagtttcctgaggccttccctggagaccagtagatggcctgcatcattcttcctgtacagccagaggaatcatgagccaattaaacttcttttctttataaattacccagtctcaggtatttctttatagaaatggaagaatgaactaatacagctaaccttaaaaaaaaagtacagaagagtcttagtgttttatcttatcttattctctgaaagagaaactgttcagaattaactggtgaaatcatctagtcttaaatttgcatatttgtcaaaatggattcatgaattccacttctttatgacatatagaaatattcaggttcgtatttcttcttgggtccactttttatacatttaatttaatcagataatatgtatttgaagatggaataaattggcccgagctttgttttatagctttttttctatgcaattttttaaacatacacaaaagaagaaagaataactattacaccagccaccatattcccatctcctagataaagctattgttaatactttgatataattccttcacactgttgttctccaatgttataatctatgtgcaagctaaaaccttttcttattatattgctctgaaattatcaagatattctccaagaaatagtgaattaaaagattaagcagaagtttatcaccacagaagcatctttaaccttttggtgtagaattcctgtttgcctggacaagaaaatatagatattgagaatgttaaagatgaggaggaggaagaagacaaaggagaaggggataaagaaaagaagataaaggagaggaaagggatggaaagggaggaagaaggtttaagggacaggaagaatgacgaggaggaggagggtgaagaaataatcgtgacatataacgtattggtaatttttttatctataagaagaaaatatcaccatggttgattatattaatgcatcacagcacatttattgtgataaaaatttgaggctcaaaacacatttaccacatgagaaaaagttcatggttagatatcagatattgaaagacaatctttcttagagtataatggctctccagccaataaaaaagtgaatatctggagaacatcactaatcaaatgccaatatctagttgatcaagttttcttcacactattgtcaaaaggcaggtgatccaagcagctgttttgttatggaatatggaattccatatggttatggaataaagtttcttggaagaattgggaatctcacagaagactatatttcaagtatttattcaatagaatccagaagaccagtatcccccatagcatgatgggtggcagcagctgtatctgtagcctccatagccacagccatagcccagtctgcggaagctgccacatccacagctatagccatagcccaggccaccgaatcctccacagccgtagcctaggcctccatagtagctgccggagtagctcatgttgtcagaagtggttagctgttgtaggtcagtttggtgactgtgactggacaggaacatttatatatactctgatgcatgtggaaagccacacctttaaatgtcatcccttagaacgtgttacctgaaaactatgccaactatcttgttttgtaacacccatcccactctcttccttgtttatgaagctagttatttagaaattatacaacatgttttattttctgctttatttggatttctagataagtgttttgcctctaataaaatgtagttgcatttatattcactgtacatgtatgagtttctgagtttcaaatgccataaacaaatctctatagcttcaagtattcttcaaattgcatctcatgcaattacatttatcctctgattgcactctttcctttgacagtccatggctgctgagccttttctaagccaaggatgttatctttattctgccaagaattcacaaaaattgaaacattattgttctctgaaatggcaatcaactatgatgtatgtctttatacaatgtgcttttaaagtcagctgggaaccacattttatagtggaatgatgatatttaatttttaaaagagtcacaaattaatgtcaaaggaatttctcaaatattatgcttcatgtagagccagcctgcttagtagataccattaaagtgtgcataaagtccctgccaatcccttatgaatagtttcctctccccaaatttaatcttagtctagattctaaatttcgtactatcataggatcatataattatagaattaaagagacttgagtcatcatttatttcagtgttcttgttactgatgagaaaaatggattcagagagacaagcagagttacgcaacagtgaaacttagtggcagattaggactaaaacctaagtactttgattattggccttagttcagcagatgcatttgaaatcaaagattgcaggttagggtatatcttctcccacaatgcccagctgccttatatttttgtttcatatcatcaatataaataaaagcaaatgacatgaaaccagtaagcatatatgctcagctactcctgctatatatatatatatatgtatatatatatatatacatgtatgtatgtatatatacactttaagtactgaggtaaatgtgcaaaacgcgcaggtttgttacataggtatacatgtgccatggtggtttgctgcacccatcgacccatcgtctatgttaggtatttctcctaatgctgtccctcccctagtcccccaccccctgacaggccctggtgtgtgatgttcccctccctgtgtccatgtgttctcattgattaactcccacttatgagtgagaacatgtggtgtttgcttttctgttcttgtgttagtttgctgagaatggtggttccagcttcatccatgtccctgcaaaggacatgaactcatccttttttatggctgcagagtattccatggtatatatgtgccacattttctttatccaggaacctcaaagaatacaggttatttttgaacttcatttatactgattaaacttatttcctttaccagtttattaaaagtgctacataactaggtacttaacatatttccatcctgagggaactttgcaaactacaagttgaagggaattattaatggtaaagaattgctgtatttgaatttgcttcagttaagaaaatgtaggttcaatataattttaggtaattttttaaaaagactattatctttagcacttgtcacaatccagataaaaccagatatatttgcttggtagggaaaatattattatcaggaatagaagatcccagaacctccaatctaggaattattttctagggtcctctgctttatttgattcctaaaagtgaagctaacacgtatgtgaactttgcctgtccacgaagcatcaagtcatctgcctcttctcattctcagctcacacgacctcccacttggcactgataggacta

SEQ ID NO: 1562426 - DNA, 4001 bp, Homo sapiens
caaagacctcccttccccacctatgtctctattatgggctgctatattttgagtttcttgacaccaaaagcgatgtattattcatttgaaatttccatatgacgtagccagcatgtaatacaaagtaggtcctcaaaaaaatttgaactatctgaattatctgctcctagaaggcacttttgaaatcatggaatattatcaatttttagaccattttaaattgaaatataacaaacatgctgaaaaatacacacaacataaatttaataacttagaaagaacctccatgtaaccacttccagatcaaaacatggaaaattgccagcacctcagaagtccccctcaagtcctcccatgaatactgtcttcccaaaggtaacgactatcctgacttctaaccctgtaatgtcgtttttcttgtctaaaaacttaaataaatgggctcatactgtatttattctactatgcctgggtcctttcactccacattatgatcgtgaggttcagccaggttgttgcctatagctctagtttggccattgtcattgctgtgtaatattccattgtaagactatactgcaatttatttttccattatactgttgatagacattaggttgtttatggtgaagtccagacgtgcacattttccagttatgtggcaaatatctgtagcttgccttgaaagcaaataatttttcatttatgcttcttgacaaaatgcaaggcattctgcctgaccctgtaagggtgtacatatggagtgctactgttgaggttttttgtcagctgctggggcaaaaataaactccacctagggtgggagatatttgaccagagtgtgtgagtatgtgtgtgtataagaggaaatggggtgagaagagggtggagagctataaaagaacaccattatccccaaattatccccaaaccactggacagattaaaaatgattttatattataacactgatgagcaagtttcttaatccacaaatattcttgactgccttatacatgccaggtattgtcatgaccacagaatatacaatggtgaattaacacacacacagatcctggaagcttgggtctggttctgtgaaatgaatcaatagaaatgaaaccaagtgagatataccagccacagaaagacaaatactgcccgattccactttacatgaggcatccaaaagagtgaaatttgtagaatccaagagtagaatggcagttaccaagggctgggtgaagggagaaataggcagttactgacaaagaggcatgaagtttaagtcaggcaaggtgaacggaccttagagatcagctatacagtatggtacctgtagtcgacaataatgtatggttgactcaaacagttgttaggagggtagatctcatgttaagtgttcttaccacagtaaaacagaaaaaaaaattaaaccaaatttgctctactattaaaattagtttattgaaatagaagaagagttggtgccatgttgatatattaataagggaagagagggattcacagcttgaaaggtgggattctaggtcattctacaggaagggctccccttgctgctgccactgattctgttgtgtttgttgccagaattgagtcttgactttgaagagttcacaaggcaccctttgctgctttgtctggtttatcaagaaagtggctgcgcaattcacagagggggtaaaaagacctgaaaggagaattaagtcaggatgatagacagattctagtgatccaaagaatgagttcactcttcagtagaaggcagagaatccatatcctccgtagtataatggtcggcaacagctgaatccatagcctccgtagccacagccatagcccaacctgcggaagctgccatagccgcagccatagccatagccccagccaccaaagcctccatagccatagcccaggcctccataatagcttctgtagtagctcatggttcagcaactgtagatgtgtttggaggtcaagggcaagtttcctgagtacaactatcaccagcttccctgggacttttatacatcctcagtgattagtggggtagacttctcatggcgtagattcaattgcatgaaaaaaaactcactcatcttaaaactgtaggacaattcctgacactaattaaagatgttttcattcgatttctgtgcagtttggattccacaggatgattatgctgtcttcaaagccctcttgctttgaccatcatagttaaagctctataatcagacataagagcagcaatcagctcccattttgtcacctaaaattgttctttcattacagccccttcccagtatccaattcttaatgtattccttgcacaaatatttaatgcccaactaatgcatcccaggcactatgctcagagctagagatatggctgtaaataagaactgcccttcccaatcccatgagtttttccccttcatctttgttatttaagttagtgaagtaatagaagaggtacacttactgtataaatccaacaaaatgtagctgatagcacaaaaggatcacatttatttttttaagagagagagaaaaacccaaatggaaaaattttgtttccttacacattactacccttttaactcaatgttgtttatgaaacttttgatagctcttagctcttactgcaagactttttcattattcaatgtttatataggaaataacactaggggcaagagccgtgggtgtgatttttgcaaagtgataccatattcttcatctttgtaatcttctttttaaaaaataatcttctaaagagattaacatctgagtactggatctacccatctgactccacagtcacaggtaggcaggcagccctctctgccttactaaattcctaacacaatcagcaaagaggttttaaaaagctgttttccaaattctgggattccatcttctgctctctaaggaaaccttaattaaactacaatttacagaaatatgtaaaattaaaaatacttaaatatgacattttctttttgaagaatgaagcccactgaagtgttcatgataagggtcagaatcacttctacttagccattggtatcaaaaccaatttcaagcacataagcagtacgactattctatatactattaataatcacttcagatagaataatataatatcagaactggtgtaaccctcttactttacagatgatgaaacagaattggagaagattggtcagatcacccagtgagtgacaaaacccagactagaacctaaatcattcactttcacctgttttttttcatcatcacatttttatagatgttgtacaacaaaggcaaaagcaagaaatattgtattatcacaacagaagaatgaaaatgctcctttgctttctcggttggtgagctttctcattttgatttttgatctatatgctgattggtctgttcctttcctttgggccagaactcaaaggactaaaattagcaagtggacactgaaagtcacatccacttattctcaatgagattacaatggagatgcctgttgcattgattgttcaagagatgtaaaactgagaggggagaacaaaaataggttcaaaagttttgaagtggaaagttgaagcccaactctttcttgtcttagagttaaaagtatatgtattcactaagagataaatattaaagcaaaacaagatgtaaaatgggactcagttttagctgagaacctgtatcatcagtgacaacagctctcacatccccaagaaaggtggtaatctacctaagaaggacttgcaaagggagctacagaaacctagatccgcagtctgcaactaattgaaatcacctttgcaataattttaactgagaaaattataacagtgaaagagatctgatctaaccgattccttcttgcttctaacctctaagctgtccttgttcattcctgggtgtaggccaaactaactttgggaggaatttagtttatagtttaactt

SEQ ID NO: 1562427 - DNA, 4001 bp, Homo sapiens
taatgattttaaaactcttcgatcataaaagaacttactgaggatcttgaaaagccattctttatgtgttatatttactgatattcatctttttaaaattaaaattgatgattttaaaatatgagttaatcaatttcaaaataacagtcataatttcatatttttagaaacataatttttttagagcaaaaacttcttaggaatagtggaatgttttacatgtttggtcaatctctttaatgtctcgcttaatggaagacagtttctcatatctgatttagcttttagtctgttgtgataacatgcatatatctggaaaattccaccgttcattcatgaatgtatggcagtaaaaatgaaaaatgtattatgaaaataattttgcccttatcgagacctcaaaagggtctttggttcccacatgcgtccctagaccacaccttgagaaaatttggtcgagagcagagatcttcaaacttgtgagatgagaaaaccatactgtaaatattttgaacctgcattcccaatttcaattcaaccatttatttataaattttatacatgtgttattgctaataatcattagcaataacacatatacaatatgtataatagtaaatatattattttaggtatgttttgatattttagaaaattttaagaactggcaatgcatagatttggagttctgtttctagattcattttattctaattactggaaaagatatattgtttgctgtattcattaaatcatgatacaaacttttaatcccattatctagttgtataacttgttttttaaatttccctaatatagtttccttaatgtcaatagtttatttttacagattaattgagaagtttgattttcataccatgtggtaaaaattcactaaaactcttccgtttggaaaaaatgtaaaacccaattagaatattctaatagtacacaaataccagttttataaagtatacaactagataaaatttagtaatattacaacagaaataatcttgaatattcatgaaaagatgctctctcccaatatagcagcatgcctagaatactttaggagctgttgcatgaatgcaatgaaatatgaaatgaacttcattatcaaaatcgcctatcataaagagatttcctataaagacatccaggttcccagacatggcacagcacttcctgtatacaggatctatatcaacaacatcaggcaactgagaggcttcatagtgatgaagctaccagaaggcagacaacttggaaaactcatggaagccacaacttaaaatgtgtatgtgtttctatgtgctctggagaaacaaggacagtcagcagcatgcagccaccagccttaggtgtgtagcttgtcaagctcaagtagaaattatttgaagagaaagcaatcaactgtgtccctacagaagctcagttttaaatagtgtgagaaatatacagaaggacaaaaaataggaaaatgaaataagatgtagtgtcaaccccttgggatagtaattatccacaggtttccatcttaccatcatccacatgcaaagttgacaatgaaaataataaacatgaaaacacactatatttgcaaacagactaaatttatttaaaggacttaagaatcaaagaattgcattttaaaacctattctttatcatcttgcacaacagaaccagagaaagacagcatctgtagttctttgataatagcctagtttaggtttctgctgttttgaagacacaggatcagatgaacaagagcagcatgagaatccaggtttcacaagcagacaaatctggtgagctctagaattgttcagtagaaaccatatgaccaatatcttccatagcaagatgggcagtagtagccatttccatagcctccatagccaccataaccacatccatagccacgataaccacagccatagccacagccaagcccaccatacccatagccaccataatagttgctgtagtaaatcatggtgtcagaaatggatggttcaggtgtagaagaggatgttcttgaatttgaacatctccatcttcacaggtcttttatacttcctcagtagtaggtgtggcaaatcacaggcaatgttgctcttattatgaattattttgggttgaccgctaacaccgccaaggcaacactctcataaatctcttatttcattaggcatagtgaagccttcatagctaggattcctctagtgttgtgtcaagattttcacaatcaaagaatgtgatttgaatgacagattttttttaacctggttttaacatccttttttcctgagagcacatactaaaatttcatgatgagattctatgaaataacagaaactatgcaaatctcatctgattcaaattggttttggcttgttaattcctttacattcatctaccagttgcagttgaagaagtctgtctgcatggctttggggagacagatgtgcctaaggggcaagtctttcgagtatgagatctgtaatattgcccaatatttcttcagagatagaacagtttatttcactttaaatacataagtcaggtaacatttttacaggatacaactttacaaacgtacaaatgcactttattttactgttataccaaattctatcttgattcattatttccactaaatggcaaaacatttattcttgtccctttcaggtaaactcaacaaaattcaatcactttctggttgtcagtattaaaatacaattgcaataaagacattaccactcctcattctctgcctgaggtgtgcttcgatgtgcagtgatatgctgttggttttgaggaggaccatacctgttctgcactgacacctttggatggcataacacatattgccattttccactgccacaaaaataaaactctgttcaatccattacctagcatgaagtgttacatccttgggtctctacagccagaacagtctttggttgtagtaaggaaatcaatgagtctccactcagatccacctgggtgagaaccaatcattgtatctccccctgcttgtgctatgtgtgttggggaacttggtaggactttccccttctcagtaaaaccaggatgtgactttctctgttgttagatgtacatcctcaatgcagagtttctcttcccttcagcttcaaggacataatgcccctaaatgagaacttaagcatgcctgagttctcttattcaattgatcaactctctactgaagcttctatccagaaaaacagggatgggatgaaataagtaaagacagcaaaatttattctagtattctggttcctactatgaaccaaacactattcaaagtgtctggtatgtatcaaaagatttgattttctaaatttccttgtggggtaggtatcattattacaatcccatttgcagatagggcagctgaagcatgtagttaacagtggtcagacagctatggatagtagaggtaaaatttgagcctagaaagcacattacagatattttactcttatttactatattcaactcactcttataaagtcatcttactaagaatataagtccagagggctacttgacttaatcattcaatttagctctgatcttcactgctttgaaaaaagattaggctatagtaacatgttcctcatagtctcatattttgccaaagacttcttgtttgatggtggaaatatagtaggttgcatgaaaagatacttctgccagtattattgttttaaatatgaaaatacctatacttacttttgagccagaacacaaatataacaaatgccttgaaatttcaggaaaatttttataaaaatacaattttataaataaaatgaaacctcattgattacgaatttgaaactatgggaaagaactattgttttaaaacagtcacaaaaggaaatattgatgtgagaaagaaaagtatagttttctcatgcctggtattttagaatttcaaactattggctttgtgtcaacagt

SEQ ID NO: 1562428 - DNA, 4001 bp, Homo sapiens
tcaaaatacagcatgctgaatttgagttacatttttctttagtagttagagatgaaattagtatttccgatgtgggtatggaagtggagtcaggaagcccaacaggaagagtccagcaggttgagttgctcaagagaaaccctgatagagtctgtatgaccagaatattacactgttagatgagcagcccagaaccagagacaaggcatcagagagttgccatttcagctcatggtgtcagaaatggaaagttcagtaaagagaagggactctgtttcttcagattgaatgtcaccaatggcgcagttcagggacttttcaatcttctgttgttggttgcacaacccatgaatattactgaccttataattcagactaatcactcaaataaaatgttagcagctaacttacagttgaatttaagtatccatgtaggtaatgtattaatgtatttttcacttgtgttaacaagtaattataatttattctttttaagggtattttagtttagcccaatcttattgttattgtattagccaaaaaaagtgaccattatctacataacataggagttgttgatggaaaagttttaagagttggttgacggaaaagagctgcccaagcctgaattctccatgtctcctgcaagcaggttccctaaagtagtgcctttatacacaatgtcatcatttggacaatgagactctggacatggatataggtatatgtgtgcacagcttcaatttatattatgctcccaaatgaattaatgtaattcattaaaataacatagattttttaatgttccatcatctaagcaaatgacatttaatcatttaagtgatatttattgagggcctactatgtgccagtcacttttaagacaatggattatattacttctattattgtgataatgtgtccctataggatgttttctcattgatagcatcatgtgctataagatgtagcaatgttgcaaattttcatttgaaaatattaaaagtatccccaaagaactgtattcaattgttttaattgaatatatccaaagttggaatgatgaacagatacctctgaaatatttacatcaggacaatgggattctaaatccccataacaaacaaaagtataacacatgattggaatctgccaataaagtagttatttcatctgaggtatttgagtcaacaaatgctaagataataggttcataaataaaagataaattgcacacaatatagtaaattcactcagacttattcaaacactgacgctaaaactaagaagagtaggaataaaacaaaatataatttcatagaaaaacagaaatatgcatgaagttggactagcctaaacatcactgtcatcttgggatgctccgaagaattgttctttctttttctcatattttcttctttcccattccatttgccaatacaccaaaatgcaaacacacacatgcacaataaacataattaaaatgcaacaaataaatatactttcaatgagatgtttattaaaagaaattttacatcttctcacataagttgatcaaaaatcaacaatttaatgacagtacaatatcaaaacaaagctttttaaaaatctgtgaaacatgtcaaatgatttcagttactctagatgaggcttgcagcatctgacctattttttcttccagatacttaaggatgatgttgacattttacaacagaaaaatgaattactcatatgaagaattatgaaggcaaatttaggaagtccatgtggaagagaccacgaggttgagttgccagatatttctcagtagaagccacaggaccagtatcttccatagcaagatgggcggcagcagccatatccatagccaccatagccacggccatagccacagcccaggcctccatagccatggccataaccacagccacagccatagccaccgcccaggactccatagccataacgcagaccaccatagtagttgctgtagtagcacatggtttcaagagtggaggatttggttgaggagcaaggaatcagtttcttcagtttgaatatccctatatgcccaggcagtccttttatatacaccctcagtggtgggtgggacccaccacaggacctgttgattgcatattttctattaatttgtattagtatacttcctgaatatttgttttattaaacaatgtgaagcctttataaacaagatgactttgctattgtgtcagccttctcatgatcaaatgcctttaatgtgtttttcttattcttattttaaagcccttactcatactttgtttagcttaaaatatttgacaactttgtgtctaatttaatcattgaatgggttgtaaaaggttgatgtttaaaattctgtgattacttgtgcatacattatgtgagaatcttctacaaagaaaaataactttaacaatagagtttatttagcatactcagctaagtttttttcttgttcattatttgctttaataagtaaatttcattcagacataaaagtaaatagaattgtattttgaagctttataaacacatccctggaatttaataatcatcaatattctgtcttcagttccttctctccctgtacattttttgtagttagttagttagttctgctgaacattttaaaacaaatcccaggcaagacaacatttttcttataagtacttcagtgaatatctctatcacaacagaagtctaaaaaaatatgtatagagagagccccaataccgttatcacaccaatgacattacaaaattatttggcatcccctaatagttaattcgtgatcagttttccttgattgcttcccaaatatattttcatagtcttttttttacattaagacacgcattcattacatttaggcatgtctttaactctttttagagatgtgatggttcttttttttcctttttaatgtattttattgtttcgaggaaactttgttattgtcctatagaattcttacattttagacgtggctgatttctttcttgttttcccttttcatatcttcctctatccctcataccatctacaggtagatgacaaaggttgatgtgattctggttatttttactatttgttgacaagagtgatattttatagttgctctgtgtacattttattacataatattaggatgtaaatggtgtctgggtggcccattgcttcacatttagtaaggctgggattgtggattgggttcattttacaatctcccccataaactttttagctacagttttttatattcagtaatagttacctagacccattattgccagaagttcaaaatgctgattttacaattctatcattacttctacctgtagaagatagaaacctataaagagaaaaaaaattctcatctatgagtttattcaggagaggaaaatagttgattttttcatttatcaatttccagaatgagtatataatttagcagttgcgaaaataatatgcttaaacattcttatgcactcatagactttttttgttgttgcttttttagacggagtctctgtcttgcccaggctggagtgcatggagtgcagtgatgcgatctgggctcactgcaacctccacctcccacgttcaagcgatcctcgtgcctcagcctcctgagtagctgggattacagatgtgcaccaccacacccagctaattttttaatttttgtagagacggggtttcaccatgttggctaggctggtcgtgaactcctgacttaaggtgatctgcctgccttggcctcccaaagtgctggggttacaggcatgagccaccactcccagcctcatagatgttttaataacatcaccctaaatatttaagtgcacaatgcactattgtaaactgtagtcactacatcgtatctaagaaatcattgcccagtccaatatcaacaatcttctatgttttcttctaatagttttacagtttgaggctttatatttaagtctttaatt

SEQ ID NO: 1562429 - DNA, 4001 bp, Homo sapiens
gtactcaagtaaacttttgcggctccactttgattgtcccccaaatgttccgattcccgtatcacatgtgccattagttccacagtcagtcgttgactgttcaagtccttgtttattttgtgctctgttttattccttagccccctccattctcataccacatgggcatgttctttaacttctatcccataataatctatttgatctaggccttcataggaatcttagttgccgcttttacattaagaccttgcattggctgcttacacagcctccagaatggtcgtttggtctgtggtcatactccttggccacctttccttcaattggatgccataattatttgtataaaacatgcgcttcttatttttattttatttttccatgagttattggggtacagttggtatttgattacatgagtaggttctttagtggtgatttgtgagattttggtgcacctgtcacccaagcagtatacactgcaccatatttgtagtcttttatccctcacctccttctcacccttccccccacattcccaaagtccattgtatcattcttatacttttgcatcctcatagtttagctcccacatatcagtgagaacatacgatgtttggttttccattcctgagttacttcacttagaataatagtttccaatctcatccaggtaaaggaaaatattacaactttataaaacattatccagtacacccattgcaaaatatatatggccttgatgttctagtttctcttcactgcccagggcttcatttcctgccagtgactttgcccactgttctctcaagaaataacatcaatttatgactttgcagtgcaatacttttttcatggctttgcatatttgtttcccctgcctggcatacactttacctccaatgtatttttcgttggttaaaaatttattcaaatgtaaccttcaatgagaatatttttgatctgtttgctctacaatctcgctcttttgcatccaaacatgagcttctcctctgtgttcctacgtggctattacatcacctatcatgttgtagcatacatgtttatttaaacatttgtttttctgcttaaaaactcttctcccataagtaacactaagacttaacaggaagccctatatagaaattacttaatgaggacttattaaacaagtgagtaattaataaatttaaaaaatgaatgacattggcctggccaaagtaagtttaattaaaaataaacctagagctccctactcctgaaacatatcaaaaagtaatttgcttggtaaattatgaaaacacatcagtttggaagagaaaaatgtagttaatctggggcactgatgtggatttagtgtgaatttaatgatgtgtgttctttgcctagaattagattgaataactaagcattatttttgtttttttgagatggaatctcattttgttgctcaggctggagtgcagtggtgccatctcggctgactgcaacctctgcctttgggttcaagtgatcctcctgcctcagcctccccagtagctggggctacaggcacccaccaccacacctggctatttttttaacttttagtagagatgggattttgccatgttggccaggctggtctcgaactcctaaccccaggtgatccacccgcctcggcctcctaaagtgctgggattatagggaatcattaagaattctaattgggttaaacaaattaaaaaaagtgtagtagaacagcacccctgtctcataagaaaatggacccaattgtagatattattcagtcagtgcctgataataagcatgtagcataatcatattggtggcagcagtcaaatccataccccaccacagccacatctgtagccacagtccaggattctaaaggcaccaaagccagaggtataactatatttacagtcatagccatagcccagtcctccgtagtagttgccatagtagctcattgtgtcaggatttaagtctctagcctgagaggccagcataagttttagtgcataaaaacactaaaatactgggtcttttatcagtctcagtggaggtgtgacaaaccacaggcactcctgacattgtcatatagaccaacctgtatttaaaaatctcattaatcttgtatctttagattttaaaaaaagactccctatcctgataaaattgagattttcttctcagtatgttatgatcctgccaaacagctgatagactttaaaggaaaaaaaaatactgagttccatgaccttactcacactgatgccgaatttaacctttgtagctatgttggatgacatcacgtggaggaggcaaatgccatcctcttccgatcactttgctaataatacccttcttcttatatgcatatttaaatcttaatcaacacagctgtgatgttatcgctataaaacttagtagcaaatacagtggactcttgaataccatgagtttgaactgcacagatacgcttatattaagcagattttcttcacctctgccactccggcagcaagaccaacccctcctcctccttctcctcctcaacctactcaacatgaagacaataaggctgaagacctttatgatgatccacttccacttagtgaatagtaaatccattttctctttttctttattttcttaataaaattttcttttctttagcctactttattataggagtataatctctcattacaggtaacataagcatgtattaatcaactgtttatgttattggtaaggcttctggtcaacagtaggctattagtagttaagtttttggggagtcaaaagttatactcagattttcaactgcgtggaggttggcactcctaatccctgcattgttcaaggatcaactgtgatttattctgtacaaactcccaccaatcacatattattctgtagttttcctattgctatgctctcttaaaagtagtgcccttttcttgcctgtttagttccttcttctccacaccttaagcattctttaaaaagttgtttggttgattatcttgtacctgcactgcaatgtagatatgtttcttcggagaaaagaaaagcattgagaatcttatctgattccaaagtcacaggaacgtaaagtagacatttttgagacccaaatataacagaaggcatgactattaatttttctgtagggatattgactctgtctgtatcatgtacttatatgtagacttaagttctcaaaggcaggctgaatctagatactatcatttcttaagatgattaaaaataattgaaaattttccttcaccactgacctttagggtaatccccgatttgatctgttgtacttcagtcatccacttttaggcagtgctaccatattggcagaaccatctataatccaggactaatttttccttctccaactggaaaatcagcataaattcataggtgtatgttgagaaagaagagacaactcagcagagaggaaaccatgagaatccaagccaattgcttctgtaagttgtttgtgctttcacaactcccttaagcccaaccttatgttccccaccttcacttgatgacagagagctggtgtgtatgctcaactttctgaataagagggctagaaaatttgggctgagatgatggggttttctagatatacaatcacgtcatctgcaaacagggaacatttgacttcctcttttcctaactgaataccctttatttccttttcctgcctgattgccttggccagaacttccaacactatgttaaataggagtggtgagagagggcatccctctcttgtgccagttttcaaagggaatgcttccagtttttgcccattcagtatgatattggctgtgggtttgtcatagctagctcttattattttgagatactttaagctgataggcaacttcagcaaaatctcaggatacaaaatcaatgtgcaaaaatcacaagcattcttatacaccaataaaagacagagagcc

SEQ ID NO: 1562430 - DNA, 4001 bp, Homo sapiens
aactgctgtcccccttggcatttgctactgtcctttttagtctttctttgctgctggaaatgttgtattatgagctcaaatgtcataacctcaagatacttccctgagctgtctctccagtacttcaaaccttaatctcctctccattaagctgtttcattccctctatagcaattatctgtctgaatttgttataattagtttttgcttcattattattattattattattattaattattttagacagagttttgctcttgttgcccgggctggagtgcaatgacgcaatcttggctcactgcaacctccatctcccaggttcaagcgattctcgtgcctcagcctcccaagtagctgggattacaggcgcccatcaccacgcctggctaatttttgtattcttagtagagacggggtttcgccatgttggccaggctggtctcgaactcctgacctcaagtgatccacctgcctcagcctcccaaagtgcagggattaacaggcatgagccaccacatctggcctatttttgcttctttaaatcttcatctgttagactataaacattctgagagcagaacatttgcttataatttttcttctgtgtcttcaggatggtgtctattcaaaaatatttaagtgaattaaatagcatttctcaacctccatgtaagcaaacatatatatttgtacttttgtcagatgtagatacatttgatagtatattttttctttgaacttacccttttttaggtttttatttcctcttgcctaacacttgaccctgactcaaaattttcaacaatcctggaagtgatctctcctattgcattacttttttttgtgtgtgtgatggagtctcagtgtgtcacccaagcaatctcggctcactgcaacctccacctcctaagggttcaagcaattctcctgtctccacctcctgagtagatggaattacaggcacgcaccaccaagcccagctaatttttgtatttttagtagaaacagagtttcacaatgttggccaggctggtctcgaactcctgacctcaggtgatccacccacctcagcctcccaaagtgctgggattatattacttctttaagcactcaggctatatctcctccctgagacttttgtcataacatcctgaataggtgtcactttgcctccctttccccctccagctccattctagacactcagtgccatttccaaagcacagttctgaaatactctgtgatttgtgcttgggtatgtgagaacctgagcatgtgggatatgagaagcaggtagagaagacattatttatgatgcaagcataagaggaaataattgcgttatatcaaggaagtacctaaggttcagccaacatactgttagcccaattttcaagagattccaaaacaccccaagaaagagtaattcacaagcaagtacacaaagatttttaggaataaagaaccatttttattacaaatgattgacttccgcaactgtagatgttatgatcattaacacagtcataacagagaatcagagattaagggagcaaaagataacatttggaaaacagtcagatgacaccatggatcctatggccatgatttcattcaaagaaatgtgaggctagaggtcgaagattctgtcaagcatgtaattcttggatatagaaatcttggagtacgaatccttgaatcagcattatcttcagacgtgtcattttagaagcaaatggtcctccgacagtgatgttttagcaggaagaatagcatcttctaaagcaaaatggccggtagccacagtagccagagccagagccatatccacagccatagccagttccataaccacagccataatgggagccaaacccacagccatacccacagccatagccagttccatagccacagccacagccagagccagagccatagccacagccacagccggagccatagccacaggagttgccgtagtagttgcaacacatgttgtcaagaggagagaattgagatgggtttcaagaagatgcttctgaggtgtggatgtcttctacttccctgagacctttatatactgtcagtaattgccaaagcatatcactcattccctgacttaggcaacaaatatttaatcaattattatgtgccagtcactgttgaccatcaataatattttgcttaaaatgagccaattattttggagactctagtttcatttcaggaacatcattttaatctgctctgccaaagaactgcctcaatgaaatcatgtgcccaaatataaagctgatactaattttcaaaatctcctatcagtaaatttatatcttacataacaagttttgggaggataataacaaaattttatcctttttttcctctcttttttcctaaaatgtctacctctacccatagggaaggagacactcctatctcctttcctgagtcattacaacttcttgccagacttctttctccaactcactctgcacttccacacctaccccttgtccaacctccctcaaatcccaagaaacatattcacatctgatcattcaaagccagaatgtatgctatctgcaagtgcttcctacattttccttccatccaccaggcaaaccaagaccctggggaggcagagaagccctccttttgtctcccatttcttcagctatataagtaattgtcattgaggagcctttttaaaactaaacagcttcatttggataaggaagtaaaaaaattcattcgaccagaaactcagttctttcctccaatacagatttcatcaaagttttgcatgatgaaatacagatacattcctagaatttaataaaccatttttcttctcctttcactactattccttggacatttacttcagaagctaaaggatagtggacaattttaggttactgacagcaaaagcccaccattaacaactaacccttctatgatataaagtagcacaaaaataaattttgtcccgtttccatacacgcatttcacactactcattcaaaattctcaattacccacttattacaagttctcaatcttctacaaaaatattcatcgtgattttgaaatccgaggtgccctccttcttcccaacaatcctctctatcacacttaccttttcaagatacaaaagaggaaaattagtatcattttttctgccattagtatttttctcatcaccctcaattatcaaccaaaaaaaccttctgtttatacatcaaaagtcagatctggaatcactttctacaggatgcctttcctcattgctactgtggattacattttcccttcagttggaaatctttccttttttttctgctatctgtcactcgtctcatctcatttctctgctatgtttagtcccttaaaaaaagcataaatagatctctgtctcaattttttcttttcctttagtttctttctgttttttcatccttgaaattcaaaactataaattctacttcacaagtggatcctcttgtttgctcctatatgcagacgaatataatagatttgtcatgctttggtgaaactttatcctgtttactaataaaagcatgatattcttgaggaaagagactatacctttcacagtagaaattccaggcaaacctgagacccaatccacattttacataagaggaacttaagagtcaataggagtcaaagactagacccaaactgaagccactgtagcttcaatttgggtctagtctagatatgactgtagcttcaatttgggtctagtctaggtaagactgtagacatgatattggtgccacaaagaaaattttttctactgaggctgaaaacatggtcagaactcaggaattggtgttgagccataaaatttatacgacattccaaaattgtctaatgtgtatggcatctttattttctctaatatttttacaaattttatctttatagtcatagcagggccatggtgattctgcaagaggatacct

SEQ ID NO: 1562431 - DNA, 4001 bp, Homo sapiens
cagattttgggattgactttcatagaagcccataagggtcacgtgttcattgcagcaatgttgtgctgaagaagagctgggtgtgattatgtgtgcatcaccgagatagcaaaaggcaaaatcttgtgtattagccacgtgaagtatcatatggcaatgagaaataatagtctaaatgtacacgtagtagcataaatgaatcattcactgcaattgtgctgaaagaaaaggggttttaaaaaatatatataataatacaatttaaataggttgaaaatatatagtagaatggccaacttttgggggatactgacaagatgaaaaggggtattgcatataaaataataaataacaaggtgtttatgaatgagagatgagtgtgagaatggaaataaaagataaatgtaagagaataaataaattactctgttagacaaaaaaaaatagaaaaagggaaaagagctatgtgtggacaaacagtaatatgatataaataggacagtatattaagctcaaacctctacacttgaaggaaaaaaatgagtgaagtcataaattgtaccccttcccaaactcaaattgctgtaggaacatatggccatttacctgaggttttgcttcctcagtcttttgtcctttcctcttgatcccaaagacctacatactttgggcacacatgattgctgactagcagaacccctgaacacctttttgttctttacacacctttagctaagagtggtcacagtacacatgtgtacaaacaagggcagtcaaaattcttccaggaagagtgtcccttcccaaataagaggacaaagttttaaaagacctgatgctcttcatcatttgtccttacttgtgcagaatgttggtcatacacagcaaccactttaaaaccatgagtatgaaagtcacacagaaagggtggggagtgggaacataaaagagccctgatcctttctcaccatcttgagcacttgtaggagacttatctgcttagtctaagatttcttgttttacatatttcaaaagctattaacattaaattaatattgttgcctcttaattaccttgacttaagctcaaacaagatagtcattgctgaactagtgcattaacctcatgagtagatcccctgtctcattcttggttctattctaattcttttttcatgcatattttaaaattttgagcttaatatttgtgttcatgtttaaataaaaatgtaaagagttaacatacaaggaattaagaaatatgtaaaacacaagtatttggattcaaccaataaaataacgttgtcttatttaaagttgtggtcacacagcttttgaggaagccacaaaacctcaaattaaggagacattaaggagaccagacttcttagtgagtaaggccttttattaagaaaattctattttttttccattttagtatgctccaattatatagtcctcttgtgtttcagcaaatagtcatggcacaaagattcagaaaaagatgtaagagcttacattagaaaattacactagaaaattaatcagaataaaatctcctctcttcagcgatgtgatgaaactactcagtctccatccactgccaacagcttctcttatatgcattcagatagtcaggtgaccatagtcaacctttacttagatgtgaagataatgggtaggggagatttcaattgaacttgatcttggagaggtcattgcaaagccaaggatgacctgtagtgatgattagtagcaagaggaatagcatcttctgtagcaaagtggtcggtagccacagcagctagagctgtatccacagccatatccacagccagagccgtatccacagccatagccacagccagttccatagccagagccatatctacagccagagccgtatccacagccatagccacaaccatatccacagccggaactccagccagagccatatccacagcccccacagcagtttctgtagtagttgcaacacatgatttcaggaggttagatttcagttgaggtgtaggaggatatttctgaagtgtgactgtcctctactcttctaagacctttatatacttccagggatgcatgggtcatcctcacatgggctctatttgctcattttataatcatctgcctaaaatgagctcattctgtgtacatctactttctttggaattcataatttgcttatgacttccctaggaatatttttatgcctgaaaagaaaacaaatatacaagttctaaacacacaagcttatacaaccataattttgttttccatagtttcatttcatagccatgacataacacatcaccaaaatatgtttgacctataaatgtatgtttatctttctgttcttgtaaggtcttgagaattatctatttaataaggagttctcactgctcttaataccatcatcatcatcatttcttcttattctttcctaataccttggtgttcttttcttatcatagtcactaaaaattactaaatcatggtttttggacaaagaattgggtatttccacgtgctacctcaacttcttgaaaccctctccttctctctgaagaaaagtttgaccattccccccttttctaggcagtctatgaccttctcttgcttgaaaaaaaaatttttgttaaacgtctgacaggtcagttatgtaatatgtgtcatttaaaatttatagaataaacttttgatttttccatttaaagtgaggggaattccttggttcacaactttgttgttgatgtccagttgttaaattctgttcttaaacacaggtttgtttgtgtttaagaaccgaattaacaattggatatccataataattggaccactctgatgtttatgctgtacatcggtgctttctactgaataataatttccagcatatcctggacccaaaactgaggtggagcttcattggatatccttaacccacactgctgataccttctactgcccttctgtgccacacccaaaaatgcaggagctctgtttcctcctgcaatgtccctgctgcatcctctcctgagaaaacttgaagccatgctcacagtgaaggagaaatacttaaaggaatcccatctatcagcacagagaatatactgaaggatgaattagatgctgaggggccacaaattgataatcagtacaatgtcctccatgttccagaggctctgtagtagaaatagctttccctggaaaacagattggttaatttcctgactgagtcttttcctaattatatgaccatggaaaatgtcctcaacttagatgaacctcagtttctgcaactgccaaatgggaataaaaataattacttttatttaaaattttattaagaggcctacagaaaatacacaggcaatataagtagtgtagcaatgaccctgatacatggtggagacaaaactttttctttcttttccccttttcttttgcccaaatataagcattcctaaacagtaacagcttttcaaatttctgtatatacttgtattgatctatttgttgtactaaaattttgagatttgaattttaattttgctatttttaaagtatgtgatatacatatgtgtaaatatacatatgtcaagtaatgttttcgtaataaactttcaaaagtgagcaaatgctctcagaaaatgaacttccatgtaattgacctcagtttaccttgcctgaagcattttatacaataatgttttgtaaaaatacagaatcaaggaacacatcacagggctaccaaaacagtgtggtagtggtataaatatagataaatagatcattgaaaaagaagagagaacccggaaataaagccatattatttatagccagctgttctttgactaagtcaacacgaacatacattggggaaaggatatcctcttcaataaatgatgctgggaaaattggattgctatatgcagacgaatgaaactggaccccatctctcaccatatacaaaaatcaact

SEQ ID NO: 1562432 - DNA, 4001 bp, Homo sapiens
cagaaagagaaaaaaaaaaaaaaaaaaagtaagagctaaataaaaacagggaaatccttagagttcggttgctctagtaatttttatgtactccatgaattccaacaaaagcatgagaccaaaaaaaaaaaaaaaaaaggaaagaataataaaatcagatgacttaatttggaggctgctacctctcaaaagttagcatagatgaagcattacattgtttgctgcaaaacaacatacataaggagtcatttgccaacaaaaacaaaatcctattattacgtatcatgctacatgctaagtatactatctcattaactatggcaacagtcctctgacatcagtgtttataacctttttgtttgaatggaagaggagacttatgaaatatgaagattaagaagttttctgacacatgcacagctaggaatgggaacattggcatctaatgtcactctctgttgccccaaagcctgtgctttttaagaaagagaaatgttgtgactacactttgccatagaggagaattgtttgatatccccatataaatagtcctagactcactttatcatacatagcagtctcatagagcaattccttcgccaccacaggaatggagtcaggaattttttttttttttagatgagtctcactctgtcaccgggctttcttaaataattttataattatgtaacaaatataactgaagaaaaaaacaactgatttttgactttgattttgagagagagaaagatatgaggagaagtagaaggaggaggagaagggagaagaggaggaagaggagaagtagatgcaaggtgatgaacagggaaatagtgtaagaatgtcatttctatttcaagtggaatgttaggcaaagtctcctaaggagttcatattaaccagaatcccaaaaaaagtgacagaactgtctatgagaatgtttgagaaaaggccgacggaattagaattagaatcattgtgttcgtgtgtgtgtgtgtgtgtgtgtgtgtgtagccaaggcgggtggattataaggtcaggagttcgagaccagcctggccaacatggtgaaaccccgtctctactaaaaatacaaaaattagccaggcgcggtggcgggtgcctcaatcccagctacttgggaggctgaagcaggagaatcacttgaacctgggaggcggaggttgcagtgagccaagatcgcgccactgcactccagcctgggtgacagagcgagactccatctcgaaaaaaaaaaaaaatgtttcagtgattctctctcctcctcccttttctttggctgataataatctactattctacactaaggatgatatcattccacttcctttcttcattttgtatatttagaagtatatctaattaacaggtacatatttatttaatattaaatatgtggtggatactgacaattaaataactcaagttttatgtagagtagaaaagataaagagaaaaagagttattgaaagttaagaagaaatttctaagaagctaaggatcaactaatctacatagtggtctggctttcaagggggtaaaacatgccccaaattggtgttgactcacacacgcacacaaagagcattttatatttttcaaaatttcaaaatagtcatattttccatctctcagtgaaaccacattatgtctatgactaacaggtactttgaagacaaatggagttttcaccagatgagtcatttttctctaacggagaactatcaggattgaaggtgattaaagcagaacagatctttgagaaactaaataagaaacaatgctcaatggcatttcttagaagcaaaaaatatcagatcatctataacagaatatttattttcataacaaccataataaccgttacagccacagtgggtgctgtgtatacagccatacccacaaccatagcaagagccaaatccacagctcccacacacacttttgtaattgaaatacatagtgtcaggagatgagaattcagccaggtaacagcatttctggagtttggaacccttgggatctttctatataataagaggtctgcaaagtgtgtgccatccctactttgccttctcattcccacaagaatttatatttaacaagcttgttgttgttttattctgtgtcctaagaaagcctctcattttagaccttcatttaattcctgcaagttaatcatagactgtaaaaagtaatttgtacactctgtatacatgttctcagtgagccccaaatgtacactccacaaatatcatgatgctaaatcttgcagggaagtacttccctcagctctaacccaaaacattgagaatccccatccccagcctcctagagaaaggaaggggcttagtgattcctaccttttcaggtgccaccagtattaccatccaatccacaactgtactactcaggagaggataggcataggaaggctaaattgagaaacatgcgttcaattctataatattagaatttattgagaactttcctaaaaaacagaacatgacagtaggcactgctgaaaataacataaaaataaaaatgaaaaacataaataagaccaagaacagaccttcaatgaactcccagcttagtaaggaagagaaacatttacacaaaaaaagtctcagattgatgcggttagagaaaaaggaaagagaaatcctatgaaatagacctcaaaacaatccagaccaggtccacttagggccttcatccatgctgggctttcacctgcagtttttacaatttaacacccatatctatgactcattccctcattgccatcagagtgtgttcaaatgtcactcaaggaggccctccctgaacagtattatttatagctagcaccctcccacagatatatctttattctctacttagcatttatcaagccatttatcaccatatgatagacttgcattttactaattttgttgactgtttttctcactggaatataggatatctgtgaaggcaggaatttctttttttctttagggaataaaatagattttaaaaaagtataataaactggggccaaataataaagagctttgaatattaaggtaaaaagtgtggaattcattctaaaggtaatggagaaccagagaagattttgagcaaattaatggcataatcagctcaatattttgagatacagaaatcacaaccatttatccagtgtacttagtaatgtcctatttcttcgaaaccattatttgctaaattattctcttgagcaaagatctttccttgagcactagccatggttgcattgaatttgtggcattttattttccaattatgtttccaggaacactaggactgggaggtattaaaatgtattccaagaaatagagtttccaagattttaaaatgtgctatcaaacactataaaataaaaacaccttcagagtattcacaatttacatatgcgctgtaagttttacttgcacctaaatgccaggtattgtagtaggagtacaaactggaacgccatgatagcattttaattatccttaggaggacaactgtgtaaagaaaaccagcttgacattcttcaataaactaacatatttgtgtaacaaaataactttttaagttgagaaataacttttaagttcttttgaaagttatcgtcttagagtatatgttcaaatatgaaaatcttatgagtgttcaagtttccaaatcactaaagagactgttggcgtttttatacagcacaagcaaataggccacattaagtcaaacaggtcatcttttttttttttttttttttttttttgagacggagtctcgctctgtcgcccaggccggactgcggactgcagtggcgcaatctcggctcactgcaagctccgcttcccgggttcacgccattctcctgcctcagcctccccagtagctgggactacaggcgcctgccaccgcgcccggctaattttttgtatttttagtagagacggggtttc

SEQ ID NO: 1562433 - DNA, 4001 bp, Homo sapiens
taagataactggcctgtcatgcctttggtagatccctggcactacaagtgggaaaaaggtagaggaatggagacacatacctcttggtcagattcacttggactttagccactgccacacagaactggacatgagatatgctaatcacctgcacacagaggagagatactgtagcccttcagatggggatagaagaagcactataaattggtctcactacccagagcggtgggtctgtcatggtgagctggaggaggaagtacgaaaagagctgattgtgaacaagtgaatgaagtctctcactaaccctatatttagtagattttcttgaataaatgtgtctttatttgctgtgtggccttaggataattaccaaatattttaatttttctaaagtatatactaagtctgatgagggcctgatatttgatgagcagttttctgagtatgatgggttattgagtccaaagtcaggttttacagagttcttactctggcttttttgaccatgctaaaataggacattctgggaatctgactcctaagattcctgcccactatggcaggacaaaagccaaggctgtgacaaagatgctttcttcagtctcccttcagtttcactgcctgtcaatacttggagatgtcagagtgatacggctctatatgttgtctgtctttaattgatgaagaattttaaaaaattctttattattgtttcatctagatgttttaaaaaatcatgtatttggaagctagttaagagtttagccaacttcatactataatagccattaacaaagtaattttgtatgaatattttattagttgtagaaactccaaatgttaacattagtcactaacagattagaagatatttttgctttatatttttatcaatgtcgactgataaataataagtagagtgaataaagaacagctttgcttaacttgagcacggctggcaaactgaagtctatatttttcagcttgtattttgggtcagacttgtgtcttcaagaagaaagtattacctgaggtagcagatattgaccttgataaaaggttcacagaaacatacttaaatttgatggactctctgtggccacatgggtctgacacttggaagtgctgtctatgcagccaccaggcataggatgagttcaagagtatattttttcagagttaaaagaaacagccataatataggatttagagaaaaagttacagctatctagagccaaaaatgcaactaagtatcaagaaatgtaatgtatgtgcaacagaataaagtgatgagaagggaggtactatttttgccaatgattttagtcaaacattggatacactgaagatgaggctttgatagatcaaagtaaattatagtaccacttggctctgcccatgagaatacattttatcaaagtactattggtcagacctaacacatccacatcatcaactgtaagtttccaatgggtcagcaaccttacatatgtgctcctgaacacacacacacaatcacaaataatataggtactctagataaataaatataggtaggaaaatgctgtaggtttgcaaaataaattacctttgaagaaaaataaatttagactttttcccaaatgaaaatgcttaacattatttgtacttaatcatatactagtaacacaacatcaaaggttcttttttcgtttgattaaattgttggaaattccagctaattgatcaaataaattctgacttggcaatgtgggctaaattttagttgtcactctttgaacagaaaaaaacacgggaagaaaacatagctcataagagaatggcctaaacagatcagcaatctctaatttctcagaagcagccagaaaaccaagatctttcataacaccatgggcagtagcaggcatagccatagccgctaagaccacagccatagctgcagcccaggcctcctttggcatagccctggccaccatggtagttgttatcaaagctcatggtttcaagaaaggtaggctcagttgtatagcaggatcagattctagagttttaagtttatagagttttaagtttaaagttttaagcttataataagggccttaaatgccacatgaatggtatgtgggacaaatcacaggcactgttagattcacattccacactaattagcattgaaaccatctaaaatattccttgtaaccaatacatccaagacaactttgctgtttctcaggaatgttgaatataatgaaataatgtacctttaataagagatccatctcctattttgatgactcgtttatttcagatgtcaaatttaaactacattaccagcaaccaagagtaacccacatggcttccacttgttgttgttgttgttgttgttgttgtgagacagagactagctctgttgcctggctggagtgcagtggcacaatctcactgcaacctccacctcctggtttcaagtgattctcctggattctctgcctcagccttatgaatagctggtgcgtgccaccacgcccagctaatttttgtatttttagtagagatggggtttcgccatgttggccaggatggtcttgatctcctgacctcaagatccgcccgcctcggcctcccaaagcctggggttatggacgtgatggcttccattttttaaaaatcctactttcacccaataatatccttcagcctaaatacatatatgcagacttgggaataagagtgtagctccaaagtgataaggaaggatgataagcgtgtaagagaagtcatggtggcagcattcacttgtaaaatgttgagtgataaggtgtttcatcactttttgtggagcaatatcattctctttggtttatacttcacatgtagctatcattttatatatgattctaaaccgtggcaaagactttgatttttgacttcgttgattctgggtatatagtaagaaaaggacttctattaaaaatctgaattttaaaacaattccagaattactcaaagatttattggcatcatgactccctgagatggcacaagacaagagttacatctcttcccaaatgtataacctcaatctacatatgaggaaaccttagacagattcaattggggaatattccacaaaatatctggctctctaaaattgtaaggtcataaaagccaagaaaagacgaatgaaccatgagcaattggaggtgactaagaagtataaaaaccaaatgcaatgtgaattggatccaagaacagaaaaaaagaacattaaaataaatatgtgaatagtgctacaatgaaccatggtcctagaacttaaaataaaataagttaataataacagaaaaatggtaaaataaagtctgcagtttagttaagaatactgtacacagttaatttctttggtgtgataagtggattatggttatgaaagatattaatattagggatgttgaatgatggatatatggaaattttctatactattttgacaactatctctatgcctgagattattttaagataagaagttaaaagagaatataaaactattgttccatttcattgacttggtcacttattaattcttttataaatcaagaaaataacttacattttcttgttcttccgtagaggttgaacataaaggaaaattagactcactggtataagtagaaaaatacaacaaatttttctcagatctggttttctagaatttttaattagttgaattattatcaacatcatggctttagtatagaaaagacactaaatccctgaaaaaagtattatttggataaagagagcagaaatactaaaagggcaaagttattgtttgctgaatgttgtgcaaaagagtacaattaattggggcctagagcaaataagagtgtaactaacaaaagtctttcttgatgtaaaggatggctatagaaagtctagtttgaggcaggattatatgagtgtgagtgtgtgaggtctcctttcatcagagccct

SEQ ID NO: 1562434 - DNA, 4001 bp, Homo sapiens
tattactgattagtttgttctttttttgaacttcccataactaaataaataacaacatatgatgagtatattttgtaccgatatgcatgttgtttcatttttgatacataattttttattgatttttaaatctggtgttccaaactgccataatgaaagcattgatacccatttgcacaataagttaataattatgaaatactatacaaaatatagcaacctccgtcattctagagcactaacttgtattgagaatcagaactgtgtacaggactaaacacaaattttcaatcctgcacaatctcaccaagaatctttcagctttacctttctaaaagttgatttaatttggcatgactgcaatagaaattaaaatgtttaacctttaaatttgttaatccattaaatgggataatttatgcaaataatgagcagagccccaacctatatcttagtaaaaatggaatcacttccctcttattttcatttttcaccagaggaatgatcaccaacttctctgcccagtcactggttgggcaagttgggttggaactgctaatggattgactttttcactccagggaggaaggaatagacagcaatacagtattttcacttccgtttgctttcagaaagcctgcacttgggggctgggagatacttcactagtctcatattgatctataaagtgtgatccctacgttgatcgttggtagttctgctacatttaagagtagcaaatgaattaatatgtactattatctgtttatattttattctgattgctttatcataattaatgactaatcattaataatatttaataagtggatggaataaacatgataaattatcacagggagtttcatagaaagtcagctctcataattaagacctatcaccagaatgcatttgggccagaaatgtggtttgcaagatgttattctatccaagtcaccactttaaaaaatagtaacaggaattctgctagaagatgatcagagttagaaaaactcaaaagagtcacttagatctctaaatgaggtgatctttgctgtggaaacacaggattatcaggcataccaaccagcttcatatagaggattcttatctataagagtgagtgaaaagaggtcagagtactcaatgcagggctggagttgtatcagtacagaagcacatgtttaaatgtagactattaggagagagaaaattgcagtagaaaatagcttggtgggtaatagtgctactggttttgccaattacctaggtcaaacattgaatttttctaaaatgaaacttgcattagatcaatatagagaacagtattcttgaaactgaacttgaaattacttttatacaaacatttttggaaaaacatcagtcatgagttgcctgttttgtcacatcactgactaaaatagccacaggtagcaatttcactctctctttctatttctccctttctctctctctctctctttcacacacacacacacacacacacacacacacaaatacacaaatgataaagagaaatgaatatatatgataagcaatacatattgtgaaagtgattatatttattaaaatgcaaatttataagttttcctgcatggaaattgttaatattataacagacataaacacataaaactaacaaaatatcaaaggattttcccactaactggtaggaaattccactaatccaatgcaaatatgacctgtggtaatcaataattagagttagttaaaattggagagacaataacgaatccataaataaccctgttgatgcaattagtgcatcacaagaaaatggctcaaagtgatcagcaatcagaatttctttctaggagccaataggaatcttccataggagcacggaaagttgcaggcatatccagagttaccatattcagagccatagctgcaaccatagtccaggctaccataatagttgtggtagtagcacatggtgtcagaagatggagttcaattgaggcagatagtagtttctgaaatttgactctcctgatttgtacaaattattttatccaacctgagttatatgtgaaggaaaccacaatctacattggactcattctcacaactaatttgcattaagattaaaaaaaccctcaagaatctcttagccatatgtccaggaaaatattaatattgctatgtgtcaggatgccaacaagtaaaatcatgagccttaaggagatattctcttaattttgtggcttttgcttacttaaaatcccaatttaaacttgatgattagcttctctgtgatcacattaagcttatatttcctgcctcttgaaacatttcttttttctttttcaatatcctcctctacctccataaatgcagtccttaaaccacagagtggccaggaatggttagggaaggttggctatgcagtgaggaagccgatgaaaatgtctttatttacttgcaaatatgcctgtatgttttgactaatttatttcttaatcaatgggactaaaaattttcttccaagttcatatgtagcttatgttcttggagtagtaaagttttttctcttccatcatcctcactttggttatattattagttgtggtgttctctttgcatctgagaaagcaattagaaacaattacccaccgtatctcaaaattcatgttttcctctcctgacacataatattcacatattttaccttctttttatatttaatgaatttgcttattttaaaatatattaattccaaatttccaaaagtattgtaaaaatacttttcatcttctagcagaattcctgttactattttttaaagtggtgacttggatagaataacatcagcaaaccacatttctggcccaaatgcattctggtgatagccttaattatgagagctgactttctatgaagctccctgtgataatttgtcacgtttattccatccacttattaaatattattaatgaattattagtcatttattatgataaagcaattagaataaaatataaacaaataatagtacatattaattcatttgctactcttaaatgtagcagaactaccaatgatcaacctagggatcatactttgtagatcaatgtgagactggcaaagtatcatatcaataagaggcaagtagaacatttagtcagaatttcggaactgcacacagtagttcataaactttagtggatatataccaccaccttaacaatcggaaaaggcatggattctcaaaccagaaaaaaatcaccatgataaattcctccactggtttgcatatgatccaaaaggatcccagagtacatgaatttatccccagttaccccaagcatagaacaaagattgtgattattctacacagaatttgagtatagaaagttgcatcatgtcattcatttggttattttttcactaattcatcaaatctttattaagaatctgctgtatcaggcaccgttataagaaatgcagattgagcagatgaacaaaatagacaaagtctctactttctgcaggttacaatgagacagaagggatagagagactgattttaaaaatgaatgaaatagattctaacagtgaagaatcctgtgagaataataaaactcagtgagttacattaagttcagttactggaggtagactaattaatataaggtggccattaaaagtctctctgggaagtgaacatttcaattgaaatagaaaatgagtcaaatattcctggtattattttaagaaagagaaatcagtaagtgcagaggccagggccttattgtgagaagaaacctgctgcattttaaaagacaaaaagccagcagagtttgagcattatagataaatggaggagagtagcaggatatgaaatcagagagatacgtaagggccagaacttctcagcacaatgaaaggcctttagagatatttttgcaggggcacgctatgttctgattcactgaggcatataaaaggccctctgc

SEQ ID NO: 1562435 - DNA, 4001 bp, Homo sapiens
gcatggtggcaggcgcctgtagtcccagctactcgtgaggctgaggcaggagaatggcgtgaacccagaaggcggggcttgcagtgagccgagattgcgccactgcactctagtctgggtgacagagcaagactccatctcagaaaaaaaaaaaaaaaaagaaagaaaccccagagaaggaactttaccagaagcattgttccacatggctccttgtttctcattggcttacctcagatcacatgctcattcctgagccaatcactttcagtaggcattggggcgctctagagtagccaaattcaatccttaagcctaaggcataatcacgttcatttgcaggactatgtgtggacgaggagggatgcacaaacaaaatccaatttccatagaaagaagagcgagaaggaaaacagctgtgagagcagtgaacgatgagctacccacctccatttagatatttgaaaatgtatatgactgtgttccacttaatgtaagaatataatggactgtctagttttgcatccagatacaagcccaggatatcaagaggtaaagtcttatctctcagtccgtgtcacctatgcatgatactgccaggtttcagacagttttcaggtgacttctattataacaccggatggctttatagtgacctaatgaaaggaggagggagtgaaccatcaaattaaaaaaaaaaaaactcttagatattatattcttcttattatagtggaatgcatacatctttaatttcatgtatacctaaactatttgtttcattacacttgctactgaactcagttaaaatcctgacctcagaatttcattgtggcttatatatgtctgggaaggaagattacaggaaggattttgataatgttctcataaaaacagccaggctagtacttgctaaaacatcactgctgtctctggatattttcttcctagactagacccatgagtagcttaaccaaagtgaagtgtcctgattaggcctaaatggccatgaatagaaaaacagagataatctcctgtcctatctctgagtctacttggcagaaattcccaggaactagatctctgttgttagaaaactctgcctatcaaggaacctactcctttccctcaaagtgaatattttatttttagacaaaaagtgggggtttcaaattcccgacagacatcttataaagaaaattaacacaagatttgtgatctgatatcagattaaatgagtttatttgaagaaaaagaaatcaactcttgctccatttttaactagagaaggaagggaaaatacaagaaaacagaagaaaaagagatgagtattctatgagaaatgttattttaatattaataagtttaaaacaattatcttttctggatagtagaatataggttctagccagatgatagctgagatggactttgagagaaataattgtaatgtggaggtttggagcccttagcaagttgatcggtagaagccagatccacaagttggtctgtaacaggaagactggaatgtcctaaagagaacatatgttgggtggcagaatccagatccatagcccagggaagggaagccacagcctccataacccagggatctgacgccactggacccacggcccactgagtagcagctcctagatccatagcccagggagcggcagctgctggatccaaagcctagagactcagagtaagtcgactggcagggactgcagagcacggagcttctggggcggtagcaggaggtctggcaggggctggactccacacaggacatctggcagctaggggtttcccagcaagtctcctgaaagcccttgcagagagaggaacccagctggcaggtgctgggagatcaaaggttcagtgctgtagaccaggttgctggggtacgaggagccaccacgggagtagcctgagtagcacaggtagccctcacaggaatgggaggagaagtttccacagcagcagttgtaggacatgttgacaggagatgtgagttcagctgagctgcattgagaagatgccctgatgtccctgcctgtgcccaatgatccagtgatgtttacaccctcacactgctgggcgtgatgcagtatccgggaacccccccattcttgtgaatgtgttttcatcaaatgactaagtaacctaggttataattataactcaacacattcatttgtctttaacagcagtgtaatcattccagtttatagaagcccattggcttctctctctctctctctctgtctctttctctctctctctctctctctctctctctgcagaaataaggtttggtttgctttcagaaacattggtgatgatacatacagtgcctccccaccccttttactgagcttgactgtgggtattctgagcttcagcctacaaattcttaccagcaatgtactcccaacagtaatcagcagccacccaccccccattatttacatatgttttattaagcattaactacatgcgcaacatttaaaagtgtggtatgatttaatctttgcaaatatcttatgagatacaagttgtcataaacaatttagaagtaaggccatggaggtttggaaaagttatgtaacattcaggtaataaatcaaacaaatcatggaccccatgtcatcccaggtgtgtctgtctttaaggctagcacaaaccacagagctatatagacaatttgtgaagcttgtaatttctgctcccagaatcacatggacaattgagtatgcaggtgaaaaaaaaattccaaggtgttaatatttgcatttcatctgatatatctacttgagtattcttaccccttttatgaattccccaaatatagccaactgaggggacagcttcttaattgattttggttatttttttagtattcagagttactatggagatgctttgttacaaattatcttctatttgccctctcactcagtttatcctagttaagcaactcatgttttatccaccatggagttattagattctttttcagtgtgaggcagaaaattctttggcaaacacagactttcactgggactagttgcgaaaaactgatatgcctttagtgagttgactaccaataaaatacatttgcagaagcttgaattttaatagggtgccgaccttttgccaactcagttgggagtgagaaatacgacaccttccagagtgattcatttcactccttgctgagcttctcttgttcatccttctaggaagacaaagcagcataaaatttaccattatattaagtggttaaaattatctttaccactataaaacatcagtggtataaagaaaaatcttggaattagaaatgtctttttccccacttgttatcatatccaacttctgccttcaagcatcttttagaaattggaaagcaaaaagctatttatgtaatttgatcttttcaaactgtttcatagatgattgttttttgtaatctcctgtaatatttgcttatctggcaacaatggaatattttgtccattgttttgctaacaaatttctaccaaatgcattgctcacattgcaccaaatccctttgtgaaagatgtaccaaaatggagtcatttatgtcaaactctaacaaaatggggtcaagagaggccacaaaaaaaatcctcgtgcacacatgcctgtaacaagggttatcacaagaccttcttcaaattgcactattccagataaataggttccaggacagttacctagcaacagctgtctttaccaataaacaaatgtcaactcctacaatgagcttttgacccgtgaacttgtctcaaagcagcttacctggacctctctttgtatttaaaaacttctcctgtgccctaaccccttggatgtgcctatgatccatcatccaccatagcatgcacattcctagattgcacttcgctgctctttccaattaaaactcatttgttctgaagagcatatgtgagtttctttttaggttgaca

SEQ ID NO: 1562436 - DNA, 4001 bp, Homo sapiens
cgcctcccgggttcaagagattctacctcctcagcttcccaagtagctgggattacaggcatataccaccacgcccggctaatttttttttgtatttagtagagacggggtttcaccatgttggtcaggctggtctcgaactcctgaccttaggtcatacacctgccttggcctcccaaagtgcttggattacaggcatgagccaccgcatctggccccttctttgtatctttaatttagactctaaactaaatggcaggaaagcagcattttgacaatgctatgtatattgcccagaatatggatgaaattttagtaaatgtgaaataaagcataaggaaagccattacttccagacagaaatttgtttattaactaagaactaggacattttccagagtcagaatgcaataaattggcaaggcaagatgataggagaatcctaaacgcagattacacataattgtaaagggtctctaacagtatttgttcttctttcaacaaataattttcatgctttagctaattctgaggctttttcttaggcatggagaacaaaagctgagtaccagtgaatcttgttttatggcttctctggaagagaagatttgctgaagtcttctatttttgagctctagtcaccattgctatttgcctgttcttacaatcaatcagtaagaaaaggatgaaatagttcaacttattatgctcaagatagtgttttctatcggcttattagcaaggtgctagttaggtagttgacaaaaatattaatgacaatcaaagccatccgaatgaatttgcatgctggaatctgcagtcaaaccatggaggccccatttcatcaggaaaggtaggtgataatcacactgtcagacaagtgacagtgacagccaaagtaagaaagccggtgatggttgtatttcaaatggagtctcttcggtaagtccattgtaataaatctcagaaataatgatgttaccttcagggtcagcttttagtacaaagagcaataacagaacaacagaaaaaagaaaacctagcaggtgatactggctgtggttaataaacctgggagttgtatttgaacttaatgtaacaagattcttaggctgaataaagagattcagcagaaaattagacgttctagtacttagtagaatcttccccattgggcaatttccagctgctataaattctggaagttggtcaatagcatttcagaggtctgctaccactgcacaaatacctcagaggtggaaaggtactgggtatatagctcagagatctgaagcttctagataaatagctcagtggtcggcagctcgtaggcctgtagcttgaatagtgataatttctcactaaatagctttggggttggcagctgttggaaatataacataatggtgagacgtagctgggtatgaagcaaggattttggtagcttttataccccaaagtactcaatctgcagtggtttagagtttggaaactcttggataagcagttaagttgtccaaagcagttggaaccgttgcggagggtttggcaggctttggatgcatttcgagtgggtatgtggcaattgcatacatacccattggtctgggtgcttgggctgcagctggggctggggctgacgttggtagtttcacagacactgaagacttggcctgctgatggggagttgcagggcacagaggagtttgacgggtcacaaccagtggtactgcaggtcttgggctcacagctgggagatttgcaggttggtgcttcaccgtaggattcttggcagtaatccaggagccagagatttccttggtagctactgggtaagcagtgtccaaaggtagggcttaaatcactggagctaagagtaacagaagaggtcactgggatataacagtgagttctgtatgatgtggtactgcagaccccaggatagcctgtagtagacatggagcctgcaggcatgctcagtggtcgctgtgcagtgtgtctgtggcctaaggacgttttataccttccctggtgattgtcaaaagcctctccagactctttcttctgtctgcttggggcaataacacagcaacatctcattagtgtgttggttagccacagaggctaatgttttcacacgtgtaaaaataagtttattttaattcttcaaagtatccataatcaccactttgaccatcacccatcactcatcatctgtagaccataccttcagcaaatagtgattttcatgttaataggcaaactctcatctgtcaatcagaggttaacaagagttcatgggtctatgggcttctgcaacatggttatttaaaggttcacaaggactcaagtaaagcaagtaacctgtatttttccacgctgttaactactggaaaacactgaaggacttaatcatatactctgaaataagtcaagtagtttgtctgtctcaacatggttactcaaaagcaggcattgacctttcaagaatcagttttccaaatatgtgctatactcttacctgtgcagggccatatactggtaacggcttctcatgtaatgtattaggagaagttcataggtaagactcacagcaatacttgggaaacttggtgaccaacacctggctaaaaatgaacttgttcccagggggcatttgttgctaagcaaccaagacttctgttaaatcccttcttaaagagtgtcggcaatatgcactatcaaataaacccagctttgcaagatgataccttcctaattgactaagattacatatcacatgttccattgcctgctgtaaaccccaattgctgtcagatgtaaatattttccccgtttttccccaaataagttctcttattctttatttgctttcttttgcacctacactttattttactcctgtgttgaaaaatgcagttatttttagtttatgtcaatgaaaggaaataactctttaaaagttttatctgaataaactgtatagttcttacaagcactgtatatatgaaatagcactttttactactcagggtgaaggctaaagaatttttttaaagattttaatttatactgaagaactgaaattttgttcttcaaatataaaattataatttataattccagcctctattgaattggaaacagcaatgcatttattaactgtgaagagttcagacagagaatagaacagtcttcttcaggtataatcagctatagggatagttttttaaattaactctctttatagcaaactatgagatttctctcactgttttcggttacttttcagtcagatttttcaaatgcacagcaatttaaacctacagatattctcttttttttaaaaaagatctccattttctcagtgcttttctcagtatttgttctgtaagttgacaataagcaattctgtattaaacatgttttgctgccttctgcagtatctctcaggtgacaaaggccacaatcatgaaactgtatttccagtaaattgtttggctatagagagccttgggattttgtgcggaaaatgttagtcctgaggcaggcaaaataggaaagaagatacatgggcagttagttgacggccaactttccgctaagttactgagccccagtgatacacagaaaagccacaggttgatgaagctttatttctacagttctctattgtatcattgttgcctctagtctttttttcttaggcatccttgaagcaggtttgagggctaacaccattaacaaacacagaatgagttaagtcagttactgtaaagctcacattcttcccttccatcttaaaattaaatagtgaggtattttgaattaatttgattcacacaggtgtaagtctaaaaaataatgtggaacatcatatggcatgaccaatattcaaagcatgagccattagaacatatttaaattgattttgctatgataatattctaaacaaataaacaatgagatttgagaaaggaaccctagctcatttcctctca

SEQ ID NO: 1562437 - DNA, 4001 bp, Homo sapiens
aggaagggatggagggagggaagaaggaagggagaggaagaaggaaggagggagggaggaaaaatggaaggaaagagagaggaaagaaggaagaaaggaaggaaggaaggaaaaaggaaggaaagaacatgccagaataggctgttttaggctaggtaacttgctatgatgtgtataaattatatgttgatcttagaaattaaatttggaggaattgaataagttgaaggcatttaccaccatttatatgggaaataaggatcccagagagggcatactccataaaggtacacaccattaaagttagtccagctagagagaaaggctgggtggggctgtggcagagaggaaatacttttatttgaagtttagatttgtcattctagaattgaagattatggtcaccaagtaattgataacttccaagtggcttctagattagccaaaacctgaataaataaaaatagagataatatgaaagacaatgaaaagtctttgaactataacttatgtgggtcttctggcaagtttcttgacctatttgaattttcttatctgtaacaatggggatgatagtatcttttcatacgtgcattgggagattattgatcatgtagtggtatgcccggtacattgaagatgatcaatatggtggaatagttattggaatatgagcagttgcttgtaagaagaacaagttcccagtgagtaggtggaataactgaattaattagttacatacatataagagagaaacaagttcaaagtaataacaattttctctatgcaaggatccacgggagggaaggggggaggacttaagtttcattcaagaggaaaaaatattgtgctgtccgttgtacagaactaaaatttatgtaacccctttgtgcttaatcttgtggggcaggctgggcattgtaacttgttctgttcaatggtaatttagaagacatatgcagggctgatgagcaattaattttccttgctattttctctctgcctctactggcattattcctgatagtgaagatcctctatgcctgggtcccagaatgagaatgatttgggagctgaaacaatgaatgtgtagtaggggtgataagtagaccattccaattttaagcatctggaattttgaagttgttggttgctaaggcaaaatgtagtctatttgggctaaataattctctttttaactgttagaaaatacaggtgcatatttaatgtttaagtagtaggacacatgcaatcagattcttgaaaggatctatcttgcctgcgtttttcagatactctttattttctttcttttcattatatttgtttagtgaaactaacagtccttaacttcattgaagataatgaagaaccaaaagatactcttttctatataatttgaagacagtttacttataaataaccatgaaaacttgtcttcctattcaaggacatattattggcatagaaatcaagaatcgctggcagtgaaaattttctagtgaagaaacaattacaatctcttagaatttgatcaagtaaaatggtacaggttaaaacagcacctgaactataaacacaatggtccatcagcctaagaacaattcttcaacctaaagataaaatttctgtaaaacgctgtcagggcaagacactgaaaagacaattcagcatgttcttctaagaaatggagattgccaacccacaaaatcagaacaagctggttggaaactgctgtgcatgaaggaaataggttggaaactatgagacacataattcagggatctgaagctgttggatatagaacctatagtttgattaccataggagaaatagctcaagggatagcaggtcctggacacaaaattcagtgattgacagcgacaaaaaataaagctcggtgattgacagccataagagacatggttttgggggtggcaactactgaaaaaaaagccttgagatctgttatgcattgaggattggcaggaacttgagaaataaggattgatataaaaacagctagttgagtggcaaggtctggagacacagtaagtagtagaaagcagcaagaaattttacaaattgcatgcacacaactggatgaatggtagctggaaggtttaccacatgtctctggggagttttctagaagtcaaattcagcgttggttggacaagcacagagcatggtcccagtttacacaagtaggccagagtgcagtggatgaggtgacaagaacatggcagtaactcccaagacaacagaagttgtagtttccataatagcagatgctggctgacatgacagagtctgaagtaaggctttcattcagataagtaacaaagaatagcttatctaagtctacatcaaactagaccaggttgcttctacaccttgatagctatatactcagactctctgcctccccatattttagattaatttgcatcataatatctcatgaacttagtgttgtgttgcctatgaagataactttcttcccattcataaaataattttggttttaatcttctatatatctacagttgtaatctttctcctgtttatcaggtttcagaatgtgtgtgatgtaatcacttgtgtattttatctgctttgcttctgcttccactcctaaataatgcttaattaaaaggagtccatttgaatggatgtttatcctattcattatctacaaggaaccccacagttaggaaggcatagtcctcatcctggaagaagagatacaatgttgcaatgcttagaggaggtgttgatgtcctaaaatagtttccatatatcaaagtttcttggattttccagacaaaatatctcatgctattcgctgtttttcatacttagctgagaatctaattatgtgatgttgctatctgtatattgtcttgagagtcaattttatataagcatgttagggtacattttaaagagctcagctttgacaacttaatatttttcatacttaaaagttgtgtttgatttccaaacacttgagaaaagacatataatagttttacatggtaacattgatgacatatgtgcttttatactagtgcaaatgtcttacatgtacctgtggtcttcaaataagaggataaacatgatatcaatagtcatcagcttgtgtactagctttccagaattaatggatgtcttcatctgaagcaatttttcaggaggaccaatttggtcttcatgcaatgagctaaacaaggattatgcaaaactataatatcacataaaaaagatgtccgaagcctgcttacttgaatactatggaaggaacaacaatattttggattcttccctaaagatgcaagttaatgtttacaggcatctattttctggagtctcttgtcttcccaaaccaacacattccattctcaatcatcttctcacttatcagcagtgacggagttgttcatgagcagaggacactaaagattccaagtagccacttggcatcttagagtatcattgatgatccttctgttgaatactttcctattgtacaatagtcctgttgttcctgcattgttcattgaagattctggaagactgattattattttaattttgcggaaaagatattgaaatatctttttaattggaagcttttacggagcattcagaaaactgcagatatctcatcacccatgcaaacatgcacaaaggaagaaaagaaaacagagagagacagagaaaacacacttatgatatattttgacatttatttacataaacatgacatttggtacagatgtagtataaggttcttcctctgaatttcacattttttgtttcagacagtgaaaggaaaaatgtttgacatttcacatggggaattttcacagtcgattgctacattcttgttaaagaaagcctcagatcacatcaatgtaaaagaggactgttagggataaaaaggaacagaagagattggaatcatcaaggattgagataagtttgagaatctgtct

SEQ ID NO: 1562438 - DNA, 4001 bp, Homo sapiens
tttatttccttttaattaatgaaatatatgcccccacacattttaggttgagtgagagaaaaaatgtatctttaattgttacatgtcccatagcttataacttctggcaaattctgtgatagttcaggactgttttgttcacctcagtatcttttgtgcctggcatatagtatgcaagcagtacctttgtttctgaataaatcaaaagattaattaatgaactcaagactgtgtttttgtaaaagcaagtatgagttttcaaaacagagctgaagaacataccgctctcgatgatgacctatgcaaaaggatggatgactgtaaaaagcatatgtttggggacccatgtgtaagtcaggatcgcaggagcttagttttattatttgcaatattgagcaaaagagcatgaagccagagaggtatgggggagaaagacagtgagggaactaggtgtcatgctaagaggtttgaatatttatcttatgggaatagattataggaagccatcaaaggcgtaagcagaaacttggttaggtttgcaattagaaagaacattctggtggaagtgtgttcatggggtagagagataagagacatcactcctaatttttccttttcaaaacagctttcccaaggactttttgggtctctcaagtacatagggtcagaagtctaaaaagcagcttaaggaataaaccatcaaacaatccctctactgtcaggtaagaatatatggttgagtatcacttgtccagctcagtcatcttgcaagcaattgacgttggttatttctgtgttgaaattaagtcatgaaacacaaagcgctgaaccagattcttaatttggacttaatcgcatttattatagtgcaaaacaaatacattcttcccagaccagagcaacattgaatagcattgtaaactaatttttttgatgtcaaggaaagatgaaaacaagataaaacatgcgagagaagcagcttgcattagatcaggcacagtaaaactaagaaacatcagttgctactagcaaagaagcaaaagtccatggagtttgaatttttgttgtggatgctcagagtgattattcactggaacaaagaagctgctggtttcacagtccagagcaagatggacgacacgtgctgaacacatgggtcagaggttggcaaccactgaacagaggccccagaggtctgaggctgctggacacaacgtgaagactttgaggacgataggccaagcaactcgagggttggcatccagaagtgaggaggttttggggctggcaactcttggacaagcagaattgggggcgataggcattgggcacacagtctcctatgggctggtaactattgagcagcggcctcagtggacgacagccgctggacacatacctctgtggtctacaggatactggaaggcaggaactggagaagaaagaagcaggaagaaaactgcttccttggcaaggcctgggcacgtagtaagcagtggaagaaccgcaagaggtttcaagattgccggtctcacagtggaccggctggcagctggttggttcaccgcaggtctcttggcagttgtctgtgacccaggtatggtcttgagagctagtgggtaagtagaggacatctccacagctcacgctggtagggcagaggtcgatggaggtgagaggaatatggcgggaggttctgagagatcctgagttggagtttcccgagcagtagttggggcaagacatagtgaggttgtgagagcaggctgaagttgaggcaaagaagtgagtgtctgaagtttgttctgcccttccttagcttgaccctttatttatccctagaaggtggtgcttctgcgtgcagactcttcctcttgttgtatgaagatgcatcagaactctttattatagccaaggaagtgaggcttccaccctccataaaactggatgctccttgcaatgccatccattgattacgtctatctataaaccaatgcgactgagttttaataggatctatccttcttaaattatccaaacaaaacagacacattttaaagcctatgtgcttattccaattataaccaccattgcacaaacattcttaagattcctctcttagaattgtctttgaaagttgtagcaacttctttgaaacagtgagaacttacatctttttgaagaaaaattctattcttcttggaaattgccagaagtgagtaacttggaacaagtataagagaaaatgaaaatccttgcaaactatatgacagaaatatggacaatttcaatatgttttgcttggttagaatttatttttctaagttgtgatttgctttatttcagaattctattcagacttgactttctaccaaaatatctttattcaaaaatatgtgctcattttagtcatttcaataaataaataagctgagtgaagctgaaaccttggcttatgtttaagatattcttgaatatagataatgaagttgggccaagttaaaattatgtatcctactgtgaacaaaagcagagaagtagacctcttaaagaaagtcaggcatcttgacatttttcatgattatttcaaggttatgtattgcatggtttctcatattccaactgaaaaaatattgttcttggttaaaaaatacactgattatgacatgaatttattttgctttctacattggccttgatgtcaatttccaaaaaggagcttctaaactgctttacatagggaaaagcatcaggataaattattgttttcctaagttttagtactttaaaggtcatttgagaatatgtatttctggtaaaattgttttaaaaaatgtatgattttagttagtttcaactatccctctatatttttctcatactgacatacccagtggctccagtagctattttaatgggattttaaattatctgctggctctaagttccaattccttttggctagtcaatttaaatcataacactttcttctattttggtgtttgagggacatacttgtgcttatccagtctccctctgtcctggaggagtgaaatctctgaaacagaaagttggtttctcaatgagacaacactagactattttactactgggggagaaatataaaaataaaatggtataatcccggaggtcctgtactaacatgttgaatttatctcagtattttaggtcagacgatttgtacctgatgtatttgagaaagccccactcactccaacccccaaccccaggccctcatcacctaatactgtttgtataaccggatactttgtatacttcggacatcacctaatactctgtgtatacagctgctagagtcttcttgtaaaatcctggttgcatcagctgaatggcgttagtaataggtacagtcatatttagctgaatgcttatgaaattgtatgttgatcctttttatgtctgctcttctctaatataaacaagagcccaacatctgtatcattagtacatcaatacgcttgtgtgtatgtgtggatagatgtatatactacatgttctatgtatacatggatggttttccatgaagagaaggggtgtggaataagaggaaactggcattcatggaatgcctactctgaagaaccttgtgctgtgggtgcccacatgtgccattcactttgtcctcacaattctatacagtagatcttactatttcaagtactcatacgagaaaacttgagctttagaaagttgcagtaataggtattacgaaaaacatctgaaaaaaggctccttgactccccaaacagtttttctctatccaatatggcattacatagagatgcattgatactatcatttaataaccaataaccgtgtgaattgggtaatttgcataattgctctgctccccagtcactatcagtataattttatggaaatattaatagtatctacttttcagtgacatttcaggaatatattgagatgtcattaaaagttaaaataaactgtaaaac

SEQ ID NO: 1562439 - DNA, 4001 bp, Homo sapiens
aggtcaggagattgagaccatcctggctaatgtggtgaaacccgtttctactacaaatacaaaaaattagccgggcatggtggcaggcacctgtagtcccagctactcgggagtctgaggcaggagaatggcgtgaacccaggaagcagagcttgcagtgagccgagattgcgccactgcactccagcctgggtgacatagcgagactccatctcaaaaaaaaaaaaaaaaattgaaagatcaatttaagaacacaccaaaagtttcagaatagctaagctacctaaataaaattaatcaatttcaaacatctgactctatggtcttatgatgttcatatgagtatattttccatcttctgttgactaccaccatgagttattcttttctggttcacactataaaaattataacaagaggatatgttctcttttcttctaaatatttatactattttcattaggtaacaaacgaagaaacaaaaagcctgtaacataacacctgcaaaaggattgaataaaaataatagtgtgacaagtccaaattttgcttccaaagaaagcaaatttatttaatacaaagaatattttccaaactcaaaaaatacttaagaaataatgaaaacaggaaaaaaacaaacaaccaaaaaaacaacgggaacgaaatgaagtgaagattctaaacttcaattcattctatttaaaggcttctggttgctacgtggttataaagcccatggaggtgaaattcaaaattaccttgctctattcgaacaatagacttaatcttctagttaatttgagaatgttgtgattcaatggctaaaataacagatggccagtgagtaggcctggattttagttgtggttctgatgttattaactacttgggcaacctctgatagagttgaacctatcgtaattcacaggactaggtaggcttttaggtttggttccaatattttatgaatttctgagactagtagcacattacttaataaaccagatccaatgctaagtatttccaaagaaaacaacttgcagttaaagtgtgatgtttcctttaagtattcatgttatttcctggctacagctcttattgcttaataacaaatcgtatcctactgctctaaaatagctagcatgctttccaaccccagattaccactagacatacccaaaagaaaaacaagaaaaaaaatcttgtctttggagacagtagtaaaataagacatgttcatttactaacaaacacacacaacattttttatttaaagaaatacaaaatatctaagtatctcaaaaataaattcatccaaatgagaatataagccatctcccctacagatcttcacttactaggcaattgagaaccaccagtaacacagcaagttggttcaactcctggagaagattccaggagttgtggctcaggtgcaacattgaccagaggtctacaggaactggattcagggttctgagactgacactgacattggctagatgcacgttccagagtttcgaaatttttagacttagaagtcttgggtgggcaactgtttcccttgaggcttgcaggttggcagctctgggctacaaaacccatctgctgagtgctttctgattggcaaggctgagaaacacaagccagccctgctgaagaactttctgattggcacgctgtcctttcgcagggcctggaattggagtaagtagtttggacaactccggggaagcagttactttgcacacagctatcgtctgtgaataagtcctgttcacaattggtcatttggcagctggtggtttcattgcaggtttcttgaaagttgtccaggaaacaggttctgctatggaagctgctgggcaaacacaatctgtcttcaaaggttataggattagtgccatgtgtgatggcagagagtggtggggcattgtggaagctcctgagtgaatggcagtggctatgaggcatattgctaaaaatccttaaagatggtcataaggactcaacatgctgagtttgaaaattaaattctttggtgcggcgattatatactcagaaacctgggtgttggcttctcaagacttctttgcaactcattgcttaaactaatttgaaggataacatctcattaccactttggttatatatgcagatgatgtcttattaacaaagatgtaagtccattttgaatcttcaaaatggcttttatgttagctccaaagatgactcattcaaggtggggttggtcaaataagagtctaaacctgtccaaccaagctaacatttttttttttttttgccaccatgactctgcacattggtaagtggacaatgagaaatgcatgaggcagtggccaactgaatactgattaacatttagcactggttttgagagctgccaatgtagcagaatgtggtaatttgatgttcaagacatttaaagttagaattggatccaggttgagcccaatctcattccactcagatattgttctctccagtggaccagaatgtgagaggactttgtgatcacattccttctcagtgttcatgcaaagtactgagtgtggccattgcccaataaatacttgtcttttgcctaacatttcgtttccctaatctccttgaaagccaagtttaaatgcgtccttttcctgaagtcttccccaatcttcccatttaggagttatttcttccttttctgaattactaatggatttaattccttttttctatacttgacaaagtggtgtgtttacttgtgtttgtgcttctcaaaggttgattattttcctttataatgaaccttcttcagatatttttcatctttattctgtgctttttttattgactgcagacagatgatcagttcctatgtttatcgcattaggacaccgttcttagcatagtttcatactcatggcacagagccaaccagcacaatttctataacatattctataatatatttggctcagctaatgacaataaaatagaagtatagtcttagtgcactaactagactccctttctaaggtctgaagaagcccaagaacattcagcaattctcagtaattcttatgcaaacacttccttgaaagactgaggatattataaatttaaaagggcacatctgaatactttcagctttataggctgcacactcatcttgtatacaatacctttgtaacacacgcaagtcatttataattttgaataaccacacttgtatgtttaaagatctcagtgtgccctccacatgaaccctacagccacccatttaattcttacgcatatatgtatttattattgcacggaggcttcgttattgcacagaggcttcattatagcttgtgactttcttgcttaaagataccaaatggcttctcattgtccttacaataagatctttttcctttagacttccctacaacatcttataagacctggccatggcctttctttctttctttctttctttttctttttcttttctttttttttttttttttttttttgacagaatttcactcttgtcgcccaggctggagtgcaatggcatggtctcaggtcactgcaacctccgcctcccgagttcaagcaattctcctgcctcagcctcctgattagctgggattacatgcgcccaccaccacgtccagctaatttttgtatttttaatagagatgggggtttcatcatgttggccaggctggtctcgaactcctgacttcaggtgatcttcctgtcttggcctcccaaagtgctgggattagaggcgtgagcaaccatgcccggccctatttttctaaatctaactcttgtcatgtcactctgcccaacatgattcatcctcacaggcctcatgcagctccttggcacactaaacctctccttgcctccaaactttgcatacgcagctgcctgtctgtttcacccctccactgccttctcccattctatccatagttctcatcttttgtgtcttagcttaa

SEQ ID NO: 1562440 - DNA, 4001 bp, Homo sapiens
ttaaagacaaagcaatcccaatattgtacaaattgtcaaagagcacttaaaatgaaggacaacttcctaattcctattatgaagggtgtatagtcatccccacttatcccaaaggataagttccaagatgcccagtgaatacttgaaaccaagatagtaacaaagcctatatgtagtatgttttttctgtatacatacatacctgtgataaagtttaatttacaaaatagtcacagtaagagattaacaacaatatctaataatagaaggaacgtataacaattactgtaaaaacaagttatgtaaatacagtctttctctctccccacccatctctctctctctctctgaaaatagtttaatattttctcacagtggctgatcttgggtaactgaaactacagaaactgaaattatggttaagggaaaactactgtatgcactgaatttgcagtgagaagaatcaacatgcccagtgattgctgcctccacatgtccgtactcttgtgtaagcccctctctgtgagtgagggtgagacctgttgcttttagccaatagaatatggtgtatgtttatgattatgtgtgcttatgtgattatgttacataagactgtagtacccatcttgctggagtctcttgccctcccttgctggttttgaaaaacaagcaattatgtttcaaaacccctttgacaaggaactgtgagcatccttttggaggtgagggttgcctccaaaagatagctagcaaggcactgcaacaaatggccaacaagaaaatgaaaatgagccctttagtcctacaactgcaaggaactgaattctgctaacaaaggcatgaccttggaaatggatccttccccagataagccctgggtacaatcagccccatttaagatcttgaattgcagccttgtgagactttgaagcttctcggtttatacctgaaatagtgtttttatttaattattatggcccactatgcaggtcaaatagctttataacctattactagcttagagtatactagattataaaactattcctttggttatgtctcattaaaaaatagtttctttaaaatggaagattcaaaatgaaggatatagtaacaagcattcatttattttaggagatatgcacaagaaggcttcggaaaattaaattttttctttgttatgtgacagacagcaggcaatgcataacccaacatataaatgataggtacttaatttagtattgagaattactcagcacaacataaattcttcccctagaagcaaaggaggaaactgaaatttattaaaaagcttacttttctaaaacaattgagctttgaattggcaaagaaacctctctagaaattgtaagaaaaatatctcccaaagaatttaattgttagctttcatgcaaactgaaacaaaaactattggtaagaaattttaaatattaaatgattgacataaacaccaggtttctcttctggattaaatgtgtttattaggtgaacagagaaaaaagctccatcataaaagtcatcaaggcagatgatgtgacaccatcattctgatgaaaggagaactgacaggtgaattttaccttatcccgtttcatgatggaaattcaagatatttgtaggttagatggtagctcaacaacagaccatattagacttccattgcaggatatcatcactcaagggaaaatctcagaacatgtgggcttcagaattagtgaatctcagtatcacaggatagagggtgagagtctcccatggcatcctcaataatagtagccagagccagagccgcatccatagccatagccacagagggagcgggagccatagccatagccacagcccagtctgcggaagccacagccacagcaggagccatagccacagcccaggcctccatagccatagcccaggcctccatagccacagaacccatagccaggggtgccatagtagtttccgtagtagctgccacacatggtgttggttgtggaggttgtccttgggtaggaggaagtgtaggtgacttcagtatgaacacttcccctgcagagggccttttatatgcctcagtgtgggtgggaaccatacacaagtcatgccattggctaatttgaaggaccagcatgagtaatttgttgactcttggttttcaatcgtggccttgtggcatttagaacattttctattgttcagccacatctgaaacatttgtgcatctttaatgagcatcaactgtctgatctttaaaactctactcacaccagacattcaaattaccattttccaaccagcctttatggcaagaaatagcattttagtaaacaaactgacctgttctaaacaaccaataattttaccttatttttgctgacattcaacaggtcatggtaatctcccttgagcttgagtttctccatctctttcctgctgctccaaacccattgttttcctttaggaattcttctcattttcacatgagagatggttttcttttaaaagccagaaagtgtcactcagcttccagagactgttgacacaaagccaatagtttgaaattctaaaataccaggcatgagaaaactatacttttctttctcacatcaatatttccttttgtgactgttttaaaacaatagttctttcccatagtttcaaattcgtaatcaatgaggtttcattttatttataaaattgtatttttataaaaattttcctgaaatttcaaggcatttgttatatttgtgttctggctcaaaagtaagtataggtattttcatatttaaaacaataatactggcagaagtatcttttcatgcaacctactatatttccaccatcaaacaagaagtctttggcaaaatatgagactatgaggaacatgttactatagcctaatcttttttcaaagcagtgaagatcagagctaaattgaatgattaagtcaagtagccctctggacttatattcttagtaagatgactttataagagtgagttgaatatagtaaataagagtaaaatatctgtaatgtgctttctaggctcaaattttacctctactatccatagctgtctgaccactgttaactacatgcttcagctgccctatctgcaaatgggattgtaataatgatacctaccccacaaggaaatttagaaaatcaaatcttttgatacataccagacactttgaatagtgtttggttcatagtaggaaccagaatactagaataaattttgctgtctttacttatttcatcccatccctgtttttctggatagaagcttcagtagagagttgatcaattgaataagagaactcaggcatgcttaagttctcatttaggggcattatgtccttgaagctgaagggaagagaaactctgcattgaggatgtacatctaacaacagagaaagtcacatcctggttttactgagaaggggaaagtcctaccaagttccccaacacacatagcacaagcagggggagatacaatgattggttctcacccaggtggatctgagtggagactcattgatttccttactacaaccaaagactgttctggctgtagagacccaaggatgtaacacttcatgctaggtaatggattgaacagagttttatttttgtggcagtggaaaatggcaatatgtgttatgccatccaaaggtgtcagtgcagaacaggtatggtcctcctcaaaaccaacagcatatcactgcacatcgaagcacacctcaggcagagaatgaggagtggtaatgtctttattgcaattgtattttaatactgacaaccagaaagtgattgaattttgttgagtttacctgaaagggacaagaataaatgttttgccatttagtggaaataatgaatcaagatagaatttggtataacagtaaaataaagtgcatttgtacgtttgtaaagttgtatcctgtaaaaatgttacctgacttatgtatttaaagtg

SEQ ID NO: 1562441 - DNA, 4001 bp, Homo sapiens
aaaaatgctgaagggacaaaagttaataagagatgagatggggaaaagggattgagaaattttcctagaatttggagaaaaggcataaaaagattgtgccaaaaagtaagagatgtgcatgaaagattataaacgtctaatgtgtgagctgaaatttcgtaaatagagtggtcagtataaatttaaaaagcagagaaaagtggaatggaagattttcgttgggtaaagaggtaaaaaacaaaattgttcttcagataattttaatttaagtcaataacattaaataacagtaataactaagcctatcccgggagataactttgcatttagtggttaaacaatccctgcaattatctagagtcaaagaaaataaatactttagatgaatctacaaagagacaacaaacaggtgggtatgaaatatctcttttgccacacctgccaatgagaaagttactccattctctttacttctatctattcagctctaaaatggggataagtttttttctcttttttttttttttttttttttttttttttttagatagagtctcactctgtcacccaggctggagtgcagtggcgcgatctcagctcactgaaacctccccctaccaggttcacgccattctcctgtagctaggactacaggggcccgccaccaagcccggctaatttttttttatatttttagtagagatggggtttcactgtgttagccaggatggtcttgatctcctgaccttgtgatctgcccgcctcggcctcccaaagtgctgggattacaggcatgagccaccatgaccggccaattttttttttctttttcttgaaaaagatgtcacccaggctggagtgcagtggcacaatctcggctcactgcaacctctgcctcccgggtttaagcgattctcccacctcaccctcccaagtagctgggattacaggtgtgcaccaccatggcccctggctggtttttttgtatttttaatagagacggggtttcaccatattggccaggctggtcttgaactcctgacctcaaatgatccacctgtctcagcttcccaaagtggtgggattacaggaaaatggggaaaattttaacacatcatgcattcattctgaggctcatttgagatgatgtacgttaaaaacttggcacagtgattgctctatgctaaacggctaataaatgctacttaattatggttatttagattataaattatttatgtagagttgtgatatgaactacatagaacaagtttgacagtaaatgattttcatacgcaaataatcaacccataaatgatgcacggttttctgctctgttcatgctcggttttctattctattgaagcagtgataacatgggttacgttgagacattgttaggttaacataaattgggaagaaagctaaaaagataaatactggatactaatgaaaagaaaatcaggatggtaattccagattgaaaaagtgtattaggaaaacagaaaataagttcctgcatgaaaatcaaaaagcaagatctataacagcatcatcttgatgagagaccacaggagttcataggatgaattttacattattttaattttcatgcattaaatgcagaaaaggaagttgaaaatactagatccagagggtactgggggtgggagggtcagtcttcagataaatcacatcagaaacttttaatataagataatcttcatccagccccgagctcagagcatacggggttcagaattggtgaatcccgatgtcacaggatagaggatgagtctcccacggtgtcctcaatagtagtagccagagccgcatccatagccacagccacagaagaagcgggagccgtagccatgaccatagccacagcaggagctatagccacagcgcaggcttccatagccatagcctaggccttcgtatccacagcacccatagccatggtcgccgtagtagtttccgtagtagctgccgcacatcgtgatggttgtggaggttgtccttgggtaggaaggagtgtaggtgacttcagtatggatacttcctgtagaagtccttttatatgcctcaggatgggaatgatccagcagaggtagcataccactggctaattttttgactaatataattagtttgttttttctcaattgtaagataatgctgcagaggtattaaggaggcttgttttgtttggccttgcaatttgggctccccttatctgattgagggctctgatgaaaggagacctcacacactcacactcatataatcctgcctcaaactagactttctatagccatcctttacatcaagaaagacttttgttagttacactcttatttgctctaggccccaattaattgtactcttttgcacaacattcagcaaacaataactttgcccttttagtatttctgctctctttatccaaataatacttttttcagggatttagtgtcttttctatactaaagccatgatgttgataataattcaactaattaaaaattctagaaaaccagatctgagaaaaatttgttgtatttttctacttataccagtgagtctaattttcctttatgttcaacctctacggaagaacaagaaaatgtaagttattttcttgatttataaaagaattaataagtgaccaagtcaatgaaatggaacaatagttttatattctcttttaacttcttatcttaaaataatctcaggcatagagatagttgtcaaaatagtatagaaaatttccatatatccatcattcaacatccctaatattaatatctttcataaccataatccacttatcacaccaaagaaattaactgtgtacagtattcttaactaaactgcagactttattttaccatttttctgttattattaacttattttattttaagttctaggaccatggttcattgtagcactattcacatatttattttaatgttctttttttctgttcttggatccaattcacattgcatttggtttttatacttcttagtcacctccaattgctcatggttcattcgtcttttcttggcttttatgaccttacaattttagagagccagatattttgtggaatattccccaattgaatctgtctaaggtttcctcatatgtagattgaggttatacatttgggaagagatgtaactcttgtcttgtgccatctcagggagtcatgatgccaataaatctttgagtaattctggaattgttttaaaattcagatttttaatagaagtccttttcttactatatacccagaatcaacgaagtcaaaaatcaaagtctttgccacggtttagaatcatatataaaatgatagctacatgtgaagtataaaccaaagagaatgatattgctccacaaaaagtgatgaaacaccttatcactcaacattttacaagtgaatgctgccaccatgacttctcttacacgcttatcatccttccttatcactttggagctacactcttattcccaagtctgcatatatgtatttaggctgaaggatattattgggtgaaagtaggatttttaaaaaatggaagccatcacgtccataaccccaggctttgggaggccgaggcgggcggatcttgaggtcaggagatcaagaccatcctggccaacatggcgaaaccccatctctactaaaaatacaaaaattagctgggcgtggtggcacgcaccagctattcataaggctgaggcagagaatccaggagaatcacttgaaaccaggaggtggaggttgcagtgagattgtgccactgcactccagccaggcaacagagctagtctctgtctcacaacaacaacaacaacaacaacaacaagtggaagccatgtgggttactcttggttgctggtaatgtagtttaaatttgacatctgaaataaacgagtcatcaaaataggagatggatctcttattaaaggtacattatttcattata

SEQ ID NO: 1562442 - DNA, 4001 bp, Homo sapiens
agttgataatgaccaagcaatggggaaaggacttcctattcaataaatggtgatgggataactgactaaccacatgcagaaaatttaaattggtgacctacattcctccatatacaaaaattaactcaagatgggttaaagatctaaatgtgagacctaaaactataaaaatcctagaagaaaacctaggaaatatgattctggacataggctttggcaaataatttttggctaagttctcaaaagcaattgcaacaaaaacagaagtggacctaattaaactaaagtgcttctgcacagcaaaagaaactgtctacagagtaaacatatagctacagaatgggaggaattatttacaaactctgcatccaacaaaagtctaatatccagaatccatagggatcctaagcaaatcaacaagcaaaaaccaaataacccctttaaacatgggcaaaaggcatgagcaggcacttctcaaaagactataaaatcagccaacaaatatatttttatatatttgttatatacaacaaatacatatataaattatatatgtgttacatatatatttgtcatatatttgttatatataacaaatatatatgttaatgcataacattagtgaccagtcaaaatagttactattaaaaaagtcaaaaactaaaacgtgttggtgaggttgtggagaaaagagaatgcttatacactggtgatgagaatattaaattattccagtcactctggaaagcatctggagatttctcaaagaacttaaagcagaactaccatttgacccagcaatcccattactgggtatatacccaaagaaaaaaaaattgttctaccaaaaagaaacatgcacttgtctgttcatcgctgtgctattcacaagagcaaagacatggaatcaacccagatgtctaacaatagttgacaaaagataatgtgtttcatgtgcaccatggaatactatgtagccacaacaaagagtggaaatcatattctttgcagcaccatggatgcagctggaggtgattatcctaagcacattaatgcaggaacagaaaatcaaataccacaggttttcacttataagtaggagctaaaaattgagtgcacatgtatataaacatgaaagcaatagacactgggactcttggagtggggatggtggggggtggtaagggttgaaaaactacctttcacatattacctcagtggcatgcaattcacccatgtaacaaatatacacatataacccttgaacctaaaataagagttgaaaaaaataacgataaaagcaaaaaatcaaagaaaaaaattttggacaataaataagatacaaacaccaagatttctcttgtggattaaatgtgtttattaggtcagcagagaaacaaactacagcatgaaagtcatcaaaggagtcactgtgacaccatcatcctgataaaaggagaagtgacaggtgaacttcaccttatcccacttcatgatggaaactcagggtatttttgggttagatggtagatcaacaacagatcatattagacttccactgcaggatatcatcaatcaagggaaaggctcagagcatgtgggcttcagaattggtgaattgcaatgtcacaggatagagggtgagagtctcccatggtgtcctcaatagtagtagccaaagctggagccatagccagagccgcacctatagccacagccacagaaggagtgggagacatagccatagccacagccatagccacagtccaggcctctgtagccacagccacagaaggagccatagccacagcccaggcctccatagccacagtccaggcctccatagccaaagcccaggcctccgtagccacagcacccatagccacagccgccataaccacagcccaggcctccgtagccacagcacccatagccatggccaccattgtagtttctgtagtagctgccacacatggtgttggttgttgaggtcatccttgggtaggaaggagtgtaggtgacttcagtatggacacttctccgcagagggccttttatatgcctcagtgaatcagaacatagcgtgcccctgcaaaaatatctctaaaggcctttcattgtgctgagaagttctggcccttacgtatctctctgatttcatatcctgctactctcctccatttatctataatgctcaaactctgctggctttttgtcttttaaaatgcagcaggtttcttctcacaataaggccctggcctctgcacttactgatttctctttcttaaaataataccaggaatatttgactcattttctatttcaattgaaatgttcacttcccagagagacttttaatggccaccttatattaattagtctacctccagtaactgaacttaatgtaactcactgagttttattattctcacaggattcttcactgttagaatctatttcattcatttttaaaatcagtctctctatcccttctgtctcattgtaacctgcagaaagtagagactttgtctattttgttcatctgctcaatctgcatttcttataacggtgcctgatacagcagattcttaataaagatttgatgaattagtgaaaaaataaccaaatgaatgacatgatgcaactttctatactcaaattctgtgtagaataatcacaatctttgttctatgcttggggtaactggggataaattcatgtactctgggatccttttggatcatatgcaaaccagtggaggaatttatcatggtgatttttttctggtttgagaatccatgccttttccgattgttaaggtggtggtatatatccactaaagtttatgaactactgtgtgcagttccgaaattctgactaaatgttctacttgcctcttattgatatgatactttgccagtctcacattgatctacaaagtatgatccctaggttgatcattggtagttctgctacatttaagagtagcaaatgaattaatatgtactattatttgtttatattttattctaattgctttatcataataaatgactaataattcattaataatatttaataagtggatggaataaacgtgacaaattatcacagggagcttcatagaaagtcagctctcataattaaggctatcaccagaatgcatttgggccagaaatgtggtttgctgatgttattctatccaagtcaccactttaaaaaatagtaacaggaattctgctagaagatgaaaagtatttttacaatacttttggaaatttggaattaatatattttaaaataagcaaattcattaaatataaaaagaaggtaaaatatgtgaatattatgtgtcaggagaggaaaacatgaattttgagatacggtgggtaattgtttctaattgctttctcagatgcaaagagaacaccacaactaataatataaccaaagtgaggatgatggaagagaaaaaactttactactccaagaacataagctacatatgaacttggaagaaaatttttagtcccattgattaagaaataaattagtcaaaacatacaggcatatttgcaagtaaataaagacattttcatcggcttcctcactgcatagccaaccttccctaaccattcctggccactctgtggtttaaggactgcatttatggaggtagaggaggatattgaaaaagaaaaaagaaatgtttcaagaggcaggaaatataagcttaatgtgatcacagagaagctaatcatcaagtttaaattgggattttaagtaagcaaaagccacaaaattaagagaatatctccttaaggctcatgattttacttgttggcatcctgacacatagcaatattaatattttcctggacatatggctaagagattcttgagggtttttttaatcttaatgcaaattagttgtgagaatgagtccaatgtagattgtggtttccttcacatataactcaggttggataaaataatttgta

SEQ ID NO: 1562443 - DNA, 4001 bp, Homo sapiens
aatgaatgagttttaattcaaacataaagtgttttgcttcaataaagcagagatttttcagtaagcaagacagggagcattttcttttttttttcttttattattatactttaagttttagggtacatgtgcacattgtgcaggttagttagatatgtatacatgtgccatgctggtgcgctgcacccactaactcgtcatctagcattaggtatatctcccaatgctatccctccccctacctcccaccccacaacagtccccagagtgtgatattccccttcctgtgtccatgtgatctcgttgttcaattcccacctatgagtgagaatatgcggtgtttggttttttgttcttgcgatagtttactgagaatgatgatttctaatttcatccatgtccctacaaaggacatgaactcatcattttttatggctgcatagtattccatggtgtatatgtgccacattttcttaatccagtctatcattgttggacatttgggttggttccaagtctttgctattgtgaatagtgccgcaataaacatacgtgtgcatgtgtctttatagcagcatgatttatagacctttgggtatatacccagtaatgggatggctgggtcaaatgttatttctagttctagatcgacagggagcattttctaagtgtagacaacataccatttcaagtgcttttgatggcaactattatttcaaagaataaacacttcatttttagtactagttatatgtataatcagaggtgaagaaagtggagaaaataaacccatctatcaaaaaaggataaaaaataatatgtgattttagtagttggcttccctttattgatcaaatcttaggaactcttaaagatagagtttcataactaagtctatttagttccaattcttccaacaacatgaggggttcaaatctccccagagctgagttctataaacagtaggaaaggagaaatgaaccaaaatggaatcttgtcactaaggaaaagagaaaagaaaacatgttttagcattcaacagctaagaaatattcctgttttataatcagctttgagaaacgccaacaattgcagtatatctgggttaaatacgggacatttccagggagttttttaaattgaaatatcaatataaaaataaaaaatggttaggcatcaccctatcctggctatatagtctgaaatcagaataaaatttggttaaagtcaaccattacgggtttaaactgattgatgaattcaagagcataaaagagaagtgaaataaataaccaggacaaaaatatttatgctgaaggaaatagatttattaagagactgacagaaaatccccttactacccacacccaatttgtaatacattaatgttgatgtagaagctaataatacatgagcagagcaaccatgggaggcaaactactttttcactgttaaaattcaagtatgaccaaaaaaatgcatcttgcttcctttgtctgtagatgagtatcagttcagcacctgagtcctgggtgacttgtccaacagcatcaaagacaaagaccacagcaagaagtcagcaagaagatggaagatgtatcacccaagcacatgggaaggtaggaagacagtcattgctcttcaggttgttctgtgcagagaattaattgagagtcctgtagtcactggagccattggtccatcagtaggtgctgtagccaaagccagagccagagccccatggcctatagaagctaccaccatagcagccgcccaggttgttgatgttgctaccaccaaagctgtagcccagggagctgtagccattgcatccacagccatagttcaggggagagcccagaggcacaacacagttcaagggggtggctctgaaggtcccatggaagttggtcccatagatagggtatcctgggaagtagcttccacagcagaagtaacgagtcatggtggcagcaattgagaaggatttagatggattgtgaagggtaagttacccaagtgttaatgaaggtctcttcccgtacagggctttttatacctcaagctggtgggcacaacacatctgtctaaacatcttcccactaatttgcataggtaatctcattcttttctaataaaatgcttataaggaatgcacagactcattgcccacatttttgttggcttttctctgtactattttaaagccagtgaccatgcttgacacgcaatcgaattcttttcatcagagtcccatagtttaactactgttcttgattgcatcatgtgagactctttaaatcctctgattataaactcttcccaactgacatagctaaactaaaaaagctttggcaagaatgcaaacacttcaagccaagacaaagccatatattgaggtcttttgaacattattttgaaacatcaaactgaaattctataacctcttgaaattcacccatgtgcccttttaaaacaattgtataccaactagttaatgggtacagagtttccttttggagtgaagaaaatcatttggaactagacaatgttgcaaaacatttggaatgtactaaatatcactgaattgttacctttaaaatgccttggtttgtgttatacaaattttaactcaaaatgtattttttattttaaaaagcactgctacacaaatctatccaaccaggtgtttttacagaggctgcaatggtgccaaataataagttggctgtgaataacctgcaagtaattttcatcaatttcatttatgagcattctgtttgttaatacatattttattttttcatggagaacataccatgtttgcttgtaaatcatcttgaacattgccaaactgtctttctggagttgccacactggcgctgagtgggatgatgctcaatttcagagtcatgttataccacacttgcttcttactgactcctataaaacaagcctgaatgccatgatccattatgaaataccagttatatttaaggatgcaacacttccttctgctcttattttgccttacataaccaattctcatgaagaacgtaaaccaggaaggatctgagctcagcaaagctaagtctattccaattcaaaggtttacgacatcatctttttatatgtgaatcaaagtcagaattctctgaaagtagaagaaaaaacttcctgaataccaattcctttttttatttccatcttaacagacaatcacagagtccaatatgcaaaactaatcattcctctcagacatccctctctctttaagattctatctctctcagtttctctgacagagagctgcctaaagaatgttctataagtggatatgatttcttttattctacaaattaattaaatgtcataagagtatatagagaaagttaaagaaaaataagttataatttcaaattcagtttaacaaaaagaatgaattaaaatggtaagaggttgtgtcctcagggtttaaattatataaactctgtatcagataatccagaaaactcaaaaatacgtttgtgattaggagagggcaggggtgactaagaattacgcgtgacttgaaaaatttcactactgattctatcacacaatgacattggaacctgtaatttgtacatgctgccaccaggtggcagtggtatttcagttactccgtataaaccacaggactggatttagggttctcaaatgtaagcaggtagaagaatcttctaaagaattcgcttgaaattcagaattccaggagctctcctctcccaccaccacctgagattctggaaatctctatttgtaatgggtatctcaggtaattctgatgaataaatcatcctgataaattccagggctggtttgtcatgagaattcaaaaaagcttttgctgggctgtgtgaaattgcccagagatgcttatctctcattggcaggagtgtttggtttcagtcgctggtgacttatttcccttaactctggatgatagaggtaattaaaga

SEQ ID NO: 1562444 - DNA, 4001 bp, Homo sapiens
tgtgggtgggtgggtagtgtacatctgtaatgacctgaaacagtgcttcttagagtgtgggtctcagaccacctgtactagaagtcatcaggagcatcttaaaagtttagatttctagacctgatcccagatgtactgagtcagaatccctaggggcaaggcataagaatctaaatttttaagtcagctactcaggtaattctcctgcatactgaaatttccaaaacactagaggaggtgctctctgaggtcccttcaagcccagatttttatataagtcagtcatctttacagaacagactgataaccttctagtttcgatctgatgctctaatttctgaaaaatcccacttttctttttctgttctattttaacctgcatgtttaattaattcacaattctcagcatgaattaacatatggctgctagaaagttgcaaactggagattttgttggctgtaaccttgtctactatcgctaaaaaggaaaacaatcaattatttcccgattttttaaaaaagatatacattagataaagtatggtggagaaaatactctcttctgaaatgacctcgccaaatagtctttatgtttttaactacgaagtgaaccatatgcaatataatcacttgcacatattcaataaaaaagcagggttaagccaaattttgttaccaccaagaatatttgtactatacataagatgttttcaatagaaggattgagactttttttatctggcttataaaaggaaattgctcccttccctaaaggaacacagagaaaagctgatacatcttcagaaatattcattacagctcatatcttttaagtgaaactcgctatctggtgttgattctataaagattaagaaacttgtcatggttgtgaataacccaggtgcttcaaagctacaaaatagacaccttagatggtttgatataggggatttatcccttcaccttaaaaactctcagatttccaaaggatgtctgtggcttctctattactcaatgctccagcatccttcattagggggcatggcactttagtctataatccttagtccctgggaaagggaacacagtggatttcatttggactaacatggaagtgactgaaaaagttcctcctgtgttgggttttcttgcggaggagcagaagtagtgagatgagaaggggaccccgagcaataaatggtgctccattgggttggaggtgggcatcataaaatttaaagaaggttcaaacaggcaaccttttaagtcattacctgcaacccaccctcttacctgcttatcacacaggatcagtaattctttgctttctggctgttcctaatgcccacatgagaaaaataaattcacttcccccccaccacccatgtaacagaaaatatgcacacaccaagaaaggaaacttcgctctagcatgagaatattataccagctgagacaaatttattgagattttgatagacatatccatgacttcatcacaagtcatgagtgtcatggaaaattcaaaagtagctcatgacaagtgggaggtcaaatttccgaaaatgtcccagagaacatcagccaggggaggcagcttgaggaagcgtctgctttttcattttcctcccctgggactcgaggtaagttggaaagcagtgtctctgaggttgatgagcaaatgaggactgaaggagtggatacggggggaacctggagatgtggggctcagccttcaagggagagaagatgctacacctcggggatttcagccaatcagtagagagcaaatggcgagtatctcctgtagccgaaagccccacagccgttgtagccatagccgaagccatagcccactggagagtaggtgctgccatagccacagccaacgctatatcccagcgggtagccatagctgccccagtagcatcctgggaagacagccccggggaagttgtcgcagagcatggtgtcgggagtggagggcttaggtagcaacagagtgcgtttcctcagtgggatggattcctagtctcagaaccttctttatatatcccagctctggtgggtggtgaaaaacacaaagccctcattttcattcttgacaccaatttacattctaaaaagctcattaacttgttttgctcttgcttatgatgtctttacagtggcttaagaaagctctcgtgtgatgcaatacagggagaagatgcctttaaacaaattatttcccttcctaaaaaaaaaaaaattattgccaggacttcaaagcactctgtcttatagaccccatataactctgtaagcaggtatataatatcaagaaatattctgaggttgttagctgttatgcagtcctcttgctctctgaatttccacaacacacagttgaaattcaataaatatgtgttaaatacattaatatataaaataacaaatggatagtgagtctatctcaaaattctcaaaattaaagtatgtcttagtattcacctgcttcaaggattctcttttttggaatatgaaagacaagtgcaatggaactcatgagaaagagtcttttttttttcctctactacagctaccgtgtttgggaaactggttaaaagtgtaatcttaatcatagtcccctcctaaactatacctaacatcacatttctagaagactacttgaattaatagtattgagattttaaaacggagtatttggattaatccttgtactgaattgtcaaacaaatttaattttttggcctgaaacatatttcaaactaaacattgaaactaataaggtaaacacagaaaaatgaattaaaaaatttattgtaagatttaaaattttttttctcttagatctaatgaaactagattgtctgacaaatgtgatgatattataaagggccagatgacaacatgaaatcagttatttcacttttacaatgatcatgcaccccaggataaagaaggaatgttattcctttctaaacagagagtcagttctcaagcatgagttaaaggagggataaggctgatcaaaactatcttggatcatgtaagacctgatatattattctcagacacctgcattaagatttcttacagtggcacttagtagagaacttacagaacaaataccaaagagggcatatggaacagaaataggcacagagataataggaatcattctagaaggccacaaaacagatatgtattacacatgagctctcccagattttacttcataacccagaggtaactttgctccctgctatcagcagctaggaatcaaaggctgaatccaagaacaagatgagacacttggaaaattcaaaaccatgccagtgttctagccagcagtagactaattacagcagaggcattttttttaaatatagatatatatataatttttttttgaggcagagtcttgctttattgcccaggctggagtgcagtggtgcaatctggactcactgcaacctccacctccttggttcaagcgagtctcctgcctcagcctcccgagtagctgggattacaggtgcatgccactgcgccaggctaatttttgtatttttagtagagacagggtttcagcatgttggccaggctggtctcgaactcctgacctcaagtgatctgcacatctcggcctcccaaagagctgggattacaggcgtgggccaccgcgcctggcctaaatttttttatttttagtttttgtgagtgcatggtaggtttatatatttatagagtacataagatgttttgatacagatatgcaatgcgtaataatcacattctggagaatgaaaacacctacagtaccctgcttcgtgagcaaacctggatggctgcctatggggattcagtaattaaaattcaaacacgatatgtggcttatagctaaacaagttcagggaattgaaattagatttattcccaaaacataaaggtattcaaccacagatcattccctaaaaatcatagaatgatttaca

SEQ ID NO: 1562445 - DNA, 4001 bp, Homo sapiens
gagggaaaaacaatgcagacagagaggaaagaatgccaaggcctggtgggtggaggaggcccatgtggctgaagcccagtgagaagggccagcggtttcagatgagtcttgagacgcaggcgggggtgaacagctgcagggccttcggaaggcgtgtttatgatgtggatcattaatccaagggcaatgggaagctaactgtaggcaaaagagggaggcgggaggggtggcataatcagctctgccttctgaaggttactctggctgcagggtgaagaatcgagaaaagccagagggaatgtggggagacaagctggtacaggactgcggcaggctgaatgaaggtggtggtttgcacttgggtgtccacgacaatgaagagatgtgaaagatgcccaggagacaacctcacctgggcttaaggattcactgggtgttggggtgtgataagggtcaaggaggaatcctaggtacaacggaagaggttccagctggggttgggaagtggggttgtttggttttgtgcatgttgaattggaggagactgagtggtattaagaaacactgtcacgcagctagctgaacgtacgagtctagctgagaaagggtcaagttggagaaaggtaggagtcaagagcacagggctggaacttaaaagctgtgcgtgtgaatctgtgccttgtgctagatgaaggggcgcaatggagaataaaatgggaacagatgccgagctttgagaatctccaatattaaggagcctgggagaggagggtgagccagaatggcagcaggaaaagcagaagagtcagggatggtcacagaagccaagggaagacagtgtttgtagagtgaaatgggggcagcagtttcagatgccgctgagagattgagcaagacaaagcctgaaaaagtctcattcctggtttttgttttagcagagatgaagagggaagccatactggctgaggagtgagagacaaataatagaggcattgaatatggcagttctttaaagtttgcctgtcgaaagggataagggattggacaataactggaaactgaaggggaacgtggggtcaaagaagattctttttttctcttttgtgatgggagacttgaacatgcttcaaaaccatggcaaagagccagctgagatggaacaggtgatcatacaggagagggaatgtatacctgacagggtagagtttttggcgagtggaaagcgatgggatccaaagcacggagagggagtggccttggttaggaggaggaaggaaggtaggaacagatataagtaaggcttgcagttttgggagctgaagaatgaggggattcccatgtgacagcttcaagcttctctatgaagtgacagcacaagggcgtggtgggagatcaaatctgaggaaaatggtcatttatgaaatgcaatctcctacagaccctcagctaaccgtggcaatcctactctgttactttggttaattggggttttacctgatggcaaaagagaaaagatggggctaggagtttaagagagtggcaagggtagggccgggcgcagtggctcacgcctttaatcccagcactttggaaggccgaggcaggcagattacctgaggtcaggagtttgagaccagcctggccaacatggtgaaaccccatctctactaaaaatacaaaaattagctgggcatggtggcgtacacctgtaatcccagctactcaggccgaggcaggagaattgcttgagcccagagatggaggttgcagtgagccgagatcttgccactgcactccagcctggccgacagagtaaggctctgtcttaaaaaaaaaaaaaacaacaaaaaaagagagattggctaggggccttagctccttgagggcagggacctgtcacattgatcgcggtatcagcacccaggtacttactattcaaaatgatcagcatacggatgatcatttgtctgcatctcagtttgcctcttttggtgcttctctaaaaaataaaaaaggaagagcttaaactcctacatgattcctgtctttgcgctgggaagaaggctctgggttcttttgttcttcaggacagtcccttgtaaagctcttgccatagttctgttccaggggcactgtcatatttatacctaacaaagctaaggggtgtctttacatttttagcttgttagcaggatgcttatatggccttgctgacccggtttaaaagttgcaatttgcaaaatacatactgaaaatactgcacttttacctatggaagttgtaatttatataaggaaattgtaatttatataatcctttaaaaaacttactcatacgaaataacagagaacggggaaataccattaagactgtcatgctcaagtgggggaggggcagactcagggaaaccaattaggaagcaagtaaaataatccacgcaccagatgatgggggcctggaccaaggtggtgacagtggcggttgagagaaatggtagaattgtgaatctattctgggtgcattttgaaggcagtgctgacagactgaaggtgaggaagagaaaaacaggactcaaacaggatgcaagactcgggcaactggaggatggaatttccagcaactatgatggattaagattgtgggaggacaggcttggcttggggaattattgagcgctatcttggacgagctgtgtttgagatgccgtagacatccaagtagggatgtggcaggcagctaaatgcagggatctggtgttcaggggaggggcgagggctgggaatgcacacttggggctcactggaattcagataggctctgagtacaggcgactggatgagttcatctagggattgagtgtagacagaaaaaaggctcaagctcacattcagccgtgaaaactggtctctgaaaaaagttaaccgttggcttaagtgtggcaacgaaacgttaacacgctgaggggagggtgtggataaagagccccgaggctgggtgagtgggggacaaacacagacagagaagacatttcaaaagatttagattcctacgagatagggagatgccagcgctaaggttagaaagaaaaactaatccaaagcaaaacagcaagtaagcagaggcaaaatcggaggtcagatagaagattcagatagaaaaaccccaaagttccctcggtggggcggcggtgagatcggcctccgccccctcgccagacccaggcgcggccccgggagcgctaggtcacctcggcccaggccgtccccctgcccagcgggcctgagagtacgtgtgtcgccggggcgcccggtcactgccgagccggggtagctgttccttggcaaactgtgccgcgaggaggaaacggcggggcgccagcgaggcaggcaggggcgaggactgagtgaccggcgatactggaagcccagaaagagcgtagcaggagggtccggaagggcccagagctggggctgtaacagggtaaccggctgagggggacgacggcagcagcggggccgttacctgctccgcgctgttcccacgactgcgccaacgccgcagcgccggcgcgtccccatggaaacccgcgcgcggggcctcctgggaagcgccggcctgcgggggctgggcgcgcgcatgcgcactcgggcagcaggagccgcggcggggaggggcgtcttgggcctggaggtcagtgtggcctcgcgtttgtcttcggtgacgggaagtgagtttcttgtgtagacgtctgtaaacgatcctcctgccgtccctgttcggcgcccgggaccctgccttcccgcgtggccgcaccgagacgagggagcctgtcacgcgctctggcgctctcctgacctcttaaggctctgtcagtcttaggtaacttgagtcagtaggtgggtgtagacgcctggtcaattcctgggaagcacagttcccctattaaccccttgtcataaagacgattttttttttttttttgtaaaacaaaatctgatgac

SEQ ID NO: 1562446 - DNA, 4001 bp, Homo sapiens
aattacaaaattagccaggcgtggtggtgtgtgcctgcagccccagctaccctgcaagctgaagccagaggatttcttgaacctaggaggtcgaggctgtagtgagccatgaacttcacactgtactccagcctgggtgacagaatgagaccctgtccaaagaaaaaaagaatttctgacccttgcaatataataacagcaacaacaaaaatttcagtgtaaatggttacaataagttggtaactgtactaagaataaatatgcatatatgcatataatttgaatatacagatacatagatgtactgtatatctgtataaagttttttgatctatctctcctctcccattttattctacttacaatttttaaaaacacctgactaaactgcttttcggaatgtcgtttctttattaaaggcagatttaatcaatgattttcatgttgacaaccatgaaacatgccctccttgaggtatatatcagaatctctagtggagaagaaaggagcatgtgtaataaataaaacacacttgtatgaaataaactactggaaatcaacaaaattttttaatcaagtagagattcaaggaaaatgagagaatgcatagagtctacatgggttaaaaatgaatttgaggatcagtaaaatttgtaattcacttattttctatttactactgttaatatctaaaagttctactattgtattttaatcatcattacacaagaattagcagacagaaacatacaaagcaattatgtttgaattttcccaactgaaaatttaggcaactgactaaataaatactaatcaaaacaataatatcagaaagtctgtcaaataagtttttaatgtaaactatgatattaaaatgattataactgtattaaaaatgacacataagattaggggcctagacttcaaatttctctggctttcaactgaaggtgccactattttacattataataacataaaatccctatcaagaaacttaagagtaataatataaattataaactacatatcagtatcatttagtttctatatttaaatataaaattcaaacatttccagaatttatggttatctcaaatagccaattgaaaacataagaaataatggtaatttctagttaattttaaagttattcaagtatgcattaacaaatttcaaataaatttaaaacataaaggaaataatctgctctcataaaacccctacagaaaactatcatcttgaattttaaatttgccactgttattaccataaagtagaactaattgttctacttataagtcgaacaagtaattctactttctcataaagtagaaaacgatactcttaatattgataaactttattactgtacgccaataaaccagaataaagttctaccttattaccataaaccagctttgtttttcgtcatactgaatgagagcaaaagttgtagtatctggttattttgtttgttttgcaatcgataatttatccaagtaagaattttcttcaaaagtagagctagttaaacaaataaaattgaaacaagatatttaaggcataattttaaataccaaattaatttctccattactgaatttttttctcttgagtatttctatttattctctagttacatctttttttaaaaaaaggttttctagttactaattatctggcaaggaaataaaatgcaaaatgtcaacttattaaacaaacacatgcacacacacacgtacacacacagaagttttcttaatagtaatgtttgttataattagtaccaataatctaacatatttttatcccattatatcataacattctttatcccagaatacagaccacactattttatatgcaatttttaaagataaatcaaattattaattaatatcttaccagatctcacccagcacatcaaacaaagaaaaatgtatactctcatttggaatctgagaaaagcaaaaacagcactcaattcaccaaaaaggaaattccgtaactcattgaggtttctctttggtaggatcatcacaggctggcaggttcttctgtaaaagttcactgatttttgctcctccctcttggttgaaaaggtgaggtagtttgttttctcccactttagcttgtggttgtgggaaggatttttaagtcacaggctctgtaataagtcacaaacaaaccttcagctacacaagttgaatttaagggaatgataaatctaattacatctttctgtattccttttaacctcaggatttcagaagcggtcaggaaaatatgcaaatgtgatgttagaaaatgctagaaatggaaagagtcagaaaaagttgtggtttatattcactttgactacaaactaagatatctttatataccataaatcaataatgaaagccatatccattaagctctttcaagtataaaagatgagcttttcatatttatgttattttacatccccaaagcaggggctattttaacattcaaaattttggctcatcacttgaggctaaaaggtgaaaattataaaaaaaaaagtatttaatatgatgaccattttaaaattagcatacattttctttttacatgtttacttaattatcttcttttcttagcaatggactttagtaagcaagaaaaattgggagttgttctaagtacataaattgaaagtttaaaaattaattcatttttaaaaaattcaagtttctctaaagttccaaaaatacagtaagaacagaagtgttttttgtatgttataaatctgcagaaactaatctgaggtctggggaagtatttgagaaaattcacaaacaaaatgaagtattagtttaaaaaaatcacaaacatttaactgctgaggaagttccatcattattttgaactgtctgatctctgggtgttttacatgagatttccattttttaaaaaataccaccactacaatttgtttgaagaccaaaaataatctaggtccttccacagcacttagctgtaagaactgcacctctctaacaaagatataaataagccacatcatttcagaatatgggaagaaagataatgtgtcatacatcctagaacaaatttttcctaacaaattttacttaataaattaaaatacaaatctttcctccttcacttataatttccttttctctttgtgctttcaatgtggcattataatatgactcttgcacatttactttcatctttatgagttcatactgaaaaatactggcatatcaggcagtataatatagagtttcaaaattaaaaatcatgcttcttcattatcatgtattttgcctactgccaatatgagaaagatgaggttattaatgttcattgcattaaataggaaaatattgggggatgacaaagttacaaaatgccaatagtttagtaagacaatctatttgagcacttgtttagtcctccttggatataaaaaatgattgtaagtagcttacatacacacttacaatgtaaacattaactcaaaggggatgttcatgatgatgatgtgatgatgatgatgaagatttaaaatttattgagccctatgtatcaggcgttcttcaagcactttacaagtgagttaattagtgtttgagatggaaaatcattgtttatcacaatatattttgtcacaaccttttattaatttgtcaatgtgtcaaaatgtttaacaatcttaccctttgactcagcaattaagcaacaaagatacttcctacagaaatccaagacactttcctacagacacatccaaggtccttttatgtggcaaatggcctacatgtgcacaaatatatgagcaaagacattcatctcaccattccaataacagtcaaaaaatgaaagcaatataaaatctaacaatgagagattagtctaattaggtatctactgtggattaaaactaatgatacagattgatcagtatttattggtgtaaaaggccttcattacacctttttcattac

SEQ ID NO: 1562447 - DNA, 4001 bp, Homo sapiens
agacaaaagacaaaaaatgaactacggaagtgttttcaatataaggtaggaaaggaactaatatatatatacaaaaccataaatgagaaaaaagaaaaagaatactatagttgaacaccaggtaagggatataaacagatattttctaaaaatattcaaagagttcataaatgtattaaacatatgcttagtctccttaaaaaatcaataaattttaattaaaataaaattaccatatcatttttacctttatactcattgactactaacatcaatgtatattgcaacatttcaatacagaatatttaggattcaattaaatacatggaaattatagactggaaaaataaattatcatgtatttctaagatggggactatgcagcatttaagaaattatgtttctgaaaactaaggataacatcagaaagcacgtattatgtaaaatgaaatacaataagataataaaaaccatacacatgaaccatatgaatatatatttctgcatatatagcccatatttatatagtactcattttatccatgatatagcgtatatataatacactgtaaacacatgtatatatttgtgcacatacctccccccacacacacatctttattgggtaagatattaaccaacacaaatgtagtttgcagtgatgctgattaaattgtgttctcagtttatctgtatttctctgtgtgatttctattgtctgtattttaatatttttagtttcctatgtctaaaatattcatttcttagtttaatgagaaaaaatagatttaatagacttcagttaattaagaataaaaattgccaaaatgaatggtatcagcaaaaactgaatatatctaaaacagaaagattagtattaatttttgtacctgtttgaaaaattaacaaattgaggatctgagaaatagactaagtaactctattgtgattcaaaattcactagcaggtacataatatagaattttatttccaaagatgtaggaagataatgactctagcagtaatctcaacagagaggtaagctgagaaataatactgaaaatcttattaggtttcaaattatagaagcagcaaaaatgttaaaaataccaaagacacatggggaagttataaataatcattgtaggttgtccagcattctctctgaaacatatttccattacagttacaatgcctgtgaaattgagagcaaggagattaaaacagacagtccagaggcaggcatagtgccctggacgtgagcagctgagactcaagtacctctagcctctctcaaacatctcttgtgactctgagcaagttattttacctctcatctctgagtctcagtttcctcatgtttaaatggaaggagttgaaagaaatggtctcctgttactgtaacattctttgatttcaaatgctttttcatgctgggcaagctgctgagataagtttgtcttgcaattttcagtgttttcattattgattttatggtgtataaagataacttagtttgtaatcaaaatgaacaaaagaaccactagttttgctgactcaagaacagagagccttaaaacttagccataaaaagctacaatcctcacacatcttagaaagatttaaccctttttttttctgataatctaaacccccattctcatcccaaaaatcctacatgaaaacctccttcattctctttcctcatttctggaaaaaaaacggatttgttaacaacaacaatattaaccacatgataatagtttatattcagctatcacttcatggcaagcccagtgttgttttatatttcctcttcttttcttcattttatatatgaagaaagtgaagttaaaagagattacctgatctcaggcacacaactagaagccacaggacatttctgggtgagaactgaaaagcatgagcactatatttttggcacaagttattatgtaaacatttgagcaacataaataagaccctatcagaagttcactagctctttgtttattcatgtataataagaaggaagacccttttgggccagcagaattccaagtacgaaacaattgacccactttatgctacgaagacagtggcttctatggccacagagccagttaagacacaacactgtaggtaaaatgttaaaatccctgaatgctagtggcagaaagcaaaataaaaggcaaatatagctttaattatgtagttgtgaagcaatcaaaacacacatttagaaagaatacaaaattatagctagataggagaaataagttctagtgttctacatcagcgtagaatgactatagttaacaataatacatagtttcaaatagctaggaggatattgagtgttcccaacataaagaaatggtaactgtttgagatatcaatacactaattactttgatatgatcactatgcattatatctatcaaaatattactatgtactctagaaataataggcacaactatgtcaattaattttttaatgaaaaaacaagatagtcagcaactcatttatgcaaatgttaggaaagctgctgaaaatgaatctgactacacaagcaaaataaagtaggtgtctaacaagtctttataccaggaattcccaagaatgatcttaaaaatggatgtaaaaaaaaatgactgggtacatcagaattttcagaatgtaatttcctggggccaaccccagagattctgatttggtagatatatctgcatttttttaagtgggtaacccagagaattctcatatggtagttcatgaagcacacacggagaagttttacatctggaaattatctaaaagaattaaagagaaaatgaacacggaaaaaaacacagtggattattctaacctaatttatattgctttctacgtgaccaaatcaacatttatgttaccttctttgagcttcacaatagagtgagatagtattacagctattaactgcatgtagagggttaagtgacttggcacaagatgacatgccaccaggacatgaatctgggtcttttagttccaaatttcattttctttcacatgatccttgtttaaagagattttggtacaataaattaaaattccttgagggcatctgattttagtaagtcaagaaaaattaatcgtggatcatatcagaaaaatactgacacaatttagagaaaaataatgattttgttgaggcactcagctcagaatcccatgggttctggaaagattactgccctacaaacaggcttctaaggttctgtaacttcctatacccttattactccaaggtggtctgcgtacccgtaggcatcacctgagtgcttagtagaattgctaatcttgggcttcacctccagcctatggataagaattcgcatttttatcacatactacaagttctgtgactttacaaaaataacttcattttattctgtttttcactttcctcaactgtgaaatgagaaagctgaattattctacctttaacatctcttccaaagcacacaggagtgggaaactatgtcctgtggtcaagtctggttggcaagctaagaatgttttttacatgtttaaatggttgggaaaaaatcaaaattataatatttggtgacatgaaagttacaacaaattcaaatgtgagtgtccataaataaagttgtattcgtgcacgtgcacatgcacatttacttgtttatgcattatctactgctgctttcttgctttggtaacaaagctgagtaggtgcaaaagagactgtatggcccacaaaacgtaaaatatttactatctggtcgtttacaaaaatatttcctggctggctcagtggctcatgcctgtaatcccagcactttgggaggctgagaagggcagatcacttgagcccaagagttggagaccagcctgggtaacatagtgaaacgctgtctctccaaaaattacaaaattagccaggcgtggtggtgtgtgcctgcagccccagctaccctgcaagc

SEQ ID NO: 1562448 - DNA, 4001 bp, Homo sapiens
gtcaattgacagcctccatgtgaatggtttatatctctcacactaatatgtgcaaaatattattgccccctcttatgcatatctagcaacaccaacatcttagagacattaaaaaaggtgtaaaggtaagggaagagtttccactgcattgaaaaatatttttgtattatttttatgttactgagacttattattaaacttgctttctaacattgctttctaattgctccaagctttcaaaaaaccaaaactttgaaagctatgataataagccatttttaatgcacccaaagaacaaaataggtatatgtgaaggtaagcgcaaaacttaaaagtaatttgttgttaccctttctctaaagcacaaaagatctgagtttgtatcctggtgcatcctctctttgagtgggcaagttatttaaccttttcaacatttctaaatctctctaaaattgttgtgagaataaacataaataatttcatgtatacatctattaccttacaaaaataaggcactgaataaatgatcattattattttttgtgttatcaggaaaagtgtgattttaagaacaggaagtggcatctaaatctgtaagtatatggaagttctttatctgtagtagacataggctggtttatattgtcctaagccacaacaaaagtaaaagaagtttatatgtattaaattatagttgaccctttaacaacatggaggttagggttgctgacaccccatgtagtccaaaattttcatataacttttgactccctaaaaactttactaatagtctactattgactggaagacttactgataacataaatagtcaatcgatacacatgttgtatgttatatgtattatatactgtgttcttacaagtaagtaagctagagaaaagaaaatgttaataagaacatgagcaagagaaaatacatttattattcagtaagtggaagtggatcatcataaaggtctttattcctgtcatcttcacattgagtaggctgaggaggacgaggaataggagcagttgtggcgaaagaaaatctgtgtataagtggacctgcacagcttgaacccatgttgttcaagggttgactgtattttaaagacagatcaattgcacaagagttagaatagccagcactgttaaacagggacaggtacaattttgtataatgcagagaactctatctctagtaattttaaagataattcacagaacaatttgcatttgccagtttgtaacacttaccttttacaaatgatggtgtgtatccataaattcaggaaacagtttattacagtggttagagcataaactttgaaagcagccagtgatgtgtcagaatcagcacttgagataattattaactaaatattcagatactgcaaacctgtagttaaactatgggtagcttgaaattggccatggtggagcatttacactgtggaaattgacaaacgcataaatctaggtctccctcacaaccaccacctgatttgccagaaactactgattcagatatgtatctgtttaaatgccaactttaacacttaatagtttatagcctttagtatcttatcttgcctttctttctcgcaacttccaaatctagaaaatgatataattatttatagtcataaggttgctttgaggattgtgttaacttatataatcatctagtgcacattcaataaatggtggttcatattaataagccaaaatcataaaaaagacaacaagaaagagaaaagcagaaactaaaggaaaaggaataactttctgagaacagtgaatttttgctgtattaataagtatcattaggcaagagattctagaactataatagagaaaaaaaaatccactccagtcaatgcttcactcaccacgaagagattgtttggtgtttgttcactctctccaaagggtgggataggagaatcagttctactagacatgttttcttggttagcttgttgctctgggattggctcatataagctatccatagagccctcctgcaatacagagatttatgagtcaaggaataacagaataataattttcctttaaaaggtacctaatttatacacccacctttatatagtactttatttaaattatcctgggcatagggattaagagtttacagtatgctaactttcaacagtgaacaatacagtaaagccaggaattattacacagccaggaattactattaccaccattattacagagccaagaatttaaacaagagtttaagtgttgcagaggcaggcacacaatgagggaattcctcaagaggtatgttgaagacattaagctcaaaaaactaaataaatgccttttgagacaccaataaactgtgttggttacagatttgagttacatgtatgtctctaattggtaccacctccctttataagaaatacagtctgctctacttagctttctcaactgtaaagtagcagtttcaatggcagaggaggcgaagtaagatggcagaatagaaagctccactgatcgtttctccacaataaggacaccaagttaacaactatctacacagaaaaacaacaccctcataagaatcaaaattcaggtgagcactcatagtacctggttttaacatcaaatcactaaaagaggcactgaagagatagaaaaaacagtcccgaatctccgacgccactcctcccctaccgtggcacctgcggcctggtgtggagagcatctctgggatctggggaagggagaacacagccatcgtgcggcattgaacttagtgctgtcctgttagagaagaaagaaaacccagaccaaactcagctgatgcccagccatagagggagcatttaaacgagccctggccagaagggaatctctgatcccaatggtccaaggttgagtgcctgcaaaccttgccgcccagggctgcagcactctgtgtctccagtaaacttgaaaggcagtctagaacacaaggactgcaactcctatgtgtgtctcagtgtgaactaagcccagagacagtagactgagggggcatgtaacacactgagacaccggttggggcagccaagggagtgcaggcatcaccctgcccctaaccctaggctgcatatcttgaggctccaaaagagaccccttccttctgcttgaggagagacggaagtgtagggaggcctttgtcttgcatcgagggtaccagctcagccatagcataatagggcactgataagagtcatgaggtaccccccttccgggccctagctcccagatgacatttctaggcaaccttgggccagaaggaaaccgctgccctgaaggaaagggttcagtcctggcagtattcattacctgctaaccgaagagcccttgggccctgaatagccagcagtgatacccaggtactacatcaagggccttgggaaagcctctgagacttagtggctttagatgagactcagcacattactagctgtggtggctacagaggaaaacttctgtttgagaaaagcagagggaaatgcaaaggggactttatcttgcactttaggtaccagcacagccacatgggggtagagcactgactgggctcttgtaatctcttattccaggactgtatgcttggatggcatttctggacatgccctgggccagaggggagtccagtgccctgcagggtaaatcccaggccaggtagcattcacaaaaagctgacttaagagaccttgggccttaagagagcatctgtggtagtctagcagtactccttgtacctagggtggtatggctacagagtgaggctcctctgtctttaaaaactggagagaagagtgggaaggctggtgtggtttgagtgccagctcagctgtaatacaataacaccaggtagacttctaatgttttagactctaatccctgactcctggactgcacttctggactcacccagggcctgggggccttcagtgccctgaagggaagcac

SEQ ID NO: 1562449 - DNA, 4001 bp, Homo sapiens
atattataaataaatatatattataaattaatgtataattatatattatatataatcccatttgtgattattataatcatataattatatatacacatattataaataaatatataattatattttttatatatatatataaaattcccatttttctgatgagcaactgagactgccagaggtatgtgacttgctccaagtgacacagttaagtgacaaacccaggactgagccccagaaaatctggctcacatccttgaccacggttctaggtgtgatcttttgtcgctgatcccagattctacgtcacctctagcacatgtcaggcactgcccctggcggaccctttccacccttcctgctttgctgtctcagtggacccttcagtaggtgtgtcagcgggaggggttcacagaacacctctttggcgggatctccaaaagcccctcctcatttccctcttcttgaccaccaacgtgtccctctccctgcccttttagctggggtctcctgcgtgcctgggcctttctgtctccttcttatttactttgcccagcaactactataacttctcacctggctctgacccacacaaacctagaccaatccccctgtttccctctccacctcctaaagagtggggtgcccagctggaccataacgacacagctgcctcgggctggggttgaggggcatccacttggttcttccttcactgggaacgccagaccaggaacggccccagctttccttaaggaggaatggtttctctgagtggaaatggtacgcattctgcaggcactaaccatcttcagtggttgtggtttaaaactcagaatgagaaagccaccttcaaagaagccatgccacacatttcctgtttaggagctcagcctagactagatgagtgctcacgcctatagtcccaacactgggaggctgaggcgagtggatggtcttcagcccaggagtttgagaccagcctgggtaacacagtgaaaccccatctctaccaaaaaaaaaaaaaaaattagccgggtgtggtgggactcacctgactcacctgtactcccagctactcagaaggctgaggtgggaggatcacttgagtccaggagactgaggctgcagtgagccatgatcacactactgcactacagcctgggcaagagagtgagacagtgtctcaaaaaaaaaaagagctcagccttgattgggcatcagatttagttcttgcttaatggcccagagcagcataaagcatgaagcatgacagacatgtcaaaagcaggcctggcagagtcatcctcctgggctcctatggcatatccttcacgctggccaggcctcaaatccaattccaggtcttgaccaccaccaaagccctgcggtcagccgaaggttcctgccagccagctttgttcagttatctacttatttttacccctaaaccaccccaaaaaaataagcagactgactgttcagttaaggagggacatcagtccactacaaggccctgaagccaagagctaattttaagaaaggagggaaacacatatcacaatgtgccccagaccaaacaccactgggacaggagtgtgaacagcgcttagaacccaaccctggaggctcacctctgtgcagcctttggccatccatccggagcccgccctgattctccacagggagagtggggaattacagttcccatccctgttgggtggaaccagatgacatcctaaaggcccttcctactgggactcgctccatcctggtaatacctgccatcgaataaacaccatggccagccatagagacgcatgatcacactcggtcatcccaacaacccagccagactgttcttgtgaacaccctttccagaaatggggacagtctcgtgccaagatgccaaaatgggtggggggaagagaaagggtttgggtccaggtctgtctaattcgaaggctgcttctggcacttccccagctcacgaagcctgctgcctcttgacaggaagtaaaaggcacagacagatggtgctctggtggagccctgcccagaaaatggccacttccggagcaaaactgccacagcaacaggccttgtcaacagcagcctccaaccgttaaccacagggccatctcacctctagaaatcagctcccttttatccacacatccctacacacaaacaataactccatcacccaggagaccacagaacaaaggcaacgagagagagggacagaatggggcataaataagatgctggatgggcagacaggaaaaaaacacttcaaggcagagcacaccaggatgtattagaaaggagtatttgacacgcaggcttttagatgaagcctaccctccttacgtggggagtatacacaaatgagtctgtattttcaactacgtcacatgcaccgccttgcaacccaaaacaatatttgtgcttcaggggctgcactgcgctgttttatacacagaatcacctggcacagctcctgtccctgagatgcaaattaatgttctcatgtagtggggggaaggggtcgagaggaggcgagggggaggggagcaaatgtgctctgcaggccacactcaggcattgacatcgctgggcatgataggcgccgccagtgctgttgcttagcaactcaatacccttcgagaaaatccagcagcctcgctggcttgcagaagcaggcagggctggttcagcatggcattgggcatggaaagatactaacaggttttttttttccagttattaataatcattcttcctgatttcccatacagatcgacatacctgaggggacccagagtcatccactacactggggctggaaaaagcccagggtttttaaattgcctcccaatcggcttcggagagtagtggaattttactggctggtcccatgacactccttccagccccggccctcaccacaacacaaaggcagagctccacagtgtgactcaccagcataccttcagatcgttgtttgtcagcccatgtcatgagtcatggtttcttcagctttcttttttctcaaaactgaaacacttgacattttacaatagggttggggggaggcttttcattttttttttttaagccactctgtggctttgtgtgcaagtgtgggggcacgtgggcagaggtgagtaatggatgcaagaacaggtaaacatgagcaaggttctccacgccatcagccacctggcaagccatcagagctcaaggaagttgtcatttgtgtcgtggaggaatgggaatacccctgggctatgtatcttggaagagacaaggtgctggacagctttccaccctccatctgttgcatcccagcagtgtaatgctccctctattcccacacacaaagaggtcggcttcattttgtgccacgtgataacagcaccatgtaaggctttaagaaaaatcctgcaggagttacaagagacaaagtacactgcgacgtaagataagaaaaaaagaagtggaattgccacagggaaactgtgctgggccgaacagttggttggtgggtccctggctttgggttctgattctgacataaatcgggtgggtgatgagcttcttatttgcatggctcatgcaaatatgccatgatgttataaagcacaactttcctcctctccatgaagccctcaatctccaaatttattcacttagacagcacagtctttcccccagagtgtgaacccctcaaagtcggcaccattttataaatctctttatggtatcaacccagcacatatccaatacatactagatgctcactcatgctgcctgtgtgtatggagacatggagaaacaaaaattaactaaatccaattcacgttttggaatccttatttattcccatgcattacaggatagattcaatatgccctgtcaagtcccaggaaagtaatgaagacctaggaaaggatacaacagaaaacgttctgaatgttacacaatttgaaatgcca

SEQ ID NO: 1562450 - DNA, 4001 bp, Homo sapiens
acacctgcctcagggaagagcaaaagcagcatcagtcaccacctactacaaaagtgacagcagccaccggcgggggtctgccggaacaggcgctagggccccgggccgatggggtccttggaggcgggggcgctgggcagagacttcaggtactccaggtgcctccgggcatcctcctggttgtggcgcacatagtacacgacgtaggcgatcaccatggcgaaccagccgaacatggtgaccagcatggccacgtctgtggtcctgtgggggacgctgcagaggctggcacccgcatccagagcctgaaccagaggcttccccacaaactcctcctgcactgaggtgtggcaggcgatctcgtccacagagtcggggtccagcttcagctcccacagggcctcctgcagggcgcactcgcagtgcagggggttgtgggacaggcgtatcttggcgctgagtttgcccagggcgtccttggggatcctctggatgcggttgtaagacaggtccagcagccgcaggcccccggccaggcccgcgaaggtggcggagccgatggcctcgatggcgttgtgagacagatccagctccctgagccggtgcaggtgctggaaggccccgtccgggaggtgggagatcttgttggcatcgagcttcaggagcacggtgttggccgggatgtcctcggggacctcctgaaggccccgcaagctgcagaagacagccacagcccctgcgtggtcagggcaccggcagggctgtgggcaggcggcgcccaggtgcaggcagaagaggaggaagagacaagactcccgggtggagaccagcaggagcgaggggcgaggtgggcgcacggtgcccatcctgacctgacctggggacggggacacgcgagcctctgctagggcctggggatggagctggtttccgcaggcaaggccttatccaaccagacatgaaaccgccatcctgccccgctgggagaagcagtgcagtccactctggcagctctgaaagggaagacgcaggagggagcggagagggagggagggtggtcagcactgccggctgcggtcacctgggaaacgcgtccactggtggggagggtgttgagggcccactgaagggtctggggtggggagcacgcctccttaaacagctctgcctgtaacttacttctggagactcccaatgcgcccgggaggagcgtcccacaagtgcagggagctggcactgccagggggctccgcatggcccagtgggtggtcactgcggccacccctggccacctacagcaccgctggggaccaaaggccgggcggcggagtggcggcggcttggaccacccagcccctccctcctcagggtggacgccaggaggacggtgacggctgcagcttctcccgaacctggagcgcgggtcaagctgggcacgtggccgggcaccagcgggcgctcgcgcgccaggggctactccagcagccaacgcctggctgactccgacaacccctaaaaactgtcataacccagcaagcccttccctgccagccctaaaggagccgcggctcgcaccgggcacagaaccgcgccttttctttcaactgcctgaagaaggaaaccgagaaaacagagaagccaagccctgtgcgcgcggcccgcgctgggcgtggacggcggggccgcgcgcggagccggccgggagaggctcggacccccaggacctccagcctttagaccctccggccctaggacccccggaacctgggacccccgagaccccagcactcgcggcggggggatggtcatggggtgggtgggaatccacgctcccagggctgggcgggggctttacctgcgcggcggcggccggaggctgctctgcgcgccgctcccgggcctctcggagcccgccagacccagctccacgcctggcgcggcggccaccccgctgcccctgcgaccgcgcccgcgaccactagctggggaggccgcgactccggcctgcgcgggcgaggggcggggtggggcggggcctggagggggcggggcgaaaggcggagacaggctgtgtcgattccccgcgggggcggggaaggggcggggcatgtaaggagaccggaacgggatttgtggttaggcgggggcggggcttgagggcgggttctgcggcagggcggggcctggaagagatgggggaggggcatgggaggggcatgggaggggccggtggtgcggctttagatggagctggtactaagacccaggtcgcaggggctgtgggcgggttgtgggagtaattgtggcatgctgggggcgtggttgtggggctgaggacgaggtggtgggggctgagggcgtggttatgggtgggggcggggtctgcgcgccgggaggggctgtgggtccagcccctgcccctcactctgggcaaatcccctcttccctctggcatcaggacttctggggcttgaagaccctgggtctgcgggaagcccctgctgagcgtccctcgcctaccccgtggccagtgggtgagtagggctagatctccgcccatctaggtccccttctgctccagctccagcgtctgacatcccaaggaaggaacgcagggtgggggcatttgagccggacctgagccatcctcatggttttcaaaaagtagccttattgtggtgtaattgacagacggtaagccacatatttcaatttggtacgttttaacactcggatactcctgtgaaaccatcaccacaatcagcatagtgaacaccccgggttccctcttggtcatctctccctgccctccctcatccccaggcaagcactgatctgcattctgtcactactgattactttgcatttcctatgatttgcacaaatggaatcatataatatgtactttttgtgtagcttctttcactcagcacaattatttttgagatttgcctgcgtcatttggtttgtcaatgcgtatttcttttacagctgcatggtactccagtgtatgaatgtaccacagtttgtgtccattcacctgctggtgggcatttgggttgtttctggtgttggctcttacagataaagctgatccgaacattgtgcacaagtctttggatgaatgcttttctttctcttgaatagatgtctaggagtggagtggctggatgccacggtagccatatgtgaaactttttaagaaactgccaaagcgattgtatggttttacattccacatcctccccagcacttggtatggtttgtctttttaatttcaaatactctaataggtgtgtggtgatagatggaactgtggttttaatttgcgtttccctgttggccaatgatgttgagcatcatttcatctgtttattctccatctcctgtagtaagcgttgagttcaaatcttttactcacttttaattgggttgtttattttcttattattgagtttgggagtttgttgcatattctggatacaagtcctttatcagatatgtgatctgtaaatgctttctccaagcctttggattgtgtgttcattctcttaacagtttttcaaagagcagaattttttaattttgaggaaatccaatttatgtttttcttttatggatcctgcttttggtgtcatatataagaaatctttgcctcacccaaagtcacaagggttttagagttttaaaggtttgcatttgggtctattacctattttaagtttatttgggtttatagtatgagatatgattcaatgtttattttttgtgtatgtggataatcagttttttccagactgttgaaaagactatcctttctcttgtttgctgagagtctttttaatcaggaatgaaagttggattttgttttttctgcatctattgagaatctttttgcgtgatgatctattaatatgatagagtataatgattgattttaaagtgttaaatcaatcttgtgttcttgggataaagcccacgtggtcatgatgtattatcat

SEQ ID NO: 1562451 - DNA, 4001 bp, Homo sapiens
ggcaacaaaggtatataaggactttctatctattacaaagtcagcgtagtaaaagaaaatgatgtatcagtaagagttatcacagaaacaaaacctatttatgtaggaattcacgtcattgaaacaatgtgattacaagtcactagggaaaaaagtcctattgcataaattcataggagggaatttcccattttacaaggctgaggatttctgtagagaaacactcccaggatgcaaaatagtcttgtgtagccaaatcagttcaatacccaggcagtccaactgctatgctcctcctactcaccagcctgaacctgaagctctcctgcaatagccccgaggaagttcacagcagatatcagctccccacccaccactctgcccacctacagccccttggcataggctgggccttccacctggaatgtccatcccatcctgtactgagacttcaaagcccaccttcctcctccctcaaggcaacacagagccctagagaaccacttgcttctcttatcagagagcctgtcaccctacactggcaaggctagctgatcccctagaccaatagcaggacgactctgacatagggcagagtttgccagcccttttcttgtgagcccctggattttcacctgcttcatcaaaaccctagaccaggctgggccaggatcccaagggtgatccagggtggccataccatcaggctggggcagcatactcctacctggcaggaggaaaagtgggccaccataatcacccgtccagtgcccatcctcagcctgcagccccacgtaaaatgtcatcccgttcagagccccctcaaaggcggtgtgggctttgggcaagtccttaaagtaattcttctgcaaagagatcgaaaaaaaaaaaaagagatagctgacgggactgttgcccggccagaggaaccctcttcacatacagcccaagtcaaaacagtgaatgtaaattactttaaaagtttcagctgtttccatcaaaagtctgaaactctttgatgagagcatcacacctcagcaaagtaaaagaacagctgcacattttcgttgctttatttgccagtcatgtattcttcacaacttctccaagatgtctggaataaaccaggcacccagactgtagggtggggcacgggtgccgacctgggcctgggactcgggcctctcaaagagggcccaaggggcggcacagcctttccctcggtggccggggctcggcaggagaccctgtttacactgcagactctgacgaccaaaatctcttacaatgcacacaactaagacagtggatccaaacactttttgtgaataaaaacaaagttacaactatctttgcaactctcctataagtcaaaaattatctcaaaataaggtgctaaaaaataaaacattaggagtctcctatgcgtggtttagagatgaaggggctgaagcggaggggcccgcgaacgcagttcccgtgggcgctcgccttggggatgggcgtcgctggccgggtcctcccacccgcctttctgagagaaaacgtgctcctcacggctcacccctcagggtcccgagctcgctgacgctccgcggaagcaacttacggtgtccagccccagggcgtaggcttccaggccggtctgctcgcggccggcgcgctcgtcctgcaggtaggtccacgtctgccggcccctctcgcagttgagtcgccagcggccgaggtcggtggcgggctcggtcttgtaggggccccctcggcgccgcagacacctgaggaccaccggccatcagcgacccaggccccgccccaacgccggccgccggcccactgccccagtcgcgctctcctcagcacctaggaccaccccgcattcgtcaggagcccggggcgaggggactcacgtgccctccgtcattgctgctgcagtgctctacgccgcccactgccagctgccagatgtccgcacccgggacctgccgcccagccccgcccctcccgcccctcccgcccctcccgcccctcccgcgcgcactacgcaggcgcaggcctcggcaggcgctcaggcttaggtgggccgacgcccacgcaaccaatcagagcgccgcgagcgtgaccccggggtgtgccaggcgaccacagtggtggagcgcttggtgccccatgcggcgtggggcggggcctgagggagcggggatggtgggtgaaggcgacgggacgggggaggcgggtggggccttattggcggggcatgaggggcggggctggtgggtggggaggtgggggcggggctggtgggtggggaggtgggggcggggcctggtgggtgcgggtgggggcggggctggtgggtggggccgaagggcgggggcggggcctctcgcgcgccctctagaggcttgcgtcccgggagcccggcctcgtgcgccgcgctttgaggtgagcctctctgagaaatttgtgaggagggtccagccgcgggtcggaaggaaggacgtggggagcgaggctcgagcgagcgacagcgagtgcgaaggtcgggtggcagggaattgctctcgcgctgcaggatttgcccggacgccggggccgggggtgggggcgggaggccgccctgaggtgaggtgggcgcgggccgtcggctccagtgcgagaccagggggagggcggggcggagcggaggagccgagggcgccgccggcgtccctgggaagctgagcgccgcgtagcttcgccggggggagtggggtaggcgcggtgaggccgtgggcccccacacctggcggaccacaggggccagaagccctggagccccgccagggaagggctgcgtcgctggccaggaccgagcgcggtagagcctcagctgctcacggggtcgctggagttgggggtggccccaggagaaattaaaggtgaaaagccttagcagcagagggaagaggaagatggaggcagagcgagtgaccgaacttggaagggacagccgggcgcaacagggcagggggcgtctgactgttggaaacatggctgacgtctggaggctgcagccagtggtccgtaagtcaggtcaaggacccacagaagaccccagcatgtcttcacctggcccacagaagccctgacatccagttacaactgccccagcctagtgagcatttcggcacccactcctcaattcctacccccagcctaacttcgaaggggcggtgagccacagcaagccggaggagaaagttggaagagagagtggacaaaagaatacccacaggcaccttccccacagtggaatagcggggttttagacaatcaaggataatcacctcttcctatcccagttcagaaacggatgaaaaagacacagcaataagatgggtgggtatcaaaatatcagctttgccacaaattaaaaacctagcttgaaggacaaggcttaaatctgcaagcaagagggcaagctactaaatcacccgttaagtcagacaaacatatcccccagcctctaggccatgaaactgcctcaccaagcactatgcaattgagtgcccaccagaagacacccctccagtcaacccacagaccccagaaagagtacccagaggagcctgagcacactccaccctatctgttctctgaaattcaatcaaatgagtcactctacttctctggaagcagaaagaggctggaagtttttctccaggtaagttcctccatgtagaaacatgaagaatagggataaggggcttcagcctggatggaatctcacactgaacctggcaaagctaggtgagggaagaggtttcaactggataagagtttgagttttgatatcttaatggactggactttttatgagtaaaataatccgctctttttaatgtctgaaagaaaagaaaaagctgtaaactacgtctgagaattgacacagttaagcttctaggggcagtcatgagaaaaaacactgttcctatctgcttacatactactgcatccagctt

SEQ ID NO: 1562452 - DNA, 4001 bp, Homo sapiens
gcaacatggcaaaactctgtccctacaaaaataagctagccgtgatggcctgtacctgtagtcctagctactggaaaggctaagctgggaggatcacttgaacccgagaggcggagattgcagtgagccaagttcacgcctctgcactccagcctgggtaacagagccagactctgtccccgaaaaaaaaaaaaaaaagattagccaggagtcctagctactaaggaggctgaggtgggaggactgaccgcttgagcccaagaggttgacactgcagtgggccatgatcataccaccacactccaggtttggagacagagcgaccctgtcttacaaaaaaaaaaaaaagaaaaaagagaacattattgggataactacagaagtctaaatacaaggctgtatcctggattacagtattatacaaaagtcaaagtttctgcatactataaccattattataattgctgcaggctagaaaatggcattgtttttagaagatacatgctgatgtatttaggagttaagagtcccgacttctgcaactaactcttataagttcagaaaaatacataaattaagagagagaaagcaaatgcaaccaagtattagcaattggtaaatgtaggtaaagagtatatgggatgtcgttctaatattcttgcaacttttcctcataagaacttttcaaatataaaacatttgagaaaatctgttaaataaaaaacattaaaagatgcaagtaaagtgcttagcacagtaacacaacaggttgctataattgttaatactgttattatcttccaaaacagattaagtgacagatctaagaaaatgtgacattgaaatcactagaattaactacatcagaaacaggaaaaaaaagcattctcataaaattggactgtgctataataaatctaacaccataaaaaaataccattacaaaacccctcatcgtgtagttttacacgaatccactttaaggtcgtccttaagcaagtacttagtgagcgtctattaggtgccagtctgttctaggttccgaggataaaaacatttgctttcaaaatacttacgtcctagtgaaccaagacaataaatgtcataaatacaatggagtaaaataaagtaggaagaacatgggagtggggaagggctaccaagagggtgatcatgggagacctcactgaggtgtcgagagcaaagtttggagccacctaactgaagagcgttgggagccggccaggtagtcaaggcacagtgaagagatcagtgtggctggatgaagtaagccaagaggagggagctgaagatgggactgcagatggaaaggggtaacaggcagtccagaaaccaaatataccatcctaagagctttagcttaggagaagccactgtaggtagcaaaggagaggcacaatctgcggtaacctccacagtggattcactttaacattctcccaactctccttcttcccagcgccgccctcccccaaccaacccgctacctcggccagatcaccttccagtgaacctgacacattatcatttcttcatgaatattatgggtgtgtgctcggatgaggacagctctggcatggtacatcttttctctcacgattccccaatctgctcagagataacacaaaccgctctcagggacgcacacacaacagagaggtcacactcgacagggaaacacacgcctccctacagccgcgctccacacaccctccagcaacgcgctgggcggagccagccgcctcgaagcgaggctcccgggtcggccgagccagcccccgctcaccctcaggttccctttagttcgctgcttgttcttcccgcccatggtcgcggttgcagctgtactctgagcactcagaccccggttgacacgtccgggacacaacttccggcttctggcggcggaagaggacaccctgtaataacttcccccgggcccttttccgccacccaccctgtccatttgctgccccacttccgctcccgcctcccgctgtgtccctgaccatccgccaccggagacgtcacagctaaagccacgcctgtctgagtgatgtcattcctggccaataggaagccaagcattggacccgtggcgccaaatcctgtcctccccgctttcagaagctaggtttgttccttgcttagagggtaggaaactggcgtgaatcatcagaggggcagtttcacataagggtagcattagaatgttatggtagaggctgtgggaagatgggagtgttttagacttccaacatgatgcaatcatcagtatcacctgggcgttttttagaaaaggccaactcgggcccctcagaactcctgaatcagatcctgcattttgacagtattcccaagtcttgttaaaatttgattactgctgtaggcactattctctctaaatctcccctccccgtccccttttattcatattgaaactgttaacgtgcagtttaggaaagaggataatgtgggagtccctattaaaatttgaaatgtacaaatcctgtaacccattgattgtgcgactcagaatcacaccagagaaacaagtaaatgtgtgctggttattgtttcttgtccacgcagtcacccttttatactcaactccatgttactgggggggcttctgctagattccaccaacaggacgaacaagagggaaacaaaggcaagaggaagaagggacttgctccattctgtaagcatcatgccagcagcagctgcattttaccgtggcaggagcaattgctttagccaaaaggtggttttaatctctatcctttttccaacaatcacagaatcagccttattgcacccctcagagatcacagcagcagtcagtgctctcctcagagatctgaattctactttcatgcggcccctcccctgagctcctgagatagccaatgtttgagccacctcctcagaagtttgagcctcaacaccgtgggatcccttctttgtgctccagagatccagtaacagccagccatcaccctctcttcattcttcataggcctgaactaaggtgttcagggccctccttcaagcttttaggttctgatgactccaaccacttcttttgttccatcctttcctagctctaggaatggtagctgctacctgcagtgattacctgttaccttttataattccttttgaccaatttcccatattaaaatatttctcaataactaatgtgatttctgttttcctgactggaccctgattttaaaatgcacacaaaagccaggtgcagtggcttatgcctgtaatcccaccactgtgggaggccgaggcaggtggatcacctgaagtcaggagttcgagaccagcctggccaacatggcaaaaacccatcgctactaaaaatacgaaaattagctgggcagtggtggcaggtgcctgcaatcccagctacttggaaggctgaggcacgagaatctcttgaacccgggaggcgaaggttgcagtaagccaagatcatgccactgcactccagcctgggtgacagagcagactgtctcagaaaaaagtcacacaaagagacatattacaggaggttcacaaaaactttataatagaaagataattgtaagcaacctatgtctatatattggagaactgctaaataaattatatgtattcaataagctattaggcaacatttaagaagaataaggtttatctgaacacacataggaagaattctaagacacattcttaaataaaaagcaaataccaatatatacagtatgataccatttgtgtttttaaaacccacaacacaataatatatatatatatatatttatgcatatatatataatataaatacagagaataggccgggtgcggtggctcacgcctgtaatcccaacacttggggaggccgaggtgggtggattgcttgaggtcaggagtttgagacaagcctgaccaacatggtgaaacgccgttgctactaaaataca

SEQ ID NO: 1562453 - DNA, 4001 bp, Homo sapiens
agtggtgagacagtatggggaagctgagagacccatagagaaaaggaagcaagccaaagctaagaaagagcttggcatttggccaagactcagattagcatgggcctttgcctgcatgccctttgtggatacaccagggcagagccacttccttcctgtctcttggcactgcttctcctgtggcctgagtcttggccaaatgccttgtgatccacctggaacacgagaagatggagacctgcaaagagcttctccaaggccatcttcctttcacctcctgatctcacctgggaagctgtcatgaagcagtttctcatcacctccagtgttctgatgagacgtgggtcttcctgcttcaccctctcttaatagagtggcagaacacaaaaccaccgagctgcattacccaactcgcattgcaatctccaagtccctttggtttcagtgtcattctttttgatgagcagaacaatgacctcaaggagttggcacatttggctagtcttccttttgtcatctatgtaatgaataaacggtctgattctaaaaaagtgtccttgcatctttaccagtcgaatcagtcaggactttaccttagccatgccttgtctcatgtgtgcttgacagaaactaagtggagctgtgggaccaacatggtagtcgtaggccgagtctcccctcaacctcatccccactccatagataaaaggcagaagagtgggagggaggtttacagggagatgaacaaaagtaacaattatattgagaggagagtattgtttagtcttactcttttggttacccccagttctcggcctctcaatccactccttctgacccacattggaagttacctcactggtaagggattgacatggggctacctttcttgattgcatggagttaacccatttaaagtctctccttctctgatcagtgcaaagcagcaatgatgcccagcatgcctgtgctttcaccctaagccacgttctctgtagtccagcgagactctgaattccagcctcctgacccctctattttcttggttgtttccaaactcagaaagtgaataagggtataaattattgtgccctcttaagcccaaataaattcgattaaaagagaaaaaaatttaaatttataaaggaatattaaaagattttaacaacaacaaaaatatcctgaagcaaaataatgagccaacacaaaatgagtcagactccaaagccaaacaaaagaattaaaattcaacagaaaaatactgaaacataagatgatatagtaacatgaaataaacaatacaaatggaggcagaaaaagaaaagtcaggaggttaaggatttaatgggaattgggaaaattaaataataatacaaaaaaaatcaaaacacatagacaagccaaaaacattaaacaattctgacgtacaggggttaaaactttaacacaaacaaaaaatgaaaaaaacagaaacaaagtaactagaaacaaatagtgaactgagtccttatcagaatcctaagatggctcagacatccccaacccccaatcctcacggcttttagctctcctggaggctggaggccatgttttcaggcagcacctaacatgaggatcccaggcttttgaatcactataacagaaacctacagtctccttggcgttttgcaaactctgcgcaaaaaccctcttgattgctttgtgttgttctctggttttacttcacatacgtctggatggtaagaatagagaccatacctcccatgtcttaatctgtttgggctgctattgagaggtgacagcgtgctggcagtcctcacagccctccctcgctctcggcgcctcctctgcctgggctcccactttggcggcacttgaggagcccttcagcccaccactgcgctgtgggagcgccttcctgggctggccgaggccggagccggctccctcagcttgcggggaggtgtggagggagaggtgcgggcaggaaccggggctgcgcgcggtgcttgcgggccagcgtgagttccgggtgggcgtgggccccgcggacctcgcaactcggagccgcctgccggccccaccggccccgggcagttgaggggcttagcacctgggccagcagctgccgtgctcaatttctcgcctggccttagctgtcttcctgcagggcagggctagggacctgcagcccgccatgcccgagcctccgcgacgagcgccgcccgctgctccacagcgcccagtcccatcaaccacccaagggctgaggagtgtgggctcacggcggcggactggcaagcagctccacctgtagccctagtgcgtgatccactgggtgaagccagctgggctcctgagtctggtgcggacgtggagaacctttacgtctagctaagggattgtaaatacaccaatcggcactctgtatctagctcaaggtttgtaaacacatcaatcagcaccctgtgtctagctcagggtttgtgaatgcaccaatcgacactccgtatctagctactctggtggagacatggagaacctgtgtgtctagctcagggattgtaaacacaccaatcagcgccctgtcaaaacagaccactgggctctaccaatcagcaggatgtgggcggggccagataagagaatgaaagcaggctgccagagccagcagtggcaacccgattgggtccccttccacactgtgggagctttttttttctttgcaataaatcctgctgctgctcactctttgggtcctcactgcctttatgagctgtaacactcactgcaaaggtctgcagcttcactcctgaagccagcgagaccacaaacccactgggaggaacaaacaactccagacgtgccttaagagctgtaacactcactgcgaaggttcgcagcttcactcctgagccagcgagaccacgagcctgccagaaggaagaaactccgaacacatccgaatatcagaaggaacacactccggacacgccgcctttaagaactgtaacactcaccacgagggtccacggcttcattcttgaagtcagtcagaccaagaacccaccaattccagacacactataacaaaatactacaaactgggtggcttagaaacggtagaaatgtgttactcacagttcgtgaggctggaagtccgagatcaaggtgctagcagatacagtgtctggtgagggcctgcttcctggttcatagatagtaccttctagctgtgtcagcacatggtggaaaggcaaataagctcccctgggcctctttcataagagcgctaatcttttataagggtggagacctaatgaactaatcatctcccaaaaggccctacgtaataccatcacttcagggcctaagattttaacatgaattttggagggacacaaacattgagaccacagcaccttaattcttcgatctcctcttctggatatccatttggtcacccagtagttcatttgatgatgatttattgactccttactccgtgcattgtccaattacagtataagtgctggtgattcaccacctacctgctggtggagaaagatgacaaataattctgtcattacaactgtggtaagtgctatgaaggagaaacacagaagctatgagaatgacaaacagggaatgtcttgggagtcatcaaagactttctaatgaaagtgtctgcatactgaggtagaattaattcagccataagggaatagaagagcattttaggtaggaagaacagcagaggcaaagaccctgaggcagaagtggtaaagcagacagcacgaactattccaggtactggggccagaatacaagacattaatgccaaatggagaagataccagtgagacaaggaccagaacctaggcctcaaagtcactttaaatatagattaatatatattaatatgttaatcaggtgtcattttagctcctttcagttttatttcaattttattttgtgttagctatttttataagtaatat

SEQ ID NO: 1562454 - DNA, 4001 bp, Homo sapiens
ttgttgcgggaagctgttctgtggattgtgggatgtttaggctagcctctggcctctagctactagattcttgtaccatatccctggttgtgacaccccaaaatatctccagccattgccaaatatcccctgggggaaaaattgcccccagttgagaaccattgccctagagtaattactatgacctagattggtccaagcctaaagcataacatataaacttacaaaaatgatattcacagatacatgacaatgtgacataaactaacctttaaacagtttacagtttacaaagcactttcacatataagtcatttgctccccacagtaatcctagaaggagggtaattatcatcattctcatcttagtggtaaggaaattgagattcatacaagttacttgatatgaccagggttactgcctgctaagtggcagagatggaacttaaacctaggtccttctcggccgggcgcggtggctcacgcctgtaatcccagcactttgggaggccgaggcgggtggatcgcaaggtcaggaggagattgagaccatcctggccaacacggtgaagccccatctctactaaaaaaaaaaaatacaaaaaattagcccggcgtggtggcgggtgccggcagtcccagctactcgggaggctgaggcaggggaatggcgtgaacccaggaggcggagcttgcagtgagccgagatcacgccactgcactccagcctgggtgacagagcgagactccatctcaaaacaaaaacaaacaaacaaacaaacaaaaaaacctaggtctttctttttcataaataaagagaattaccttattaaatgagctatggaggggttatttctagtctttaacaatattattgctcttggtaaaaaattcagtattagctgagaaataatagttgtagagatactcttaacagattattcagtatgaaaaatggattgtgcatccataataagggaagcctatctgtagatatttacacaagttattatatgagctattatttggaaatagaagtcttatgatagtcagctgggtgcaggggcttacgcctgtaatcccagcactttgggaggacgaggcgggcggatcacttgaagtcaggagtttgagtctagcctggccaacatggtgaaaccccatctctactaaaaatacaaaacttagctgggcatagtggtacatgcctgtaatcccagctactcaggaggctgaagcaggagaatcgcttgaacccaggaggtggaggtggcagtgagctgagatcgtgccactgcactccagcctgggtgacagagagagactccttctcaaaaacaaaaacaaaaaagtcatagtgagcctgagtcagagacgttggagagatttgtaatcagttaagaggagtaaaaaaacagcacagtcgaacaaactcaggaatagtctttctcctgtaaactgcagcccctgcctggtgagaaagtgaaatcacaatcctagcacattgactgaaggagatagaagaacacccagcacgtcgtagagccattgtcctgctctgacccagatccctgcagaatgaggtgctgcccaaccagccttaggctcccatggtgcagtgtgtaaaaagccttcagaacctgagacttccagaaagtggacggaatactcacccagaggggagctggggatttccacgggcacagtaatagactttggcttcagagtgagcatccaatcgccagtagccaacttgctgacctttggattgtcctccaacatggccaaacttgttgcagagcataaaactgaaatactaaataaagatcaaggccaaatcaaagtcatgatgagacaaatgaccccgcacagaccttttgatgtcagttctttttttccctgagaagaaattgaaacctcttgcctcctctttagagagggttgttaatggtttaaatctggaaaggtttctcatcaggggaaagagcactgggcttggactcagaatcctggattccagtcctggatgttcaacagagaaaccactcagcctcgctctgcctcagatttttcttataaaaacaaagagagctgattataagaactctaggatttctaccacttctagaattctaccctttaccaacatcttaaatttgcatttaatatactccccacttgggagacaccatgcataaaattacagaaggcaggatttggagtcatgcaggcccagcttgcaatcccagctctgcagtattctagctggattatgttagacaactcccctagccctccccatgctcagtttcttcatctttaaaacaaaggtgataacaacagtatccaactcaaaaggacttttgtgaatattaaatggaattatatgtataaacaattaatacatagtacctggtacataggaagcactcagcagatgggagttactatcatgtatttgagaatggacaggccaggtgcagtagttcatacctgtaatccaagcacttcaagaagccaaaagcaggaggactgcttgaagccaggtgttcaagaccaacctgggcaaaatagcgagactccatctctatgaaaaaaaaagaaagaaaaacttagctggatgtggtggtgcacgcctgtggtcccagttacttgaggggctgaggtgggacaattacctgggcccaggaggtcagggctgtagtgagccatgattccaccactgcattccagcctgcgtgacagagcaaggggctgtattgaaaaaataaaaaagaaaaaaagaaaagaaaatgtacactcaggaaaataaaattgaaggacttttattaagagctatacctcattttgtgatggagggaactagagtgacttaaaaatcaactggctaaaaacattctattttttaaaatctcaaaactgtaaacgacagtctcttagagggaacacaggccatctcatgtttcctgcatgattcaaattggtggataattagtcataaagattttctgagtaaacagcaccatttggtaatacactgttttctgctggtttggttagggatggagaaattgtgaatgaaaaaggaatgtatatagatgtgttgtccagtacagttgccactggtaccatgtggctattcacagcttaaaatgtgaccagttcaagaggagaggtgctgtaaatgcaaaattcacagcagatttcaaagatttggtaccaaaaaaagtaaaatattcaataaaatgtttatattgacaaaatgttgaaatgataaaattggtaagttggagtaaataaaatattttaaaatgaattttacctcctttttagttttttaatgtgactattaagcaattttaaattacatatatggcttgcattatatttctattgaccaatgcagtatagagaggaaaaataagaacacacatacacaaagagcaagaaaaaaaacgaagtcccggggatgcagcaattttaaaaaaaaaaaaagtgaggaaggccacaggcttgatgatcctggctccatgcaaaaaaagtcactaaaattgatttttctattaacaaagaagctgccgggcgcggtggctcacacctgtaatcccagcactttgggaggccaaggcaggcggatcacgaggtcaggagatcaagaccatcctggctaacacagtgaaaccctgtctctactaaaaatacaaaaaattagccgggcatggtaggggtgcctgtagtcccagctactcgggaggctgaggcaggagaatggcgtgaacccaggaggcggagcttgcagtgagctgagattgcaccactgcactccagcctgggcgacagagtgagcctctgtctcaaaaaaaaaacaacaaaacaaaacaaagaagctaatagagattgcattccctacgccttttacgtatttcattttgtaacatttggtagaagaaagaaaagagaagttgtgccttcctcacttctttcattgaataatctctttt

SEQ ID NO: 1562455 - DNA, 4001 bp, Homo sapiens
tatctgttatatgatgaatatcatatgctttaaatatctgattaactacctgtaagtctaccaaacatttctaaggatgcacatcttaacactctataaaagcaaagacaagactcaaaaacatcctatagatattctactccagctatcaaatcatcatttaattaattaaggtagaatgaatggaaaaaaaacatcctgcagataaaatggaatgggcaaaaacacatgaatatttctggttataatcagagaacttagcccaaatatattttaaccaagatatttgataatttgatgtctataggggactaggaaaagatagttataaatacatgatatctttcttatttaaaaacatatatttaacttttctatttttagtcccacctcccctaaaccctctactttccttctcatgtagacagtaaaccaaaaaacctgaatgatattttaagggaaatagctctaaaaatggcaaagtataaataatctctttagccatccttaaagagattctgggaaatgctttagcaggacattttctcacagcacggtttctgactttttcccataactttcctctatctatctaaaaatagtgtccagaacactgaattttgtttttaaaagtatttatagagccaaagccaatgcatatatatatacatgtatatttagacatacatacatatggaatcatcttacccagcatatgaaaaaagatcaggcttatattaaaaccctagtatagctttggagaaaaaccagcaactgtttattatccagttagaatcataatttggcccatttatttagcactacaagtagcaatgcaccaaaaagctctccactgtccatatcatgtaattctaagttagaaagaaatagtgacatgaaacatttaattttaaaaaagagtaatataaaatatctgttatttgattcaggatttgttttatcttaactctgccacccttctgtccagtcttacctgctcagaatcaagcattttgttagccacctagggaatggcatggattgtctcaaattcaacagaagaaaccattaaaattcccttaacattttagctaaaaagaaaagttttactgttatgcattgtacaatcaccgaatcactttagcataacatctaaggatggaaagttgcactcctcttttggctaaatcccccaacactttcccgcaccaagaaatcaagtacaagaggtagaaatttgcctcaaggattttgtaaatagtcctctggtatggtttccagctacaggaaatggaattaataaacacagctaattagagtccctcccctccgctcaatggagaacatctgtctgcctatgaaaggatggtggcaagactgagtggactttgagttccacaccatgttgaccacaaatgcccctacaccaacttgccttttcatcacaccgtctggggaaacgaaccacaggttccttctcttggctacaggctgtaacagagctttggttaagttgctgctgatctgagcatttagttcagttttcacacctgttggcttacctcacttagttgagtgtctgcacttgtgtaacccagagccagccactgccttggccagtcgttgcctttgtggagtagagactcagtgagagaccaggctgcacctgctgcatagcagccactgacaatctgaggagcggagacagctgtcagggcagcacgctgctacctgctctgccccagaccccagcgtcccacgggacctcccttcccttcccttccgcttcccttcacaacccctctctcctttccttgcctctctaacagccaggatgttgtcatctttctagaaaaagcaagagcaaaagaaaaccctcctcctgtcagaggcattgataaacagcaagttgtggggagtccaaatgttttaattcattagtcctggcaaacttaaaatacaaacagacttgcttcacaagacaggaatgtcttcagcgtgacccaatcggtgtctgtgtctattccagcaaactggcaaagatagcatgactccagtcagcaaaaatgtcggccgctccaatcagctcagccagacccagccaacttggacaggccacaggctgactctcagatgatagcagcgaggatcctggttaagaatgtgaggtttgaggttgagcccatgttgggcttgatgactcgattcattcttcaaatgcaaccaaccacaaaaggagtcaatggtaaataagaatacagcattaggatttgtcaacctttttaaaaactgtaaacctggatgtcattggtacttaaaaaataattggattgtgatttttgaggttaaataagcaaaataaatattaggagaaggcaaacacaagccacagactgaaagaaaatatgcaaaatacatatcagatgatggactggcatccaaaatatacaatgaactcttaaaattcaacaacagaaaaacaaacaacccaatcaaaaaataggcaaaagatctgaaagatatctcactacagaaaatatacagatggcaagtaagcatatgaaaagatgatcaacatcatatgtcattagggaattgcaaactaagacaacaatgaaataccactatacacctattggaataacccaaattcaaaatactgacaacatcaaatgttggtgaggctgtggagcaacaggaactttcattccgtgctggtgggaatgaaaacataatagtatatcccactttagtaaacagttgggcagtttcttacaaaagcaaacatacttttaccacatgacccagaaatcacacttcttgttatttccccaaaagcctgcatacagatgtttatagcaggtttatgcataattgccaaaatttggaagcaaccaagttcttcaataggtaaataaatcctggtatatcctgacaatggaatatcattcagggataaaaagaaaaactatcaagccacaaaaagatatggaagtatcttaagtgcatattactaaatgaaagaagctaaatcttgaaaggctacatgctgtataattccaacaacatgacattctagaaaaggtaaaactgtggatactgtaaaaagatcagtggttgccagggattcaggaagagaaaaaggaaggatgaataggtggtgcatgagggatttttagggcagtgaaactattctatatgagactgtaatggtagatacacatcattacacaattgtccaaacccatagaatgtacaacacagagtgaaccctaatgtaaactatggactaataatgaataataatgtatcaatattggttcattaattgaagcaaagatgttaattaggggttagagggatgaggaaatatatgggaattccatacattttactccgtttttttctgtaaattgacaactgttcaaaaggtattaaatatacaagtaaaaggactcagcaggctttcttaatctaatgaatggaaggctaatttgttatgatatatacaacaataaagctgtacagactcagacaattaaaacattcacatataagcttattcttttcaggaattaatattactgttttaatattattttatggttataataaaacttactaatgcattataatttatcgaagtgaatttcttattcacgacctcattttaatcttccagaagatcctatacaatagtctttgtcagtattgccatcccgatttgacagatgagcaaattgagacgcagacaattcaaataacaggcttgaggatgaatgaccataatagaattaagaacccagataggatccaggttttctaattattagttcaagctacttccactacaccaggatgcactccgtatcaaagatttaattggccgggcgcggtggctcacgcctgtaatcccagcaatttgggaggctgaggcaggcagatcatgaggtcaggagatcgagaccatcctggctaacatggtgaaaccccgtctgtac

SEQ ID NO: 1562456 - DNA, 4001 bp, Homo sapiens
tacagatacagtacacatatacatatataatagagatacagtacagatgcatatacagtacacatgtatacagtacagatacaataagatatgtacagtacacatacagatacaatacagatacatatgcagtacatatacatatactgtacacatatatatgcagtacagtacatatacatatacagtacatacatacagtacacatacacagtgcagatacatatacagtgcatatatgtatacagtacagatacagtgcatatactacatatgcagtacacttatacatatagtacacatacatatacagtacatatacatatatagtacctatacatatatacatttacagtacacatatgcatatacagtacacatactatgcatatacagtatgtatgcaaaatataaggtgaaaaaataatttaaaaaccaaagctattttaaattataataaagcaagaaaagataacagtttttatgttttcatagtcatcaccaaatttcttgataaaaacttgttggtgttctttttgaactagaggaagtgacatgggccacatacaatgtggaaacaagtatcctctcccaatgtgctgatagtacagtccagaataaaatgcagtacacaaggcatttctggcatctaaggcattgaaagcatcgaagataatcaccaaaaagataatttaaacaagcatggtattcactttgaccaaacccctcaagggtcatatcacttaatagtctctggtatattttagtcaagagtagtataacaatacttccatttaaaagtagtttaaaataatgacaatgcatcaccaaatttgaatctgttttgtatctgctcctatgctagacaatgggtgtcctcagattcagtgatatcacttaactttagctcacagaacaagtaaaaactgagaaatttcccaagccccttgctgcaggttagaggacagtcttcagaggaactgagattcagtcccaaggccctttgaatgctctacttagaccagaagtgacaaattctgccaattactgtgccttgttaaatccaccccaatgtttgcaaagaattggacaaaaggcaaaaataatacacttgtcaccactgaacctttagaggtaggcttcattataaaacctatgctttgtgaaactgattttgttcttaagtgcgtttacattcactgcagtacaagtttaataacctagacatcacgaccattttagctcattgggtccaaggccagaatgatttggcaaaggtaaatgggaacacactgtacttgtgcatcccaaccctaataatcatagacaagcaggcacttgttggaaggagaaaccactctgtaaagtatgagagcagctgagacattctagaattctagaagacagccaggaatgaatcttaaggcttcctgagacttaatccaccttgccccctgtgaagtcacactccttcctgcttaattattaaaaaaaaaaaagttatccatttactttactacagtaatgtaaatagcaaacacctggtatcaacagacttaatgaggcccgttgtggaaatcgacgtccttatttatagtcacgccatgtcacctcacacatatgtgaccatactgataaacttacagataaataaagtagcttcaaattggactccttgagttgaaataaaagtctaattgattaacgtagaaatcaacatacaatagatgttttagagagtcaagcaaaataaaaagtaagacttttgttaaagaatggatcaagttggattaacccaagcaggaaatagcagcggaaacaagaaaaccaaagacagatgtatgaagcctaccaagtctgaaagccaggcctgtatttcactgtttgatgccatctggtttagctggcatccctaccagccagaagtttcagggcttgcgaagctgcttacaaagctgccccaagttgatgtgtggtgtgtttacttttaaacagtggctgccttctttgactggttttaaaaataggcaaatattctaaaagcaggatgatgaatcactggattgggccaaaaggaaagaaggaaaatgactcatgctgacttgtagcacagctgttccaaaaacatttggctgaatcgttgtaaaacattttgacagtgataccggatcggagttcctgacagcagttaagtttgttttgacaattccagaagcataaagtagactgtacagtagctgtacaagagaccctctagcaaatttagcttttttgaaaaaaaaaatagttgcttgatatgtttataatgggacaaaatcacagcacaagtacatttttattaaaatttaccaattatttattgtgcaagacagggactcagacttacgcaaattggcaaatcactttatcatatttttaatgcattaaggaagtaatttgaaggcttcttcttcaaaatggcactgtagacttactagaccaagcaaaatgtatcctaagaaattttttaaaggatgaaatataaaggaaagaagaggaaaattttttatataaacagatgttcactgcctgtttggcaaatacaatgtgactaagccaacgtccttaagctagaactttcttactgacagcccaaccattatgatgtaccatagtacatttgatgatgggctcttttcaacatctattgagcagctgttgggttggtttcaggattattttgtttgtagattcccttcaattgtcttctctgtgtttctccataacttgaataaataggacacattgggtctgtaatccaaatcctccctgttatttagcaatgatagctagcaatcagttaacagagaatattgaagctggaaaggactaggcaaccatctggtccagccccctcagagtagagctaaagacaaggaccccaaaaagggaaagaagccacccaagactccacgattcgtggccatgtaagactaaggggtgtcccccagccctgggctctttccaccataccactccgctcttcttcacttactagtccataggttctcagactcgtatttcatgaaccagtaaaattttccctaaaatattctggctgggcacagtgactcatacttgtaatcctagcactttgggaggcccaggcaggaggatcacttgaggtcaggagttcgagaccagcctggccaacatggtgaaaacctgtctccactaaaaatacaaaaatcagcctggcttggtggcacatgcctgttgtccctgctactcgggaggctgagacagaagaatcgcttgaacccaggaggctgcagtgagaactggaggttgcagtgagccaagatcaagcccctgcttgcactccagcctgggcaacagagctagactccgtctcaaaaaaaaaaaaaaattccctaaaacatggggaattatgtcttaagagcatccaactttttatttagctagtgaagatgattcaaaaatgaccaccggatatcattagtatccctttaggacagagagaacatttcaacaccaaaatcataaggcaatcatagagtaaaggagtggccattatattacatacatttagctttacagataaaaataagcatatacccaaaacacctcactgtcgtacccttctttctttctttatatcagaggggtgaaaacttcatcaaagccagaccaggttttgagaaccactgttctaaacagcatcttcactgggttttacaatcaatcatctccccctcccactgtgctccccatcgtagacataactgggatgtaagttgagacgccctaaatccttgttaaaaagtgtttaggttgggccacgcggggtagctcacacctgtaataccagcactttgggaggccgaggtgggcggatcacctgaggtcgggagttcgagaccagactgaccaatatggagaaacccagtctctaccaaaaatacaaaaattagccaggcgtggtggcacatgcctgtaat

SEQ ID NO: 1562457 - DNA, 4001 bp, Homo sapiens
acaactctcccagcatttctagagtactatattctgtagggacctagaatatgccaagttatgaaataaatagtgctatcccagcctatgctaataagatatttgagtactttctctatattatagtaagcaaacaactgagggaccaaaaaaaaaaaacaggttttaaagtgacaaggttcaaatctagggtaacaaatggcaagatgggagtactcacatgatcaaagaaatgtaccactgcaagctttttgctgcgcctggtaaagatgcgctgcactttagcaattttgccaaaatggttctccagaatggtcctgtcgttgaggtagtcagggatgttcttgcactggatggctgtgacttcagagggagacaagcccccaagactgtctgtgctctcgcttctgttactctgacgcgccggagttcctcttagagaatctaggggttcagagaatggacacttaaaccatcagatgtttccaacaacaggaggcaccaactgtgtcgaagcagaggaaattttcagatgtaagacctgctccgatgacatgttagaatccctaatgtttatgggagatttatctgaaaaatcaagctaacacccagagaaacgtattgaaaacctgcctgcaggatttactctatgtgctacattttcagagctcaccttctttcttctctctactttcagtttcttcctctttattcacacctggaatccgggaaggtgccaggacagactgattccctcctgggatagccatgtggtcactttctgcagactcaacaaagccagtttcctttttggcctccttgttgcccagacgacctacttccttattgcttttgaaaacatcctgtatcgtccgaccaaataaagtacctccccggggtcgattcaggcggacaggtcgtttgtctggaggatgatcgccccgggacagaggatccgaatcttctgctggctcgtggccatgtctccttggggagcgatcctggtcctccttccttttcagtcctttcattaggctgggaagtggttccacctgggaaacagcttcttcacacccctgcctgacacctgctttgctagcctggaaaggttcgcccaaaaccgcagatgatacagggaagctactgaagctattattagaacttccaaatattgacttaggtcctctcttctcttcctctacattttggtttgacaaagcaggggtaaaggcagataatgaattattactactaacaggttttgaaaaggtaaaatttgaagtggtagctgaactacttgttacttgaggaaaagagaaaggggccaggcctccaggtgcactactaattgggtgggaaaatgtaaaaaacccagaagcaatttggctctgggttttctctggctcagattcagcccccagtattggtttgaacactgcattttccagaggtttaaagctgaattctgttttcccaaaaccagagttcactatttctccagcttcttgtccaaaagcagaagtgcttgggaaagccccaacactggtgggtgatttaaaactaaatcctgtgtttcccagcacagatgaacttgaaggcccagaggtagccacaaaggtggaagtgtgctcaagtccagaaaagggtccaacacttgaggtttgggtgaaccctaatgtttgcactgaagaggaatgacttactccagaagacgctggaaagctggatacctgtgaaaatcccgagctcttcccagataaggtactgttttgtccaaaaagagaaggttgaccaaatcgaaatggcggcttagatggaagtgttcctacattactagaagacgccgaaaaagcactaggctgctgcccactgaaaggattagttgggttcatcttctgctccaattattagaaggtaattaagtattatgtgtacaaaattaattggcttcctgaaacagcctgtagcactagggagttccccttcgtctttagaacaagctgaaagagaaaaattcagatcatcatagctatgttctgctacaagtctaagaaaagaatttttgaacactgtcatactaaaaggataactatttcaaaggcaggcaaagggttattattttctgagagccgataggttattttgttggagggtggggtagagagtggtacaaataattactttgttacagaggtttaaagcgtgatcctttaagattaaaaaaaaaaaagccgaatctttttactgagttagtaaattcatgaaaaacctccattggcagtaagaaaatgaatgctgttccaccttacaacttagagacgaatttctcccgacttcctccaatctctacagccggagaattcactgtaacgctgtcaaaaccttagcgtttcgggatctcctcccacctggcttccctcggagcggctggagcgctaagcactttctcacattccttcatcgcgccctggcggccaccctcgagcgggctggaaggacgagggcgctgccacgaagctgaggcctctcggcggggacggcgtgcccggggagcctaatcttccacccagcacagcccgaaacggcggaggccacgcgctgggcccaggccggcctggccactgtcccgccccgggctcgccaggggtcgccggcgccgcaacgctccgttagcgacgatgtggaggcccgggcgcgcggagctgcgtgggggaaggaaacggcgcccctggcgccggcccagcccccacgctcaccgtctcgccccaggaccccgaggcccgcgctgcccactggcccctcggaaagacttgaggcgcaagcacaggctgctgccgcgacactcagcgctgcgcaccgcgggcagaaaacgccgcggaccgacttccggttcgctcagcactaccggattccgccccgcccgctgcgatccggttccgctccccacaacccgctctgtggcggggcttccggtcgggagggtccgcccgctctcgcgtcctttgctgggtccagacaccggtacgtccgggcgggtttttagtctcccaagcgagagcgtcgcattcacccgcgtgggtctgcgggcgccccagaccccagaggacccggcccccaacgcttacctgtcccctctcctgtccctcccccattccagccccttctctccccagccgttgcccctccccgcaccccgccgcgtccgcgcgcctctctccgcgcgcacccccaacccgcccccttttctctgggaaccgctccttccgctccgcccgcctggagtccttctggccggattccgcggcatccttccatagaccctcgttgttgcttcctccttgtggtaaatgtaaattcccttaagattttcaatcagttccaccaaataaagtgatctgattgcgcgtgcatctgtatttttacagaccgtattatcacttgtactgattggtcttctcttacactttaaccccaggttccgttgcaaacatttttaaagggctggttattcttcctgaaatgagtttggtgattagaaatctgcagcgagtcatccccatcaggagagcgccacttcgcagtaagatcgagattgtaaggaggattttaggagtgcagaaatttgacctggggatcatctgtgttgacaacaagaatattcagcacattaatagaatctacagagatagaaatgtcccaaccgatgtgctttcttttccatttcatgaggtaaaaaaaaaatgttcctcttcttgtctagcccatcttcccagagtaaatttcctgtcgttttgttttgttttgttttgttttttaattgagacggagtcttgctctgtcacccaggctggagtgcagtggtgcgatctcggctcactgcaacctcccttcctggttcaagtgattcttttgcctcagcctccccagtaggtgggaccacagatgctggccaccacgcctggctaatttttttttgtcagtatttttagtagagacggggg

SEQ ID NO: 1562458 - DNA, 4001 bp, Homo sapiens
taaactaattcaaattgggtaaggaaggaatggaaatgaatccgagttcatttatttgtctttactggggggtgtggggaggtgttaaatcctattatctaaatctgataaatcaaaaaatgtatagttctttaaattttaaactactattttagaactatgttttaaatttaaaagctattgttataaaaattaaataacaaaaacagtctttctataagtaacgcaaaacaacgaaaagagcccacatggcaaaaaatacactctatcgaaacaaacaaataaaatgaaagatgtaacatcaaacacgttattccttaaaaacatgtaaacaagggaatctcattcaaacaaagagcttttcctacctaaccaaaaatctgcttttttcttttttttcttttttgagacgttgtctcgctctgtctccaggctggagtgcagtggcgcaatctcggcccactgcaacctccgcctcccgggttcaagtgattctcctgcctcagcctccggagtggctaggattacaggcgcacaccaccatgcccggctaattttttattttggcgaggctgatctggaatttttgtatttttagtagagatggggtttcattcaccatgttggcaaggatggtctcaatctccggatctcgtgatccgcccacttcggcctcccaaagtgctgggattacaggcctgaggcaccgcgctcggcctggtttgattttgataggtgcaaagagttaatctcaactttcagttaactactggacactggtgtgctcctttattcccagtattacaccaaggaaaacgttccagaaacgtcgataagccggtggtgaattactgccatcggaacatttacggcattcaaagacagaaaaaacttcatcttgaaaaatcacaatccaaaaacaacagccattcttacaccaattcataaaaaatatgtgaaccactttatccctaaatactgcaaaaacatcaaaatgagggaacagtggaacaacagaggtaagaggtaactgctagaaccaggattagaaactaattcctgccttcttctgaactcttttgctacatcctccttcctcgccagttttcatggggttgttggtgcttttattgcaagtttccttccctttcttccctatagcactgtgttccgtcaactctgcggctctatcactggaggctgtagaggcatccgctgatacaccaacagcctgctaatttctatggggagtaatagtactggctgcacctcaagtgcttacagtctagttgaccatttgtttctctttttttagggtctttaaaagtgttattctttgtcgccctttgtttctgagtaatgctcacgatgatgctgattcaaccactgctcttctgggatcggggaccccagaaaagaacccaccgcccgagagccaaagtggaggggtgaccctcctccccttttcctgccacagctcacactctcagactttttgctcttaaagtccctgggcagccccaaggagcccccgcctcctcccgggccgcccacgcgcggcacccctggaagaaggcgaccccacgccccccctgcccggctcgacccaactgacagcgaagcaggatgcagttggtgtcctcctggctggccacccagctcagcgagtcgcccagcggccgccggcagccggagcacaggaacaccagcggcctctcctccgcagccgccgcctcctcctccagctgcgccctctccatgtcggccaccgacgcgtcttcgctcatggagctccacatgctcgcccacttctgcaacagctggtggcggctcgagtcttcggagagtctcttgcccaacagcgaggagtcgctgcatttgcccttgtcgccgcactcacagccgccagcgcatcctctgctacacctcagtgaccgaacgcctgccattacctacaaatcgcccgcgccccagagcgccatgggaaaaaaaaccgccgctgctcatgcgcggggcggggagcggtggcggaggccgagaaggggcaaaagcctgaagggggcgggacggcgggcggcctctagtgcgcatgcgcgccgtgcggccttggccaagcgtgatagtcactgcgcctgcgtcaggttttccagcctgaagaaattgatgatgcagacctgtttgcttgtcttcctaaggattattcacccctttccgtgggaggggcagcgtcactgagaaagttacgggttgcaagcttgagtgtctaagaaccgcctggcgagcttcttaagcagatcgccaggttccatcttcgcagactctggttcagcaggtagcaggttagcccgagaatctgcatttctaacaagctcctaggcgtgcccacgctgtcagtattggcagcccaaccttttttggggggtgggggggggagtttttctatgttgccggtctcgaactcctagccttaagcgatcttccctactcggcctcccaaaatgccaggatcgcaagcgtaagccactgtgccagaccaccaccctttttcttcttttttgtaagtggactaattatagttgtatataagcagctccacttttgatgaccactgctctattttgtcggctcctggggacctcctttccatgaagtggagaaggaaggggatagaggagtccctcatcacagggtccttttgcgcactgctatccctggaatgagaccctgggaagggccccggatcactcaggctgtcactgcaaggaaaaagttgaggaagcagcagtgcccctggaaagcctggaagtgtccctgctgcttggatcaaggaacaattcgtccttgcaaggaagaagcatcccttgttgatgataaggacagatttcctcagctgccccagaaagccagcctctgcctaaaacaccgtaggtcaggagggaaagctggcggggaaccagccagctgcaccacagacagtctggtggtatacctgggaagaaagctacctgcaaggacctactctgttcctactacgctctgggtgtcccccaagtcactgcctattttgcttggttgcataaactatttatgtaaatgtacttccaattttagtgcttacagccactagcaaaaagcaaaagctttggagtcagtggtcctggttaacttacccctccctccacaaggtagtaacagtgtagggaactgtggaaaaggctgtttgccttccctgagtctaattcttcatggagtaaatggagtctgtttcttcagtactacaccaagttgttcatgaggatcgagttttctaatattcatgaaaatactttgtaaaccctggcacaccatgctcatgttaatcaccttcttactggaagaaaatgctttagataatttaggctttttttttttacccatagaattcccttccttccttctgcttttttttttcttttctttattttttcagagatgatgtttcagtatgttgcccaggctggtctcgaactcctggcctcaagcgatcctcctgcctcagcctcccaagtagctggaactacaggcatgcctcaccatactttgccccttctacttttgtagagccaagcctgaccttcctggactgttgttttcaagcataatatctctggtacaacattgatacaatccacatgagttctttaagtaagtggctagttacttggggattcaaaggatcatcttgtctcagactttgggttcctattgtcaatacttaaattctatgataggatgccccaggaaagaaggaatacaaggccgagctgcgtggtgactttcaggggccctatttttgccttagtaggcctttctctccataaaacagttaataaaaatttcattttatagtcacattgctatgaagatgattatattaaaatgatatcataaaacatttttagacctgtaagttcatttattgctcttgattaaaaaaattgaaacattttcatggtccttca

SEQ ID NO: 1562459 - DNA, 4001 bp, Homo sapiens
tatgtcactaaacattcttctttttttctcaaccatttacaaatgtataaatcactcttagccttcaggccacacaaaaacaggtgctgggctggatttggcccatgagctgtatgtagtttgccaactcctgacctaaagcaaaagcaaagaggctgcagatgggagatttctgtcagtcaggttcccaacagcccatattacccacaaaacaaagacccagcacatggacagcagctacacccagagtgcccgctaacaatgctggtctctaaacactgaccattatctctgcttcctttctcccctcaatcttgaagagccagagtctacaagggcctgggggcgggaagggagaagagaatcaaaggacagaaacaggaaatcaactcactccgtttctccactacaggtttctgggcctgaacaagactcaacctcgagagaggaaggagagagaagtggggaaaggagataggggaaagagagggggaaaagggagggagagagaatagagattttaaactaggtaaggccagactttacaataccttaagctaatgggaaagcgttagtcaacccagattcacacaagtggggaataattaatgtttacactcagtggttaaaaaaaaaaaaaagaaaaaaagaataaaattgtcctctattttcaaactactaaagcctagctcactcaataagctagttacataacgaaaggatggacctttatccagaatacgtaaagaactcttacaaatcaataaagatcctcccaaaagaaaaacagaaaatggtcaaaggatatgaataggcaattcaaaaaaacaaaacaaaaaaccacaaagactaatacatgcgaagagctcaacaacacaaacagtcaaggaaacgcaagtaaaagcaaatatcatttcacaaatatcggactagaaaaaatttaaagtccgtcaaaaccaggtgttagaatctgcctaaacgaatgaaagtcccagagcaatgcaccaattattcactacgtgtttgtaccccaaggagtcactacccattcgaatgttaaaattagtggcactagggcagtcattctttggcaaaagtcaacaacctccagaaaagaggaacatttcagcataacatcaactgcgctcacaaggtagaaaagttttttaggataatcaggtggggaagccacgcccacatttcctggacgtgagatttcaagttatcttgtgtgaccgctccctacgatttaagatacaagaaatgttcacagggtttccaagaactcgaaacgccccaaaacagacgcaacgcgggataaagaggagagctcgagctcagcgatctagggtctgggccccaaggcttccactgccaaggaagctgcaggcactgacaggcatcaggcacactcatcctgactccactcgcccgcaggcaggcccgcagccccgtccccccgcccccgggacgtcgaggccgccggcgtttctggacgcggaacccgctccctcccaccacgacgcccagcggacagaagagggtcaggggccccgcggccccgagagcagaccgatctcccgccgaggcctcgcccgcggacgacagctgctgggagactaggagggagctgggaggaggagccgcgaccctggcccgccccgaagcaaaacagaaacacaatgcagaggcgacggaacgcagcccggcccgcagccgagctgttccgccgacgggagcgagatggccgccccctccccgggccccgccgcagcccccgccgccgcgtcggccccacaagccgccaccgcccactgccggccccccttcgcttgcccgcccgccctcctgggacacggcccgctccacccctcgcggctgctcaccgcgctgaggcgtatcccgcggggtggctgcgccgccatcttgagcgagctacaaagccaggaacggcctccgccgcaacccgactgggaggtggcggaacgactgtggagccctatgggtaccgcccacttccggggaggggcgcacgtctggcccctcccacccacttccgcctccaggcaatgccgaattgggagcttggggaagatgaattgcctgactggttaaagcagggtacagtgggagctgagcttccagcgcggggccctgcgggcctagggcgcatgcgcgaggcgcggccggcccgtacccgtctcgacacccagctggagctcgagactcggggatctagagtttgaagcctggcgcgagatgcggtatacccgagaccggtgaactccagtcacttgacctggtcggatgtgaattgcgcagaaaaaagccattccatatccaccagtgtccatgtgaaaccttaacgaaataaagacggaaattaatgtagactgtttggatttgccctgaaaactatcaatctaactcatgatttaaaaaaaaaaaaaagagttctggggccgggcgcggtagctcacgcttgtaatcccagcactttgggaggccgaggtgggcgggcggatcacctgacttcgggagttcgagaccagcctgaccaacatggagaaatcccatctctactaaaaatacaaaattagccgggcgtggtggtacatgcctgtaatcccagctactcggaaggctgaagcaggagaatgcttgaacccaggaggcggaggttgcaatgagccgagattgcgccattgcactccaccctgggcaacaagagtgaaactccgtctcaaaataaataaataagagtcctaaaggcataaggccggtgcagtggctcatgcctataatcccaacacattgggaggtcgaggttgggggttcacttgataggggttcaagaccagcctggccaacatggtgaaaccccatctctactaaaaatacaaaaattagctgggcatattagtgggcgcctgtaatcccagctactcggggggctgaggcaggagaagtgggtgaacccaggacaaggaggttgcagtgagcccagatcgcgccactgtactccagcctgggcgacagagtgagactgtctcaaaaaaattaattatttttagaaagagaaattggctgggtgcagtggctcatgtctgtaatctcagcactttgagaggctacattgcgagggtctcttgaacccaggagttcgagacgagcctgggcaacacgaggagacctcatctttacaaaaaaaaaattgaattagctggcagggcgtggtggctcacacctgtaatcccagcaccttgggaggctaaggcgggcagatcacttgaggtcgggtgtttgagaccagcctgaccaacatggcgaaaccccatctctactaaaaatacaaaattagccgggtgtggtggcacatgcccgtaatcccagctactggagaggctgaggcaggagaatcacttgaacccaggaggtggaggttgcggtgagccaagatcacaccactgcactccagccgggacaacaagagcgaaactccatctcaaaaaaaaaaaaaaattaattgtgcttgggggcgcacgcctgtggttccagctacttgggaggctgaggtggggaggactacttgaccctgggagactgaggctgtaatgagccatgttctcaccactgcactcagtctgggcaacagagcgagactctcgtctcaaaaaggaaaaagaaacaaaagagaatggatttttttttctttttttttttttggagaccgagtctcgctctgtcgcccaggctggagtgcagtggaatgatctcggctcactgcaagctccgccttccgggttcacgccattctcctgcctcagcctcccgagtagctgggactacaggcgcccgccactgcgcccagctaattttttgtatttttagtagagacggggtttcaccgtggtctcgatctcctgacctcgtgatccgcccgcctctgcctcccaaagtgctgggattacaggcgtgagccaccgcgcctggcctggatt

SEQ ID NO: 1562460 - DNA, 4001 bp, Homo sapiens
tctaagataataatgacatacttatattaacaaatacctcaaagtccttgactgttagcattgtttttcttctccctttaatttgtaacccaagtcttgaaggtgaagttcttttttctaggatgttttctattacattagtgatcatcacaactacagattgagtgtggagagaaaggtagaagggagaaatctagagagggagacggcacaaacgtttattgaacgatgacctggacgaggtgctttaggcaattctcacaatactatggtctcaggtggtgggacctcattttccaggcaaagagctggatacagccagatacagccgtctccaggccctgctgtttccagtacccctgagatttgcaacctgggtgcattagtgtgctatggctgctgcaacatgttactagaaacttggtgacttaaaacaacatagatttggtgtcttaccttatgtcaatttctattttttttttgccttacagttctggaggccagtagcctgtaatgagtcttatgggactcaaacaaggtgttgccaggactggttccttctggaggccccaggagagaatctgtttccttgccctttccagcttcggggggctgtcctcattccttggttcatggcccccaccacactgccgtcctcccctgctttcattatcacatcaccttttccctcttccgtagtcaactctctcttcttccaaagctcctcttcttataaggacagttgtgattatactgggtccgtgcaggtaatcaaggataatttttccatctcacaatccttaatcacatctgcaaagtcccttttgccacataaagtaaaatgcacaggcttaggggactagaatgtagatatttttgggggccattaatcagcctctgcactgggcaaacaatgtcacatcctgggaatataaatcctcaaaataaacacacttctttctggagtgtccatgtttttattaaagatttttgctataaaagttacattttaatggctgggcatggtggctcacaccatgcccagccattgggagccaacatttgggaggcaaatgcaggtgaattacctgcaatttgggaggcaaaggcaggtgaattacctgaggtcaggagttcgagaccagcctggccaacatggtgaaaccctgtctctactaaaaatacaaaaatcagtcaggcgtggtggtgcacacctgtaatcccagctactcaggaggctgaggcaagagaatcgcttgagcccaagaggagaagcttgcagtgagccaagatcacgccactgtattccaacctggacgacagagcaagactccatctcaaaggaaaaaaagttacattttaatactgaaacaaacataggtgtatatcagagtacatgcaaaatttgcataactttgataaaaactcaatttttatcatagataatttcaacatttgcaaaagcagtgagaaagcataattaattcacatgtaaccatcactcaacttgaacagtttttatcaaatcatggccaaggccaatttagtttcatctgtaaccctacccacgtctccaaccctggattactgtgaagcaaattcaaaatatatcatttcatctgcaaatatttctctatgtatctctgcaggagggcttttttttttaaacaaaaccatattatcccacctgaatattatttaattgaatcaactatctagtcaatgctcacattttccttatttgtctcataatttttttacagttaatttgctcaaattgggagcaagtaagggccatgtgttgcaattgcttgatgggagatgtgtctctgaagtcttgttaaatttacaggtatcttctctttcctattcttactctctctctttctaataaacctttttttttaaagagcggttttatattcatagcaaaattgagaaaaaggggcagattttctatatacctccagcccacacacctgcatagcctccccattatccacctgctgcctcagagtggtacatttgttacaactgatgaaccaacaatgacaatgacacatcattatcacccagagtccatagtttacattagggttcactgttgttgtacattctacgggtttgggaaaatgtataataacatgtatccaccattatcgtatcatacaaagtagtttcactgccctgaaagtcttttatgctgcacctatttatccctgcctagcgtcttccaacagtaaataataagaagcttaaaaaaattatgcatttctgaggctgggcacggtggctcatgcctgtaatcccagcaatttgggaggccgaggcagaaggatcacttgaggccagaagttcaagaccagcctgaccaacagggtgaaaccccgtctctactaaaataatacaaaaattagtcaagcatggttgtgcacacctgtagtcagtctcaactactcaggaggctgaggcaggagaatcggcttgaacccaagaggtgaaggttgcagtgagccaagatcatgccactacactccagactgggtaatggagtgagactctgtctcagaaatatatatatataaaatgcatttttgaacttaaatctatgtacattttgtacatttcttgtcctagaacaagcttgccataggccacatgtggcccaggatggctttgagtgtggctcaatacaaattcataaactttcttaaaacattatgagattcttttgcattttttttaaagctcatcagctattgttactatttgtgtattttatgtgtggcccaagacaattattcttcttccagtgtggcccagggaagccaaaagattggatacccccgcgaaccttgaattcagtcatttctccaaggaatcccagttcttagtagaaaatggtatttagctatcatggtctagatgataggggtgcttgttgctactgggttggttataatgtttagaccaattcaatgtagagagctagaaaatatttattttttgagataaaaaatagcatgagttcatactgatgcttccacttcaaaatcacaagcatggagtttttacttaaccttatctttcttagctgtatctctttctccaaaacttaaaattatattcccaacaagactaacataattactcaatatacaacgtacacacaaacgaccccagaatagcaatatcaattcttttttgtctttggaagaatttattatttttgttctttttttcaaaaactttttatttccataggtttttggggaacaggtggtatttgcttacatgagtaagttatttagtggtgatttgtgagattttggtgcacctgtcacttgagcagtgtacactgaacccaatttgtggttttttatcccccacccgcttcccaccctttccccctgagtccccaaaatccactgtatcatttttatgcctttgcatcctcatagcttagctcccacttatgagtgagaacatacaatgtttggttttccattcctgaattacttcaggaattactattattcctgaataatagtctccaatccagtccaggttgctgcaaatgcctctttgtggctgagtagtattccattatatatataatggaatatatatatgtggaatatatatatgtggaatatatatatgtggaagatatatatatgtggaagatatatatatgtggaagatatatatatgtggactatatatatatatatgtggactatatatatgtggactatatatatgtggactatatatatatgtggactatatatatgtggactatatatatgtggaatatatatatatgtggactatatatatgtggactatatatatatgtggactatatatatgtggactatatatggaatatatatatcacagtagatatatacagtatatatataatggaatatatatactgtatatatataatggagtatatatactgtatatatataatggaatatatatactgt

SEQ ID NO: 1562461 - DNA, 4001 bp, Homo sapiens
ttaagttaggctatacaatgaagaggggagaaagaaaaaggcggcaaaaaaaagctgatcatctgaggccatggcaatccctttacaccaaaatcctttcttgagacctgcacggtgactcctcccaccacatcacagccctagctaaaaggagcaagcaaattccagctacttgggaggctgaagcaggaggagagcttgaggtcagaagttcaagaccagcctgggcaccacagccaccctctctctcaaaaataaaaataaattagccaggtgtgatggtgggcacctgtagtcccagctacttcgtaggctgaggctaggagtttcagtgagctatgatagtaccactacactccagcctgggagcagggccagaccctcatctctaaaattaaattaaattaaaggagaaagcacactagtaacaatgcactcaggtctggtcaccttctgccagaaaattatctagtaccataaacaaagccagattcaaacaagcgccaggcaggacaatctgtgcactacagtgccaaccttgcaatactcagagtaccctccagaactacagggacagtgaatagacaataaggtgccagataaagaacctctgggaagtccagggacttctgcgcccaccacatctggctaatttatttctatttttattttttgagagacagggtggctatggtgcccaggctggtcttgaacttctggcctcaagctatcctcctgcttcagcctcccaagtagctgggatttgcttgctctttttagctaggtctgtgatgtggtgggagcagtcaccatgcaggtctcaagaaaggattttggtataaagggattgccatggccacagatgaccagaagtaattacagcatcctgtctcctgcaccagtgcttccacacagcttaagtaaaagggtcaaaactgtaacctgattctgctacttacgcatggcacaactgtagggagttgaaatgtttttattcatcacgaagacagtaccggggtcagttttcccaacatgcttaacttctatcttctcagttcggggagttaatgataactgcctggctttctctttattaaagagatcattccgcatttctgtcaattctgtcggtgacagctgagaagctgacgatgttgctataaatcctgtggagaagttacaataaatatgaagactgaaaaaatgattaacgtactgccaaaagtgcgctcagaggtaaaattaaaccaatttgtaatattaacaaacaccagcggaagaaacagagctggcccagatacgtgcctctacttttaaatttggctctttcacatcagatcgctatttcccaccaatttcctgtgtcgtgtttccaatcagtgctttacaataaggggcaaaaagtaaccaggaaacggagtcaaaactggactagagtcattgggaaggtgaacaaagtggtcggtttgacagggtctgaagaaaaacaagaaaatttcaggaaaccaaaggtcccacaccgaaactatcaatatccagaatgagaaatgctgagtttatatcccaaaggccaaatcagggaacctgccaaggcaagtacgagtattccttgggaagacatggacagatgtgcacggaacgtgcgctgcttcccagaggcgggcccaagctcctcccgcggcctggctccgacccctggccccgacccctgcccttgcccctgccctccgccagaccctcgttcccataaattagtcctcccaagctgtgcaagagcgaccgccgcggagggactaagaaaccctcctccttcctctgccccgcgggacctccccggccccgcctcagacccaatctagacagacaccactatctaggcctcgctccctgtccctacggcctctgaaactcactccatttgatcccgccaccgggtgcgaccagccagagccgcagcgcccgggaacccatggccagcgcctccatagcagcggtgagaaccgtcgcgcgcaagtccttctccgccctcctcccccggaaaccgaacgcgcactcggagttccgcaggacaggtctgttccggacccagcactcagactgctcgcctccaccggggggcgtcaggcctcgctggggattcagtggctgagaccccgagactcggagccggggcgcgttacctgtgctcgatacctgggcgcggtcacctacccagaggtgcagggcccccagggcggtcggcctgccgcccaccacgtaggctctgcagggaaacagagttccacaggcgtcgttgccctccgccttcagccctccgcgggttcgatcccggccacccaggtgaagcgcttgcttccctaaaagaatatatggttttcttggcgggggcgggggtgggggggaatggggaaggcgtcttctattttgtcagcgatgacatcctctagcgcgtggcttaactttcaattgtgccgggtaggttcttagttcggctggagtgggtctgcaccccggttctccccttagctgtggtaatagaggcctcggaacacgtccccttgactttggagaggacgttgtaattcctaagagctctttacaaattttctagtttagtttatatagtataggatgtataggagaaggcatcccggggcagaatttttgtctctagttcactgatgtatcccaagcgcccagaacagagcacagcgcagtcagcgctcaacagatgtttcttgaatgaatgaatgaatgaatgcccttgcaggcaaacttcagctcattgtctaatttttctgtcctaccaggacgtgagtgttatttgaagtaagcactctgtaggtacaggatggaaatattttcatttacagtagtttaattctgtggctttacttaagggtgtcgaattcagcctttcccccactctgtcctttgccttgcaattggaatgcgccgccaccaggtggaagtgccgcctaaggtacaaatatgaccctgcgccacgatagatcgaccgtctccttggcccaaatgttacactcacaaccactgcgccaggaaagtgtaagtatcttcactttttaaaatgggaaatgtaagtgacggagcttggatttacatccagtctacattttaccaggctacatttcatttaagatcctaattcaaaccacgaaatgtacatatatacatatagtgttggagggcgggtgtatcttttgcttcctcaaatttgcatacagttcccatgaaagctgtctgtttcatcggccttttagagcctgtacccatttaaccttacctagaaacactctagtgcccttagaacatcttagagccacatttaagcaaagcctctgaacataaacttaagcaagtttgatcacaaacccattggaggcaggtaattggagttcaccggtatgagaaattaacctagttgaaaggttgtcactagtgataatggccaaaaaatactatgtgccaatcatagggcttggtttattaattttcacaacctacctgagcaattggcataataatcttcatattccaggaaaagaaattcaggttttaagagcttgagagacatacccgaggtaaatctttggccaagaattccccccaaatattttcttactctgaatcttctttatcttgccttctttatcaaccagctccccaaatcttagtctcactctgtcaatgtctctgccaaataaaaagtatcaagtctgtaacagtaaatatctaagataagcctggatcattactgtgccagaaagcctacaactaactataaaatacagacaaacagaaacatgttaaaaaggacggcggaccaagctcgaaggtcctcccgctgtccaaatttgggagagtttgcataacaaaaagaataatgctgaaatattatgacatgtatattaaaaattcatgaatccgtaatgacactcaagaataaatcagtgtagaaagagtgaagagagttttctgta

SEQ ID NO: 1562462 - DNA, 4001 bp, Homo sapiens
gatttcaaggaaggttatttattattttaaccaaattacgctctgttgatctgaactagagtgaaaaatgggtgctccacatccaaaggctatgttattacaggacataaaaaaaaatggtaaaagaaatacacttaatacttgcagccatgttaaccaagatacttggcaactatggcaaaaacaaaggggagggcaagtcttcatttcaaaggtttcaaagggttacagaatgagcaaatattattgcctacaggttgcctctttcagtgtcacctgctacctccccaagacaaggaaagtaaacaaaaggaatttcagtaacgaatttcccaggttccacattccctaaaacacgtaagttgaagggagggcttaaacaacttccacctaattaaaaatcttcccttttaataatgctttgttttcactgctcctatcctttcggagttacatatgctggtaagcaaggaggagggccaaaagggatattcaagaggctgaacagatactatcttaacttcttccaaatccatgaagaacaagctgggggacacaatggcatgcctggccaggctgtctggacctcatagagaggcactggcgtcccttcccagttaacaatatgcaaagcacacttcctaacaatctcccgacgctccgtgattgttagtttatcaattgagcttaagttcaaccaaacttggtaatactcctcgcaattgacctggagcctaatttcaaacgtaaaaatgcgtccactcctctagcgctgtaggaagctgtgcttacaaagttcggacgtggtacaatgatttttgttttattacacctggtggagaaaaaaaaacataacaccaaactacgttaccgaattccgaattcacgggagaatggggatttcggcgacgacttgaggagtacatgacccaggacagaggacgaagtgagctgcctccgggccgcgggcccctgtccttggccacgccgtcacctgaaaggggccgctggttcgcttagcatccctccaaacctgaaatcccctacctcaagatcaatcaaaagcagggggaagaaagtgtcttctggaggcgcaagaaaggccacaacttggatgaatgaaactgggctaagggcacccggagcgggattttcgctgaagtcagaaaaagaaaagtcaaaagatttttttttaacatgagagcgattgcaagagactggaatacagacaacggcacaaacaagctttggaggaacgctttattgggcgcggacgttccgggcggccggcgggcgctagagcggaggcggtcggcggcagccggcgggcggcggagcgggacggaccaggcggcggcggcggggccggcgacgaggcagcttcacgactggcggggacgggccggagtcgggctgggcgcccgcgcgtgtcctcccgcggaccttccactggactcccgcgggccggcgccgggatcggggtcggggcccgctcggtccgccccgccccccgcccggcgggccgcttgcgaggcacaccctcccggaccgcgcacacgcgcaggcacacccccgcctcccgcgcgcacgcggccgggcccggccggcccacgcgcgcccccttcccgcggacgcccgccgcccgcccgccgccccggcctcctccgaggagtgcaggaaggcccggggtcccgcggccagggcgcgcgggggacggcggcctagcggcagcgggggcgcccgcgcgggaagaccggctctgagggaaggtcacttacccgctgcatggctttcaggattaaagccagctcgtagcggggcatgcctggaggatcggcgagtgcggctcggaagccagccggttcccgggacgcgaaggggcgggacggcggggacagtggggacctagaaactgctgcgccggacggctcccaggcggcgaaagcacggtccgagagcgcgagcccgggcttaaaggcgctggcagctgcgcagacgccgcgccacgccccctcggcgcgccccgccccgcccgcgcgccttgccgccgccccgccccctctccgcccgcgggcggccgccacgccccctccgcagccccgcacccgccgcaccgcccccgccccgaccccagcccagcccgccggccgcggctaggggcggtgctgcagacgcggcccagagcggctcgcggcggccgcacgccccctcgcgaccctgcctgcccctaccccgcctcctgccatgcctgctacctagctctcgaaccggctggaactttccatgccttccttctcctcccgggcggcgggcgagtgagtgcccgccagtgcgcgtgcgctgcggtgcggtctcgtccgtgcgcgtgcccctcgcccgcgactccccggagctagggaccttcgcggcgcaaggcggggtcgcggccggcccgggggctgtgcggccaacggctgctcgcaggggttctggaacattcccgcccggggtcggtaggggggtgcagctctcgcccccagccacaactctcaggtctgacgcggctgaccaggccccctacccggcgaggagcgcgctggcacaggccgtgggccgcggcgcgcgggctcgggtctgactcagtcccttggcactgcgtgaccttgggcctgctgcctgtgccgaaagtggggacccgagtgagttactgcacgttaacctccgaggacggtgcctggtacacacaggcgcgatacgggcatttgtggtgtgcccctgacctgcccccacgtgtttcagcggagggcaggcgaacaccttaactctatctcatttctttaaatgtttcctccgctttcacttaaaggctaggctgagtgcctgggagaccctttagcaactgtctaaggtgggcaggggcatacgttctgcccttgccatccctttacacccacatggttctccgccctccagccaggggctctgcaagtgcagttttctccagcgcccttccttagaggttgagtaccctgcagctgaggcctctgccccttgtttgccccattaaaagctctgtacgtggagtgtttgtcaacttaaagtgctttaacgttaataggtaaagtttagtgaacacttactctgcatcaggccccatgccaaggctggtggatgtgtctcctaaaattctcacaacagccctgaggtgacaaagattctttgcttggccaaactttagtcaggcttctgaatctcatgctaggcccatctgtgcacttccttgtaaaatccagttctagcacagaacccccatcccctcatagcagatcaggttcctcatcttcctctatcccccagtcatgtcttttcaccctggcctgagttctacaagaatcctttagatcggttgagccagaatccctcttcccccgatggttactcttagtgattttacatggccataaatttctacttgccgacgctgcattcagaattggagcccactctctctccccgggtttccctgatccctgtacccatcgcgttggtcctgaataaagtctttcttaccatgctttagtaagcatcactgagtaatttttttaaacagaggcaagcactgttaaccccatattagggattaggaaatgtaggcacaaaaagttttgtaactagtccaaggtcatacagtaatagaaacaaagtacttttagccgcccctctacccttctgacctccggttctcctaccacacagatgaagatgctgattgttattcagtggattaaccgtgtagtccacgtaagccaagattagagtacctttgtcaccttacccagaggttaccatttcacatcccatgcgtctatttgtgacatatgggaggtaggagatggagatgaacccaagtttttctgagatagctggattttaacattttctatttttagacttgtctacaacccatacctgtgtgaagccacacaggtaatccaaattgcctggctaagtgtcaattaact

SEQ ID NO: 1562463 - DNA, 4001 bp, Homo sapiens
atccctgaactcaggacccaggtcacactcagaggctttgttgatgcctgtccctctgccaggctgccctctgtccacaggctcaaagggaaattcatctcccctgcctgaagtgaaggagtaagagaatggctactccacagagcaaccctgagggctgctggttgcccatttttgtggttattcttgatgatatgctaaacacggggtggattattcatgcctccccgttttagacatacatgtagggtaacttcctgacattgccatggcatttgtaaactgtcatgcgctggtgggagtgtaaaaatgaggacaaccacaggtcactctcgtggccatcttggttgtggtgagttttaaccagcttctttattgcaacctgttttatgagcaaggtctttatgacctttatgaccttgtgctgacctcctatctcaccctgtgacttagaatgccttacccgtctgggaatgcagcccagtaggtatcagcctcgttttaccagctcctatttaagatggagttgctgtggcatgcacccggtgtggagttgctctgggtgtacctctgacaacagggttctgtttgggaaaaagaatggcagcgttgatggctcagttcccaggctcgatgtttcccttagcataaggagtttgggggtcccgagatattttcttttgcaacctgtcctgctccaggcccaggtggacttaggtgcctgtggggaaaagcaagagagatcagattgttactgtgtctgtgtagaaagaagtagacataggagactccattttgttctgtactaagaaaaattcttctgccttgggatgctgttaatctataaccttacccccaaccccatgctctctgaaacatgtgctgtgtccactcagggttaaatggattaagggcggtgcaagatgtgctttgttaaacagatgcttgaaggcagcatgctccttaagagtcatcaccacgccctaatctcaagtacccagggacacaaacactgcggaaggccgcagggacctctgcctaggaaagccaggtattgtccaaggtttctccccatgtgatagtctgaaatacggcctcgtgggaagggaaagacctgaccgtcccccagtccgacacccataaagggtctgtgctgaggaggattaatataagaggaaggcatgcctcttgcagttgagacaagaggaaggcatctgtctcctgcccgtccctgggcaatggaatgtctcggtataaaacccgattgtacgttccatctactgagatagggaaaaaccactttaaggctggaggtgggacatgcaggcagcaatactgctttgtaaagcattgagacgtttatgtgtatgcatatctaaaagcacagcacttgattctttaccctgtctatgatgcaaagacctttgttcacgtgtttgtctgctgactctctccccactattgtcttgtgaccctgacacatccccctctcggagaaacacccacaaatgatcaataaatactaagggaactcagaggctggcgggatcctccatatgctgaacgctggttccctgggtccccttatttctttctctatactttgtctctgtgtctttttcttttccaagtctctccttccacctaacgagaaacacccacaggtgtggaggggcaacccaccccttcaggtgcctgacaccacaggctcctgggcgggcagggcccagtggagcctgaccttgtggcactggcctggcctctgctaccaggctgaggaccgggtcaaccggcaaccccaggcccacgctgggtgccgctgcacttgggatccgggcacagcgtggttcggtgcttctggaatgaatggggaatcggaaggccggccctggtcctgcaaacacgggcctcaggatcctgcactgggcttacttctccctgcgctctccgcccccaccgcgaatttcccggacaattcagtttcggtttcatttctgctcgctggtttccagaaaggaaaagtcaaattgcatgacttcagacttcagaatccagggggcggggaagggggcagggaagaagggggcggtgccacgacgagggggcagtgttactcacatacaccgctagcacctcccccagcctggacccggttctgctgggccggggaggcgggtggtcgcggaacggcggagcatcccacaacctgcccatcctcccggctgcatttcctgcaagtccgtccgcctgcccgcgcccgcgcccgcgcccccgcccccacccttgcccgctttgtcctgcctgggcgcgagtaaagggactggtttcctttgcctcgtttcgtttcctcttctgtgcgtgtggtatagacccgtgcttctcaaagggtggttcctggaacagcagcattggcttcacctgggaaattattagaaatgaacggtccggggccatcccaagacccctgcattaccacctgtattttaagggccttcctcaggtgatcccttggcaactgggcacgagactgctggcgtctgacgtggtcgcttttggtcctcaaggtcaaggccagacttttccttcatctctgtctggggcccaccagagagccctgcggagaggagcagaagctgaaatcctttgatactggtgagctttggagagccaagctgggggctgcaggacctgggttcaggcattgtgtacaggtggcccagccactgaaggaaagcaaaatattttacccctaaaatctttttttttttttttttttgagatggagtctcactcttgtcatccaggctggagtgcagtggggcaatctcggcttactgcaacatttacctcctgggttcaagcgattctcctgcctcagcctcctgagtagctgggactacaggcatgcgccaccaagcccggctagtttttgtatttttagtagatacaaggtctcaccatgttggccaggctggtcttgaactcctgacttcaggtgatccacacgcctcggcctcctaaagtgctgggattacaggcatgagccaccgtgcccggcccaaaatctatttctttcgcatactttgagatggctgctcagaaagccagcccacagaagcaccctgcggaactgtcttacctggggaaggcttgcatcttagagggtctgcactgaggcggtcaggcttgcttgcttttctttcccttgtccagatctaggaagggagaactgacatgacatgacatgacatgacatgacatcccctctcttgccctccttttctccctccgtctcctcccttcttcacctcttccctttctttctccacaaacacttactgggccccatgctggcttctatgctggacatttgtgatatgcaaatgagtaagacaaagccactgcccctaaggagacaggtggggggcacaggtgagcaaggaaggagtgagctactaggagctggagctaagtgccactcttggggctcattccagaagctggaagtccaggagagagactttgagggggtcttgggagcagtggccaagaggaaagtgttcaggaagtactcatggaggaagcgaataggccacttcaaaagctcattttccatttcccaatacacaggagttatggtgaaaagtagaacatgttaatgctttccttgagctgggcttccagctactctggaggccaaggtgggaggatgacttgagcccaggagttcgagggtgcaatgagctatgtttgcaccactgcactctagcttgggctacagagtaaggccccaacttaaaaaaaaataaaaataacaaaaacaaaactttccttgatccttgtttgtgtcacagatgtgaggacagctaagccctgaaaactcagctctgtgctctagatttctgtaccccacagtgccaggcgcgtgctaggcattcagcacatgatcgaggggtgctccggtgaggtcgagcatgagggctcacagtgatgacagaata

SEQ ID NO: 1562464 - DNA, 4001 bp, Homo sapiens
caggagactgaggcaccagaatcgcttgaacctgggaggcgggggttgcagtgagctgagatggcgccactgcactccagcctgggcgacagagtgagaccttgtctcaaaaaaaagaaagaaagaaaagaaagaacccaacggcccacttcatttctgccttaccttggaatggtggctggatggcggcgttcttcactccagatttcagggagtgggagtcttcctgtagcctccgacccagaaccgatctcctcgcagtgtggccacagaattcctgcagtgagggtaaaggtggcatccagggttgtcagggggttctctccttgtggtgaagcttcctcagctcagaccccatagaggagcagggatgggaggtaggattcagcccccttcctctcccaaaactcctaataaggaccacctactgcctacgttctaggaaatgcctaagatggaagaggctacactttcccaacataatccagtctagttttttctttttttataagcttttaagttctggggtacatgtgcagaacgtgcaggtttgttacataggtatacatgtgccaattcagtctagttttaaaactaactcttgcaggactgacattcaccttttcttctgaaagcgtttttccccccaaaccctgctggtatttaaatttgttatgaataaaagagagaacatcttgccctttagaccaaatgcactgctacctaccaaagcccctgagctgggtgagcaggtgggcggcaagggcgcgagggaggcgtgtccaccgtgacactgggattcctggccggcaactgcggtccaaggctgaaagatgacacagccattttaggagccctttgggactgacaccggtggtggaggtagaggcgcggttagcatcactggactctacttcccagtaacaaacgtgatttaaaatttaaccaaataacttgggccatcccaattgcccagctcggcagcacctgctgtgagtgttggtgggatgggagcgcaggtctcagctgtgcccgggctccttctgccacccccgggactgtcctgcctcccttcgtccaccgcacccactccacgatcccggccaactacgatggaccccgagggtgcgtcagccccacgcgccggggaggccccaggcatggcatccactggggcggtgggggggaacagcgggcaggggtcttcccgcgcatgccccatctcggcccagctcggaaccccctttattcagcaggatcggcgagaactccttgaaccttccctccccagcgacctccgcagtctgacttgggtttgctttcgcgcgttcccaggaaatagaagtcgacggaaagcagtggtcggcgttcgggtgggctcgtggcccgcgcagccgtggatctgaaactttcccggcgcccttccccgcttactagagtccctcggagacctcccccgagccccgtcccccaccccttcccaacctctcctgcaggaaggccgcgggttagggggatgtttctgatgcgtcatcaggagcctgggcagcctggtgggaaccagaatcaggcgtgctccgagcccgcccatcagcgcccttgctatgattatgattattattattgttagttactagcagccgagaaggtgcccccgtcgtgcccgtgctccggagcgctagtctccgccacgaacgccgctctcccaatgcccttctccgcgctcctagcgcggttactgggcgctgcccccagaagcgacactcaccggtccctgcgcagtgctggagtgcggcctccgctctcgcttcgcctctttcaccccgcgcccagccccgccccgcgccgcgaagaaatgaaactcacagaccctgtgctgagggcggctccgggcgcagaaacgaaacctagctcctggccccgcacctgcagcacttgcctcgcgggaactcgcgggagacgcaggttctcgggcccgaacccaggcctgctgaatcagatgctcgtttcatcaggcccgtctgaggatcaaggtgctccggaggctccctaatggcccggagtcatccaagcctgcacgtatccttgaacctaggcatgtccttccccccgtcggttttgaaaacagatgcattggtaattgggggtcttcagttccctcccagggctcactgggatgatcccagcaccagcagggactcccaggcattgtgtgccaatggctgcagagcccctcttgtcccgaactccgtccagcactcccacccctaaccaggcacacccataccatcttcctcctttcccgtttccccttgcccacttctaggcctccctggagtctggctcatctggcctctccagggtggaaacgggtgtgtggaaggaaaataaaataaaataaataaaatagtaataataaagcttaaaataataaacataacataggtaatagttgtcaggccaggccatcgcatcccaggccaggccatcgcatcccctgtgacttgcaggtatacatccagatggcctaaagtaactgaagatccacaaaagaagtaaaaacagccttaactgatgacattccaccattgtgatttgttcctgccccaccctaactgatcaatgtactttgtaatcttccccacccttaagaaggttatttgtaattctccccacccttgagaatgtactttgtgagattcacccctgcccaccagagaacaaccccctttgactgtaattttccattaccttcccaaatcctataaaacggccccacccctatctcccttcgctgactctcttttcggactcagcccgcctgcacccaggtgaaatacacagccatgttgctcacacaaagcctgtttggtggtctcttcacatggacgcacatgaaaacagttaacatttagtataagctatttagaagtaacacataggctaaaattttaagcagcccctcccagcattgtaacaagttgcagatgcaagcttatctcaaaagcttatcacctgcctcgggaccccagcctccaaccctagtccagcttggaggatgactagtcaatataactgaattgccagtttcctcagaattgtcacgggttaagtaatttactgtctttgtctgaaacctgtatcctaccttgtttttcccatctcaaacgacatataagctagctgctttctttgttggggttggcagccattttgggcatgagcctgctgttggcccgaattaaaagttctgttttggtctccaaaggtctctttgtcttccttggctagagttttactgcaaaggtgaaaggggttggggagggctgagtcaagcagacccatgggtggtcctccctttgggagctcccattctcggctaactggctgtgagtgggagatggcatttccctttgggagcggttggcaccccacctccattctccttagctcagctcacagtcccttacaagcccccgctaaagacttccatgattaggaagggtcacccccaaccaacctcaaggcccagaacctgccccagctttaggtcctggggtcaggggaaacctggatggaatcaaattcaatactgctgcacctacaagagggggaggagccccccagccagctccctgtgctgaaatctattttgctttgcaggatccactcctagggctgggcaaccccatccaaggggttcttcatccaaggggttcatccaaggggaacacaagttctcccaggaattagcaatgacctcactttaacacacacacacacacacacacacacacacacacactcaacccctctgggccttttacttcctagtcaagaacccaggcaacagcacatcctgggggactgtgagcaggctgggctgatgctttctgaagcaggaacagtgccttgggaacgcagggtaggtgtgagcagagctggcactcatgtgaacagagacttcactctgggtgatgctgctgctgtttccaacagcg

SEQ ID NO: 1562465 - DNA, 4001 bp, Homo sapiens
cacattgtaggaggtttagccaaatacctggcctctattcactattcaccctgagttgtgacaaccaagatgtctctagacctggccacaagttccagggagcaaaatgggccctgactgagaaagaaccacagccttaccaaatgcatgaatacagttggtagcctcggtcttagttcaccttataactttttgtttgttttcatttatttatactatctatttacaaaagtgtgtcaaacataataaagcaaatatgcatgtaccaaccacttgggttaagaacacaaacactcccagtacttaggacattgcacacacctccctgggtcaactccttcacctccagagggtccctctatcctgaggcttgcaatcatcacatccttgcttttctttatagttttgccacctatatgtttttcccacaatggtatattgcctattgctgcctgttggggaattttacgtaagtggaatcattttgtatatttcctgtaacttgattctttggttcaacgttgttcatttgatgcagccattttgatacctggaactctagttcattcctctttactactgtatagaattctgctacatgaacataccacactcccagtatccattccaccatgacaggcacgtagacagggtctgagttttgctgttataaacagtgctgctatgcatgtggctcccagggggatgtgcaagggtttacacatggtcctcaaactccagcacacagcagaatcacctggagagcctggtaaagcacagggggtgggccctgccccagagtgtccaattcaccaggtctaagagtgggaggaggggctggtcatttgcatttcagtcaacttcccaggtgatgctaatgggctgggctgggggccacactttgagaaccacagtctatccccagaagtggaactgccagatcacgagacacactctgttctccttgactggaaaaggccaagctgcttccaaagcacgcaagtatgagtgggtgagagttcctcctgccccataccctgacataattacatctcttacagccagacaagagacgcaccagggacggaaatgcagaaaaatgtaaacggtggtatcagggtggtggaaaggtggtggtcctctgtatttttctaaacgcttcaatgttttttgaatattgtttgaaaaattgtttaacattgcctaggaaaacagagccagcctgaaacagaccagtgatccacggtaataagaaactgagcactctgagtacctggacactccctgcactttgctctcagccatataaagcaaagaccattattctcattttagatatggaaaaccaggcttataacaggaggaataactacccacaatcacacagctgagagtgtcagcgtcgggaccaactgaggttggactgattccaggggccatgattggttcccaccaaaaatatgtcttgattctgggcaaaaaattcaccacgtggcttccctacaaagataatatcttaatgatgccccagggtttgtagcttgagactgaatcatgatgtgggcaggaaaaacaaacctagtgctccttgaacccagggcctgggccagttccttctagtatagatgagctgaacccatcgacagctcagccagtgtccccaaccccagcagcacctccacccacggtgagctaaggcaacgagtctatacatggttgtcagctggcaagtagagggtcaggatctgcgtcctggcacaggagaggcgagagagcaggcatatctgggcagcagtagcaccgctgtagaaaagggcagcctcgaatgggcatggctcatgtcacatggatagcgactttcagagagcaacttaccgagcctggatttttctgggccacagtagcatctccattcagtaatagagggtgggatgcagcagctggatcagcttttgcgatgtccacttcggaaacaaccatcttccttctttgcaaagtaagcttaaaataaagcagatgcctattgaacagataagcagctgggtgcattcaaccatggaaccaaacccaccaccagaacggaaggcccctggaggtggggactctgactagttgttcatggtgatgtccccagagcgtagaagagtgcctgggacacagtgtgtgctcactggctttttattcacggaaagagaaacagagtgacccaaagaagccaaggtcagataaagacaaacgctgcctccctgctcaaggcgcttcaagaatatccctccaggccgggccccggggctcacgcctgtaatctcagcactttgggaggctgaggcaggtagatcatgaggtcaggagttcaataccaccctggccaagatggtaaaacttgtctctactaaaaatacaaaaaaattagccaggcatggtggcgggcacctgtaatcccaactactcaggaggctgaggcaaagaattgcttgaacctggcaggcagaggatgcagtcagctgagatcacgccactgcaccccagtctgggcaacagagcaagactctgtctcaaaaaaaaaaaatagaatatgcctctgttccccaaaatattttctaaaactatctcctgtcataattttaggttgaacttcaaaaacgttttcagtataaatttgaatagttgcaaagtatacaacttctgatgcagttgtaatacaattaaaaagtttacatttaaaggctgggcacagtagctcacgcctgtatcccacccagcactttgggagaccaaggtgagtggatcacctgaggtcaggagttcgaagcgagcttggccaacatagtgaaaccccatctctactaaatatacaaaaattagctggaagtggtggtgtgtgtttgtagtcccagctacttgggaggctgaggcaggagaatcacttgaacctgggaggtgaaggttgcagtgagccgagatcgcaccactgcactccagcctgggcgacagagcgagaccccgtcttaaaaacaacaacaaacaaaaactttacatttaaaaataaaattgttatagaactgtttccaatgtagccaagagaatccaaatattacggtaatttgatacccaaacctttagtttaaaaaacacgtgagctctaaatcttttatgctctttcttttgatcatcaatttcatattgtcattcttttactcccacaaatgggggaaatgaaatgtcattcattttactcttgaaagcatgtaactgactgccttatacttgtctgcattacaaatacacacgtatgtatttgaaattcatttttaaaatgttgtaggacaagtgcctaaatatgaaattttacagtgtctaataatcttggataaaagtaactgaaaatctttctcctatgactcaaaataaatgttacagaaaatagcatgcaccaacttacctctaatatacgttccttcaaataaaagtaatgtcaacaagttaaatggtatcacagagctgttctcctgcacctccttgaaatcaagcaaagtgtacaagtaagacccaaacccgcggaacacccgagagtacccacccacccagtcccattcccaagtctgagaaccgggcaagtgcaggaggggtgtgctctgaagccgattctgacttcccagaatccttttcctatgttttgactattttaactattttaacagatgaataaagcacagagctttgctgcaaatctgctgcctggatcaataatatgtaaggatgctctccttgcttcccctcgcaggaatctcccccgagagccatgtgatctttgtcagtaccatgagggttgaagggacaggttgttaaaacaaaactcatcacccctgcctgtcaccctgctctgtaacatatctagctgcacacctgagccaatgccatttctccatcacactggagttcacagaaacgcccatgtcaggaaggttgggaagtgctgccatgggttcatgctgccttgg

SEQ ID NO: 1562466 - DNA, 4001 bp, Homo sapiens
gtcctgcagatgaggaaactgggccatggggagatgctggaggccttgtgggggccccagcccagggctgggaatcgggtctccactgctgtctctgacctgcacctgacactgcatcccagggtgttgagattggaggacaagcacacacattccctgctgagtttggaagtttgactgagactgccaggatcacgtaagcacccctgggaaggatggaaatggctgtgccggacatggtggttcccgctgaagtctaaggcaagctgcgtctcccacacgggcatagccactattgctggcttgcaaccagtccgagagctctgccgggtcctgggcaccaggggccactctgctgtgtccctttgctccagtcccaatgtcactcgcatggtgcagggtcatggctgaccaagcactggcactgaatgcgaccttatctccccgggctcacctcctttctttttaagaccgcttgtttttcacccactcaaagatatatattgagcactaagtccttgagatacatatcgagtcaggcagacaaagatctctgggggagcttgcattctagggcaggggctaaacctaaataaagctcacatacatcctggccagacgcagggactcacacctgtaatcccaatgcattgggaggccgaggcaggaggatcacttgagcccggaagtttaaggctgcagtgagctatgatggtaccattgcactccagcctgggaaacagagcaggaagaccctgtctcaaaaaagaaaaagaaaaaaaaattgtacatccgaagggagtcaaaagtgcttcaggggttggcgcggggctgggaagtagagcagagtaaacggaggagagggtgcgaggaaagatagcttggaatcctgatctttttaaacagctagagacaacattctaaacacaaaatgagaaagaacagtgttcaaaaggtgtcatcaaagccgaatggggtggcttacgcctgtaatcccagtgctttgggaggttgaggcgtaaggacttcttgagccagtgagtttgagaccagcctgggcaacatagagagcccctgtctctacaaaaagaaataaaattaaccaggtgtggtggtgcacacctgtagtcccagctacttgggaggctgaggtgggaggatcccttgagcccgggagcttgagactgcagtgagccatgatcacgccactgcactccagcctggggaacagaacgagaacttctctcaaaaaaaaaaaaaaaaaaaaaaaaaagaaaaaaaaactgcgtcatcaataccaccatgtctcctttccgctctatatcaattataaaatggacttcagcccccagagtgcaggcgatccagggtgcagtggtccagagtgctggagttggcccctactggctgggaactggccacggtgggagcattcacaccatgagaacggaagagaatcggcaaaggctagaaatcaggcaccaccctctgccctgccccgccccatgagagccaatttcccagcatatcaccgtcactaaggttacgtcagagcatcacaaataccacaaaagaaggaacacttgaaaccctccgagacgacttttcgggcacaaagctccttactcaacccccagactttgtaggacgctgagcaaagctgtcctaaaaaccacccctttgcgtccacccgacttttggccagatcaggatggaggccaccctgtccccagggccagccacttcccctccagagcctctttgtctgtgcacaaggctactgtgggctggtggcaacatgggccctttctgctcctcacaccagaatcttatctttgtggctcctgcctcccagcacaagccacattcaccaagcagatgtcacgttactcaggaaatattttttaaacacgcatctgctgtgcatcagacacaaagcagccctccctgcaccggccccgctcttaccgctgcacgttcaggatggagaaatcatctcttccctttcctccacttcacttttatgtggcatatgaaccactccctcccctgctccgtcatcaacaaacagggagagaaatgaaactacttgatctggccacagaaatgaaactgagttatcagcgtgctctccagatgactcacagagtggtccccaaactccagctgcatccgaatcctgggagagctgtggagacggggcggctgtccccccacccccgccagagagtctgatctgtcaggtctgggctgggcctgagaatcagcattgctaacagattccaggggaggctggcatgggggcagctcagagtggctcagtcactggaaggttctgccctgacagtgccatccagtaccacctgtgtggctctgaaatgtgactactgcgaccaaggaactggacttcgaactccatgtaatttgaatgaatagccacgtgtggttcgtgtatcgggcctcacagatgcactcctgttacagccgaggacatgctctcaggtacatgatctggacgctctgagctgtcctgcttagcttcatgcctgagccgcacctgacaaatgtcacctctcccctcattaggtgcggaaaacccaaagaaggagggtcaacagctttctccaagcacccgtgcctgaggtccccgccgcaaaaccaagacggttttcttcccattggagataaggaggccccaggacaaaccccaggctccggaactcagccctgagccagctgcatgtcatctttctggtcctcagttacttttcacctgcaaaagtgaaggtgcacaaccgcatgctccctaaggcttcctgctctgtgaccaaagtcaaggagggccaggcattcccatcaccagagccaagaggtctgggaacctccaggaggagccctccagacaccggggaggggaccaagcctctcaaggactggcagtgatggctgggagggaggaagcaggctctcagctctcctatccacccgtgatcctctcccagacatcaacactatacgtttaaaaaaactcctgagctcctcttggctaagtcattgtagtgacttcccttgagtgcaggcttaactttacggaagatatttagaaacttaacatgtttttcaaaaccttggcattagaaatattaacaccaggagatcatcgtcaggatcacctatccctgaaccacttctcttcccaagagcccgggcggacagaggctgaggagtgaggggaggaatgtgaatctcagacttggcagcgtgatgtgacattcggtttcactaggaatgtctttcacaacagggcctgggccggcctactgcttcaaggaaggcacaaagaaaggcctcagagaagccggacagagggacacgagcagctcgggccagctcaggggaccctccaccctctgtcaaggcagcatccccctcctgcacgcccctcaccagcagccctgggaaggaccagaggtgcctgcgcatgcaaacttcaaggacagggttcttgcgttctgagcactaaagccctgagggtgaatgaatgtcccacgcagcatccaagcacaggggccggggccagaaaagatgctgctgctcaggcctcggtcacagccgctgggcggagctcttccctcagctccacatcagggagcgttacagtgtgcagcttggtaaagaggcgaagtccagaagccccagtgcccgcctcctgccctggcacgctgactctatggaaagcgccagcgcctctgtgtgctgatgaagttcctggccacctggaagcacctgcagcacctggagccatccagagccagcatgcatccactctcccatggcctctccaatcacagaaggaaagatcaagcaaatgctttcctgaattaacaggacaaaggcaatggtgaagtgctgtagacaagcagggttcttacctggggtgtgtccctcccagcagagcacaggagcagcgggtgcaccttggagtggaactccaccctgtc

SEQ ID NO: 1562467 - DNA, 4001 bp, Homo sapiens
gttggaaatattaatgtgaaagacatcattccttcgcacaaggagctcctagcttagtatttcctaaaataaagtttgtattattacaaaatttatttttgaaaaaagttcctctatcatttttaatacctaacattcatagagccatcagtatatcctagagaattaaaaggtcccccaataatagagcaggacaaaaattctttttctggacagctatatgctaattgggaaaatagtatctgatctttgaatgttaaccatcttagaatgctgttaactataaaatcttcattctactgtactttatctttccattaaatttattttcttgcctataatcttggaagttgcttcttttttagagacaggctcttgctctgtcacctaggctagagtgcagtggtgccatcacagctcactgctgcctttaactcctgggcttgctcaagtgatcctcccacctcagcctcccaagtagttaggactataggcacgaaccacagtgccagccctctataatgttatacatgcatcaaaagcataaatcatccccattaaaaagatcagcttgatggcatttagggaaatttttagcactgaactcccaaaacaactacccagtgacaagctccagaggttttaaacttttggaaccagtctacacatctgacaagtctttattaggtggtagtaaggtctgagaatctcaccaggtggcttctctttgaaaataactatcatggtctcataaataattagaattccaaactagaaataacccaagactttataacaaaatcagctccttttacagcatactttgcagtgcaatttgtgcttgtaaatctttctgggctatcttgagaagaaaagacaagttataaaacagtactgttccactgtatattccagtagatccaaaagttccatcatctacaatgaaagactagtttaataagagctgggacattttatactggagaaatatgaccaagtttaagagggataaataaatacaatatagatctttgaaacctgaaagctgtttgttccatcctgagaaaacccagttcatcttatcttcaaacaaatctaacaacccaaattccttacatttaaaaatcacaatgtcagtattcattccttctgctattaatttaaaattgatggcgatcacttcaataaatccatttaaataaagtgctagggtagactattgtctgctagctgcatgtaacttttttttggtaacaattaaatgaaaaattcagttcctcaatagcactagccacatttcaagcgctctgtagccacatgtgaggactggctggtgctagagtatgctattcagtgggtttaaaaatatttccccactccagtaacacaactttctttcatgtttgttaagggtgctttctatgtgctgagtaaatcaaataataccatgcaattttaatatgtaatactttaaaaatattaataagcaatgtttccggaatattttgtttccaaacgtgttatactatcgcttctctcagggacatgtgttcttcagattaacaggcgacaggaaaagatacgcctttgcatggtaagcagtcagggagctcatgagacagagcagccccctggcaaaggagatgcgtccccggcacactcattacttgtagctacaggaaaattctcaattacggcgtcctggctgtcaatcatctgcaagtggaccccgcctgctccggctcagggcggtgatagtcaccgttccggccctcctccaccgcacttcttcagaaagccgcaaccctttcccgtcagagcccctcccctcctcgcaccctgccagttcggcagccgctgcctccagcgcgtccaaaagcagaaacgtgtcctccgcgggctcgtacacgtcgctgaaggcgccgcggcccacgtgcccgtggaacggcgtagcgaagttctcccctgccatagtccttcgctgcgttccatgcgcgtgcgcagggcgtgcgcatgcgcatgcgcatgccctcaccctcatgcgcaggcctaggagtggggctggcgtcccgggcgaccagtgtgttgttgttgggtcttaattctaaatttgtcagtggctctccttgaaattgctaagtagacagttgtataatccgtgactattgacatttgctttcttctttggaacatttaaattttattctgtgaactagaacctgatagtgggcattctgagttgtttttgactaaggtgaatgttctttcttcattctaatgatatttggaaattctgttttattcctagtttgcaaggatttgaaaaaatacataataaattttactgtttttttgtcagctgaactttaagctttacgctataaagatgaagactttcctcgtttttttactgtactttataaattgccttcctgatgaatcatgaatgcactctttttataaaccttaagcaagatgatgcggtttaatacactgctgaattggggaggctaataatctggctccgtttttttttaccaagattacgctaccctcgttatgtgagttaggacactgtttctggaacattaggtagaaagccttaaaactggctgggcttggtgcctttttgagtgaatggatctttgatgttttggaacatctgtaagttattagactattcaagtatttgcattctttttgagtcaatttctgaaatttgtttcgcaatgaaacatttttacagctcgttttttaaatttgagaaataaaaatacagaaaagtatttgaggtacaaattttattttattttatttctacttatgtattttttttttttggagacagagtctcgctgtatcccccaggctggagtgcagtggcgcgagctaggctcactgcaacctctgcctcccaggttcaagcggttctcctgcctcagcctccggagtagctgggattacaggcgcctgcagccacggctgcctaatttttgtatttttagtagagacggattttccccatgttggccaggctggtctcaaactgctgacttcaggtgatccacccgccttgggctctcaaagtgctgagattacaggtgtgagcctttaacgcacccggctgggttacaaatttcaaaaccccaagttttaaacccagaaatgacagtattttctcatgtttccttaaaatattttttaaatacaagaactaaaatattacaaataagatggatgttctttctctatttgccttcagtttaattgtgtaacattctctccaaggctcttatggatttagtgtatgtccatctaatccatgtaaaaacatggatcttgtatttatacgtttataaacattcatatctttataagcaacatacggtgtattttaaaatttacataactggtactaggttggacatatttttcaaatttctttttcagtcaacattatatgagatttatgttttgatatatggttaggttactcctcttaactgccatatagaattttattatgtaaaaatatgaaaaatatatatatatagaaagagttgtacttgatctcctgggttcaagcgatcctcctccctcagcctcctgagtagctggaactggaaccataggtgctctcgcacccagtattaggaatatacaaatgtctttttatccaaaaatacaaaataaattatctgtaggcatggacagtgacagcagtaaaacattatatattttgtcacttgaaaccagtaactgattgttatagtgatttcctaaacatctgctagccttttcttcagtcgttttctccagctgacttctctgaagttattggtgaggaatactgccttgggcttcctgccacagttcattaattaaagtaaaacgctattctaatcattagaacttgccatttcccataacacctcccgttccacccattgcacccaatacagggtccttctctttttttaggaatttctttgactacaact

SEQ ID NO: 1562468 - DNA, 4001 bp, Homo sapiens
attatgctcccattctgccccacactacctacacttatttaattgcagttgtattttaactgcaattttcagggattgtttcttggtgctcaaaaatacctgtctatgctataaatgaacagttaaacacaatcagcagctatctgaaaattaaagaagcatatctgtaggacatatgtgcatgctgatctttgcttaagaaccactgaattaacgaattgggctagtattagcttcagatggacatatctgcaattttgctaagactgaaatatttcatactctatgttaggaagggaaaatgagcagaatcttatcaagacactttacaaactataggaatatccaacatttgcatactgatttctgaacattaaatctgcatccaatcgtgtttcatccgccactaacactatagctgtggggaggagaagggcagaaaaaggaaggcttcacatccaaaatgtcaagccctgctgaagaatgatagaaggactctgtggaagagcagaaaccaacttctgggcttaaaatggagttctaccaccccctgctggaccaaacgagcaatacagaagaggctaaaaatgcttagaactgaatatcttggggatattttaacttgtcttgtaatttattatattattttaaaaaaccaatttcacactacactaacaacataacattctttgcaatcattacatatctcaaaattagtgctattttatttttcctttaaagactttcaccaatgcatgttttagcattttgtgtccctaattaaacgtccaaacttgtctggacagttgaaaatgcttccatttattgtaaatatatttcatgtgagtgtttactatctaaacagccagataaattcatatctatctctctagagacaaacagtgatagcttccacaaattccctctcaggttattctaccaggctattcattttttttttttaagagataaaagcttccaccagttctcccacaaccccaaaaatcctctacaggtgtaattacaatgtaatgttataaaatgattccacctttctgtattaataaggggttggggtcaaaatgaatgactgcaacacatccctagttttatccatttgctttcttacacacaatatccacggcccctctcttagtttccaacagaaataagccatcatcattcacttcatagtcaggaattagggttttgggaaaggggtggaaaaaaaaaagagtctccaagaatcgaacgtcttgcacacagcagatattttgcaaatgagtttaacactgatagtttttgctgcttctgtaaaacaccatcgtgccctttccttccgcaacctcagatatttcactgttaacacactcatccaatttctgataataaaaataagagaaagccataatcccagaggaaaaaaaaagaagaagaagaagcggtttccctggatatcctgctcaccgattcccctctccaattctgtattttcccttctcttatttaagggtctccacacaacagatacaattttagggacagctaggagaaagaacgaaaataataataacaacaacagcaataactgtaactttagttctttcatttcattcttcctgcgcctccctctttgcctctcttggccgggtggaagggggagggaaagtaaatgcaataaagcgccacactcctaccttgcccgctactgacaagcaaccccagcaggtagaaggagaggaggaggctcatgttcaggacgtgacaccggtggacagtttcaaagttattaagtccagccctggagagagaacctttcgctgccccggccgcctctgctagagccgccgccgccgctcccgcggtgccccagccgcccgcagcccgcgcgctcctcctcgcaaagtgactgcaagctccgctcttgccgcactatatccaggcagcggcggcggcagcggcggcagaagcagcagcagcagcggccgccgcggcggcagcagagccgggcggggagggcggcgggggcgggggcgcggcgaggggaggtgcggccgaggcgtatccctccgcgctgcacggcggccgctcttccgcgaggcgcgcggtcccgggattcgtccgcagtggagctcgaagtcacgggttcggtccccggtgcctccgcctagaggggcggccgcgatcgcgaaggcgccactcgcccgccggccatccgcaggttcatgcacgccctgagccgagaagggcgtggggatgggggcagcctggagctccttcacagccgccggctgcctcaggacagctgagctgatgctgagctgagctgagctgagctgatgctcatgcagatgctgatgctgatgctgatgctgatactgatactgcaggcgaccgccccgagcgcgccccggctcaacgtgaatgggggatctggaggcgggcggtgtgccccgcagcttattccttttgggcgtgggaggagggagattcttgtctctccgtggacctccttctccctctctcgctcaaacctggagcaggctggccccttgcgcggctgtccccttcccacgctccccaccccgccgcgacagaggggaagcaattgtaccctaaagtctacactgtctgtctcctcaggcgctaaagggtgggcggaaaaataacgtacagagtgtttcctctacatctcgacccattgctgttgggagcggcaccttacgggagagacactggagaggggacgagccgcgggaggggctgcgttcaactcagccttagcctcagctgtgtccttagaggcctgaagtctctcctggcctcactccgcgggctctgccctcggtcccagtgcgctgcactggccagatccccgccaggagtgcaccgagggaggactgcaaatgtgcaaagatgagttgggtcgcgggggggagaccttccccagatcagtgccctaccccgaacacccacgtacccgcgtgtgcgagtgtaaattgaagtgagggagccgtggcaaacgcccggaactaactctctgctccttaagattggggcttatcgttatttctcctagaagggtaggaaaacgtttgtgagattaacgtcacctctcctgcaagagcggttaagaggcagaatcaccggcccgggtgcggagcccatgtcaatctggcctggggttaccgcgacctgcaaacgctgacgatgggtcctttcatctgcactttctctctggctccttagaaaactcaactgcctcgccccggcctccacaaggaccctagctccttccttatcagtgaggacatagaaatagcgggggttggagaggggggaggtagaaatgtagagctcagaatccagccccagcctggggatttcacgctgaaaagggcagtgcattgccttcagggagggcagggggcaagagtagacacaggctaacatgcataggggagataccgtctgcgatttgtcctccccaggcagagcgctttatacagatgattcgtccacttggcatcctgggatggggttatcaggaagagaggaggggaaaggcggccctcaactcaccatcgctgaactgccttaagcaatggccctctcagcacctcacagctagagaacctcttatttcctcttgatcttatagcagacaatatatttagaaagttattttgccacggtacccttctcacaccctttactggttctggaatgcactaaccacacttaagtaaactcatggtcagctctttgcaggaaagggtggaagtagcacatttatagatgtgaaagaccgtgactcatttatttactccaattcttcatttctcttgggcattgataaatgctacacagtaggccttctgcgtccacagttctacatcctcagattctaccaaccatggatgaaaaataactttaaaaaaaatgaaacaatgatacaatcaaaataacgtaaataaaaaaatacagcaaagtgactattt

SEQ ID NO: 1562469 - DNA, 4001 bp, Homo sapiens
tcaggttatccacccaccttggcttctcaaagtactggcattacaggtgtgagctaccgcgcttggctcttcttgtatttttagtagagatggggtttcaccatgttggtctcgaatgcctgacctcaaatgatccacctgtcttggcctcccaaagtactgggattacaggcatgagccacctgccaggccctatgtttctttctgtaaaatgttttcttatccttagaaaatagagtagaagaaatactatctggccactaaaatgatgtaggtatataaaaactgcttcaaaagtgtctacaatataaatgtgatattttatattatgccaactcactcagcatatactcactaaggcctattaagtgctagacagtacaatgttctagatgctggatacagaacagaggtgcctgtatgtgcacatataaacatgaaaacgtgtatgttcatgattgtaagcatgagtacatgtgcttatgtgaacatataaaagctgatagaaatcgttaggaactagatgcttgaaggagtaatggtagactgtcaatgaatttccctatctgtacttttaaattattctgcaggctgaggcacgagagtcgcttaatcccagggggcagaagttgcagggagttgagatggtgccattgcactccagcctgggcctgggcaacagagtgaggctctgtctcaaaaaaaaatatatatatattatatattatattatgatatatattatatataatatataaatatatattatatattatataaatatataaatatataatatatatttatataaacatattatatatattatataatatatatttatataatatattatatattatataaatatataatatatatttacatattatataaatatatatataatatatatttatatataatatatataatatgtatttatatatatatatacacacacgcatatatattctgcagggaatagttactgcttttgtaataacagccattttaaaatttgtaagagagtgaagtggtcttagccttattttatttatttatttattctgtcccccaggctggagtgcagtggtatgatctcggctcactgcaacctccgcgtcccgggttcatgggatcctcccacctcagcctcccgagtagctgggattacaggaatgcaccaccacgccagactaattttttgtattttttagagacggggtttcgacatgttggccaggctagtctcgaactcctgaactcaagcgatccgcctggctcggccttccaaagtactgggattacaggcaaaatcccaaagtgtccgcgcccggccttggccttagctttttatttgccgaaaagaaagcccttcttctccttttcacaggtcaggtcatgtcagctggcttctcaacggctgtcagtaagttaccaagttaaccaggtccctgaaagttccctcatttcctctcttggctaaatggagaagtcactgtccttcagagaagccgtgcgggagccgcacagcggctgaccccagccgcgcggcagcatcacctgggaacgtccacccgagtctgccgcccaggcatgcagccctcgggagcgcccgtcggcacggggcacgccagcctcggcctgggcctcgggcagcggcggcggcggaccggctcgggggaaccgcgggacgctcgctggccacatccgggcctggccccgtggcggtcagtcctgggcccagggagcggggtcagcggcccaactaggacggctagaggtcgcggacaggcccggacctgaccagcaccgcgccccctcaccccatcccctacgtaggctcggggccgcgcagccagcccaggctggctcctcctttaccttcagcgccccggctcgtccttgccgcagcaaacacggggcagccatggcggtgacagcgggcgcaccaagcagggccacagcagctgcgcgcgcacccgcgcctgaacagccgccccttgggccgactgcgccaattacaggccagctgggggcggagcagaggccgtgggtctgcgcgcgcatccccagtagggctaagtgcctcccttggggccacgccccggatcgggaccaccaatcacaggcagcagcgtgagggacacgtcaccggctggtgccgatccctgtgccctgcgggcgcctgggcgctgtggcgggggcgcggcggagacctgcgggggctgctgggcacccctctcaggcgtctgcgctgggccggcttgcatgtccacccgaacgcttcgcacttctttgcccttgtcctcgcagccttaaatctgcgaccttccctgggggcacagtctggtcctacttgattgatagttctgtgttttgagaggttttaaagctcttcagctcgggacctcggcgcccacaccacgcgcccagctccctcaccctctgtcggcaacgcggccaccactgctcactgcccctcctgcatggcccctgccaacgctaataccagagttaggccgattggaaatggaagctttgtttcacctaaatgtttatttagcaaagagttcgtccccaacgttagtcgtaattgtggagtcggtgtaattagttattagcttctttctctgcctcttctctgccttccgccgcgtgcccagagccccattcgcatttcatcggagatggacgtgccaccttcagcttccacaggggaagaggccctgccacagtcatttaaatggattgtgtagggattcctgacacagctagcgattcattgaggtggcaagataaactggcggaatgaggcctttatcaaaggcctttatcaaagaggagtctgctatcaagtaaatgcaagggcatctgccaccatccaccctgggaggcaaaaagaataaccttagatcttaggataatcatgagaagggatcctttgtccctaaagggagaaaaaaaaatgccaaaagattttttttttgtttaaattttttttttttttttgagacggagtcttgctctgtagcccaggctggcgtgcagtggcgccatcttggctcattgcaagctccgcctcccgggttcacgccattctcttgcctcagcctcccgagtagctgggactacaggcacccgccaccacgcccggctaaatttttgtaatttttagtagagacagggtttcaccgtgttagccaggatggtctccatctcctgacctcgtgatccacccgtctcggcctcccaaagccctgggattacaggtgtgagccactgtgcctggcctaaatttttttttttgagacagagtcttgctctgttgcccaggctggagtacagtggcacaatctaggctcactgcaagctccacttcctaggttcaagcgattctcctccctcagcctcctgagtagctgggacaacaggcatgagccaccacgcccggctaatttttgtatttttagtagcgacggggtttcaccatgttggccagactggtctcgaactcctgacctcaaatgatcgcccgcctcggcctcccaaagtgctggggttacaggcgtgagccactacacccggccagattttttttttcttcaccactaggctcattctgttgtgtccagggaaaaggtcatgctcgcctttgtgaggtgtgcttaataattcacagcttagtaacaaatttggggatcctgatctggaattggaagatccacgtcaccctccttcatggacctggagctccccacttccacaccaccaccagcgggcacatgcggcagatgttgacatcttgctggagttgcaacactcaagaagaaacaaaaagaaaagacctcctctggcgtggtcaccggccaggttggtaaaggtggggtacctatggttgagggggcatgaaccatcttgattttttttttttttttgagacagaatctcactctgttgcccaggctagagtgcagtggcgcaggggcaatctcggc

SEQ ID NO: 1562470 - DNA, 4001 bp, Homo sapiens
caagagtcagaaaagcctttagtctcttcacacacttctttagtgcaaagttaacaatattttagggtgttaaaattagcaaaatccaagttctgcagagtttagaaatgcatgtaaaagaggcattaaacctggttttcaactaacttcccacaggcattaaacctggtttttcaactaactcatttgaataaaatcaacaacgaacagtccttttttttttctgttatgttctgatgtatattttactcacactcctagggcacttttaaaggtaagtttggaaagaggtctttctccaccagagtatgaaacagactagaacaaccaatcctacaacctgcagggcagtagccgctccactaattgattctccttctttgtctctaggaactatgcccaggcagaaaaaaagttactgtaggtgatgaagccagtgctccctgaaccaaataaaccctatcgacgttaccgaactgccgggcaaaaccagagcaactcacttacttggaaggtgaaaaacacttcaacatactccaggcggcaaccgacacttaggggccaggcagatgaaacaccatttgtttaaaaagtctattatttcactgtctcttcaacaaaggtggaaaactgatgattaaacactgaataatgccacccacttactaaacctatgattcactaataagcaggttcaatgcaattcataactttaaagaatgaattaccgaagccccttgcttcacaaattcccccaagaaacagaaagagcattcatcacatataacccgacaaccatttttactatggacacctacagatggcttctcttcctctaaggacacaatttccttcacaatcccacatgtaatcatttacaataccagaaacaaactccaactcagttccaccaactgggtttttaaaaatccttgtgcctaagaacgtcttttttccccaaagtaaaatgtgccattaaaaaatatttttaaaacgcaaaagtgcttatcattccgtacttcttttactaccttcagcagccaattattgacgtgataaaaggtagaaactcctggaatgcttcagagatcaacatgtgtcacagactcccagcctgtccgcctctaagacacagttggttcctttgttccttctgactgaacaccaactcctgatcaaaattgggaaactactttggaagggatgggagggtctgcagaatacatccacggaaaccttcataaaacaatattcaatcgtaataaggtggacacagaagaagggagaaaaggcagcctcccggacttccaccgggctcaccctaaatgggggccggcccctggctcctggtaaaatgatggctgaggcctcgggtccgtgagcctcgccatcgggaggggaccgcgagtgcgggcagagcggcccggggtcgggtgggggccgggcgagctgtcccttttcctattcactttcccagccgggtatccagcgagcaaggagcagggaggcacccaggcgaaaggcgccgcccaggatccggctggacagcaggacggagagcggcgaggcgagcggtgcccggggttcgggaccgagagggcaagcgagcgggggcaaccccgacccggccccccgagtccggccccgctcaggggccacgcgacggccgcccccttgcccagaactggcacggacgggcgggccgacccggggccactccacaacttgccggcccgccgccccggccccccgcgagaacccggagactcgaaccaggcagcagaggcaggatttccccggaaacgcgccctccccgccgccccgacgcccccgcggccctgccagccaagcgagagccgacgcgggccgcgctcccgggccgtttccggcggcgccggcggccgctactcctggcgccctggccgcggccgtcactcaccccaggccgccgcggctcccagcctccggctccgtcaggctcggtccgcgaaggcgcctgccgccccgtcctggcccggcgccccggcgagctcttccctccgaccagcggcgctcacggcgcagcggcggacgcgaggccacgggcggacgggcgcgcgcgggtggcgggcgggcgtggggccgggtcgtccctgcgcctcgccgccgcctcctccgccgccgcctcccgagttcggggctctgctgcaatgtctgcgaggctgactttgagcgcctcgctcaccgcccgcccgcagccgcgctcctccctccgccgccgagtccgccgcggcccagtccctcccctcgccgccccacgccattcagctcttcagccaagtttcttaacccttttctccccctccctcccattgtcacccggtcaggaggaagccgcgcggatccgggcggctcacaggagctgcggaaccccctctgtttcgtggatttccttctcgcctgctctccgggtgtcccagacggggctgcaagacccggaggcagcgagaggaccgcgtccccgagagaggggctgcacggcgcgcccgggccgtcccccgggctcccagctctgtccagccgcccgcgaccgctgcaggcgcctggacagctcctcctggggaccggggaaagcgctcttgggacccaggccgaatgctcccgtttgggcacagcctgggggccggggcgccccagacgctccagggtccccgcctgccttaagcgtctacctcctccccttcaccccacaacacgcgctctctgggccccctttcacccacccacccccaatttctatctccttgtaatctgtgtgtcctgctttaatgttggggggcacgggcgcgaactctgggtcactttgaccccacgcccagcacgtagtaggcgcccagcactcgtgtggagcgactctgggaggaaaactaggaaggagacctgaggagcgccccgctcagctccctggacagacgtaggacccaggagcagggttaatcctcggctgctttgtcactgcgaagtctccagcggagtctgtcagccaatctgcatcatccccgggaaggatctgacccaacaagacaagggaaaaggagcagggctgctacttcttcagcagctctcctcggttcggtctccgaataagaaataacaattacatcacgaggccggggcggcagcgcggtggagcctctcggtttcctgcagcctaatctcactgaacccgcctctaaattgggggggccacagattggtgaaacgagaaagtggaaggaggagagagtcatacgaaaccataatttccccttatccttgtatttgctgtttgaaaaatcgtatcctcaacgctccccagacatctcactagaactattaacaccccctcaacacctccccagatgtcaggtttctttttgacttgagcatctagcatttagtaattcgccatgaaaaaaattaccaggggaagcgagtgttgttgctgaaattgtttttgcttgacacaaaaaagctaaagtacagcttagtctcacccgaaattctgaaacggcatgcccgtgttaaaacacttattacataagacaaatgagccgatgaggcactccattcttatatgtaggttttcatatcctgaagaatttgatagcatttggaaatgaagttgctaatgcgcttaaaaaacaaaaactatccaagtcatgaaactgtattctgtgcctgttatgtaatggctgtattgtgtattgcaaatttcacttaacctttaaacaatatgaatgagagttttagaatactgtcacagtcttgaaagtgaaagcaatttttcaaattaatgcttaataaattcagcacccagcacagtgccgggcacatagtgccaatgttttccttagtggcaatggcacattttaaaacaattatttttcatcaccctagtgattgaactatgcaatctgttgccattttatatagttaaacctcatataatataataccatattatttgcatataccacaat

SEQ ID NO: 1562471 - DNA, 4001 bp, Homo sapiens
ggcccgctgaggaacagcggaaagcgccttcccgccgtcgccaccgcagctgggatccgccgagcagcgggcggttcagggctcccggtactcctgcgtgttaatgagaacgttcattagcgctcttgacaggacggcgactgtgagacgcctggttacctattttagtaaatcgggaacactggatgcaaggcggttggttttcgtttttaagcaagcttaaatgttggttacgctacttttggggaaagggaaacgaaaggtgaatctcgagttctaagttgctttctaagaaacccccaggatttaagagcgaaaactctctgcgacaaaacactggatacgcgagtcttaaatacagctctccaaacagctggtctacaaaagtggacccacgtcccaacccagcgcaccctgcgttgtcctcgcccctacccaccgcaccccgacgccgaccacctgtccgccgagggtccgtccgtctgccacgtcccagaccgtctgcaccgcctaactggtctttttctgcctcttgagttccggcagcctcctttgataggacctggccggcgggaacaagggcgcccgtggcctctggcggaggagaaggaaaagaaccacccctccgcccccgccactgctcgagcgcagcccctagtactgggagccggcgtgctccgctccggggaggtagcgctcggggatggcctctcgctgcacccggggcgcgccaaccacggcaaggcgccctaagttctacatcggccccgcgaagcgcgcaactccagggacaaggagagagatgtgctgggtgagagcgagcactttctgcctaaagccgctggaaccgacccagaaccccaaactgccccgaggcgccatcgaacatccgctctggtcactttaacgtcccaggggtgggggcggggaagggggtgcccgacagtcccttcctctggactggaaggttcgaaatgctttccttgctcggcctcgctctcccagacgcagggagcaggggcgcggagaagctgagcgaagggaggccgggccgaggtcgcgccccaggcccaggcccgccctcacttggagaattgcgcctgcacggcggccaggcccaggctggccgggaccaggtgcgggaacttgcacacggcgcaggtgcagaggccggggccgcctgcgccgccgccggggagagcgaactggccgcacggcggctcgtccagcgccagcgacaggtacttggcggggcgcagcgcgtcggggggtcctacggcgccgggcgccagcagcacggagccgggcgcggcggcgagcaggggcagcccggccagcagcaggcgcggcgcggcgggcccggcgccctcgcccagcgcgcggcgcagctcctgcagcgagctgcccagcagtaggatgtagttgcgggcgagcagcagcgtggctatcttggagagcttgcggccgggcgcgccctggcagtgcgccgctgagtagggcaggatgacctcgcgcagggcgtccatggccaggttcaggtcctgcatgcgcttccgctcgcggctgttgatcttgcgccgcagctgctgctgctgctcctccttggcgtccggccgggcgctgccgcccgggtgcgcgcctgacccgggcccggggcctggaggctcggccggcgcctccggcttctcgcgcgcagccttggggaggaggggggccgtcgtggaggaggaggaagtggaggaggtggaggaggtggaggaggaggaggaggagggcggctgcctgtagcccaccagctcgtagagggaggccccgagctgcaagtctccgggccgctgtggccgcagcatggtcccggggaccgcgttcacgcgcgcctgggaaaccgcatagtacatctgggaggcggtgggggcggccgaggacgcccttcaggaacgccctggggtgggccggtcggcaggccgcccctccccgcggacctgcgcgcggggaaacgatggtggggccctggcccgcgccctacccctttaaacccggcttgggaacctgcggggcagcgggtggcggggcgcagccaatggaggcgcgaggccgggcgcagccgcgtgttcattggctgcttgtgccggggccgcgcggaggtgcggctggcaccgctttaggaggttattgtgagcgcctgtgccagccgcgcgggacaggccccctgagcggagtaagggcgccttttcaaggcaagcggggctgttgaaggaggactggtcgcactggtcaggctgcaactcacgtgccttcctccagcaactgtctactcaaaaacaacctccctcatatttttttttaactgtgatcacatattcataacataaaatttaccgtcttatgtttagagtactgttcagtaatgttatatgcattagtgtgcacattaaattgatttaaattaaattcacattgttgtgcaacccatctccagaactcttttcaacttgcaaccctgaagctccacccattaaacaactccccactccccccgacccaagttcctggaattcactcttctgttctgtctctatgaatttgttctactctaggtccctcatataagtagaatcatacagcacttgtcttttagtgactggcttctttcacttagcatattgtcgtcaaggtttatccatgttgtagcatgtatcaaagtttcttccttttcaaggctgaataatattccagtatatggatataccacatttggtttatccattcattcgttgatggacatttggggtgcttttggttgttgcgaattatgctgctatgaacatgagtgtatcatgttttttttttcttaaaatacataatttcctgccaggttcaggtcgctaaatttctggactaaatgacaagtagcattaggatatttcctccctgctgctcccaacctccttccccatccctctgattgaaaggtctttagggacaaaggagcctttgggtcgggtttctatcctccccgaaagggatggtctatcagcaacttgacatttgcttaagcaaaagtcactcagaaattggcctcttattagaaacaaaacaaaacacccacatagtcctatcggttgagggtgggaatgaatcattttatttgccaaatagaatagcattacttggtgtctatggacattttctgcccccagcaccagtgcatgctactataacttgtcaatgtcctggggaagagggcatcttggtggctgtgcttgctggtttcagggctgctttgttctggttttcttccaccaatatttgccacatgggttcactctgatctttgcttctgacccccagctctgcctgtagcatcctgcctatgcctcaggttcagctccaaccttgctttcttctggaagccttggtgatttctcctcttcctcctttcatgactcttggcaaaccattgataggatttcttcatagcctattgtgttatgtagataccatctctgcatttggctatgattgttttacggtagggaccacctgctcatttctccatcttcctgaagcctagcacagtgcttggcacttactgtgtgtcctggaggtctctaaagatggtctgaaatctcccttagctcagaggctcatcccttaaatgcacaaactcctggcaatgctctaacccaagcattttcctaaaggttttatagagagggaaggaacctggtaagatctcctgcctctcagaggggcctggcctgacatggacgtggtgctgggggccccactttgggagagagagggaagccttggtaggaaggagctgagtgcttaagcagaaccatactaagcaggaaggagagagagagaccaagggaagggtcttgaatgtttcaagcaattaagtttaacacctcactaatcatttcgccttctgttgaagcagcttgctttcaagtcatttttacagacactttcacgtttggttctcatggggc

SEQ ID NO: 1562472 - DNA, 4001 bp, Homo sapiens
ccagcgcaggccagtcctcgcttccccgcggcccctggctcccctgtcgccagaacgcgccggcgccagtcggctcacttggcgtcggaggtgaggcgcggcaggctgccggcgcccatagccgacacgtggtggtgcggcggcggcacctggcacatgctgcaggggcagggcatgccgccccagtgctggaagcccccgctcgccccactgccgccgcccccgccccccagcggggcggccgcggcagcagacggagacttgagtaggccgtgcggtggacggatggagccgaccgacggcagcccggatccgggcagagaggcgctggacacagccgcggctgcagcggcggcagcagccgctgcggcggcgggcggcaggatggggtggtgcaccgcggggtgatgtgcggcgtgcgctgctgctgccgggtgcgcggtggcggcgggcaggggcgcggagtgcgccaggccgccgcaggccgacgggtggaagccagcgtggtggcccccgtagatctcgctcaccagtcgcttcatctcctccagcgagttggtgagcatgaggatgtagttgcgcgccagcagcagcgtggcgatcttggaaagcttgcgcaccgaagggccgtgtgcgtacggcatgacctcgcggaggccatccatggcgatgttgaggtcgtgcatgcgcttgcgctcgcggctgttgatcttgagacgcagctgctgcagctccggctctgtcatttgcttcttgtccttcttggtggacgacgcagccgccgacgacgtagacgacgaggtgctggacgaggatgacttgaagccactgcctcctagcttgtccccaggatgcgcgcccgcagagcccatagcgccgcgcagctcggcgctcagctccggcgggcagtcactcggggtggacgaggacacggtgcccccagtgaaggcgctgccgctgctgcccttactccgggccggcagaaaaaggtcatcgggctctggcgacgacgggcggctggacaccaggctggcgtccgagtccatggccccaggggaagatagtcgtcgcagctttcgcagggtcctccttccctcggacccgaaaacttccaggagaggaggagaaaagagagagaatgagagagagagagagggagagagagagagagtgagtcagtgagagacagaaaagctgctcccgcctgcaccgcagtaccacagcgcggggtcccggcacaggtggcccgtggctcctcgtccccctcgctactatctctggccctccttttagctgcacgcgggtacctataattaagctctctctatctcccctctgctctcatgcaacaggttatttcagggagcgttggtgaccctcggggtgcgggtggcattctagaggcttcgggctttcagttaggtgtgggaaaactgagcccccgggctggaataaacgagtgggaagtgagggcctttctttggggagaatggagatctagatagagaactaatgatttggttcctcaaacggatccaccttatctccatcgacaccacgcagcaaacacacgcacacgcacatgcacccagagccggcgcggggcccagagtccatgtgctgcatctggagaccacggggagctcaccagctgactggggcttgggcagaaagagctgttgtcgctccgacttctcgcttttggtgagggagatgcagcggtgagtgtggggaggacagaagagcaaagtcgctctggagaaatggcccgcagagtagggatccagaccccctgtatcggagcattctgggtcacagccgagttgaggagagtctgtccctgggatctaggctgcggctgctgtggggcggggacacttactctggatgcgatttgaggagctcgctccgaaaagcctcaggggagaacctggcaccgggcgctggtgtcgcgtcgatctataataagcatccgcacctttaggggctcggccggtttttatagcccggtggcagcggcgacggcggcagcggtggcgggggcgggggcggggaacaatgtgcgtgtcctggaggggctgcctcgccaatgagctgggcccgccggggggctgggaagctgatgtcatccgggctaattccgctcaatgaaactcgccaggccgggcacacgcctcctccctgcgcacaaccaatgggcgcccgtggccgggagattcttggggagggactggaggagggacccgaggaggcgagggggaggagaagggcggctcaagggggatggagggagggctgagcgcgcttgggaccaagggagaaagggaacgtggtcaaatttctgtaaaaaatacggccaccacagagtcaggttgggggatgggatggtttggagactctgcagagtctaacaaactaacctgatgccccacgcagccgcaccttttgggatgcgcgcggaaaaccctggcgacccaggatccggggctggggtctcctccctagctcttcctctgtctggtttcccgccgcctgttcccatctcactggtttcatcaacacgtgggcatttggcgccccaaatgtaaacgatgcccaggcacaaagtccccactatcttggtgctctactcgcgcgtctaggagatggccgtggctgcagctccgacggcagccggtagcgcccccagctgggggcagggacttgaggggtagagggcgggcaaggagggaggggacggactccagaagagtgttttgaaagaattcacaactctcctttaggttgaggatggtgtgggtacagggacgagttatttccgcacggtaaccgcgctagcacaagggcagggtcgtgcctgtagttaaacacccctccatttattagcaggggagccggatgatagtaagtattttcagtgtcgtctttgtgatcaccacacgccttggggcaggggcaacgctggcatctgtagtccaagcagggctccgctgtaaaaggttagcaaagagccttccgtcccagtcgcctgctttctggaactgcaaagagaagtttcaggcctgggcaaggcttctccacgctgtgggccagacagcgagatggaaccactcgcgaccgcgttgggacatgttttaccgattgcaggctggctctgaaacctgaaaactcttgacgatgaggaattaagcccgaactggagaagcacctcacggaggtagctgaggtacggatgcattcacccattttacagatgggaaaagccagagaccgtgtgcagcaagcctacagaaaaaattgctaagcctttacagagcagccctgcttggactacagatgctggcgttggcggttccttatagtacaggcagccacctgtctcccccagtccctaatctcttccccgagctgaatttctcacacccatacatttcgaattcagacatttgtttctgcagatctcggatgctagcacttgacactgtgagcgcacgcgcgggcacacacgcacacagtctcctagggagtgtgaggaacgtcgggttacttccgttgttggggaacttttactgtgcaagtacggttttaaaaacaagcaaacaaattagcatagtaaataattggtcttcaagtagcaaagttacaaaataaacaaatacaaagagaaacccacgttattgcccctagttctgagatatgtctccctctgcggtctccgctagaagcccagcccgctctcgccttcgccccagtctcgtgccttctggagcattatttttcaatccgcgtgtttcccagctggctctgcagccatccgttaaatatgtatttaaaacatgaagaactgaagcgtggtgttatgtcgtccaacggttacaaggatgacccataaccgttcaattagtagaatctgtcactcggacgacgcagggagcgggggggtggggatcagaaagggctcgggcatttgtagatgcctccttcgggcctaccccgccaac

SEQ ID NO: 1562473 - DNA, 4001 bp, Homo sapiens
gatcttctttatattccttcttgagcaattttactatctttttgctataacttgatttcttcactttgaaaacttcttcattttcttaaaaaggaaattaaatgaagtctgtagcaactattttctgaaaatattttcccttctttcacatgatcttacgtgctgtccaaattatcccaaatatatatactcatatgccaaaatcattgtataattatttcaagtctgtcacagactcaaaaacagaggtcaacttcctaaattactgtgaagtaatgagatttttgagactttttaaaggaatagcacatgtaacttcacaaaattttcctattattgtcgtccttaaatcatctatttgagaggggaaaaaatcattcaaaatgtttctgaaaaaccacatcaccaagttattaacgaatccgaaacaaaatatctaaaataaaaaggtgctgtcaattctgagtaactacatccaccacaagctgacatagtggttttaaagctaaggtaagggcaaatcacttttctttgatttgaaattttaaaagtactaaatacttaaaaaaaaatagctcatgtatctcaaaaacaaaaatctgtctgtactcctctcaaaccaaataaagagtaacagaaatgccaaagataaactacctaccttactggaaacctctcgaataaaaatgcaagatttacaaaacttaatttcttttttcgtaacatggaattaactgggttatgcacattcaaatggtcagaagaaaagatttaaggctcatttaagatcagcaatctaaaaccactgcagcctggcctcccacaggaattggagaaactaccttgcttttactatttttacaccgtctcgcttcactgttcccaaagtcagtgcgaagaaggctgggtatctgctacccctaattacttttatgggtaaactgaggctcagcgactgcaagggactggcccaaggtcactcagaaccagagctgcaactccaggcttctgttccctctcctagtattcctttttacaaactcggccttcatggtcgaggatgcctggacagagcatccaagaagtgtgggcgcagtgacctgcagagggctcggaaagcatgccaagagcagccaggggacccacaccaagttggccctgaaacacgccaggcagaaaagaggcaggacagggaacaccgaatttcccctgaaacactctgaatgcctgatctgagctccggccccgtggcagaggaggtggttaagaaaaggctgggggcagcgcgggaacgcgtcccttgcccgagcagaaggccggaggctggggaagattcgcagccggtcggacggcaggggactccgttccagggctccggggctgggcgtccagagaatacgggggcgggggacgggggcctgcgtcggggatgcggccgtctaagggcgtccgaagcgcgcactttaccttcctcctcgtcctggaagctgagcaggctggcccggggcacctctttgttctcgcgaggcctcttgcgcggcttcagcccgttgccgggctccgcgccgccggggaagccgcccccggcctcagccccgaggcccggggtcagcgcggaaggcggcgacggccccgggcccagcagcgactccccgccaggggccctgtcgccgccaccggggcccgcctcttcgcccgtgcccggcggcggcaacaacggcggcggctcctgctcctcatcgcgttcccgctcttcctcttcggagtcgttccgcttgcgcacgttcacccgccgggcctttcggaacatccccgcggcccgcacggcggtcgaatactcgcttccacaccgcggccccggcagcgccgagctcgtgacggcgcacgcgcgctctccggagctccagccgggtcgagtcctctgttgctaccgcgcaccccacgagcgcgcatgcgcctatgctcccacgcgctctcaatacttggagaaagagagagagtgagagagagagagagagagagagagagagagagagagagagagagagagagagagagagagagagagagagagagagagagagagagagcgagagagagagagagagagagagcgagagagagagagagagccccacacctctcgcgagagcgtcggctctttgcatcgctctctgtcggagtggagtactattagcatggaactctggtgttgtttgacaggtcacaaagaggatcatagagatgagaagaaagagtaggctctgttgtccctcagacggcgctgctgcagtgcgtcttcgcacttacgcggagcggtaatgtgaggaagcctcccgccaaacagatgagggaggaggaggaggggagaggccagagagagaagcggctttcgggaaggaaagtgtgatctagtaggtggaatagtcctctccaaactttgacctgaggtgtgactattggtaattactagttattcttgagtaatactttgtatttctacagctttatagctacagagctcttagaaagacattgaattttatttatgatacaatgttacttcaaagacattgaatttcatttatggtacaatgttacttcaaagacattgaatttcagttatgatacaatgttacctggcttgatgtcccccgttccccagtctttcaggaacaaggaaagcaaaagtgtttccgtgttttctaaagaatgccaagtttgcaagcaattctatgactaaatactttccaaagcttagtgagtttcagaaacaagtggaaggaaaatagagcagggggtggggaaggttgtgacagttctcagacttgcgtgacaaagccctcgctggccacaccttcacagggtgattgcgcctaaggttgaactcaccggctttccctatctcatcaccgaactagaagtttttccttcgggcatgcacctgtgcatgcgaattcattttgatgtttcgaaattaaaagggtattcggtagagtgaaaaaaatccacccatgtctggaaggctgttcacttcctcagtggcaatgttaacagtttcttatgatcctctaaagatgttccatgaacataaaagcaaataaatatgcatattttaatgtgttcccctttttacacagatggtgtgtaagctgcatttttagcctaccgtagattggagatcggcccatatctgtatatgaagggttgtgtttttttggttttttgtttgtttgttttgagactaaatttcgctcttgtcgcccaggctagagtgcaatggcgcgatctccgctcactgcaatctccgcctcccaggttcaagtgattcttctgcctcagcctccctagtagctgggattacaggcacgtgccaccacgcccagctaatttattttgtatttttgtatttcactctgttggccaggatgatctcaatctcttgacttcgtgatccgcccgcctcagtctcccaaagtgctgggattacaggcgtgagccaccgcgcacggccgtctatttttttttttaacccacctgcgtagtgattcattgttgggatataccgtaatttatttaaccagttccataaacattgatatttagattatttctagtcttaatcagtgctgtaatgaaaagctttgaaaaactgttacatctgtaggatgaaatagaattgaaattgctagatctcaatatatgcatttatgattttgctaattctaaatttctttttatagaagttatgcagtttgcacttatatcagcaaacattaggatgcctgtttgcccacaccatcctgtagaaatttcagtaagatttaaattccaggttgaagtggaagatcccgagcactccaagcatttctttttattttatttatttatttatttattatttgtttgagacggagtcttgctctatggcccagactggagtgcggtggcacgatctcagctcactgcaacttctgtctcccatgttcaagctattgtca

SEQ ID NO: 1562474 - DNA, 4001 bp, Homo sapiens
tcagggctggggagctttattatctattttctgaaacaatctgtgtaagttagaaatcaagtgttccttaaagttaggtataattcacccataaaaatgtgtctgagaactttttttgaatggaagtctttgattgtcacttaaatttctttagtattattggcttatccaagttctctatttcttctcaagtctattttggcacttcctattttcccaggaagttatcaatttcacctatgttttcaaatgtgttagcatatggtttcccacagtactcaacttttcttcttggctgtatctatggttatttctttacctatctatctatctatctatctatccatccatctatatttatttttatttatttattcactcattcactcctttctatattctgttccatcgactgtcaccagtatcatcccttcactttctttcttttttttaagacaatctcactccatggcccaggctggagtgcaagggcacaatcttggctcactacaaccttctcctcccgggttcaagcaattctcctgcctcagcctcccgagtagctgggattaaaggcacacaccaccacacctggctaatttttgtattttagtagagacagggtttcaccatgttggccaggctggtctcaaactcctgacctcttgatctacccacctcggcctcccaaagtgctgggattacaggcgtgagccaccacgcccggcccttccactttctttaaccaaagatctaactattgactctaaaacacaaaacagctttcagggctgtgaattttctgtttttctgtgctctctatttcactgatttctgccttatggatccttgggctttctctcttgctcttttttcagcctcttgagttaatttttcatgtttcttaacacgtgtttatagctacaaatgtccttctaagcactgctttagctgtgtcatgctaatttggacatatactgcctcataatcactcagccctaaagttcttttatttcttttatgattttatttctaacaagagttttttatagcatattatttatgtaagctattcctttactattaatttccagtataattgccttatgctctccacatgctgtgttatagacagatttcacctgtacacatacatccctatgttacagacagacttcacctgtacacatcctagtactgtacatgctctctgtatgcttagaaagtaacatgtagagttcaaaatatacctaacagctcaaacttatttattatattgcttaagatattaatactcccgtttattttttggtgacctacttcttgaagggatatgttaaaagctccaaacacaactgctcattcatccaacgttccttgcaattgtatcaacagaagttcatggtagcagctcaagccacggcactaatgtctgcagggtatcaccagaccaccaaaacagcacccccactcctgatgctctcattacctactctttccaaacacctcaggacgatcttcagcccccagcacagccttcttgtccttcattcctgaaacctgtgcctccttggcttctcggggctggctccaggggagagctggaaggctgtgcgagaaccacctggcctggcactggacccaaaggtgttcaaccacaaccagctcactgctatcaaaagcagggatccccaatttcccaaagtcatatacagaatagtcttcagggcacattgtggactgaagcagggtgaaatacagcactgtgtcacttcaaacagatttcatttgtcaagggtaagtctgactttgttatatacactcttggtaaacaaacaaacatggaaacaaaagacagtaactcaccttcccccataagcaggctataaggtttagagcagatccatagacagcaaaggttcagacgtattgaactcagagcatcataaccacagcaggtgatttacagaagggttgacttttgtcgtggagcctaccgacctaaaacacaaaaacacagggctgtgtgagcgcaccagtgcagggcctctccgccagcactgggcttcaacggaactgcctcttgccttcaacacagcagtcaacacctcttcagcattcgagtacaaggcacagtgtgagtgtggagacagagtgccagcaagcgctcccccctggggctcttccccccaacaccccaaatgaggtgactcaacccaaaggcaggcttccacttcacaagtgagacgtctacatgaaatgttttgataaaattgcacttacttacgtatttccttatatctacactgattttaaaacaatatttattaaattatatattaatttaaatacattgctggttttctaatttcactgatagtgaacaaatttcatctaatttcttcaatttcagcatggtcttagaggagagacttggaaaaaaaaggcacatttgaggttggatgtggtggctcatgcctgtaatcccagcactttgggaggccaagacgggaggatcacttaaggtcaggagtttgaggccagcctgggcaacatggtgaaacccccatctctaccaaaatacaaaaaattagccagggtggtggcgggcacctgtaatcccagctactccggaggctgaggcaggagaattgcttgaacccaggaggcgggggttgcagtgagctgagattgcgccactgcactgcagcctgagtgtgacagagtgagtgagactccgtctcaaaaaagaaaaaaaaaaaaaggcatatttggaaccttgggagaaaaagggaaggaaggatggaaagagtagaaattcagtttcctacagaaataaaagcatagcaaggcataagaagacacagatttaatccatctccaaatgcaccattcagtttttttctaaaaagaacctacatttttgctgaccaacaaaaaaggatgctattggacaaagaaacctggtaaaccacctgtgtcccttggcatgtccattcccagctagaaacacctgttactgctagtgcaggaaaatccaagtgcttttaaaataaatagaaaaaaggcatgcaaaatccctttgggtaaatgatgttctccaagtcgcagacactcctgaagtccttcatggctctgagagaggaaaacggggtgtgggcactaaaacttcttcagctaatggaactgagaactcccacccagcgctgcagtccaaagcaaaatgagtaaaagctgagaaacagaaatgaaacactaaaaacaccaggaacacaaatgtacagttaaaacaaaaaactgtgaaatgagaattaatttaacccaggacagaaatgaaagagaatgacacaattagcctagaaatgagactaagttacaaggtaccaaaagagagagattcagctgagtgtgaggcaggacaacagaaggaggcagggaacagaaggctgatccatccaggctgactccctagaactaaatcaaatgaaagctcctcagcaatgacagggatgtgaacagctttgcaactgcacttcaccctctccgttcacggcatttaccctttgtaacttcatatgcatcctctccatttatacagaccacacactccaagtagcatcctctccatttacagtagggtgcattctgagtaaatgactctgacttcacttcattctcttcattttcatagaatattcgccaagtaaccaggggaaacctctagagtatcgaaaccccagaaaattctgtaagctcctgagtcccgatggtcaggctgctcccacaccatggcgtgtactttcgttctcaataaatccctgcttttgctttccttgctttgtttgtgcgttttgtccaatcctttgttcgagatgccacctggacaccctctactggtaatgactgcataaggaacactgcaggaggactgagaacatcaaagagaacatgaggctgaccaagaggtgagagacgcgcagagaagctgccagatacagagc

SEQ ID NO: 1562475 - DNA, 4001 bp, Homo sapiens
agcccttggcagtttacagaaaaataaaactttaaaaaaaatttgtataaaagattgatagcttaatcaaggcatatttaagttttaaaatgatataaaagctaaatctctcccttcttgccccaattttcccccaactgaagaaatatatagcccagccaaaacttcctagccatagattctgagacaagatacagaaatagcaaaaaattaattaagccaggtcaatctcacatcttcctttatggaatcagatgttctatttttcatgacacagctcaccaaagcaccagggacatccacagagcatcgcccatcagaaggcacagcctagctctgctcagtcctcaaatccgagagtttgagactatgtgcgagcctcatctcccgctaacgtcttactcaagaggtatgcgatcgatcccacatcagcctttcacggggagacatctgttccctcaaaagacaactgtggccacaaaaacaaacgcatggaacacacatttgtgtaaatgataacacaagtacacaagctcatggacccagaaaaattacacaaggccatttacacaagaaaatggtctctcaaggaaatatttccttcaaagtcaacctcatgtcgtttattttcatgtcctcctccaccacacctatccatgtcgggatatagcacagacctggtctgcggcctgcgtcgccctacaggcggcgtcttgtccctccctcccccctccaccctcctgggagctctgctcctgttcgcagctccctgcaggctccgggctccccttcccctcctgcccgcctcagcccttccccggcctagccccgcgtcccctgtccgccgtgcccgggagccccgctcttccccagcaccccagccagaacatcctgggggggagcggcgcgcacctcgcagaggccggcctgctcccgcggttccgcctcgcgctttcgggactccctttctcctgcccccgagtcatgggctctgcgcgctttattcccacgaaacctaggacagtggccatcaaaccgagcgctttttcacggagaaacccggggcgggagaaagacgggagcgcgtcccttgaaggcgcccggcgccagcgccgcgtgggttcccggcagcgtacgccaggcccggacgggcaggacgcgagcccaagggcgcgggaagaagacggcggccgggagcgccgcgggggcctttcacacagtaaggactgcaacgccgcgagaaacgcgcggggaaagcatctccgacggacgaggcgaaggcgcaccctggggaggcgctgcaggccacccgcgccacgcccccggccccggccgcgcaggaaactggccctagaccaagcagccacccgaataccggccgcccgccccaggccacccggtcccggaggacgcgggagccactggaagatccagcctggggtccagcgcctgccgcgccccaccccctccgtgcagccacgccacgcccctgtagccccgccctgcagccacaccccgccccggcgtgcaccgcgcccagcccgcgccccaccccccccgacgcaggcgcagccccgccccggcccgcccgagaggcgccgcgcgtcccggccgctgattggctgtggccgcggcgggggcgggacctggcggagagcggcggattcaagatggcggcggccaggaggcggcttccagcggagccggcgggaaaaagcgagacctccgcggcggcttccgccggaccgcgtcctctcctggcagggggcggtggcgggcaccggagccgcccttaggacttcacgccagagcagctagagaagaagcccctaatgtttaccttcgtcctcccggcctccacctttctgcgccgctgctcttgctcaacttccatctccctcagactccgcgcgggccgcccggcggtgacggggctgacacagagcagccttcgctctatttacactccctcccccgcgcttgggctcgccctccccccgcgacaactgtcacgcagccgcggccccgcccccgacacgcgccgccaatcagggggctgcgtttccggtctcgcgcacgcgcgctctgggcggtgcagcctgggcggagccccgccctttacgctcgccggccacagattggtgcgctcacgtacccgcctcctacggcaggaccagtaagcggaaagcggaggcctggcgcccgctgtgattggccgattttaaaatcccctgccaggctggccgagcggcaaaaagttcgcgctgctggtcccgcgcgggcggcccctgggctttgtgtccaccaggacagcgggccgggctccctgcaggcgcgggcggcgccgaacggtgctcagcaaccacccggacagggccaggccgttttctcccgctcaggcattagtcgttggctgtgggccgccgcgggaagttgaggcctaccacggaggaggctgctgaggtggatctcaggggatccgcaagggctccctcacccttgccgggaccctgggaacccgaaacaaaatcctacgccaccagcccgccgaatgcgccccctcggccgggggtcctgggtcttcagagaagaactcggccgaatgcggtcagaaagcccgcgaaccgcctggacctgcaggccccgccgcttggagctcccgcctttcccgaccgagcccgtgtctgctcgtgtgtctcactgatgtcttaggtctcaaaaaaaaaagaaaagaaaaggtttttagtagacagaagagaaatggggccgtgggttcgtggtcccagggggaaactgacgtcgcatgaggtcgtcgtccctcagcttgagctcagcggaacataagcttgcagaggtggaaaccacggaaggtttgggtgtcttggagctctctggacaccgaagcccggacacagtcccggggtccgcaccgcctgtgacctgtggcgggaccgccggggtgggcgttttctcagctggcgcgcgcgtaggtggaacttgggaaactaactggagcgaagtggcaaaaaaccaagacagggccggtgacctcgcgcaggccgtccttaactgtggagtattccttcagctaacccctttatttcatgtgtccaagtctggtttctgggtttctttgtagtcctccgggcctgttcgtgcgccttcacttgcaaaaggttcgtcgtggagggccgtgtgcttgtttgcagcagtaacgatgcccttcccgagcgtgctggagtggctcctcgctgacgcaagctcaccttgcagcctcctcagcaactgcaacttaaacgcgccctcaggaagccctggaatctcgctcagaattttttttctttttttgagacagtctcgctgcgacgcccaggctatagcgcaatggcgcgatctcggctccctgcaacctccctcaggaagccgtggaagctcgaccgccagaaacttccttctcctgactcaggccacagtcttctgtgtggtgagcggggtgtccagcggtctcctggttcccagactcggaattgggtggtttgagcaaactctgggcagtgggctcattagagcaggggccaggcaggcaacacagccaagcgagcaggggctgcacccacaggatcacactttccaggaacagagacccagaccgcgcctgaatctcacaactgttacgtgttacaatacatttacaactgtgggactgaggggatgtgcccaggtttgcctagactgtgttcctcagaaccccagagtcgtttctgtggacatcctagagaggttctgctaatgttggacttgggtcttatttcagttcttttttcttttcttttttataggcagggtctcagtctgtcacacaggctagagtgcagtggtgagaccaccgctcattgcagcctcaacttccccgggctcaggtgattctccatgtcagcctcctgagcagctggaattacaggcacaccaccatgcccagctaatttttgtatttttagtag

SEQ ID NO: 1562476 - DNA, 4001 bp, Homo sapiens
gtgtctgataagcgccatggcggggcggtgactacagagctgccctgattacccgttcagcaggaaccaggctgtgaccctaatcacaggtgagctctggaacacgcgctttctccctggagacccgcacagttgagtgagcccagcagagctgagcatcctggagagctcatgagcaccttgctggccagaagcctcagcaagtgacggcatgactgagccagaatcccagggtagctgacttgacccgagaggccacccctcagtgctgtgctgctttctaagtccttcttctataggaaactcttattggataagttgtatataaagaaaaaccactccacgcagccatcccttcttgttgcaagcaaggtgagctgatgtggacacagaagcttctgaaatatctgtagagtccagcagaaagcccctcctcctagcatgtgggaaatggaggtctcatcctcatcattccatctctatttcagagccccagctcctttctttctttctcttcacctcccctctcctcctccaacctctgccatcccctctgttcagcaaattccatacacatttagacatcaagattcacccggcagtcaaccacccagcattgcagcccaagtcttggctctactgttctttagctggtgacctcaaaccacttagttcccatctctgtgcctcagtgtcctcatctgtcaattgggaataataatggtgcccactgcacggagttgttgagaggttcaaagaaggtgacagatgcagagacagcctgacactgtcggcacacagaccattaggcaagtgttagctgctgttacaggtaccattgattgtggtggtgggagaattcccatcttccaccccacagttggtctctccctgcctcaaacccctggctttgtcctaaaccccatttctaagttttatagtgctttgctcttcttcttgtcatgtttacatcaaaaatcacccatcagagagataaaagcagggaggaggcattttatttctgaagttgttaattttatcctagacttccaagaaaagaatcatccatctgtcaaaaagagacagagaagataaaagatctttaaaagtaattatttaagtgccaaccaagaggaaatgaagatgcatttggctcggttattgagttgaattagagaatggtgttgtaccaccgctaatctgcttcatagatgagaaaaaaggagaagatgattttagaaaaacaaacgtgctgtcagttggccccagtaaaacacattctgtataaacaagtttagagaagtgactttggatttgcaaaattgtagctcttcttctgccggggccgcctccggtcttagagccacagatctatacacacggatgtttcccagttcctactactttttgcatttctttccctggtgctctgattaactgcagaggtagtttgtacaactgagccatgaaatgccacccaacggccagccctttccccaccttgtccccttcccttccatggcttgcattcaccagatgaccacctgcccactcacattctgaaaggtatcaccgcgggaatcatgcaaagacacgcatcttcgtaagagaataaaacatttggctttctcttctgagctctaaaacccaaagcacttttcaaagtcaccattcaatcagaaagcaaacctttctcctcctcaggctaattgtagaagttgcaaacttaaccaatttctgcacttaccattcaaaccaagagattaatcctgtcagttctccaagcaaataattacaggattaatttgttcctcagcactgctaagtccctcacatttcctgagactaatccttcagccgaggtcccttctcactcctaagtttccctctccaggtcgaagcatcactcacctcactcatgttggctctaactcaacagctcagtcccgccgctcagcacagagaacactgctcaggggtcgctgctccaccggttctggcttttctcttaaaaagagctgcccggtggcatcatgcctccctggagccaatgagatgcattcacctgtctgcaagcctggccgacatctgagagcaccaggggccacctagtggtgcaaaagagaacggcacgttaggtcgctgctccaaattccgccaggatggaaggaaatgctcgatttctttaaaaagtaatacactccagcctgggcagcagaacgagaccctgtctcttttaaaaaaaaaaaaaaagtaaaaagtaaaagctaaagtttcaaagatcatcacagggatgccattgtgcgtttttcaatgagtgcaagatttacatgcatgtaaaatacctttcaaatgtcaatgggaaggattgtttttctaagggaagaggagctctgaaaatacctgcgtgcccgctcacgcactttcaggttttcccaggagctgtgtttcccttgccctttataacacaaaactcagcccaaggactttaatatctctgctgtctctcccctatcccatatctgtcgccctgcttgtaccctgagctggaaggataagagtagatggactgggacatgggaatgggtccccacgacctcaacaaaggaggcgagcggctccagcagccttgctgatgtgccctcctcacaaccacagtggggccaggaaggagcctgggcattggccctggcctggttgaaggtctccttgccttagtcctgttcagcttttccgggaagaggttccatcctttgttcagtcccaacatcgtgaggctctgaagagtcttcaaggcatcagagtgggccctcaactgtcccaaaaaagcgttgtgcagactgaaggcacattcacatctgttactctgccagtcccggtacaggactgagagggtctggcgagaagattgaagcgtcttgccacccgtccccagcacccctcatctccctgtgcagagcaggccaccagactccagcccatcaaccctctctcctcagctcagcagccccacgccctctgacctggactgccctccttacatgcccaggtcaccgatgcgaccacatcctcaggtccaccttggacagcaagcagaaggccatgcgcccccaaatgggcaccggcgagcacaggctgccctcagaggccttggccaggagcaccagctggtcagcaccctcgcccacagcgtgggaacaccagccagcaagacagagtctcatacatgagttattataaaataacctatatttcacagagcgacagaaatgaacattatatatattatataaaatatgtgtgttatattcgtttcttttatatgtatataaattatttatttacatatcctgaccacacaaatcatttgcaaactaatgaagacagcatcctccttctctcactcccctcctcctccttgcccccaatgccacgcttgggaaggcccacgtgggatgcctttagggttgcccaggtggttagtagtgggagagaaggaggaggagggcagggtgaggaactggagccatagtgtcatctgcgatgtaggacagattgacagattggaagaagggtgcttgcttatctatactaggagacacctgtgatttctcaggggcaaaaaccacaccctccccaggggcctcctgccctgttgggggctggacccccacagcctggaggtgtagaaggggtctcccagtgtgagcctccatggggtccctgctgtggtcctccaggctgtgcagagggcatgtggagaatcagcctgtgctctgctggctggctctggagcagacctgcattttctaacaacacaaagacacatcaagggctgcagcagcctgaggttggcagcacagcaattagtgctgaggctccaagtagaggggcaggattggaggtgcagggctgggctgaggctttgctgggtagactcagcaattctttgggaccaaccaagggactatgaagactattggggagaatgggttatggtc

SEQ ID NO: 1562477 - DNA, 4001 bp, Homo sapiens
ctgagggaagaataatgctcatcgtgttctgcagtgttccaggcagtgtttacattcactcattcccttctcattccagtctataaagcagattttattatcccttctttatggacggggatgccagcttggggagcccaggggcttgctcgtggtacaggaagtggtagagctggcagtcaatccgcctctcccccgcaaaggtgccacatgccatgtcttccccagggcccacctgcaggctgcttttctggagatcaccccaacctcagcgtgtccactgtgaaaagctaccctgcccacaataacagcctggcctgccatgcccagcgtcctcctcccacccctcctgaagctctcctccacttttcacctgcttccaagagagctgctcccgggacatctttaggaagttcttaggacggacctgctactgttgatctggtgacaactcactttaaaaagacttttgcttttaaaggcaggtctttgatacattctcatctatcgggcagaaaaagtgtgtgtgcatgtgcctatgtggtgtgcatgtctgtgtgctcatgtgcacgtgtgtgtatgcacgtgtgtgcgtgtgtgtgtttgtgagtggatgtgtgagcattggagcatgtgtgtgtgtgtgtgagtgtgcatgctggtgcagtgacatattcaagggagggccactccttcctttggggagaaaggaggctgttacagtcccatgcaattgcagacgcctagtcctggagtcagggacctgggtctagttgtgcgtctgccgctgcccagctgcccagctgcccagcactgattaaataagggggtgaccacctgtccttgaagatgcttcctcctcccggttatctgagtctctcaaagcgggctacggtgggagagggctgtactttccatttcacggggatcaagccgggcacagggtgagggaggcttgttggcttaaatctactgattaaactggccaaatgcacctctgggaacaggaaagactcaagcctggccggcacctgctctgtgcctggctggggcatctctccctggcctccttcagtggagtactccgtgggcagaaaggtgagaagcagctgcaagggcttcctgaaacgcccagctgaggtttgagggatttcctcacaatggcttttccctggggactttagggggagctcatgagagccccttccaagccggcgcgctcattgtccctccctgcccgtcagagggggccacgaacaaagggggtctattctgaacccctctcccgtgtaactcaagtccgctaggaacgctggacattcgagggacttcctatctccgcacagcaggggagagccggacccgctgccccccaggctctccgcggggccccggaggtgcagcggcccgagtccccctctgcagtcggagctactcacctgcgggggagcagtgtccccgccggcgccccccgcacctgcccccgcgcgacaggaagcggcggctgctcgccccctccgcggaccacgaccccggggctgcccggcgggccgatccaccggaaattaaaggcttcatgtgccagcccttgaatgtaaaaactcagcctaatcagattttcaaaaagaaaagctctgcctgtgaaacggaaacactagcccgcccccccaccccccaccccccagggcgagtcgcccctttccccggggagccggcgcgtggggacccccgcccccgaccagagctggcggagcgcacggaggccgcagcctggaccggcagacgcacggacagtcccgccccgccgcgcccggccccggcgctgtcacccggggggaggagggggtgtctgggtgggggaggggctaccttctgaatgcgtccatcgatgtccaggtagatggccttgggccggtagctggaggagccggatcccatcctgcgcccggcggctgcactcggactttttactgtactttcccgacgccagccgccgcgggaggcgggggaggggagcaggggagggggcgggcggggggcggcccgcggcgctcagccaaccacagccgcgccgccaccgggcccgggacgcccgggagccgccgccgcgcgccgcagggtctcctccgctcggctcgcgctcgggctcgggctccgactccggctcgcgcgctcctcctcccggccgcccgcccgcccctccccctcccccctcccccctccctcccccgtctctcctctctcccctcctcttcactccctgcacctcccttccccctctttcttcttcccttgactccagcccccggtcggctgcctatctcccgatgccccctggacagctgtgcagagccctgagcgaccccttcggcccggagccgtcgcctccccacgcagcccgtccctcctaagccagcgctgggctgagcgtggccgcgccgctgtggaccccccagccccgccgggaaaactcccctcgctcctctctccctgctgcgaccgccaccctcatttcatttgaatagaaaacgggaaaagttccttctcggtcacccacagccttcccctaactagggggcgtcagcctcctccagctgcgcccggagctgaaatggcgattttatttctgtcctgtatggggccggaccgaggattaccccgccacaagctatctgctggattcagcagtttcgtcccctccccgcttgtgtgaattgctacagggagtgtgggaaaggcgggaggggaagggggctgtgggcatcctctggatctgcggagcagggaagggctgccttggccgcccccagttctcctgggctcctccattgggaatggggttggcggctgggggaggaggctcagatgccgtggtcctggccctgggtgcaggtcgcctttggaagcaagtgtcaaagccagccggagcatgtgctattgtttcgttggaagtgagttccaagccaccgctttccatctgttaagtgtctgggtgctgcttattgagagagtctggtgcacccaggctcctccctccccttcgggcctgctggagccggccagccagtgccagggccagtggtcacttcctctccctcccctggccagcctggtctccacctggtggacggtcacaggctttacagacacccccagggccatctggagctctggtggcagctggggtcctggggaaggtgagagctccttgcctgtccgtgggggtggcatcatcctgtgaggtaagtgatcgtcctcagcctttggccagtccatcctgtgtcactttatgtccccccacctgctctcatggcggggggcacgctctcaaataacaacggcttggaactcggtaccttggcaccccctgcccacagctccagtggagtccgtgtcagagctttggcaccatgagttgtgcttttcaagtgacaggatgagaaggggacagcctggaggcctttggggtggggagacccagctgggtggttacagcgggccagctgactcgccatggggatactgtgtccccggctcattgaagtgagcactattactagtagttcaatttgttgtcaaatgttccgatgctatttgggctaatccagagatcgtgctgttgggaccgcctgtgctgcctggcatggagttcttaccagcagatggctcattggcttggcacttagttattctccatcccttattgtcatctggcctagtcttctgtaaccatttcctccaagagccccagaaggacgagtgcccgcccatggggggtggttctgcagggcagttccccaggagggtggagggtgtggctctgagactctgtgtgcgtccagcaccagtgcaggctggcccctcacactgcctggctgattctgtgctcaggagaataatcgcatctataattactttgcacttttaggagctggactggacccctgtgtagatactggatcgatgaggcctcagcagctgcctagagaggaaccctttcc

SEQ ID NO: 1562478 - DNA, 4001 bp, Homo sapiens
gcaaaatgcctgcatggaaccctgtggagcccacaggtaaggatgccgtgcactggggagacccgaggtaggaacagcagcgccatcctttcgaggctccacctgaggtgagcaatcagaggacacccctcgagtcactgggagttcgagaacaaaggacattgctgggggatcccgagtgagccaaagaaggaaacagtttgcccaatgaagtaggaggtggatgggaggagggacgggacagacacagcaggacctgcacacttctgccaagagagtggacgctgtcctcagagccccctggttccacactgcctggctgcccctgcttcaggcaccctgcacctttcttcccaagcccaatcctacctctgactctgcccaagcaatccgccagcctgtggtgacctcccccaaccccctcaagctaggagtggtccagagcagtgcttaagagccggagccacagaaccggtgcaccctgactgtcccaggcagggtctgcctgcagctggatggaacagggtctcaagtaagaccacctgtgaagcaccgcatccttcccaacaggacctccacttacttcggactcgaaccccctgcctttccacgctcaactctgctcagcttggtcctcctgggggcacgcctaggtcagccctcaaattccactgaagctctgctcccctcttcctgtcctcctcccaggccagcccgcaccgcaggccccgccgtgcccaggtggcccttctttacatcccgtggggcccagcacagggaccaggcatacctgctcccgtccccagtgaccaggccgcaggtgggcagcacaggagagcacgacccggcagggcacccccagccctcctgctgactcgacaaggccaggaagtgcccgtcgtcctggttctgcctcggccctgcgtgacacccacgccactgcacccaggcctctcctacccctccacgggccacttagctgcaaccaggaggccgtgggccaacgcgttttaaaagctggctccctaaagccaatccgcacagtcccgaactgctctctggggcttctcctcgtcagagcaaacacctgcagggatgccgctctgctagagggtgcagagcagcccctgccccaccctcttcccttcggccacctcctggcgtggtcaggccgaggggaatccaccctcgtgggcaccgtgacctcactcggcgtcttcttcctgacttccccacgcacaggggcccaggaggtgagcgcgcgagcgtctcgagctccacggccgcttctgcgttccagcggggcaaggtcccggctcgcgtgactgctccgggactcctcggggctctgcgacatttcctcgcctccgggagccgcaccgcccgcccgcccccgcggcagttggcccggtcggcgggaaggggcgaggacgagcggctgcgccatagctggtgcacagggctccctcctacccgcgtaccccgacgccggacccgtcccacccgcaggggcccgcagagcgctcagccctccgcttccgcccccgcaagccaagcagagcgggaggctcatcccgcgcctgcctccagggcgcccgcgccaggctctgcccgcagctcccgagcctccctcggggaactgaggctcgtctcgggcagccccgccaaggtcacgggctcgggttacgtaagcccgggctgcgggcggatgcgtacctgcagcgggaacgtggccgcccggttgcccacgtagccgcggatgacgtggctctgtatggagagcacccggcactcctcctccatgccgggcctggccgcggcggcgcggggccgaggcgggggcacggtctccgccgctcgctcgggctccggctcggctcgggctcgggctccggccccggctcccctcggctgcgactctggctctggcgcgcggcggacccgatcagcgcagacgcctccttctgacctcagcgggcggctccgaacccgcgagttccgcgcggcgccgggggctggccgggggcggaccggggcggggacagccacgcaggccccgcccccgggctgggaggaagcgaaaccggaccctggccgcgcggccgcgccaggtggcccccgccactctgccgcccgaaacgctgggtttgcactttcattccgcctggagagggctctgcagcgccgttcattcgttcgttcattcattcattcaaccattgtgctccgcctcagccctgcgccccgcgccccgcgccccgcgccccgccgcacgcaggggagactcgggggcccgggctccacgcccctgacctccgggcgcgacactctcgcaacgcggatggccacgagagtgcgcgcgggcgtgggaatagtgcggaggcgcgaaagtgaccccggaccccggatacccaagggaaccgcgctctcaactgcctgcagggcccggagcccgcatccgatccgcgtcccttcccaggggccgcgcgggagctgacagacacggggccggggggacccagtcaactccgcaccggcctggggcggcgggcttctctgggggcgccccagacccttgcggaccctgagtgcccactctggtggcgcggcctgcagaggcccccagccgatggccacatgcccggccgtccatccacaggtgcctgggtctgggccgcgtgtccgatcccaccccaaccaggtcttcctgtggagggcctgccttcgaggacgaacctgaccccctgggggaccccacagccttcacttcccacccctacgctctccacagctgacgcactccctgcggcttccctgcaccaccccggggaacggaggcctttgggttccagacttgcagacatggtgatttggggccctggggtcagtatcaccagactaaagtcttggtgacctaacacagcgcacctagggctctgtagcttggtgagacccaatgcccgaccaggcgggtgctgaggactgagggaggaagacattacttagagatctaggcttttaaaagaaagtacttcataattagtcataattgtccattaataatagctaacattggccgggcgcggtggctcacgcctataatcccagcactttgggaggctgagttgagcggatcaagaggtcaggagttcaagaccagtctggccaacataatgaaaccccatctctactaaaaatacaaaaatttagctgggtgtggtggtgtgcacctgtaatcccagctacttgggaggctgaggcaggagaattgcatgaacccaggaggtggaggttgcagtgagccaagatcgcgccattgccctccagcccgggtgacagtgagagactctgtctcaaaaaaataataaaataaaataaagagaattaattgtaacacacccctagatggtaccacgaggctggagtccaaaagcgcttgtcctggccctcgcacccactcgcctgcgtgcttcccctcccacaaggagttagagcgtggtgccaggtaagcaagccacacccctatcacaagtccagcaaaaggctccagggaactctcccgtctcatcaccttaaaggctgtaaccctttgtaagaaataaattctcctgtcctttcccaaacttatagattgtgaagttaacaaactaaggagaagtcagaggttacagagttggtgacaagcagtgctgggtgagagccccaggaacctacaaaggcagcaccaacaactgcccttactaccctttgctcatcctactctgtgagtctctcgcccttggctcttaggagcgcctgatgaatctctctctctgcagtggatttcgtccttccacactttgatccatcatccatggtcccttccccatccccagcccccaccccccccatcctatcacacctttggtcccaagcactaagaggaaagagcaggggaggcatggaagagagctgaccagcctccaggcccgtgggctccaggaccctccttctcgacagag

SEQ ID NO: 1562479 - DNA, 4001 bp, Homo sapiens
aggggcatcccatctccagatcctccaccagcatccagaaccgcctgtcaccctgggtgcccctccccgctggcccaagaaccacctgccaggctggcccttcagcaacctccagcgagccccccttctctgtttagtctgtgcatggggtggcagggggtggggggggcacgtgccaccccaggctctcaactttcccaaccctccactgctgatgctcccactttgcaaacaaggaagctggttggggaccctctgtgtttcagggaaccacaggtgggctttggggcttcaccagcctcaccaagaaagcgcctccctggtgggcaggcgggctggccccacagcaacctgtctgccctccagactcggggcctttcttgtctaatctcatgggatggagcttcccgagttcaccctccaaggccacgggcctcctctcccacctgggcccacaacccaccaggccacccaaagtgctggaattacaggtgtgagccaccgcacccggcctgcttcaagtcttctagctacctttgcacaggttattgtgcaaaaagacatccttgaacaacgccctcccctctcgacaacacggacccctggcccacaggaaaggcgtgacccagagccacacaggacaggacttgtggagccacactggctccaggacactgccagtagccggcaacaagcagcagctcccgctcttgccacagctgtgaaaagggcgggtgggcagccaccacaggcctggctcagccaggtctgaaggagccccctctgcaggccggggttcagacagtgacacccacgagccactcctgcctccctggcttggtcccactcaaggccggcttccttctcgcctcttcctggcttccagatagggaaaaggagggtcaggtgcctgaagctgggtgggggtgtgtgtccgcattttctcaaccattttctgaactctaaaagacagaccagaccccgctgcacagccttggggtgctggctgggccccttcccaacccagcacctcacttctggtctcctaaatcctctcctctctcctcctgaggggtagggtaggtggcgtcctgtgccacaggtgccacactggacatgtcaggccagagacactggaggccggcagtgggcaggaccaggcctccgggagggagcgtgcgaggacaccacgccctcaggccggacccccacccagctctgccaagtcccagtccccaccacctgaggcctccccagtacccctgcgaaaagggtgacaactgggctttgctcaatgccccgggcagcccatctccccaccgccctcttccccagctagacccacaaggaaggcggccgcgagggccccgaggaggaggcgcggtccgggagtgagtccgcccccgcccagccgggaggaggtcccggaagcccgcagcctggcgccggccctcgggaggcaccgggtccccgggtcgcttcagaaccaggaagggccaggctctgggggtggcgggaccggcgccctccgctcgcgtggcctcggggactcctcgggaggtcctgccccgcggcccagagtcggacacacccccggggcagggcgcgggcggcgccaagacccaggcggaggccgagaacgtggccggccgcacgtaggccggagaccgcgccggggaagagcgggggacagacccggggcaggaggccggggcgggaggccggggcgggaggccgggccggcccgagacccgggtcccggggctcggcgggcgctccggagaggccagggcggaggcgccctccaccccctgcgccgcgacgcggccgggacccccgcccaccttgcgcgtcgccgccgctggtcaggacgccgatggccttgcccgcgcccgacgcccgcagcttctccaggtccaccgcggccatggcggcggccgaaacacgggcccagctcgcactcccgccgcctgcgccgcgtcgccgtccccgccccgccccgcgcgcgccttccgcccgccccgccccgggcccgcccccggcgcctcctcgcaggacggaccctggacggagcagggatcctgcgccctcggcccgccggggccaccttcccgctgtgcgtttctaaacctgtgcaatgtcacgcgggccctgagcagtgagacccccccctccaccccggtggtctcgaggatgtggccggggaccagggcggggctggccccagtgcggccgcacgcgccccttcgccagcgccgaggccccggtggcacgtctggcccggcttcgcttctccggaggttccttgctgtcggccgcagccaccgcccctccctgccccccaggggccctcagggcgccttcaggcctcagcagagcgaaacccaaacgaggcgctggcggaaagcagccagcactcctccctccctctccctcctttcctcccctcctccctcacttttgctgggcccttggggaagtcttggttccccgggccctgggggtgcagagccggtgttcgggagagccgcctcgtgaccgcacggtgtgttcggtttgtgaaagctcagcgggctgatcgctaggatttgagcatttttctctacatatacggtggaaatggtggctgtgaatatcaactactccttatttaattgtgaaatgttagaaaacacaccgagagactgcgcaagcacatatgcgtgggctaaaaggcgctaagaagacacctgtgtctacccctgaggcatccttgtgctgacattttgggtcattattctctcccttttcttacagcttcatcacgtgtgtgtgtgtgtgtgtgtgtgtgtgtgtgtaaattcttaaacgtacatggtttagccacaatgaggtaccacctcatacccattaggatggctactataaaagaaaaacacaggctgggcgcagtggctcacgcccataatcccagaactttgggaggcccgtggggtggggggggggggggggggtggatcacctgaggtctgaggtcaggagttcgagaccagcccagccaacatggtgaaaccccgtctctactaaaaatacaaaaattagccgggcatggtggtgtgcgcctgtaatcccagctatgcaggaggctgaggcaggagaatcacttgaagccaggaggcagaggttgcagtgagtggagactgcgccattgcactgcagcctgggcagcaagagcgaaactccgtctcaaaaaaagaagaaaagaaaagaaagaaaaatgcagaaaatagtaattgtttcaaggatatggggaggctggaaccctcatgcagtgttggtggggatgtgaaatggtgtagctgctgtggaaaacaggatggcagttcttcaaaaaattaaaaatataattaccatgtgatccagcgattttactcaaagactcacacagatatttgcacacacatattcatagcagcattactcacaacagccaaaaggtggaagcacccaggtgtctgctgaggaaagcatagatgaacacaatgcagtccatccatgtgctggaatattactcagccttaaaaaaggaagcagatttcggcacatgctacaacatggatgaaccttggggccaccatgctgagtaaaataagacagacacaaaaggacagatactgtgtgattccacttccatgaggtccctggagaagtcatagagacagaaagtagagtggagggtgccaggggttgggaggggaatggggagtgagtgtttcatggggccagagtttccattcaggaagctggaacagctctgcagatggtggtggcaatggttacatgagatgtgaatgccactgaactgaaaagtggtcgagatgataaatttatgttatgtggtttttttgttttgttttgtttttgagacggagtctcactcttgccgaccagactggagtgcagtggcgcaatctcagctcactgcaacctccacctcccgagttcaagtgattctcatgcct

SEQ ID NO: 1562480 - DNA, 4001 bp, Homo sapiens
ccaggctggagtgcaaaagtgcaatctcagctcacggcaacctccgcctcccgggttcaagcgattctcctgcctcagcctcccgagtagctggagttacaggcatgcgccaccatcccggctaattttgtatttttagtagagacagggtttttccatgttggtctggctggtctcaaactcccgacctcagatgatctgcctgcctcggccacccaaagtgccgggattacaggcgtgagccaccaggccggccagaatttaagccttaaagtgattgcttttatttattcatatagcttctaatccttgacatactctttgaacaaggatttacaaaagtgctaacaataacatcagtagctaacacttattaagtccctaactgttcctaggcattattttacgtgctttacataaattacccccgttaatcctcacaacagtcagaagaggcagcagagtgaagtcagccagtgtatttgggttcaaatttagaaggcttttatttagtagctttgcaatcttgagcaagttactgaaaccacaggatgctcatctttaaaggacagtaataacagaacctaccccatagaactgtttcatgcgtcataagcatttaataaccatcattatcactacccttttacagataaggaacctgaggctcaaaaaatttgctgagggtcccagctcacatggctaatctgtggaggagtcagaattcgaactcagttgtaacttcttcacttcacttcagttttaatagcctggccattacattcatctgcaagctgtgctgatggtgcaggctgatatattttagttagggttcagaagtactaccactcctccactttcctggtttccaaacagttgcagaacgttggatcacgggcactcaattttctcccttttgtgtgcctcaaaattctcaaatcattttggggagagacttgggacttgctgtgtgagtgggcatattagtgtcttagtgagcatcagtctccttatctgtaaaatggaatgttatggggttaaattaagggagatccaggacgcaaacgacacacctttcaacccgacttctctggcctacttctcctgttccccagatcccgcagggcacactggtgacatcacaagctcctcgggtccaaaccctctcacgccctcattcaaggcctttccacttcttccctccctcttactctttcctaatcagcatcagtgccagggggaaaggcctctgtagaaagccttgactttccagtctggtttcaatgtctctccaccgtgctccctgacactcatcacactgagcattaactgtagatttacccatctgtctcctccacaagaccacgacctccttaagggcagggaccaggctttatccactttgccatcgcgtctggtgctgtataaatatttgtagagactaaaacctcctaggctagtgctggcacacggaacactcagcaaacacgagatcccttcagattttcttaaaaagagacatagggagaaagaatcaacagttcatgtgtgcacagtctaaccaatgtattcttcccttgtcactgaacgccagaaaaagcccctggccatccatcaggaaagtacttactgaagccaaattgggagcttaagaaaagaacaaagccataaatcgctctttctggcaatggcgacggtgaattttccaccatttttcctggggctttagacaatctgtggaaaaggaacacaatcagcgtcagcgatgtgctccgtggcaccattgatccattctcgcctcctcgctccgccgcgggtacggcccccgccgcgcagaaccgcctcccgcgcctccgtccgcaacccgcgcccccgcctcgagcgcatacagacacccaggctggcgcgcgccccgcaacagaaggggtggcggaggatagggcagggaggggggttctggggcgatagacgcgcgctccagctctgcaagcgtggcctccctgtgggaggggagggcagggaacaaggctcgcgcggcgcccaccagcatgcgggcctactaggtcgcggcgcccaggccccgggccctgcccattcgtggagacttctatttctcattcgaggcggggtatgggggggccctcgacctcgggtccttcatacgcccacccaggcccctcccgacacctcggccacctcagcgctgagttctccgcgcaagcgccgactggggagccgcagtggggaagaggaaaacctgagggaaaggcctaggcgcgacggcaacccccaccctggcgcaggcgcacaacgaccctccccgggtgggagccagcgagcgcgggggcgggcgtgatcccgcggctcgcgacggcgaaggagggggcggtggggtgcgactgcgcacgcgcgctgccagcccacgtgacgcacctcgcttcaacgccgccacccgctccctcccgccgtcggctgacgtggagggccggaggtggcggcggcggcggcggcggctgctgctgctgctgcccgcgtccgaggctcgcgggcggcgggcccgggtgagtgcacacccggcgcgctgccgggctcccggatgtgtcaccttgtcccgctgcagccgagatgccgggggagcggggccttccacaccccctccgtgggtgtgtggtgagtgtgggtgtgtgcgcgtctcctcgcgtccctcgctgaggtgcctactgtgtctgcatgggttgggtcccgcgcgatgagggggtgtggccgccattgcctaccccagtgggtttgcccccttggtctggtgccccttcgcgagcgaggccctgggatgccggtgcgagggtgtgagtagtccctttgtgcgcaaccccccgctgcccgtgcctcggccggtgcgtggctgacacctccgctgggtggaggcgctcgcgtgtcgcctcgtcgccccttttgtgtcggtgtccgcgctccctggcggctgcgtgggcgctctcggccttgcaggtggcccccctttgtgttactgcccctgtctgtgggctgcgcgtcccctagcgcgcgtggccgcgccttctgcaattgcgacccccgcctagagccttgctcgcgcaagtgtgcgtccttgcgtgtctccgagtgacgcagagtgtctgcgcatgggtcctgttgagtgcgtgatctcttgtgtgcggatttaattctgtcgagtgggtatctcttgtgtgcaggtttcgttggtgagcgtgaacgttcgtgcacaccccttgctgtgtgtgcgtgtcacgactctgttgccacctgttttcgtgtgaactggcagtccagtccagggcctgtccccacggaacggacccaggaggggggtaacctcgccgctcccctcgcccccgcgcctctttctgagcattctctcccacagacgctaatgggaaggggggtggacaggatcgagtctggccagctgctccgcagtgttgacgctgccagtgtggcctcttcagccagcctgttcaggagacagaatagggggatcaaagataaaaaatgaagccgagacgtaggtgaatttgggctggtaccagtgcgccgtgccttttccagtggcgccctggacgccaaaaccccctcagttgcagagacctttcaaaatatatgcactctcctactgggcgatgcggtccttaggcgttcttgatgatatttaatggtttatagagtattttatggcattcacctaaatctctttccattttgcccaagatcctggcgagggaaacaaggtagaaattttacagattttactcctccggagagagccttttccttataactacgactctagttaggacattttttgttgcaagaaatttgcgatttatcctaaggaaaatgggatatagtataaggatacctagggtaagaaacttcaaaccccttagagacccagctactgctccgattgctcaaggtttcgtgctctgcgctcaagggctgcgttt

SEQ ID NO: 1562481 - DNA, 4001 bp, Homo sapiens
atcagtagctaacacttattaagtccctaactgttcctaggcattattttacgtgctttacataaattacccccgttaatcctcacaacagtcagaagaggcagcagagtgaagtcagccagtgtatttgggttcaaatttagaaggcttttatttagtagctttgcaatcttgagcaagttactgaaaccacaggatgctcatctttaaaggacagtaataacagaacctaccccatagaactgtttcatgcgtcataagcatttaataaccatcattatcactacccttttacagataaggaacctgaggctcaaaaaatttgctgagggtcccagctcacatggctaatctgtggaggagtcagaattcgaactcagttgtaacttcttcacttcacttcagttttaatagcctggccattacattcatctgcaagctgtgctgatggtgcaggctgatatattttagttagggttcagaagtactaccactcctccactttcctggtttccaaacagttgcagaacgttggatcacgggcactcaattttctcccttttgtgtgcctcaaaattctcaaatcattttggggagagacttgggacttgctgtgtgagtgggcatattagtgtcttagtgagcatcagtctccttatctgtaaaatggaatgttatggggttaaattaagggagatccaggacgcaaacgacacacctttcaacccgacttctctggcctacttctcctgttccccagatcccgcagggcacactggtgacatcacaagctcctcgggtccaaaccctctcacgccctcattcaaggcctttccacttcttccctccctcttactctttcctaatcagcatcagtgccagggggaaaggcctctgtagaaagccttgactttccagtctggtttcaatgtctctccaccgtgctccctgacactcatcacactgagcattaactgtagatttacccatctgtctcctccacaagaccacgacctccttaagggcagggaccaggctttatccactttgccatcgcgtctggtgctgtataaatatttgtagagactaaaacctcctaggctagtgctggcacacggaacactcagcaaacacgagatcccttcagattttcttaaaaagagacatagggagaaagaatcaacagttcatgtgtgcacagtctaaccaatgtattcttcccttgtcactgaacgccagaaaaagcccctggccatccatcaggaaagtacttactgaagccaaattgggagcttaagaaaagaacaaagccataaatcgctctttctggcaatggcgacggtgaattttccaccatttttcctggggctttagacaatctgtggaaaaggaacacaatcagcgtcagcgatgtgctccgtggcaccattgatccattctcgcctcctcgctccgccgcgggtacggcccccgccgcgcagaaccgcctcccgcgcctccgtccgcaacccgcgcccccgcctcgagcgcatacagacacccaggctggcgcgcgccccgcaacagaaggggtggcggaggatagggcagggaggggggttctggggcgatagacgcgcgctccagctctgcaagcgtggcctccctgtgggaggggagggcagggaacaaggctcgcgcggcgcccaccagcatgcgggcctactaggtcgcggcgcccaggccccgggccctgcccattcgtggagacttctatttctcattcgaggcggggtatgggggggccctcgacctcgggtccttcatacgcccacccaggcccctcccgacacctcggccacctcagcgctgagttctccgcgcaagcgccgactggggagccgcagtggggaagaggaaaacctgagggaaaggcctaggcgcgacggcaacccccaccctggcgcaggcgcacaacgaccctccccgggtgggagccagcgagcgcgggggcgggcgtgatcccgcggctcgcgacggcgaaggagggggcggtggggtgcgactgcgcacgcgcgctgccagcccacgtgacgcacctcgcttcaacgccgccacccgctccctcccgccgtcggctgacgtggagggccggaggtggcggcggcggcggcggcggctgctgctgctgctgcccgcgtccgaggctcgcgggcggcgggcccgggtgagtgcacacccggcgcgctgccgggctcccggatgtgtcaccttgtcccgctgcagccgagatgccgggggagcggggccttccacaccccctccgtgggtgtgtggtgagtgtgggtgtgtgcgcgtctcctcgcgtccctcgctgaggtgcctactgtgtctgcatgggttgggtcccgcgcgatgagggggtgtggccgccattgcctaccccagtgggtttgcccccttggtctggtgccccttcgcgagcgaggccctgggatgccggtgcgagggtgtgagtagtccctttgtgcgcaaccccccgctgcccgtgcctcggccggtgcgtggctgacacctccgctgggtggaggcgctcgcgtgtcgcctcgtcgccccttttgtgtcggtgtccgcgctccctggcggctgcgtgggcgctctcggccttgcaggtggcccccctttgtgttactgcccctgtctgtgggctgcgcgtcccctagcgcgcgtggccgcgccttctgcaattgcgacccccgcctagagccttgctcgcgcaagtgtgcgtccttgcgtgtctccgagtgacgcagagtgtctgcgcatgggtcctgttgagtgcgtgatctcttgtgtgcggatttaattctgtcgagtgggtatctcttgtgtgcaggtttcgttggtgagcgtgaacgttcgtgcacaccccttgctgtgtgtgcgtgtcacgactctgttgccacctgttttcgtgtgaactggcagtccagtccagggcctgtccccacggaacggacccaggaggggggtaacctcgccgctcccctcgcccccgcgcctctttctgagcattctctcccacagacgctaatgggaaggggggtggacaggatcgagtctggccagctgctccgcagtgttgacgctgccagtgtggcctcttcagccagcctgttcaggagacagaatagggggatcaaagataaaaaatgaagccgagacgtaggtgaatttgggctggtaccagtgcgccgtgccttttccagtggcgccctggacgccaaaaccccctcagttgcagagacctttcaaaatatatgcactctcctactgggcgatgcggtccttaggcgttcttgatgatatttaatggtttatagagtattttatggcattcacctaaatctctttccattttgcccaagatcctggcgagggaaacaaggtagaaattttacagattttactcctccggagagagccttttccttataactacgactctagttaggacattttttgttgcaagaaatttgcgatttatcctaaggaaaatgggatatagtataaggatacctagggtaagaaacttcaaaccccttagagacccagctactgctccgattgctcaaggtttcgtgctctgcgctcaagggctgcgttttggtgtctttgttctgcccaattttcttattgtctaattttcctttttttcttttaatttttggaatatttcagatatcaaatacagagggggagctaaccaatccatgattcagattttacagacgtgattatttaatcttttgccaaatttacttcagatactctttttttttaaagaaataaaattgctctcagttccttcccctccttttctagagatagccactgcgttgaggtttgtgtatatctttactttgcatattttatactttgatcaaggtgaatccatacacaatatatattattgtttgtttttaaactttaatggcattaaaatatacatgcctttttgc

SEQ ID NO: 1562482 - DNA, 4001 bp, Homo sapiens
tgtggttaaaatgctatcaaaacagcatcacatgctacaaagaagtctttcatgaaaggaggagtccatcaatgcagtaaatttcactgttgtcttattttaagtaactgacacagccaccaccaccctgatcagtcagcagccatccacactgaggccagattgtcaaagtataaaacaagcaggactcactaaaggctcagatgatcattagtatttttagcactaaaatattttttaattaacgtaagcacatttttatagatataatgcttgctattgcacactttaagtagtatactgtaattacaactttcatatgcactgaaaaacctaaaactgttgcgtcacttgctttactgcaatacttattttactgcggtggtctggattagaactcgaattatctgaggtacgcctgtgtacaaggacaggattcacaaatcactctaagtaaattaagcagagtgatgaaaggctcattggggtcagcctgccatcttccaaattatgactaaatgcaagagcatcaccaataactatactggcagaggttcacatttcacctcgattcttccttatgtttagagaaagcctatttttcagtatgccaggaaaaatcatgaaagtagacctaactaaagctgggggtttctttcatcctgaagaggaaccacttcctaaggaaaaatcatctactgttttaaaaagcaaactctcgtagagttggaagagaaccccacacacaggtggaacaccccccagggctgcggccccgccgtggcgctcagcctggcctgccctgggcccgacctcaggacgccgccattcccggaccctcgggcctcccgtcaggaatccgccatcggaacggaggccctaactggtcccgtcgcagagccactgtccaaataaggcatttcgagagccacgaggatgacataaagcagactccgcgtttcttcatttttcgttaagtgacacgatttccctcacaaggaaggtgcaaacccacagggcgcccagaccctgcccggcacttcctgtcatccattaccacgacccgtgtgacagaagcggctcttcccaccaattcccgggacgccggaaccgcttccccagcacccggccccaaacactgccgtcagcgagcggccctgggctgctcccgcgccggcgcccggctgagggccacgagccccatcacgcccaccgcccccaggaccccgacccacccgctcgccacggccgaggccggggccggggtcgcggccgccatcttcccgcctgcgccgccgcgcgccccgcaccctccgagcagccccgccggccctgaggactccgcgaggccgcggacccgaccggccccacgcgcgccgcccgccccggccccgccccgccgcgcgcccccgaccctcacgcccgccgccccgcccgcgccgggctccgcgcgcccccgccccgcgccggggcgcgcgccgcactccgaaagggacggttaggagcgcgcgcttcgatcaggcccagcgcggcggcggcggcgccttccagaaatttccgcgtccctcaacccacactaagaaaccaactgggcgcgcccccgcgccggttgggctgaaggcgccccctcccccgcgggtgcccgctcccctcccccacccgcgccccctccccgccccctgccccgggcggcgggtcaaatgcgggccctcgagggcagcgccggccctccagacccgggcggcagcggcggcggcgggcggcggccgcgggccggtgtgattgatagggacggcggcggcgagagcggcggcggcggcggcggagcggttgagtgacagcttacctgggtgccaatcttcatcacactgacaagcggctgcagcaatcgggacccgcagtgccgcgcccgcgtccaaccgtcacgccgacgctgggccacgcgacacagcctcgctcaatgggaggagggcgacgccgacgcgcgccgcatcaatattcagagagggggcggggcctgccggagacgggccccgcccctccctgcgcggcggcgggcgcggggcggggcctgatcgctgggggaggagagcgagggcgggaaccgggcggtggccggccccgcctccagccccgcccgcacccggagctaggccgtgcccccaaccggccgcgcccgagcgcgaggagctgtctgccccgccccgaaggcagagcctcccgccttatgactatgcagtaggggcgtggcctcagcgcacgtcttgccccctccgcgccctcggttgccgcccaggagaggtgtgtgtagccgggcgaaaccatttgcctcgagcaggcggggagggagggctgtaccatccgtaaccccaccgccgggcgtcccgtagccgaaggcctccgttctgtgtgtgcccggtttgaatgtaagcccgtgggagcctcgcagccttcctccccaggctctggagcccgggtgggcccgtcctgggcggcacagtggatgctcacgtgcctccccccctgcggcagcgcgagtgcttagcacctgaggctttaccctgggggctgtcttccctctgtgaggaccccagcaaggactcatgatgtccacaggtgcttaggggtggcctctgggctacttggcctcgcttgaccacaccttccggcccaggtgagccttgcgggtctaggtgaccaatgcggcctccaggtaaagggcacctgccttaggggacgcccacaagtgtctgcatttcaaactgctttgaaagaccaccctaaccgaccactgccacaatgtacccacaagtgcagatggtggctttggtctccaagatgtaaggaaagggcgacacattccccactgcgtaggaaagcacacggtttgcctgactggccttcaatactgcagaaacatccatttatgcagtggcccaccgaaggccatcagtgccttgagtccatacacagcgcgggaagggcagctctgtgggcccccactcctcccggaaggcagacaggcccaggactggagctgattgctagagggagcctgggggtaggtctaggcatgaacagctcggaggacatccctcctgtgtcttcagagctccacaccgccaggaggtcttggccaagtgctgtgcagctgcagagccgcctctttcagaaagatgggaagcagcagggtgggcaagagggaggccctgagatacttgcccaaggagggaagttcaaggggacaaaaaaagctcagtattcaagactgagcataatctgcagagcctagtgcaagatccagatgcaagtgtcaataggtgttggaacagagagactccacatgggctgggtaaactgaagctgagacctgctgggccgcaccccccaggagttaaggcgttcttagtaatcggatgagataggaggtcggaacaagacacaggtcacaaggatcctgctgataaaacaggatgcagtaaagaagccggccaaatcccaccaaaaccaagatggcggggaaagtgacctgtggccttcctcactgctgattatacactaattataatatatgagcttggtaaaacacactctcgccagcgccatgacagttttcaaatgccatggcaacgtttggaagataccctacattgcctaaaaggggtcgggcgcagtggctcacgccagtaatcccagcactttggggaggccaaggcgggcagattacttgaggtcaggagttgagaccagcatggccaatatggtgaaaccccatctctactaaaaataccaaaaaattaagcaggcgtggtggcatacacctgtagtcccagctacttgggaggctgaggcaggagaatcgcttgaacctgggaagcaaaggttgcagtgagccgagatcacgccattgcactccagcctgggcaacgagcaagactccatctccaataaataaataaataaatggaagaggaagcctaagttctgggaattccccacca

SEQ ID NO: 1562483 - DNA, 4001 bp, Homo sapiens
ctatgaacatcagtgacttacctaggtaaaaatcctaaagttaaattttagaagatacaagattctcttcaaactaataagctttcagtagtcttatttgttgaatgtatgagtgttcttttatctataagccagtttgacagcacgctagatgtaacacacatcacaatacatgtacatatacccaaaaacatattaaataaaatgacctatacaagacaactggattcaagttatttacagaactgggacccatctacctggccaaattttgtttgccccgataggtatggaaaacaggaaaaggcaggacagggaatcccatagcatcaactaaaaaggggaggaagcaaactgcattgctcaaaaggagattctggagtccccacgccactggagagcacactcagtggtggaaataccaaagaaaaatgttcaggcggctgcttatctgccactgtggaaagctgtcctctgggacagtaaacttacttgagctaagcagctcactggggctagtaggagaaggttagctctagtattgatggaagctttttgttgttattgttctctctcaccagagcagttaggacatttgcattgccaggggcccttttgcgtatagtaggcgcagtgattctggcccaggggtcagcaagtcaggcatcaagtcttgtctaggcatcccagatgctaattttgtaacattttctcaagatgagtaatcctgaggggcaaggaggcttaaagtcactgttaacaattgtactttttggctatttctttttactcccctcttttgccctgtccctgttgttgtaaactttaaaggctatgtttaagcgtcgtttcataggacttgaaggtcccattgctgctttttgtagattcctcctaatgtcaggagaagattgaatgagaaaatgtatacccaggagagcttgcccttctggggtgtctgggcctgcattagtatatttcctgagtgcttcaactaaaagaccctgaaacagagcgggattttcatcttttccccgagttacttctttaaccttgtcataattgactggcttaaccacacactttttcctctacttttttttccccacagcacagcaagcggatgacaatatttgtaaatcgtggcaatttgaagaacatagtcaacgtaacaaactcttgtataagcttttctggtttatctgaaaactggccaattctttccttttataaggtctaattagacatggaaagtggcatatgtactctttgagtgttccctcatttccatcaactactttccacagtggacacaggcttgaccttaggggctgatatggagccccactcctggtgtactggttgggctcattttcttgggcagcagagggtataggctagggctagttggataagggggaaaggtgcctgatgatattggggtggaatctcattagggaattggcgagaacccccactcaggactgggggactgaagagactctggggaggcttatgaactttctatggggagcagctaggtggggatcccttatgcatggcattctaatgcctggaagtaacgtgatccagtatagagccataaaagcctgtacataagggatctcttcccattttccttctcttttacaaaataagcctaatcgtaaaatatcactatagtatatagaaccatgtttaggccagatatattcgtcatctaacttgtatttaacccaaatggtgttgcaatacaaaatgagtttctttttctttaagccaaatttgaatttgctccaatagcttaaaagacaccctagcggcgagtcccttgggatactccttgttgtccccatgcctatattaaggatctctctacagagggttttattagcccaagtttagcaaaagcctagttactcttccctcttaaattcccgtgttctttaaaggtgtaaatatagatagcaaggtgttataaaaatggattatgagctacgaatgggcagtcgaatgtggagcctaaattccatagagatctagagttgggtggagagggggctaaacaaatggaggaagggaaaggggtaaacagcgttgcccaaggggagacctcagaggctctgacttgctgaagaacctacccagtagtggagatactgaaaaaaatattgggctggccacttgtctaccactgtaggtggctgactgccaggccaggagcctgggagctcccaattcctttgaccaagagcagcttaggcaagggagttataagacagtacacaggaaggagcttgcaattggctattaggaaaataatactcctaacttcagggtggaaaaagacaagaccaatattcgcctagcgaaaggggtataacccacaatcctagaggaaatgtcagtgctaaaaaccccagagcatctggagggtggcctataataccgatgctgagaacccaaaatgcctgcgtttcagccaacaaggatgccctcgccaaagcagctgtgcacagcagtgccaaaaaccctggggtacccagtgggcggccaaccccgtgaacccaagaccaggttacagaacatagaacaacgtgacaacgtgactctggtatcccagagtcaacacaacaggggacctctcacaaccaagtgtcctgccttaaacaattgcccaaatacaattaacagaaagtcgaaagcaaacataagactccaaacaagacatacatgttaggactgaaaatgaaaccaaagtggagcaataaaatggagtcagaggagaaagaaccaggtgaaggggtggcaagaatgtgcttcaaggcacctaaaccgtggggaactgaccgcttagccaaaggcttttatttcctagcttacctgatattactgggggagggtgcaaaggggactctcacccatccacagaagacaaaatggcaccagccagtcttccacgtgggacccgggtgcaggtctctctaggttccccagcttgggggtgctcagcttctgtgtcgggggctggctcgttagagcagtgggtcccacacgaggcagctgtactatggacacttggctgtccactcagtttcaccacctgccagggaaagatgatggctgtgaaaagaggcactggttagggttagagctcggtagtgttagcagctctttattggtacttcctcagtgttacagatcttacatcctcaatcacagactgcttcaccgtctcttgctgtcttgccaactgctgtctcttgtctctcaccaattgctgcctctctgtctctgctgtcttgcctctctgccaattgccaccatctccgctgtccttgtccctttgctggttgccagatgatgcaggacaggcaagccccaagactggggcttagcctgggagagttcttggatttgcccaaagattcaagggtgagctggtggtgttaggcagcagctttcatggaagcagctgtgcacagcagcgccagagatgccgctccttgcagatcagggctgctccataggctgtgtgccctgagtagcagctcagaggcagttctgcagtcatatttatacctacctttaactatatgcaaattaatgggcggtgtatgcagatacttctaggatgagggtggtaaccttagggccattgggtcattgccatggaaaggggtggtaacttctgggtgttgccatggaaacggtaaaccgacatggcatgctggtgggtgtgtcctatggaaaactgcatctgccctgacctgttttagctagtgctcagtttggtcctatgtccaagccttgcctctggaatcaagtcccgcctcctgcctcaccaggagtcgcaggtaagagtgtgtgtcatggaggaggttataaatgtgggccactgagacccactccccactggggaactctgagaggtgacatcagatagattcagctgtgctgactagggggcaaggcagctgggccttatcactccctcctgc

SEQ ID NO: 1562484 - DNA, 4001 bp, Homo sapiens
cttccggggggttgacgtcatacagaagatacctgagcagggagaaggaggaccacaggtctcaaatgctgaggtttctgcacggaaaacccgactgctcacaagtctcagcgcgtggcccgactctaggcacttaacaatggttcctagtttgtgaaggcagtgagtggcctgtttctctatgaccagttacttacggagcctgtaagcagaagcagcagacatgctaacatcgttttaacaattagcaatagttcaacactaaggcagaggaatcccagtgactggaacccaagaatcagtacccacatggttctcaaactgtttggtttaaagacccctttacactggaaacaatgactgacggctggttatgtgcactatgtctattgatacgtcctatgttagacgttaaagctacaagtatttaattcagctaaaaataagaagccattacatgttaacaaaaaccacatatttaaataaaaaataagtgtattttaaaaaatgaattagaagaactgtgatgatgttcttaatttttgcaaatctcttttgggtttggtgacagctggattcccatacccgtttctgcattcaatctgttgtgacatcacagatcaagtggtttctaggaaaactccacagtgcattcatgagaagtgaaaaaggcgtataatactctggtactactattaaaacggctacaaaagctcagagatccaggacacactttaagatcactgccctagaggaaggacacaaagcgccccaaggcacagacaagtccccaaggcacagacaagtccccaagggctacagaaaccctgtccctggcgctctcctttccctgctctgcgctggttttccatactcccatcgtcgcgagtgaagctgcgtgcagcgcccaggcctgcgaacgccacgaggggccgtgcacacctctgcgtccaggcccctcccggggtccgcttggagatcccacagccacagggcggccgcgaagctcgtcttggccctgagaattcactgcggagcgcccgcccggcactgactcccggctccgcacacccaggcctggacccgtgtcacttgcaggggcctccggagccagcccacgctcagcctgagcaacccggcccccttcctgggctcccgaggctgcgccccgggcctcgcagacgaccccgcctgcagacccgggccgcagtgacgcagcctcgactacagccaacccgctggcccgaccctgcccccagcccccgccccatcccatcccccagactccagcccggccccggcccctgcccctgcccctgcccctgtcccgtccccgtcccatccttcttggccccggctcccgccccgcccccatcccatccctcgggcccccgttcctgcccccatcccatcccacccctcctggccctagcccctgccccgcccccatcccatcccatcaccctggcccctgccccgcccccatcccatcccatcgccctgatccctgccccgcccccatcccatccctcctggcccctgccccctgcccctataccatcaccctggccccttactccgccacattccttgccccagaaccctgaccccatcccattcccctgacccctgccccctgaccccgctccatcccatccccctggcccctgccccataactccgctccattccatctccctggccccggaccaccctccatcccgtgggcctgcccctgaccccatcccatctccctggcccctgaccccgccccgcccccatcccatcctctgaccctgcccggtcctggaaccccagcgttggcaccgtggacgcgcgtttaccgtctgcgggaagccgcccccgacagaatatcggccgccgattgtccgggccagaactcctggccggaggcagaagccggaggccaggacactgcccccagcagcaggaagacgaagctgagtgtcgccatggccccgggcggccacgcacttccggcggccgcgccccgccccggaaccacgccccgcccccgtgaaatgcgttcccagtagccacggcaacgcccagctccgccctccccgcgcatgcgttatgcgccatcaccggcaagcaggggcgggagggggaactgcgcgtgcgcagagtctccgccctcctgaccgcagcggctagaggttccattgcagacccggaggccgtggctgtggttcgcggcggtgctgtcgcgggcgccctggcgcagcccacgcaggggctcctgagggtccgcgaggccgggaggtccgggggtcgggaggtcccggggtcgggaagtcggtggaccctgcaggccagtggggagggtacgcgagactgggggccgggagggctgacggctggtggcgcggggcgggtccgtggggaggaggcccggggctggtaggggcgggagggctggacggcgggggcggggcggaggagggggtccgtagacggggtcggcgccgggtgctctcgcccctctggagctggggtcggggcgggagccgcgcatgagagcctgggtttctagtcggggggcgccgtcgagctccacacctgcggcctcctgggtgcccccaaccctggagccccggcgagggggcacccgggctgaggcctggccctccaaggagccctggagggactgtgctgctagggcgcggggctcgatggggtgatctggagacctggggggatccggggctgccgcccctgcgctgccaacctcccaccccgccccttctgcgaggcgttattaaaggtctggtttcgggagccaggtgcgtgcccgccgccgccgctccccgcagcctccaggcagctcccgctgttccccgagggcaccagcactggccgaccgacctggcttggggcgcggcgctggcaaacccggccttctgaggggacgccacgctgactctagtgcaggcagcccccaaaacggtataattggacgaatttcttgaaggatgccagttaccaaaaaagaaaatactaatgcttattatctgttaaatttgagatcaatttgttatcaaattttctcacacagaaaattccaggcccagagggccaagctggtgaatcctacttagagaagaaataataggaatccagccactcagacgatggacgaggaggggcacttccctgctcgatgtatgggccagcattgccttgatagcaaagtcagacatcaccagacagtagaaccacagaccaatgtctttcatgaaccaagacacagcatttaaaaaaattagcaaatggaatttatatctgcctattgtttacaaaaaaagccaaactttgtaaaatacttgaagagatttattctgagccaaatatgacccatgacacagcctcaggacgtcctgagaacttggcccaaggcggttgttttactgcttggttttattcatttcagggagacataagacatcagtcagtacatgtgaggtgtgcattggattgatccagaaagtcaggacgactccaagtggaaaggcctccaggtaataggtggattcaaagatgtttctgattggcagttggttgaaagaagttactatctgaaggcttggaatcaatagaaaggagtgtctgggttaagagaaggggctgtggagaccgaggtccttattatgtggatgaaatctcataggtgtccgccctcagaggcaatacatggcaaatgtttcctattcagaccttcaaaaggcactagactctcagccagtctcctcaggatcagaaaaagagctggaaagggaaggggagtctacagaatatgaatttccccacaagacaccgctttgcggggccatttcaaaatttgtcaaagagatatattttggggtaaaatacattgatactttgagggcctgttgtcacgtgatgctataccagcgtcagattggaacttggtgtcttgctgctatggagtctgctgtcagtctggtcagctgcacctg

SEQ ID NO: 1562485 - DNA, 4001 bp, Homo sapiens
tctaacttaaacagaaaatagtctttcattcctcttctaacttaaattccttctcttagcaggaatgctgttttcctatgtgcacaggtcactggtagacatgcaaaaaagtaccttgcccaattttaaattgagcttattttattatatctgcatatatatgccggtttcagtggctcatgactgtaatctcagcactttgggaggctgaggtgggtggatcacaaggacaggagttcaagaccagcctggcaaagatggtgaaatcccgtcttgattaagaacacaaaaaattagccaggcatggtggtgggtgcctgtaatcccagctacttggtaggctgaggcagagaattacttgaaccaggaaccagaggttgtagtgagctgatattgcaccactgcactccagcctgggctatggagtgagagtctgtctcagaaaaataaataaatattttcacatataaataggcatttgtgttttcttctggtacttttctccttttgtatctttaaaatttttaatctatactccaggaacttatttttgtgacataaaaatctaggtagttttctccaagcagcatgcatttaatttatgaataattcaccttgttttaccaatatgaaacatcaccattatcaagtgctaaattcttacatatatttgggtatttctggatttcctattctgttctgttcatttatatcttttcagctgttagtaaacaatttgtggaaataacacatgcacattttgatatctggaaaagcaagtctttttccattctgttaaaaaaaatcaatttatcacaatgataaaatacatcatgtgcaatttaaagacactaagactttgctatttttatttggcttatgtaaaagtgataaacacagaaaaagctcacatcttaagaaaaacgaaccttcctattcaaagatatgaaccatacttcccatttcagtttccttttaaggttactcagtaaagaacgtatttacataggggtacatcgatataaaatccatattggattttatttgaaagatatttagcccagaagttgatatattatgggacttagttctcaatatacacctttctatagtgtacagaacattgttttaaaatgtgtacattaaaaataatctgctgcatcgacttaattttgcgagttaaatcactttaaaacagtctattagtgttctataagggaaattgtaattggattggaaatcagctaaaactttttgtgtcgctgtttataaagggacctgggccctgacctctctgaggtttccacacccagggtggtgtggggcctgcggaggaagagaaagcctggctcctccctccctgcgccaggagggtatgtccccatcatccccccatgtcctgcctcctcccatcccaggcccggttacctcttttccttgtccctcttgttcatgtcagtgtccctgagcatgacgatgagatcctttctggggactttaccccaccaggcagctctgtggagcttgtccagatcttctcgacggatgtggtacctcggctccatgaaggcgctgtggtcgtagtctccccaagcgcccacgttgctcttgccgctccccctgcagcaggggaagcagtgacagcaccacttgcccatcttgctcctgagcatcttcataaaggagttttcatggtctccagaagtgcccacgttgctcgtgccgctccccctgcagcaggggaagcagtggcggcaacacttgcccatcttgctcctgagcatcttcataaaggagtcgtcgtggtctccagaagtgcccatgttgctcttgccgctccccctgcagcaggggaagcggtggtggcaccacttgcccatcttgctcctgagatcaaatggcttcttcacagtagaggcagtgggcattgaacaaacctcagccaccatctgcttttaacagccaggggaggccggtagtagcgaacagatcgcgtctaccaaccagtttcaccaactagcaggaaaccttgggtttccaatctgtttgaagagaaaggtcaatcccagccaaaacttgccaaccccagcaagggagcccagcccaccccacccagggaaaacccacacccacccggggaaagcccacgcccaccagggggaccccaggcccaccccaggaaaggccaagccccccctccgaaggaaacacccagcccagtcaagggaatgccaaacccagcagagaaaaattcaggcccagcaaaggaatgcgagggagaaaacgccaatccaagcaagaaacaccaggcaaagcgactaacgccaagccaagctaggaacgcaaggccaagcgaggaacgcaaagcgaagcgcacccattacaggtaagccaagccgtcatgtgcgtgcggggcgcgcgtgaggcgggcgcgcgtgcggggcgcgcgtgaggcgtgcgcgcctcagacgttatgcggcgtgcgcgtgaggcgtgcgcgcgtcattgcacgtggtgcaggaagtggccgatgtgtgcaatccgcgtgcgcaagtcttggcgccacaaatgtcagtgacagccttgcgttactggcaaagttcatgggagttgacccagctttctggccactgaggagaagcctgtggtgggaaaaagcctcttgaagcaggactggggctagagcgcctggaactcgaggatgctgacagcctcctctgaagaaagcccccaagacactagtggtggtgctgttgcgggtggccgccgctgcagcttagagctctggttggcgaagctggatgcaaatggcctcaaaatctccgagcacaagacgcccacggagcccagggcctgcgtgaggcgccttccacacctgctcctccttggtccgtgcccagaacacagggccatcagcaacggggcactcggggccacagaatcggggctgggctgctagctcctgctgtggtgccccctgcctggtgtccaaaccagggccaacagctgtggggcttctggcccggggtgcttcgcttcactggcatgcagtagggttgaggtgcaggccgctgtctccaggcctgaaagaggcggctgggaggagcacctaccactgatggggagatgcaggaaggcacccccacatgcagatcctgggaacagtacactgccagcaccagggagccagatcggagcctccctggtagcctgtgagctggacccaggcagtggcacctcgaccctcctgctgggaccctcctgctgtgcaggcttatgcagccaggctccaggctgcttcacccatactgcaggtgctttggtgtgggaggaaaaatgcattctggccgggcactgtggctcacgcctgtaatcccagcactttgggaggctgaggcgggcggatcataaggtcaggagataaagaccatcctggctaacacggtgaaacctcatctctactaaaaatacaaaatactagcgggcatggtggtgggcgcctgtagtcccagctactcgggaggcaggagaatggcgtgaacccgggaggcggagcttgcagtgagccgagatcgcatcactgcaacctgggcgacaaagcaaggctctgtcaaaaaaagagagagagagggagagacaaagacagagacggagacagagagacagatggagagaaagagagaaaaatggattctaagcctgggacaccgacctgctcttgccaacaaaagcagaggggaagccaattacaagtgcaaaaaaaaagtttttatttcagtgggatgaatgtctaggtgtgcagtcactggagtaaacgtcactgggacatgatgtgtaattctttgtgtacatcgctgagtgctactgctaatgttgttaagaactggtgtatccatgttcaagagaattaccaggctatagtttacttttttgtactattttgatatcagagtaatgttagcttcataaaatgaattgggaaagattctctattttcagaa

SEQ ID NO: 1562486 - DNA, 4001 bp, Homo sapiens
actttgcaaatgaggaacggagtctgaaaaatcatttaagtcaccgctcaccatcccaacctcttgagcgcacgggtggaagacacagttgccttaaatctcccttcaatctgcaaaatggcaggactgttctttcctggccttctgtacagataatgacatcgaaaatgatatgagagccacatcctaagtgaaaagagttctttgtcaaatataattattctaagacaagctagcagccttccaactacagttgatttttaaatttatttatttgtcttctggagaaataaccgtcccgcctgcttccaaaatggaacatttagcttgttctttgctggctactttgcggcaaaaagtatgaatcacagatagaagaaaaacaaactataaaaaaaatggtgtttttgctcttgaaagtctaaattatagagctactatttcttaatcgttcaccgtgaggcagcgatgtcaggaaatctggggaaggagtgaagcagtgaaaacgtggaacacgtgaaaatgtccgagcttgaaacaaaatacggtagtggtgtgtgcaccggggtgggatcaccacccttatcgagtgttgacatcattgcattctccaaggagaactgtcactgctaccttttaaggtacatcacaaagccagtggctccttcacatgtcaccacccttcaggaaccaagctaggttctccaaattcacttgagtctggcttaagccaatgtggtttttttaaaacgagtgttggtagctttaaatacacacacaggtccacgtgtctctgatcacacacttgtttctaccgttttaaactccctttggggacttgggggtgaggggcaatttctgagcatttgtgggggaaaaaaccatccactacattagggggttaagaaaggtaaatgggtgataactctaaccaccagataggagtgtttatttccatgagttttcatttctattttctcaaggctaacccctgcgtgaacacctcccctctagcaggacgctgcgcgtggcccccgtccccacctgtccacgcgaggcgggcctcacctgagcggccgggcacgccccgtccccgaacggccacccaccccgggtaggcacgcgtcacctgtccatccacctcgctaccttctctctgccaccaaaaggcttacgaaaataaggcgcagggggtctgggagaccccatcaccaggactcagcttctctaaacgcggggttgggggtccagggacccccccgtgcgacccgcatgggctgtacccgagggcgggggataacgacatcccctggggcctcggcgacgacgccgcccggcggcgggggccgcggggccgcgggccggggcggcgaagaccctgcgccgcgcccacgggcgagcgcggcccggcagccccgcggccccgcgctgggcctggccgcgggcgggcggggggcgcgaggcaggggacgggggcgcggagcccggccaggagcgcccgcggcggcgggacccggcgggcgggcggcgcgcagggcgatcccggagcggctccgggaaatccagccgggttttgactccgatcgccaacggtgcccgcagccggcgaatgtaacaaagaacagtcggcatggcggctggaccggggcggcgcgcggctgccgggcgcggggggcggggggcagcgggcccagggcgcgccggggctcgcgggggcagcgggtgcggcccggggccggcggggcgcacgccggggcgggcggcgggcgcagggcccggagctttacctgcctttggaatgtgcagagcgggatcggatccggactccgggttgcgatccgctccggaaactgcgcagcaccggaagccggggggcggcggcggggcatggcgggacttgtagtccgcgggcgggcgcggggggcgcaggcgagaccctggcgcggccgggggtcctgcgggtgggactgcggggcgcgggcggcgtggacggggcagcgggcgcgcgcggggcgggtctggccggagggaattccgcgcgcggcccccctcccacgtggcacggccctgccgcccacgcgcgcgggcagctccctctccacctctcctcggacgcgtttcttgcggagttggggagtggtggcggtgggtgggtcgagtttttctctagaacaggcctgggacttgcccccactcacggtgacctctggatttggccggcggggccctgggacacgagctctgtgcccgcgaggggagtctggcctggcgggctccgccacgctaccggtgagcaccgggccagccgcggacctggctctccattcttccccgggggcctgtgtggcctctcttgaccccctccaccaagtgtgtgtgccatcacaaaacgtgagacggagaagggacagacttttcaccttagtcctggccgcccatattcagagaggccgactgtcttgttcattgctgcctggcaaaaacctacattcataaagagaagtgatgaaccggggaaaatgattttaaattgatgccacaaaagggctcgtttccctcatgtacgtgaaactcttgtgaaccaataaaaatatatatgtatatagaaaaatgagcaaagtgtgtggatggacagttcgtaggaaattcaatggttcttaagcatatgagaagctattcaactacgctgcaataagagaaaaaaagtcgcagtgggatcatttttattagattagcaaagattttttaaaacgtttaatacaacctgggcaacatagccagaccttgtctctaaaaaacttagctgggctcggtggcacgtgcccgtagtctcagctactcaggaggctgaggcaggagggtcacttgagtcccacagtttgaggctgcagtgagctgtgatcgtgtcactgcactccagcctgggcaacagagtgagaccctgtctcaaacaaaaacaaacaaaaaaaagttttaatagcataattttgaagaaactagagaaacaagctcctttacgggtaggagaataaattagcgtagtttccattcagatatttgtggatatccataaaaattctaaatgcacatagcctttgacccacatgcaggaatggtgccagagacggactcgcttgtatgaatggcatatgtgatcatcacatttgcttacatactacgtgccatcccatgggaagtgttggatgcacctgggcacatccataggctgcaacgccgggcagccggagacagattaggcaagtgttgatctgtgaaggctggtttctctgcctggcccagcattctacagtggcttccatgttgcactatagtaggccatcccatggccccccagacctttctggagcatccccggcgtccactgtctccctgcttgtccccacctgcgacttcatgcctccctccagcctcctgtccctgaagcctgttcccaaggccttctgtactctatcttcaaacacttcccaggttttccacaaccttctctgtattcaggtctccgcccaaccccactcccaccaccaccactacagctaatggacattccctctatacacgcacctccagtgacatcactcacagttccaaaatggccagatgactggttctgtgggcctcaggacatgaaacagtcctcggcatatgtgaataaaaggttgtttacactaaaaaagtgacaggtccacagcaagtgcgaataactgaaagtaaaccaaagacttcaacctcccccaggccatttctcctattactacatacagcccacggctggaattcacttacacaataatcgtcatatctcgtcttcaagaggattgtcaatgtgtccactataatccttcagaacaatctagaaataatacctcttaaggcagattcatctccaaaatgttaaaagaaaaaaaaaagttttatcttaaagtgtcaaattttcattattaacaattaatgcaatatacaactttgaaaaatgggcagaa

SEQ ID NO: 1562487 - DNA, 4001 bp, Homo sapiens
tataaataaaattcctatatataaaaagccaaatgaaagctcattggaatgaaagagaaaaaaagaaaacattaaaattgacataacagatacggaaatgcttgatttttaaaaacagtatctattattcagttggtgacttttacataatcaacagtctttacaatttgaggggtattttttactgctaacttgaacgaaactacatgagtaccccaggcagaaacagtatgaatacataaatcttttctaatgtgtccaacttgccttcaatatattgctggtattatgcctgaaattttattgaacagctcagaaaatatgcttgctttgccagttcacgtaccaaaaatggaaccctaaatgatgctgatgttttggggctaagtatttccttagaattgttatggtgcccaatgcaggatgtcaccttacaggcactgcgtttcctctgcctcacaatcttcacatttaagcattctactgccggtggccaccttccaaggcacaagccaagctccatcacatctgtgagctgacgcttagctctctgtaatgctcacattcattaaacacagatttttaggaagtggaacggaaattacctgcgattcacttctgggacagtcacctgatgttgccatagttctcttaggctctgcctcataactgctgatttatttcattttcttttccatttctacttttaaaaagagaaggagacacaaagtacttgttacattgcttaataattgagttcacttaacttctaatgtgcatgatgtcctctaccaaatagaagtaaaatgtgtatgtgtgaagattagtgtagaaatgaaaatttacaatactttacagagacaaaagcatttaaaaatcataaacttcaaatagtgtgttttcttcactagtctgcaaggtgttaatcttgttcatttgctgaagcctgttagtttctgttagatcaggtgtcgacttaaggcaataaatcagtattcattaatttcttagaagtgtgatagctttaattccaattaaaagtccctacctgggaccttacagtgtttccactaacaggaaccaaggtctgcatcttccagtcttttccttcttctcaattcgtatttttccagtgatagtgtaatccacacactgctctgggatcaatgtgtttttaaaattgcatagcaattctttgtttaaaatgcatgcttcacttctaaatccagacttgaagcttatttttgtgatattcgtagttacaaatgcttactgatttgcataattatattttcattggaagacctgggtccaaactgggacggggtcggagtggaggccgcagtgcgcgcaggaccctgccctcctaagatgccctcgggaggaacaggatcatggagggttggaacaggtggccagtgaaggggggtgagaagggggcaggaagcgagagggccacgcgtggacgcaggggcacgagagggtcaggctgggacagcgccgcgagcttcggggcaggggccgccaggcaggtgggcgtggccgcgaagggcgtgacagagatggtggtggggtgggcgtggccgtagaaggcgctggacggcgggagtggccgggaaggggtgcggcacgcagggaagggtgtgacggggaccgagctcccgtttggacgccagggaaagtggctgagatcgcgaaggcgctcggaggtcccaaaagggggcggaggcctctgtccgccagcgacgcacacgcagtgcgaggacgcctcacctggcctgtccttccttacgtgcagtccagccatctgagctgcccatcaggacacctacctcaatcgcgtttctccgctgagttccgcgtccacaccgccagcgcggaggggtggacggtcctttccaggagcctgagccaccgccctcaacccgcgcaagcgcagtgcacgcaggccgtcagccgggaaggccccgcccagggcccggcgccccgcgcaggcgcagtcctaagacgtcccccattccagggaagccaagccaccgccctcgacttgcgccggcgcgtcgctcacagatcgtctgcagctggggctgcgccccgcgcaggcgcacttcacatctgcgcgtcccgcggtcttgcgaggcgaggccaggttctccatgtgtggagctcgtccccaatcgcccagcccagccgcggggttggggggctcggcttggggtccgacccagaggggcgcggggcaggagtccgacctggggcggggggcgggtttgggccattcacggcttgggaagcgacaacccctacgagccacaaaatggctggggcttgggggaccccccacctcctctgtcttcccgcaaataattcagttaactttcccatccgcgctgcgcagtgtgcgccctctgcctttcttctggataagtggaagcagaatgatgacgtttctgttgtggggagaggaagtttggggttaaggagaaatgggtggcgctaatgcctgtaaaacataaaattcgaagccccccctcccccgcagccgtctgactggactccctcctttaccaggggaccctgaagttcaacctgagagactattctggcctcgaagggaagtaagagttggacatgcctttttacactcctccagcattaacatcaaggcagaccttaagtctgatttaaaaaaaaaaatgtggaaggaaaataaatttgggggccgcaaaatcattaagcttaaaaggaaaagtcaagttgggaactgcttagggcaaacctgcctcccattctgttcaaagtcatctctcagctcactgagataaatgcgtatctgattgccacctctggagaggctaaccagaaactcaagggaatgcaatgatttgtctcatatttacctatgacctggaagctccctcctgcctttgctttgagttgtcccgcccttccggaccaaaccaatgttcatcttacatatattgattgatgtctcatgtctccctaaaacgtataaaaccaaactgtgctctgaccaccttgggcacatgtcatcagggcctccgacggccgtgtcatgggcgtgcatccttaaattcagcaaaataaacttcctaagttgactgagatctgactcagatattcaaggttcacattttggtaaccacaaagggattctgagtagaggtgccactgacctttgacaaatctgtcagtccttagtaccagcttgagctatctttatggctcaaaccaataggacaatttgctgaggcctggaagcaccccctccagagaatccctgatctacccagatttagtcaagatctagtttattttgctgtacaactccttttgtgtgttgggcgggggttggggggcggggtgtgctttactctcttccaacataaggaagtagtagttttttcctgcttccatgacaatggaaggcaggtaactcgtttatggagtttgagctcgcttcccacaggaaagatgaggggttttcttcctctgcttctagggtggtagagagcaatcttcagcctcagacccatccctaggaagtaactgaattggggtttgtcttggctattaagattaacaaccagctggtcttaatttctccttaccattagtgtgctcagtaaccttataaattgcccaatccttcgtttcgcttaactggtttttttgttgttgtttctgttttttgttcttttgtctttttcgcattgagtttgacgaactctatctgacttgatcgaaaccaaaggaaagttccaaattatgagaagtgaggcctctgaagtggctaagtttcaacccctccccaccacacacacacacacaaaaggtgatgtggtggggggagaaaaacagctagcaaaaggaaaaagaaaaaaaaaatttattttgactacttaaagggcttttcttacataacaaggccacatttttgctagccagaccaaccaaaaagagtaatgtctgtcacccca

SEQ ID NO: 1562488 - DNA, 4001 bp, Homo sapiens
ggaagctgaggcaggaggatcacttgaggacaggagtgcaagaccagcctgggcaacacagcaagaaaccatctctaccaaaaacaaaacaaaaaaaaatgatgcaacaggaacaggagagagattttactcagaaatacaatcactctactgtggctttttaaagtactaaacattttaaatcttttatgatggaagaaaataagtatatttcattctttcaacaaaatgactaagtcttctgcattttcacttacctactgcattatttcctatagcaattataaacttggagcacggatatttttctagcaaagaaacttccaaagatgtttttgtttgtcttcgaaggagccgcacttccctaacacaagaaacaagatgaaactaaagcaacttcaatataaacagtatcatggcaaaagggcactatatgtatgatttacaataaataaaatgcacgttagttttataaagaatataactaatatcctcagaaaacgatggactcggacaatgataaccaacagataaaactattgcatacgtgtttacggagaactctaaaatagtgatcaggctgtccacctgacccaagaaccaatcttagcatccctaaaagtgagacagctggggatagcctgcaataagaaacagaaagcaccacttagtagaagcattcttgccgacaaaactttgaatgagaatctgaccaagcctccaaatgaacattcattttacaggacatgcaggtgatacaaacgttaagtgacaccacaacgaagctatcagacaaattcagagtgtgggggcactggacaagacaatcagtcctgtctcttaggaggggtaagaggaggttgctctaaatgaagtgacacgtctaaatgtaacctgtggaccctgttaggattctcattcacgcagaccactgtaaaatgtcatgtttgaaaaaactaggtaaacgtgagtgagcatggactacaaaatgatactggaaaattagtattagtgttgttaggggtgataatagcatatgtaagaaaatccctaaaacgtttgagatgtattctgaaaaatgtagaggtgaaaggccatgatgactggaattcgcttaggagtggcgggagagaaaataaacgtggcaaaatcttcctgttgaatttacccggttgtgtaggggtcagggctcacttgactattttctcccacttttttgtgtttggaaacaatttttttaaagcgtgttcatcggctactgacacatcatgctaattgaagtgttgggtgcaggtttaaaaagtttcgagggaattggtgtgtccgtgaacaatccacgacaaacgtggtggggcccgcgggagcgctgcggcccaagacagtgtgacaagcgggaagatcacgagtccgcaagacaccaagcctccagaaatgctccagaaacgctccagaaagcctttaaagaacggatttgaacccagccctcccacagcggcttcaccctggactccacgaaacgccagcagatccacgcgagaaccacacacacctggggctggcgccgctggacgccgcggcttcacggagacccagggcccaagcagagccaaggagcggcggcaaccgcgggggccactcggaagaccgcggagccccggccttaggcgccgtcgcggctgccaggcccgcgcaccttccagctgcggtgagcgcgctgcccttatcccggtgcctcacctcttccgcgccagctgcagacgcacctccctgtcctcgggcgtctccctccgcccctcctcctcctcctcttcgtcctcagtcccagctcggcacggcgccttcaccacctctccgaagaacgtggccgccatagccgccccgtgaccggctggacacaactgcagcgccgcgggaccgcacgccggcttgcgcgagaccacgctccctcaccgcgcgggcaataagtcccgccccgcacaggccacgccctccgcgcacagcccaagctcgcggccacacccccaccgcgcgggcgctacgtcccgccccgcacagggctcgctcccaggcacaccctgagctcgcggccacgccctctacaccgcccgcccgcgctgtcatgccctgggccagcagtccccgcagcttttttgtttttaaattacagattgggggagggggtctcgctatgttgcccagactggtctcgaactccaggactctagcgatcgtcctccttagacctcccaaagtgcttggattacaggcctcagccaccgcgtccggcccccaaaggctttcattcgcagcttgagccctgcgggcgccaggaggtgggaggactgcgggctagaggggcagggggcgagaggagggcggggcctccgttcgtggcggtagcggaaccaggggtgcaggggcggagccagcgccgctggccgtggcgtccgggagctgtggggccgtcccctcatcgtccgtttccattttccttctgcgttaggagagactggggtagcattagtgtactgagcacccgctccaaatttcgactgcccaggtaggtggcggcgcggtggtactgagggcccccgtagccaggcgcgccctcagacagcgggcacgggcggacgcaagggcagcaagaaatacagcgcttcgtggtggtataaaaacgagacctttactctggcaataggaattcacatttcaaaagctgatgattgtcaaggcgatttaaaaaacatttttatgagtgtaaaaaatagtgttttaaagttggccattttctaatacaaaatgtttctttttaaatagcctttaataagcagaatgtgtgattgttctttaattggttctctttaaaatgtgctggaagacaaagttcgaggagcactgtttcaagcaagagaaaaaggggacataatttaaatgaaaatgaaaatatgcagtaatgcaatgaaaaaaccgtttcctagatttagttgtaccgaaatacatgacatcgcctgcattttgtgactttgtcagtagtcacgaaggtaagtactactttggggtcagagagagcctgttgagataaaatctcaaagctgttagaaacattttaagatgtggaaagataatcaacaaaatcatttacataaaattagtacttagcagatgtacacatctgcaaaaataaagtgagtttggaagcaaaatttgaacatttagcaataaaattaagacgaaattgctagccagtaagagcttaggaaactggatatccttagtgagatagaataaacaagatcaccacaatgatgttttaaaacattaggactcctgggttaactggtctattatgatgatggaactgcagaataaaaaggttgtttgggcaccacttgtcttagtccttttgttaatttgtcatttttaccagtaagatcttcaatttgatttcacagttccatgatgaagaaatattttctgcaaagcaaattactgtaaatagggtaatagtaatacatttggccatgatttaaattctgcacacatttcagagagaacaattttacaatgttaagttttaagcaaatgcttatttcatgcagttacaataagtttaggccaagcactttttaaaaaggcaaatatgttcgaattaaatacttagccaaaaaaggatttcattatgcaagactgataatacaatctcaaatactgacagaaattaaccccaccacagcaaattataaattcaaagcttaaattctttcattacactgaaattgctaaaaaaaaaaaaaaaaaaaaaaaaaaactttgcataaaatagtcttcaccgagttaagtatttcattttatagttacttgttgaggacataatatactcaataaatattataaattaagtgtaaaatttgaactggaaagaagtttaagcatttcattagagctcaaaaatcaaaccccatgcacctaaaagtaatagcagtttattaggaattcttccc

SEQ ID NO: 1562489 - DNA, 4001 bp, Homo sapiens
gtgcagacacaccgaatggcttttcagctgacacaccgaatggcagttccggattaattcccacactgtccactccactcgtccacacccatctctgcacccttcagcagtgcagagcaggaggaatcacagtcaaacaaaacctcatggttgttttcctgacactcccgctttcacaatgcaagcaaacacacccccgagccactgatacagttgccagtgaatcacacactctgcctgcagacgcccattctgtttgtggaaacgtattcactgcacatttgcgcttagaactcaatctgggccaaaagttcccagtacagtcccactggcctccttgactaacaaacttcaaggcagctgcattgctaacgtcacaaaccctaagcacacttggaggcaggtaagaagaaacacaaataatcctgcatcggaataaacattccataaggtcacaaaaagaaaaggtgctctactatgctaaacagacactgacagagcctgggctaacaagagctgagaaaagtattagcccctcaagctgggcccaggtcaaccctaattgtaagggtcaggaaactgaagttaaggtggcactattccccaccactagtggtcacctggaaactccacacacggaagccagcatgacattgtgaaacaggtccaaccatgacactctccagcttagaacctgctggattttcccgcagcccaccaggccctggaggcccagccccacaggaagccaccctctataaacactgccggtttctggaactctgagtctcctgtcatgcactttcctcccccagcccccgcgccctcactgcttctttcttggtcagcctcccggggactcagctcctcttggataggagctctggctgtcggtcaccactgtggccgcagggcctggtgcagacgggataaacgatgaagaatgccacctgcgcgtctggacagcgtagaaccgcaatcagcttgcttcaaaatcagatgctacagcctggctttggggacgccttcctttctaaggcataagtgcgagcgttcgctgctgtgcgtggaactgcggccgggagggagtggcggcgtgaacgccggcggctgtagagacacaccggccgcggccccatcaccctgcaggggcctgcggccgccatcccggcctgcccccgaccagctgtgcgacctcgaacacgtcgtgagccggcttcccggctcgggatcgaacccgaggagtgctgtttggggtcgcagtgaggctaagggaggccgcaggtgccaagcgtcccgcctgccgggcgagggccaacccgaggccacgcgcgaggagcggccgcagcgactggacaaaacaaagacaaagacaaagacggctcttcccctgcccgcgccccagccgcgacggcagctcccgcggccgccaaacgggcgtgaccctcgaggagcctccgtcggggcgctgcctgcgaccgtgggcccaggccgcccgccgagcccagcgccctggccgaaaccccgaccccgaccccgacctggacccaccagccgccccgcccccttcgcggccccgcccgccccggcgccctcaccagctccgggaggctcctgcgcggcggccaccgggatgagcagcaggagcagcgcggcgccaccgaggcgcaacctccagtacggcgtcggcccgcgggccactccgggcgccatggtcggccggtcgctctatcagtcagtggagcgttacaactccgactccagcacaagcggtctccgcccggaacagccgcggcgccggaagtggacctgcgaggtggggccatgcgagtgcgcagcctcaaaaagcagctcgccccgctccctcgccatctgccccgcccctcgccaacgggctcgcctcccggcgcggctgaggttcagtgcgcctgcgcgatagaggaaaggagcctggtagcgaggagagcggctgaggctcagtgcgcctgcgcggcgcggatgggcgaggcgtgaccgaggggcgaggcgtgaccgaggggcgaggcgtgaccgaggggcgaggcgtgaccgaggggcgaggcgtgaccgaggggcgaggcgtgaccgaggggctcgccgcggctcctgcgcctgcgcggcggggaacggcgaccggctgaggggactaggggagcgcggtgcttcggtggcggaggtcacggtggcctccatcctaaagggctgcgggcgtcccggacggcggtcccaagcgctgctcacgctgctcttaagtgagccctggacgaggcgcggtgggccctcatagtccgcgccggcgccctcgctccacaccgcggcgtccggccctgggctcccgccgatgtccgcgtgggacttttaggggatttgtttatttttgtacgttaaccacactagaaacggccccagaatgggctgaaacgtgtgctgctgaagctgccacctaaactcccgagagaagcgccgtttctcctccatggcttctcgccgacgccctcgctgcggccttccgggcccctcggttgataaaaggactaaatagtgacggacatttttaaggctacttaagaaatggcaaaaatacatttagaggtgtgaacccgaacacactgcgcgctttaagccccgcgagagccggggccgcccgcttctgtgcgcccgtagctcctttctcgggtccgggattcgccggtgccggggacagaaacctcctgccttcttagttcatgacccttgtagatgaacttccctgttttctgcactgcttagaccagaagacgggaaaccgtgactgccgcacccttccctgaagcaggcactgcccgtcgtccatcaaacgcgaggactgcgcccacctcgtaggaaggacgccgcggtcctgctaaaagcctccgcctctgcctgcccgagggcacccttcccctccccgcttccgagggcggactccattcctctggagccggtgtttccgggtgggccagcctccaactgcctttgaataacccccccttacattagattctgaccctgtggtgattttaggttgggatttgggcgcctgcagatggctccgaagccagcctcttgtgatccgagccacttctctggcactcggagcgctggcacccgcggagcggccttggttcaccggaccgcctgggaacctggccggggtctctggcagcctcccagggctgaggttcagactctgttccgcctacccaggtccacacctgatagggctggagttgaggcttggttttaaggcaagagtttcgtttgttatttctccaaagagtcagctgtttgcaggtgtgtggttaacactatccttcgaggttaaggttttgttcgtcttgctaaagtttgcaaccttttttgtccttcagatttggagaaggggaaagcagtttctctttgaaaagaagcagcgaatcgtggcttaagcaaaatttgtaatccttaaaactggccaggctctggagctgagttcaatttgacatgtctaaactttcttcttgagtaaccagattttcccttacagtcttttgtcacttaagagaactcataggcaatcgtccatccaaaacaagtctttctccttcagggaggacccatctttggaaactccagctggtttcctgtgcagtgcttatggtgccacctctcgttatatttagaaaaatggtctcacgtaacttgagaaaaaacatttcagtgaccaaagccgggtaccattggaacaccaaggtaatttacttgtttgctcaattggaaaacgctggctctaggataaaacggaatctttgggagagttattttttatggtagttggaagcatccaaaagaagttctaataaaggtatttatgagagaaaaacaaaaattatctaaaataatttctgaatttaaaaaagactactgaaatttctccccctcctccctcagctccttctctttatcctttgttgtctgaattacct

SEQ ID NO: 1562490 - DNA, 4001 bp, Homo sapiens
tatggggcctggctaaggcactacaacgaagaactgggtctggctgccaatttccacaactgatctgctgaccctagtctgtcctgtagtcctgtcctgggctcccttaattaacgggtgcaccattaaaaggaaggcacagaagacactatcagttttcatatgttacttaaaaaatggtgataatagtaatcagtatcactattatgaataccactttcacatacttactttttaaggtcaaatacagtgactctattgcccacgggactgataactgaatttccatcgcaggtaaaatttaggttcccacgccggtacaccgtacccagcaaatttgaaaactgtgaagaaaacaaaattgtcttaacacaaagaaaacagtcgactcccagaaaagcactaagtgaggcatctgggcagagagatggcatagagaaccccaccttgggggcccgttcacctttcctgggtaagagaggaagaagtgagcctgatcctcaggagaccagaggagcccgggcggccccaagctcccacagagatgggtaagatgcccctgtgagcactgaggaagcctcccaagacaggaggcgtctgccaggtgaagaggggcatggagcccacacttcaccaagaaaaaagctgcaacaatggaacagcaccccaaaagtgcttagaactcagggcttccagaagtgtggtaagccagcatcctatttactaactcacgagcacgagcgttcactggagactgccatgcgcacagacacgcacaccttatattctctctctagcaggagggggatgagaagtgtgggagcaggggctactttagacggtggtcacggagaggcacctggaagggtcacctgagctggaatctaaatgggaaggcaccagccaggccctgaagctgtgagtgggcagcgccctcaggacctcagggaggagcttggtcagcagaaggactttaagcggccaggcaggctccaaggcacattttttgccaccttgcagtaggaatgtggagcggatgaagtcctggcctgtgaggacgtggatatggtttctggtttggtgctgggcacacagcggtggctccaccagcacaggggacacaggagcagcactctgaggggccagtaccatgcccagtttcggacaggacaagtgtagtacacggtgggctcagcagcaggcggcccgtgcaaccctggaagcgcaacggtcagggccactgtgggaaacacaggcgtccccataaccggccagctgtagcaaacgcttcagagacccccaggccggctccacggccccctcttattacctgtctcacccgcctcctgcacttcacatctgggacaagtcttccctggctctcaaagctgagggcgtccgcctcaggaattccctccggcctcgggaaacagagctcacacctgggttccccgcccttccgctcacctggacgctcgctcgttagggaccagtcccgggccccgggtccctgctgttctcaccccgcctgcgcgcgcccgcgtccccgccccgtcccacctcctcatccctcccgagggtgctgtgccctccccgactgcaccaactccagcctttaggttgggccatactcaggttaaaaatatcccgggaccccgacaaatgtccctgttccctccgagaagccgtcggcgcctccgtcccagctctcccaggagccccaccacagccccgcgtccccgaggccacgggcgcgcagacagccggcgacccccacgcggccagacgccgcaaaagcagaccacgcgcccccagcccgcccggagccagctcaggcgccgtccaccggaagagccgcgccgatccaacagaccgcccgccgcccgcgctcacccggtaagcgaacttcatcacggccgtcgcacgtgtgccgcagctcaacccggcggccgcccacagagacacttcccgggggtccgcgcggcaccgcccacagcacgcacttccgggaagcgacggcgtgcaccgcccacagcgcgcgcgcccgggacggggtcgcgcaccaccgtccgcagcggcccaggaggcaggaggagctgcgtcgccctcgccccgccccgaggcggagtttgaacgcgaggcccaacccctcccaaggcgggggccttctccgggccccgcccacaccccggagccacactgcagggcgcctcttaggcgcgctccagcgctgggcgcgctccgcacggacgcccagcctggcacagcagcgtccacaacatgagagcgctgcacacccaaatgtcttcgttcttgtgaactgttgggtaaggaattatgaataaagtcccgaatgctggccggtgcggtggctcacgcctgggagactgaggcgggtggatgacctgaggtcagcagttcgagactagcctggccaacatggtgaaacatcatctctactaaagtataaaaatgaggcgcatgcctgtagtcccagctactcgggaggctgaggcaggagaatggcttgaacctgggaggcggaggctgcagtgagcccagatcgcgccattgcactccagcctaggcaacagagcatgactgtctcagagaaaaaaaaaaaaaaaaaaaaaaaaataatccgaatgtttcccaaaaggcaaataatctatgcccaagagtcaggaacaaggactagggagataaaacaataaaatcttcacattacatactgttgtcacaccatgtcgcagcaaaagatccagtgcaaaatagtttcttcttaaaatgtgtattttcagaattacaatgcttacattttaaagtcttaatacaatggttttaatctaacaatatattacataatatgaaaaatgacttttcatagtaaaccatgaaaatggaatacctgcagtgtcaaagtcaccaacttgtcaccttttccagtcacagaatcccaacacattgtattaatgatgactggggggggtcttacagcctgatgtatataggatgaataaatgtagagaaaggagcattttcatgaaaaataaaatttaaaaaccaggtaggatttattttaaagaacacagttgaaagtaaaacatttacatcagcccagtttgcccttttgtaaaaagtagtatagcttttcattttatatacaaacctgcagtgtctgatttcattttaaaacttaattttaagcactaaagaaaatttgaatagaagcctgtgtgtattttctctgctaattctgtatgggatatctggcatctccactaagagtaattaatacaggatctgaccttcctaggctgtgctgacaatggaactgttgtaggtaaagtcattttcagattaaatacaacaatttccacattagaatcagaagagttataatttttccaatcataggacatcccatgaaattcacaaaaattataacttattttattttccatttgacagtatttacatgttccacagatatttgtaaaacggctgcaaattccttgcttttcagatacacattgcatatctggcttcacaattatttaacatctctttatcaacaaaaccagcttgtctcaaacacatacaccttactttagataaaaacaataaacatccaattacagttactcttttaggacttttatgatgaacattaagaaaaaaatgacaattttgggtgacattcttctttgtcttaaagaggcagaagcattcatgtaacatagtttgcaaaagatcttttgggtaattagggggaaaaaaactgataaatttgatttcatttcatttccaggcaattaagcgccgtaaacattttaaatttccccttcactttcttcctctaaatatatatgtagttggataatttcatcctgggagtagaaccagatacaagaaaatcaaacagtaataaatgaaacattccctcttccagaaggtaagagagaaagctacattacactggggaaggctcccaggctgac

SEQ ID NO: 1562491 - DNA, 4001 bp, Homo sapiens
atggggcctggctaaggcactacaacgaagaactgggtctggctgccaatttccacaactgatctgctgaccctagtctgtcctgtagtcctctcctgggctcccttaattaacgggtgcaccattaaaaggaaggcacagaagacactatcagttttcatatgttacttaaaaaatggtgataatagtaatcagtatcactattatgaataccactttcacatacttactttttaaggtcaaatacagtgactctattgcccacgggactgataactgaatttccattgcaggtaaaatttaggttcccacgccggtacaccgtacccagcaaatttgaaaactgtgaagaaaacaaaattgtcttaacacaaagaaaacagtcgactcccagaaaagcactaagtgaggcatctgggcagagagatggcatagagaaccccaccttgggggcccgttcacctttcctgggtaagagaggaagaagtgagcctgatcctcaggagaccagaggagcccgggcggccccaagctcccacagagatgggtaagatgcccctgtgagcactgaggaagcctcccaagacaggaggcgtctgccaggtgaagaggggcatggagcccacacttcaccaagaaaaaagctgcaacaatggaacagcaccccaaaagtgcttagaactcagggcttccagaagtgtggtaagccagcatcctatttactaactcacgagcacgagcgttcactggagactgccatgcgcacagacacgcacaccttatattctctctctagcaggagggggatgagaagtgtgggagcaggggctactttagacggtggtcacggagaggcacctggaagggtcacctgagctggaatctaaatgggaaggcaccagccaggccctgaagctgtgagtgggcagcgccctcaggacctcagggaggagcttggtcagcagaaggactttaagcggccaggcaggctccaaggcacattttttgccaccttgcagtaggaatgtggagcggatgaagtcctggcctgtgaggacgtggatatggtttctggtttggtgctgggcacacagcggtggctccaccagcacaggggacacaggagcagcactctgaggggccagtaccatgcccagtttcggacaggacaagtgtagtacacggtgggctcagcagcaggcggcccgtgcaaccctggaagcgcaacggtcagggccactgtgggaaacacaggcgtccccataaccggccagctgtagcaaacgcttcagagacccccaggccggctccgcggccccctcttattacctgtctcacccgcctcctgcacttcacatctgggacaagtcttccctggctctcaaagctgagggcgtccgcctcaggaattccctccggcctcgggaaacagagctcacacctgggttccccgcccttccgctcacctggacgctcgctcgttagggaccagtcccgggccccgggtccctgctgttctcaccccgcctgcgcgcgcccgcgtccccgccccgtcccacctcctcatccctcccgagggtgctgtgccctccccgactgcaccaactccagcctttaggttgggccatactcaggttaaaaatatcccgggaccccgacaaatgtccctgttccctccgagaagccgtcggcgcctccgtcccagctctcccaggagccccaccacagccccgcgtccccgaggccatgggcgcgcagacagccggcgacccccacgcggccagacgccgcaaaagcagaccacgcgcccccagcccgcccggagccagctcaggcgccgtccaccggaagagccgcgccgatccaacagaccgcccgccgcccgcgctcacccggtaagcgaacttcatcacggctgtcgcacgtgtgccgcagctcaacccggcggccgcccacagagacacttcccgggggtccgcgcggcaccgcccacagcacgcacttccgggaagcgacggcgtgcaccgcccacagcgcgcgcgcccgggacggggtcgcgcaccaccgtccgcagcggcccaggaggcaggagctgcgtcgccctcgccccgccccgaggcggagtttgaacgcgaggcccaacccctcccaaggcggggccttctccgggccccgcccacaccccggagccacactgcagggcgcctcttaggcgcgctccagcgctgggcgcgctccgcacggacgcccagcctggcacagcagcgtccacaacatgagagcgctgcacacccaaatgtcttcgttcttgtgaactgttgggtaaggaattatgaataaagtcccgaatgctggccggtgcggtggctcacgcctgggagactgaggcgggtggatgacctgaggtcagcagttcgagactagcctggccaacatggtgaaacatcatctctactaaagtataaaaatgaggcgcatgcctgtagtcccagctactcgggaggctgaggcaggagaatggcttgaacctgggaggcggaggctgcagtgagcccagatcgcgccattgcactccagcctaggcaacagagcatgactgtctcagagaaaaaaaaaaaaaaaaaaaaaaaaaatccgaatgtttcccaaaaggcaaataatctatgcccaagagtcaggaacaaggactagggagataaaacaataaaatcttcacattacatactgttgtcacaccatgtcgcagcaaaagatccagtgcaaaatagtttcttcttaaaatgtgtattttcagaattacaatgcttacattttaaagtcttaatacaatggttttaatctaacaatatattacataatatgaaaaatgacttttcatagtaaaccatgaaaatggaatacctgcagtgtcaaagtcaccaacttgtcaccttttccagtcacagaatcccaacacattgtattaatgatgactggggggggtcttacagcctgatgtatataggatgaataaatgtagagaaaggagcattttcatgaaaaataaaatttaaaaaccaggtaggatttattttaaagaacacagttgaaagtaaaacatttacatcagcccagtttgcccttttataaaaagtagtatagcttttcattttatatacaaacctgcagtgtctgatttcattttaaaacttaattttaagcactaaagaaaatttgaatagaagcctgtgtgtattttctctgctaattctgtatgggatatctggcatctccactaagagtaattaatacaggaatctgaccctcctaggctgtgctgacaatggaactgttgtaggtaaagtcattttcagattaaatacaacaatttccacattagaatcagaagagttataatttttccaatcataggacatcccatgaaattcacaaaaattataacttattttattttccatttgacagtatttacatgttccacagatatttgtaaaacggctgcaaattccttgctttttagatacacattgcatatctggcttcacaattatttaacatctctttatcaacaaaaccagcttgtctcaaacacatacaccttactttagataaaaacaataaacatccaattacagttactcttttaggacttttatgatgaacattaagaaaaaaatgacaattttgggtgacattcttctttgtcttaaagaggcagaagcattcatgtaacatagtttgcaaaagatcttttgggtaattagggggaaaaaaactgataaatttgatttcatttcatttccaggcaattaagcgccgtaaacattttaaatttccccttcactttcttcctctaaatatatatgtagttggataatttcatcctgggagtagaaccagatacaagaaaatcaaacagtaataaatgaaacattccctcttccagaaggtaagagagaaagctacattacactggggaaggctcccaggctgacgacacg

SEQ ID NO: 1562492 - DNA, 4001 bp, Homo sapiens
acactatcttacagtattttttaaatcacaatgaaatacatagtgtgatagttgtcaagttttgctgggtgttgaagtctaaagtggaagagaaactccactttggcaattcctttcaatacctagacaaaaataagaacttatgcttcttacctgatctattaaataaaatttatattttgcttaggtggaagaaggaactgataaagaatgagaagataatatatagtcttgtggatccacacaactgatattgatcgagtcctgattgactaaaaataatggttattggataatgcaatcccaccccagtcttccactctcctttttttggaggctcaaagtgaaagaagtcttctggagaaaaataactctaagtttactttatatttctttcggtttttgttgttgttttttttaacttaatatagtaagttttaaatgatactgaatgaaaaaacagatatggattagagttcataaaaaaggaggcaagtttaaaaagatgaattaaaaggatgaacctaaaagtcttaaaatcaataatatttttcaaataataaaaaagttttacgtccaggaaaggaaactgtattcctggaaagaaccctctctaccaaattgtatctacaattaaaagagggttgctttagttaagtttcgagacaaaagtaagtcctttcacaaccaaataaaggacccctttgacccattcaatcctgaaaatttagttctgtaattgcctccctcggaactttcccttattctgataggagaaagtaactattgatttctcttgatgttagtattattactaataataacagcagtaccattagcagtagtagcggtagcaaacagcgagtgctagactcagctgtagccattttaccattaggccacatattccgatagccacattatactgcagatactactactctcttttgacatataaggaaactgaagcactgaggaattcattgacaggctcagagtcacactgctgacctcagagttcgcacgcggaaccacttttctatctatgtcccttctctttttatagattatcgtaaacattgtaattttaagttctccctgttaggaagataaaaggatgtctcgtcaatttgttttcccagcaccctcagtatttgccccgtaattccggatcattacacggttaggggaatggctgaatgagtgtatctttttggcaagtgatacctagctgtataggacaatacgataagtgagcgtgtatacaggacacagcaggcttaatcctagaggtaccagatctcaaagtttccgaaggtcctcttggtatgaattaaagggccttgtccagggaatcacctggtcacagtcacggtaagttggctgccaaatcatctcaaatctcacttttcatgctggaataaaaatactgtccgcataaaagggcttgaaggaaggagcaaggtgtaaaaggaaacattataaaagcgacccctctccttttgggggatgtcaggcgtgcttactacttgacggagaacagtgaccaggctgttttcggttctgcccgcgcacacccgaggcccaggcagcctctgggaagcccttaatcagaaacgggggttgaaggaaccacgtccctgcccaaccccaggactctgcagcgcggatggggatggggaacgcgccctcatttcactccccagccgctcacctggagacaggtgcgccaagaggaaacgaaattaaaacccctgctcaggatgggacggaagggggccgggctccgggtggtccaggtgcgcgctatgtttccggcccgacgtgctccgcccctccgccgccccttcccagagacggtacctgaaggaacagctcgtacagaatctcttcccgaactcgggcctctaaattcccaacaaacacggtcctgtcggcctcctcctgagcagggaacatcctccggtctcggccgtagaatgaagtaggagctgagaccccgccccttctccggctttacggcgccgcctgggtgagggggcggggccggcgccgggagcgcgcgctgggggcgaggcatggctccagggccacgcccccagcggacttggggtaccgcccaccgcactgctccctcgcctggcgtagggctgggcggtgggagagtgggtgagagtaagaaagatgaatgcagaaagggctttactctttagctagtggggtggcttcctttttttctggcacattaattgattttggatttattcaatcaacattttaaataaagtcactgtagagatgatttaaattgtggtaacttcattgcagaagctcccaggcaaatgcggggagatacatttctttgggtccaaagaataaatgaacaaatcatgaagatattaaactataaataatttttgaaagaatcgatgtttgcatggatgtggatacaacagaaaactagaattaaagtttattttcctagaaagtgctccctagatgagtttttgaaactggtcgcagaggttttaagtggactccaaaaggaacttgagaaagcaaataccaagggatatactggtgagagtgagccagttttgtgtctaagccagaatttttgaggatggcagctagggtttgtgtcaggatccaacggctgtactttgtttcagggctatactttgtatatggtgtaccaggctaaaggcttagttctttcttggggataatttttgtttttaataaaagtcttatgaacaataaaattacaagaaaggagaaagaaaacttagaatctcaatactttgataaatcagctgtcaactgttaacttggcttcctttctgaagctaccatacgtctacataggaccttgagatcatctcatgaatatcatataggtgatcagaacattatttgacctttagtttggcatcgtgataaaatttcattttgaattgaggaagcatgcttttatctggttgatggaccaaaaaaagtcatcttttctaatgaaaaggtacacattttaggaaatcctaatttctaattgatctctgacattacatagttttattactttgaacaagtaatttctctttggaattcggattctgtttcttaaggaatggattggactaaatatagttacttcatttaataggtattttctgaatgcttaattcttggaaaacaaagggaaatataaaagtctgacctcctaaagcttatactttgggagagacagcctttctaccctcacaaatataatataaatgctagtaacttcagtagttaccttcaactgatataagtcctgtctccatttttttttttcctttttctttcctctatcatcagtagagttgcggtacagtaagaaggagttaaggaaacactcatattgtaggcaaataaatatatgttgatcaaatgaatggatacttgcaagtctctgttatgtgtagacctcttgatttatttgtattcatttacttcataaatctcatcaaagcaacatatttcctccttgaattcccctcagacacttcttatatgcaagctgtatcttcaggtttcagtttaaaccattgcatgtatatgagtgcgtatgctacaaacctttaactacacttgtaattaatgttcatattatattgttctattgaaatttgcatccttctttgtctacaaatgtgcataattttggtgttataatatcctcttctggccgtacataagtttatagtgcttataattctagaatacttagttaatattataaactctgaaagtcagcttctgtagttagcaattttttcagaatatgatctcaatatatcatttttctaatgtaagcatgttctgtttcttaactcatattgaatgcatgcatggtaataaatctagtagtaggttaaaaataattcacttcactttcagtatttactgtaccattagtcatatatcaggttttaatgggttaaatacatgtaacactc

SEQ ID NO: 1562493 - DNA, 4001 bp, Homo sapiens
tgcaaggcttaccaaggacccgctgtgactttagctctcaggttgcccactgcatagagctatttgccctcagagactgggactcccttagcccacctggtttttgggttttcactgattgctgtatatctcacaggaccctagaattggacatcagtgcacaaccctccctcatccccattctgaagctccagattctccaaatggagagaagaggctcagatggaggctctgcccctttctccatctccaataccaccatcctagtcccactcccttcctatctcccctggatgatggcaacagcctcctaccaggtctccttgcttcctctctagcctacccagtttccctcctgaaagccattctccaccaagatgtgcaattagaatcacacctgaatccttaccatggccccagggggatgttttctggttgcttatccaacctcagctaccaatcgcctctctgtctctcatgcaacccttcaagtcctttaaaaatggagttcaccctgcactggagcttctgcacctgctagtccctctgccgggatgccggccacacaaacacctccccagggagcttcttcctgtcaacctggtccaggctgtgcagaggcctccctgggccactccatctaaagtggctccctactaactcctctgtgtaagtcccctttatccacactgtccccagagccattatctacccttctgtgggccctgaaaggatgacccaacctatggactccactgcaggggctcccttgcctcctagctgtcctttgagttctgccaatgaaatcagaagcctgagaatttcttccctgcctgtaccctgccttagcatctcaactccacaccttcaagtctacagctcctggcaggcagctcctcccctaggtttccagccacgtgacttcctcccccagctccagcttccagctgttgctcatggctgcaggcctggacatcccttgttagttccctcaggactgccccaattcaccagctcttcaacaaaacccccacagtgttaggacctgaccactctgaccaagccccctccccttgctctctatccctgtttcagtctcttcatcgcatttatcactatccgaaatgatcttgttcacttgcctttttcctattgtctatctccccctcaaccactggatcctaagctccatgaaagcaaggagcttgaaatgttccctgctttatcctctgggcctaaaccagtggctggaacacagtaagcactcaatagacagcaaagcctgaatgaaccaatgctacattgtctctgctcaaaatatcaccatatcagtaagaccttccctgatcatcttatggaaaatagcaatctcccctccactcccagatctccactccctcctcctgccctccaagtcttattttttcctatagcatcattactttctgatacatttgatatttctttattgcttgtttcccttccaaaaaatgtcaaccctggaggcagaaatgctattttatttactgatgcagcctcagagcctaggacagtacctatcccgtagcgaagtctcaataaatatttgttaaaatgaatagctagcgaagtgggcaaactttcatacaacacaatttcaggattgtatccaacactggaaaaaattgtctccaacactacaagtaagtgccgtcttacgtgacttgaccttgttctagcagaaagacagcctagaactcctaaggaaaaggtctgaaatgctggctagcgcttagtttatatggagaggaaaaggttttagagtaagatcaatcagtaagaccctgagttcctgacaattgctgctctagaaagcatgcctggaagcttacctaagcacacggccattgtaattcctttcagaaagtaagtgaacatataaattataaataaatgacacttacatacaccattctgtttcacagtggtgttgtattggcagcagccttcaactatagttcattgacagcatttgtggacccacagccaagcgctgaaagcactgctttttttgacagctgctctcctaatggggcatctctcaaagaccggtttcattctgtgacgcccacgttgtccacattttattctgcacaataactgcagatttgaaataaattcttcctccccaccaccattattgattactcatacctgcccctcaccctccaaagtgtctaaattgtgtggattttgcgggggtggggggaggcgggggaaggagtcgactccccatgtactgggtgtccccgatggcggcaagccacaccttcacacaagggggcaaggttcttgactaaatatcctaaaggtctgaaagatggtccccttccccccaacacaattccaccaaaactggccagccgctggctaatgagcaaccacggatcctcacccaaacattggcttttcttccaatagtgcagattgggaatgcagggacgtcgtcctatttatgaacactgagtcacgtcgccgctcaatgtctgtttcctcctccctaggaatgaggtgaccccctcctccagcgagtaaatgcggggcgatggcgagagcgcagggggcggcggcgctgccccaccttggggagcgaattcacccccctagtcgcaccagcctgggcgcacacgggggccggggcgagcctgtgggactctgcagtgagctccgcgcgccccgggggtgctaggggaccgggaccctcggggcgccgtccccacgccccagccctgacgggtccgcggccgagcagcccgggggacgtcgctgcctccccgccccgcgcgcggccgggactgggcgctgcgacccgcgccgcctcctcgggcaacaagtgtccgccctccgccccgacggcccgcccggcgcggtcctcacccggcacaggccgtccacgaacacgcgcgggtccaggtgacaggcgatggtggcgctgggcaggtcctgcaggtccacctcctccatctcgcagtcaatgaagctccagtcgccgccgccctcgtccgcctcggccgcccccgagaggggcgcgaagggccgcagcgtcaccccgggccgcgctcgcgcctcggccgcctccgccgcctccgccgcggccccgagctggggaccggccacgccgtcctccatccccgcgcccgcgcgaccctgtgcgccccagcgggctgctccgggcttgcgcgccggagcctcacgcgctccggtccgcgcccggccggcggctccgccgttaaccccctcggaatcgcgcggcggcaggcggcgggctgtcagcagtctcccagcgacacggcctcccagcgccagccccgcccgtcaccgttccgcgcgggaggggcagaagcccggcgcggcgaccgcccccccagcccctagggccggccaccggcagatccaacggtggcccctttaaggccggcgccggttgggttattgtaccccgcccttccaggagacggggccaataaaggaacggaattctcttcacgtgaccttccttctgccgcccgaagcccgaagcctcagggcggccatgttggttaggggcaaagtcctcgtccccagttccgcttttctgacagctggtgccagctgaaggacgccgggcagagtcctcggctcttgggcccttggggtgataactggggaggcaacgtttttgtggttcccatgcggggacgttttgaagcacaggggcccacttttgggaatttaagcgagacatagtctccctgtggctctgtggcccctggcaagtggttagatgcttaccgtatattatcagatatagtcgcaataaagactgaactagaccatgataacaatgccttacttttctatttcagcgtattagtcactataccattgtgaaaatttatgtaattagaagtaatttttctgaattaccattatatgctatgtacaataggacataacgaaagaattaagagatcacccctttc

SEQ ID NO: 1562494 - DNA, 4001 bp, Homo sapiens
gtataagctgctttacaaaagggagggagggaggagggagaagcatgcatagcaatgaacccaactcacctgagcaaaatataacttcatttcctttcccagaaactcagtcttatgcagctggagcctggcatctgctgcggagaaggggttgctgaagtttattctgactcgtttgaagctcttaaaatactgaaaggtgatgtccttgtcatacgtcctaaagagggactcaaatttggcctgaaaaataacaataaaaataaaaggagttgaaatttacctgcatatgacccttgactagatgatgtcattacttttttttttttcttcgagacagagtcttgctctgtcacccaggctggagtgcagtggtgcagttttggctcactgcaacctccacctcccaggttcaagtgattctcctgcctcagcctcccgagtagctggggttacaggtgcctgccagcacacctggctaatttttgtatttttagtagagacggggctttgccatgttggcaaggctggtctcaagctcctgtcctcaggtgatccctcggcctcccaaagtgctgggattacaggcatgagccaccgtgcctggcctcctcaatacattttttactgaggaagtggatcatcaatcctttcaagaactcctaacttctttcttagagaaaagcctttcccctcttaggggactatggcctttagtcccaatgcaggtgattttacaagaaggtaagaaggtatgatttattacattcatcgaatcagcagaacagttgccaatacatagacactacttacggtaacaaacttttttaaaaagtagaatgagcattttccagggaggtacagtttggtaatttgctccccatgtttctctgtcctatggccttcccccactcacccccccttttttctctgtcctatagccttccccggctagccaactccaaccccaccgttcagctcagggcagtgttgcatatatcaaagatttctttaaggcttaaaagaactgcagctaatttgaaaaaaagaaatactgacttgaaaaataacaaagttggtagaaagttttgcatttcttaaaataagtagtttttaaaaatttccacgatcgcttttatctcagtctgttactttttaactctctaaaatgatactggtttaaaaattaatgttctgcaaatggaccattttctgcatcctggctttcgtgtctgtgcacacctcgctctggtgccatagggctagtgagaattaggagatgtcctgagctcttagaatgcaaagctcgaggtgggggattacaagcttaggttgctcaggggacagccccctaggctgggtcctggagtgtggctgtcggtgggggcagctgggggccactgcaactcctcagagagggagtttaactggtggacagtcaaagctccaaggaagactgcatgggcttctagtcgccgggttttgtgaatctttttaccaggcaaaaacacttaggacagtttgtgggagcccgtgtgaaaggcagaaggggctggccaggaagaaggggatggcgcagggtgtggatggtaggcagcgcggacagagctcactgaggaccttggagaacctatggaaggcgcagtgtctctgcagtgggagcgaggattcaggataagagaggagagtgtcttcaggaatgttcactgctagcaagcgcggggaggcactggtggatgcctgctccacatggggctgcgggtaggagcagggtagtcggtccctgccaggcaggtcgttaaggagcagtcggaacaacctacgaccttgctctccttgcattccccggcttttcttcagtttagggacatttctgagactttcccacgagggatcccgcagaggcacgtgcgaaggaacgcggagctggcggacggtagagttcatctggccgcctctcactctttttccccacctctcttgagcacgggcaagtttctggcaaaagtgtgtcttcgtacatttggaattttgtatgacctcatcaataggcactgtgacccactgtttagttttgaagttatgattcagaatttgggagagatgactttgaagaatatttttagaatacaggttcagggcttaggaccagaacaaaagagaattcacattatctttaaaatctagattactatgatgcctttctcttataaaagaatcttatttgttctaataactgatacctagttattatagcttttggatggcatctctacttcatttaaaaaatagtgattttactcacataaggctcatgttaagtgaactcactttgtagtactttaaaaacatagaatgtgctctgcaatctagtccaaacactatggtgcgagcccataagcattatatacaattatggagttacatttgattttttttaaaaaaagaaaccttcgcatgtcccaatatggctttggatataaagcatataacaccaccaggcacaaataccacccctcaaatagagcatacaggattcattcctatacagtattattaaagctcaattagccggatagctgctgatgaaaaaacttacattttaatcaaatgaagaagaaaagtgtagtgattaaaatgattatattaatcaccatcaaagagagctgctgcccaggaggcacactgatctcacacttaatttctccagttttattatttgctctggcggcattttctcttgttagagaaatctgggagcttgaggccaggccctcataattactacaaacatacaaatatctttataacatttatttcctaagacgaaatgaaattattcacaacgctggctacaaaagtaaaacactattcactgtcagaagaggcctctttctgaaaagttcacttacaacatacacagaatgaaaaacacacgatgccccaactctcgccttcctagtgagttggttcaggggcctggatgttgtcaaatattgagatctttagaaattccttcctcagttaattcctcaggcaacagcttttgattttcaaggctcgaaagactttggatttctttcaaaacccccaaacccacaagagagccacattctcccaagtattcagttaatagtcccagttagcataatgctttgaaaactaaagaaaatcacgttatattagaagccttaccctggtttcactttcgctgaagatatcactgtttgccacacaggcaatcagggagctaaaactgtagttaaagtttctaaaatgcatcttgctttcttacagtgaaagcgctacagacccacgcagtcaagcccctagtgagattcctttccaagaggctgtaggttccttcttgagctggtgcttataaagcagtaagggccagcccccactccctggggaaaaaaaaagtgcagcttccacagcatcctgtttggacagcaaattcctgagtcaagtcctgcatgcttgcaggcagacagggacaaagtgtaagtttctactggaaagaggtgacgtcaacaccttagtcattttccctatgctaattaactttgcttggggagaatggaaaaaacagctgaggtttgcttcacagctgctttatcaacctctcttgcagcatagtttccactggtagtaattccattcagctactcagacaacacgctcctcggccgaatgggacgacccttcttaagatggaaaatgttacaaaagaaaaaggatgaaggtctgtggcaataaacagcaattagactgtagggaaatttcaaggctttgggaaacctggaaaccaaagtccgggtgacatacttgatccctggaatttcctgaaaacctcaatcaaagtttcactttggggtattagagaaaacattttgaaatctgtcttggtcaataaaaattttaaaggacaaaaagaggaatcattttgaagtgtagttaaaatttttttccccagtgacattttattggatgaatgt

SEQ ID NO: 1562495 - DNA, 4001 bp, Homo sapiens
ggtgtcagatgagcttcctcccactgggggaggcctttggacagggtcctctcccatcccagcaaggtatgtgtgtatgtgtgtgtgtggtgggggcgggttgggggggtgctcagagcctgagggggacttgctttactgaggagctggctgcattctagaagctcctctcttcttccctgacaatctgtcagcccctaaggacatcaaatggaactctgggagctgccttgaaggtgggtcacctgtcctaagttccccagaggagggtcaaaatggtagtgggcaggagaaaaggcaagcccaaccccagctacccctctccctgccgtgggtgccctggggctgggaaccctgccaaccagagggtttcttagcatctgcgcccagtctggttatcccctattttcctttcaagccagacctggcagtcctgggctgatttgcaggcatcttctgcagactcctgtttctctgctgagtacccccagcaccacatgagcagggaaccactctggtctgctcagtctagagtgggtcatgagctccaacccttgagcaaattcatggaaacctgctgcgcaaaccttagggtgtttgcatagccacgcctaccccgctgcaccctgcaagctccccagtgaacagggaaggctttctttcccccatcattatcaacccaggaaggtcaggggcaatgtctgaggttgctttcaaatgcaccttgatatcttcttaaaacaagtgagacgctgaacattcagagtaggaattttgtctttctcaaggtgaagtctcagagtttccggtcagcatataacataagcaacgtataagctgctttacaaaagggagggagggaggagggagaagcatgcatagcaatgaacccaactcacctgagcaaaatataacttcatttcctttcccagaaactcagtcttatgcagctggagcctggcatctgctgcggagaaggggttgctgaagtttattctgactcgtttgaagctcttaaaatactgaaaggtgatgtccttgtcatacgtcctaaagagggactcaaatttggcctgaaaaataacaataaaaataaaaggagttgaaatttacctgcatatgacccttgactagatgatgtcattacttttttttttttcttcgagacagagtcttgctctgtcacccaggctggagtgcagtggtgcagttttggctcactgcaacctccacctcccaggttcaagtgattctcctgcctcagcctcccgagtagctggggttacaggtgcctgccagcacacctggctaatttttgtatttttagtagagacggggctttgccatgttggcaaggctggtctcaagctcctgtcctcaggtgatccctcggcctcccaaagtgctgggattacaggcatgagccaccgtgcctggcctcctcaatacattttttactgaggaagtggatcatcaatcctttcaagaactcctaacttctttcttagagaaaagcctttcccctcttaggggactatggcctttagtcccaatgcaggtgattttacaagaaggtaagaaggtatgatttattacattcatcgaatcagcagaacagttgccaatacatagacactacttacggtaacaaacttttttaaaaagtagaatgagcattttccagggaggtacagtttggtaatttgctccccatgtttctctgtcctatggccttcccccactcacccccccttttttctctgtcctatagccttccccggctagccaactccaaccccaccgttcagctcagggcagtgttgcatatatcaaagatttctttaaggcttaaaagaactgcagctaatttgaaaaaaagaaatactgacttgaaaaataacaaagttggtagaaagttttgcatttcttaaaataagtagtttttaaaaatttccacgatcgcttttatctcagtctgttactttttaactctctaaaatgatactggtttaaaaattaatgttctgcaaatggaccattttctgcatcctggctttcgtgtctgtgcacacctcgctctggtgccatagggctagtgagaattaggagatgtcctgagctcttagaatgcaaagctcgaggtgggggattacaagcttaggttgctcaggggacagccccctaggctgggtcctggagtgtggctgtcggtgggggcagctgggggccactgcaactcctcagagagggagtttaactggtggacagtcaaagctccaaggaagactgcatgggcttctagtcgccgggttttgtgaatctttttaccaggcaaaaacacttaggacagtttgtgggagcccgtgtgaaaggcagaaggggctggccaggaagaaggggatggcgcagggtgtggatggtaggcagcgcggacagagctcactgaggaccttggagaacctatggaaggcgcagtgtctctgcagtgggagcgaggattcaggataagagaggagagtgtcttcaggaatgttcactgctagcaagcgcggggaggcactggtggatgcctgctccacatggggctgcgggtaggagcagggtagtcggtccctgccaggcaggtcgttaaggagcagtcggaacaacctacgaccttgctctccttgcattccccggcttttcttcagtttagggacatttctgagactttcccacgagggatcccgcagaggcacgtgcgaaggaacgcggagctggcggacggtagagttcatctggccgcctctcactctttttccccacctctcttgagcacgggcaagtttctggcaaaagtgtgtcttcgtacatttggaattttgtatgacctcatcaataggcactgtgacccactgtttagttttgaagttatgattcagaatttgggagagatgactttgaagaatatttttagaatacaggttcagggcttaggaccagaacaaaagagaattcacattatctttaaaatctagattactatgatgcctttctcttataaaagaatcttatttgttctaataactgatacctagttattatagcttttggatggcatctctacttcatttaaaaaatagtgattttactcacataaggctcatgttaagtgaactcactttgtagtactttaaaaacatagaatgtgctctgcaatctagtccaaacactatggtgcgagcccataagcattatatacaattatggagttacatttgattttttttaaaaaaagaaaccttcgcatgtcccaatatggctttggatataaagcatataacaccaccaggcacaaataccacccctcaaatagagcatacaggattcattcctatacagtattattaaagctcaattagccggatagctgctgatgaaaaaacttacattttaatcaaatgaagaagaaaagtgtagtgattaaaatgattatattaatcaccatcaaagagagctgctgcccaggaggcacactgatctcacacttaatttctccagttttattatttgctctggcggcattttctcttgttagagaaatctgggagcttgaggccaggccctcataattactacaaacatacaaatatctttataacatttatttcctaagacgaaatgaaattattcacaacgctggctacaaaagtaaaacactattcactgtcagaagaggcctctttctgaaaagttcacttacaacatacacagaatgaaaaacacacgatgccccaactctcgccttcctagtgagttggttcaggggcctggatgttgtcaaatattgagatctttagaaattccttcctcagttaattcctcaggcaacagcttttgattttcaaggctcgaaagactttggatttctttcaaaacccccaaacccacaagagagccacattctcccaagtattcagttaatagtcccagttagcataatgctttgaaaactaaagaaa

SEQ ID NO: 1562496 - DNA, 4001 bp, Homo sapiens
acattgtctctgctcaaaatatcaccatatcagtaagaccttccctgatcatcttatggaaaatagcaatctcccctccactcccagatctccactccctcctcctgccctccaagtcttattttttcctatagcatcattactttctgatacatttgatatttctttattgcttgtttcccttccaaaaaatgtcaaccctggaggcagaaatgctattttatttactgatgcagcctcagagcctaggacagtacctatcccgtagcgaagtctcaataaatatttgttaaaatgaatagctagcgaagtgggcaaactttcatacaacacaatttcaggattgtatccaacactggaaaaaattgtctccaacactacaagtaagtgccgtcttacgtgacttgaccttgttctagcagaaagacagcctagaactcctaaggaaaaggtctgaaatgctggctagcgcttagtttatatggagaggaaaaggttttagagtaagatcaatcagtaagaccctgagttcctgacaattgctgctctagaaagcatgcctggaagcttacctaagcacacggccattgtaattcctttcagaaagtaagtgaacatataaattataaataaatgacacttacatacaccattctgtttcacagtggtgttgtattggcagcagccttcaactatagttcattgacagcatttgtggacccacagccaagcgctgaaagcactgctttttttgacagctgctctcctaatggggcatctctcaaagaccggtttcattctgtgacgcccacgttgtccacattttattctgcacaataactgcagatttgaaataaattcttcctccccaccaccattattgattactcatacctgcccctcaccctccaaagtgtctaaattgtgtggattttgcgggggtggggggaggcgggggaaggagtcgactccccatgtactgggtgtccccgatggcggcaagccacaccttcacacaagggggcaaggttcttgactaaatatcctaaaggtctgaaagatggtccccttccccccaacacaattccaccaaaactggccagccgctggctaatgagcaaccacggatcctcacccaaacattggcttttcttccaatagtgcagattgggaatgcagggacgtcgtcctatttatgaacactgagtcacgtcgccgctcaatgtctgtttcctcctccctaggaatgaggtgaccccctcctccagcgagtaaatgcggggcgatggcgagagcgcagggggcggcggcgctgccccaccttggggagcgaattcacccccctagtcgcaccagcctgggcgcacacgggggccggggcgagcctgtgggactctgcagtgagctccgcgcgccccgggggtgctaggggaccgggaccctcggggcgccgtccccacgccccagccctgacgggtccgcggccgagcagcccgggggacgtcgctgcctccccgccccgcgcgcggccgggactgggcgctgcgacccgcgccgcctcctcgggcaacaagtgtccgccctccgccccgacggcccgcccggcgcggtcctcacccggcacaggccgtccacgaacacgcgcgggtccaggtgacaggcgatggtggcgctgggcaggtcctgcaggtccacctcctccatctcgcagtcaatgaagctccagtcgccgccgccctcgtccgcctcggccgcccccgagaggggcgcgaagggccgcagcgtcaccccgggccgcgctcgcgcctcggccgcctccgccgcctccgccgcggccccgagctggggaccggccacgccgtcctccatccccgcgcccgcgcgaccctgtgcgccccagcgggctgctccgggcttgcgcgccggagcctcacgcgctccggtccgcgcccggccggcggctccgccgttaaccccctcggaatcgcgcggcggcaggcggcgggctgtcagcagtctcccagcgacacggcctcccagcgccagccccgcccgtcaccgttccgcgcgggaggggcagaagcccggcgcggcgaccgcccccccagcccctagggccggccaccggcagatccaacggtggcccctttaaggccggcgccggttgggttattgtaccccgcccttccaggagacggggccaataaaggaacggaattctcttcacgtgaccttccttctgccgcccgaagcccgaagcctcagggcggccatgttggttaggggcaaagtcctcgtccccagttccgcttttctgacagctggtgccagctgaaggacgccgggcagagtcctcggctcttgggcccttggggtgataactggggaggcaacgtttttgtggttcccatgcggggacgttttgaagcacaggggcccacttttgggaatttaagcgagacatagtctccctgtggctctgtggcccctggcaagtggttagatgcttaccgtatattatcagatatagtcgcaataaagactgaactagaccatgataacaatgccttacttttctatttcagcgtattagtcactataccattgtgaaaatttatgtaattagaagtaatttttctgaattaccattatatgctatgtacaataggacataacgaaagaattaagagatcacccctttcctttggggaatagcggaaaaataagaggacctcaagtgagcagacatgtctcttcctgaaaaatagaattcttttttggacagtatgatacagtgagaacttgggtctgaatttcagctttgctttttaactacttgtacaaataagctgaatcttagtttcctcatctgaaaaaaatgaagacatattactaagaattcagtcagtgcttaataaatggtagctgtttatgcactgggttctttggaggttgtgaaattacagttatattttttcttagagtaggcttactctctagttaggaagtgttagtaattataacaaaaagtatatccaacagctgagatttattcagaacttgccatgtgcacggttctatgattactattatcatagtcttaggacagtttgtgtcctcagggagctaaacccaagaggaataataatacccatctagagataactcataaaatagaatatgatatgaggatgtgaagaaattggaaccgtcatactgtgaaagggaaatcttgggcccccaaaatcactaaggaaaactaaagctggaagttgcttagagccaaccagcctcccattccattcaaagtcacccctctgctcactgagacagatgcatttcaccgagacagatttgcctcctttataaagactaatcagaaacccaaagagtgtaaccgtttgtctatcacctatctgtgacctggaagctccctcctgcctcctgcctttgcagtagtcttcctgcctttgcttcaagttgtcctgcctctccagaccaaaccaatgtactgcttacatacattcattgatgtctcatgtctccctaacatgtataaaaccaagctgtgccttgatcaccttgggtacatgtcctcaggacttcctgaggcctgtcatgggcatgccctcaaccttggcaaaataaactttctaaattaattgagacctgtctcaaattttcagggttcacaatatattgctgatgggcatgtaaaatggcgcagccactttggaaaacaatttggcaagtcctcaaaaagttctatgtagagtgaccatatgacccagcaattcctctcctaggtatatacttaaaagaaatgaaaacggccgggagccatggctcacgcctgtaatcccaacaatttggaaggccaaggcgggcagatcacctgaggttgggagttccagaccagcctgaccaacatggagaaaccccgtctctactaaaaatacaaaattagctgggcgtggtggcacatgcttgtaatccccgct

SEQ ID NO: 1562497 - DNA, 4001 bp, Homo sapiens
gtccaggctgtgcagaggcctccctgggccactccatctaaagtggctccctactaactcctctgtgtaagtcccctttatccacactgtccccagagccattatctacccttctgtgggccctgaaaggatgacccaacctatggactccactgcaggggctcccttgcctcctagctgtcctttgagttctgccaatgaaatcagaagcctgagaatttcttccctgcctgtaccctgccttagcatctcaactccacaccttcaagtctacagctcctggcaggcagctcctcccctaggtttccagccacgtgacttcctcccccagctccagcttccagctgttgctcatggctgcaggcctggacatcccttgttagttccctcaggactgccccaattcaccagctcttcaacaaaacccccacagtgttaggacctgaccactctgaccaagccccctccccttgctctctatccctgtttcagtctcttcatcgcatttatcactatccgaaatgatcttgttcacttgcctttttcctattgtctatctccccctcaaccactggatcctaagctccatgaaagcaaggagcttgaaatgttccctgctttatcctctgggcctaaaccagtggctggaacacagtaagcactcaatagacagcaaagcctgaatgaaccaatgctacattgtctctgctcaaaatatcaccatatcagtaagaccttccctgatcatcttatggaaaatagcaatctcccctccactcccagatctccactccctcctcctgccctccaagtcttattttttcctatagcatcattactttctgatacatttgatatttctttattgcttgtttcccttccaaaaaatgtcaaccctggaggcagaaatgctattttatttactgatgcagcctcagagcctaggacagtacctatcccgtagcgaagtctcaataaatatttgttaaaatgaatagctagcgaagtgggcaaactttcatacaacacaatttcaggattgtatccaacactggaaaaaattgtctccaacactacaagtaagtgccgtcttacgtgacttgaccttgttctagcagaaagacagcctagaactcctaaggaaaaggtctgaaatgctggctagcgcttagtttatatggagaggaaaaggttttagagtaagatcaatcagtaagaccctgagttcctgacaattgctgctctagaaagcatgcctggaagcttacctaagcacacggccattgtaattcctttcagaaagtaagtgaacatataaattataaataaatgacacttacatacaccattctgtttcacagtggtgttgtattggcagcagccttcaactatagttcattgacagcatttgtggacccacagccaagcgctgaaagcactgctttttttgacagctgctctcctaatggggcatctctcaaagaccggtttcattctgtgacgcccacgttgtccacattttattctgcacaataactgcagatttgaaataaattcttcctccccaccaccattattgattactcatacctgcccctcaccctccaaagtgtctaaattgtgtggattttgcgggggtggggggaggcgggggaaggagtcgactccccatgtactgggtgtccccgatggcggcaagccacaccttcacacaagggggcaaggttcttgactaaatatcctaaaggtctgaaagatggtccccttccccccaacacaattccaccaaaactggccagccgctggctaatgagcaaccacggatcctcacccaaacattggcttttcttccaatagtgcagattgggaatgcagggacgtcgtcctatttatgaacactgagtcacgtcgccgctcaatgtctgtttcctcctccctaggaatgaggtgaccccctcctccagcgagtaaatgcggggcgatggcgagagcgcagggggcggcggcgctgccccaccttggggagcgaattcacccccctagtcgcaccagcctgggcgcacacgggggccggggcgagcctgtgggactctgcagtgagctccgcgcgccccgggggtgctaggggaccgggaccctcggggcgccgtccccacgccccagccctgacgggtccgcggccgagcagcccgggggacgtcgctgcctccccgccccgcgcgcggccgggactgggcgctgcgacccgcgccgcctcctcgggcaacaagtgtccgccctccgccccgacggcccgcccggcgcggtcctcacccggcacaggccgtccacgaacacgcgcgggtccaggtgacaggcgatggtggcgctgggcaggtcctgcaggtccacctcctccatctcgcagtcaatgaagctccagtcgccgccgccctcgtccgcctcggccgcccccgagaggggcgcgaagggccgcagcgtcaccccgggccgcgctcgcgcctcggccgcctccgccgcctccgccgcggccccgagctggggaccggccacgccgtcctccatccccgcgcccgcgcgaccctgtgcgccccagcgggctgctccgggcttgcgcgccggagcctcacgcgctccggtccgcgcccggccggcggctccgccgttaaccccctcggaatcgcgcggcggcaggcggcgggctgtcagcagtctcccagcgacacggcctcccagcgccagccccgcccgtcaccgttccgcgcgggaggggcagaagcccggcgcggcgaccgcccccccagcccctagggccggccaccggcagatccaacggtggcccctttaaggccggcgccggttgggttattgtaccccgcccttccaggagacggggccaataaaggaacggaattctcttcacgtgaccttccttctgccgcccgaagcccgaagcctcagggcggccatgttggttaggggcaaagtcctcgtccccagttccgcttttctgacagctggtgccagctgaaggacgccgggcagagtcctcggctcttgggcccttggggtgataactggggaggcaacgtttttgtggttcccatgcggggacgttttgaagcacaggggcccacttttgggaatttaagcgagacatagtctccctgtggctctgtggcccctggcaagtggttagatgcttaccgtatattatcagatatagtcgcaataaagactgaactagaccatgataacaatgccttacttttctatttcagcgtattagtcactataccattgtgaaaatttatgtaattagaagtaatttttctgaattaccattatatgctatgtacaataggacataacgaaagaattaagagatcacccctttcctttggggaatagcggaaaaataagaggacctcaagtgagcagacatgtctcttcctgaaaaatagaattcttttttggacagtatgatacagtgagaacttgggtctgaatttcagctttgctttttaactacttgtacaaataagctgaatcttagtttcctcatctgaaaaaaatgaagacatattactaagaattcagtcagtgcttaataaatggtagctgtttatgcactgggttctttggaggttgtgaaattacagttatattttttcttagagtaggcttactctctagttaggaagtgttagtaattataacaaaaagtatatccaacagctgagatttattcagaacttgccatgtgcacggttctatgattactattatcatagtcttaggacagtttgtgtcctcagggagctaaacccaagaggaataataatacccatctagagataactcataaaatagaatatgatatgaggatgtgaagaaattggaaccgtcatactgtgaaagggaaatcttgggcccccaaaatcactaaggaaaactaaagctggaagttgcttagagccaaccagcctcccattccattc

SEQ ID NO: 1562498 - DNA, 4001 bp, Homo sapiens
cagaaggggctggccaggaagaaggggatggcgcagggtgtggatggtaggcagcgcggacagagctcactgaggaccttggagaacctatggaaggcgcagtgtctctgcagtgggagcgaggattcaggataagagaggagagtgtcttcaggaatgttcactgctagcaagcgcggggaggcactggtggatgcctgctccacatggggctgcgggtaggagcagggtagtcggtccctgccaggcaggtcgttaaggagcagtcggaacaacctacgaccttgctctccttgcattccccggcttttcttcagtttagggacatttctgagactttcccacgagggatcccgcagaggcacgtgcgaaggaacgcggagctggcggacggtagagttcatctggccgcctctcactctttttccccacctctcttgagcacgggcaagtttctggcaaaagtgtgtcttcgtacatttggaattttgtatgacctcatcaataggcactgtgacccactgtttagttttgaagttatgattcagaatttgggagagatgactttgaagaatatttttagaatacaggttcagggcttaggaccagaacaaaagagaattcacattatctttaaaatctagattactatgatgcctttctcttataaaagaatcttatttgttctaataactgatacctagttattatagcttttggatggcatctctacttcatttaaaaaatagtgattttactcacataaggctcatgttaagtgaactcactttgtagtactttaaaaacatagaatgtgctctgcaatctagtccaaacactatggtgcgagcccataagcattatatacaattatggagttacatttgattttttttaaaaaaagaaaccttcgcatgtcccaatatggctttggatataaagcatataacaccaccaggcacaaataccacccctcaaatagagcatacaggattcattcctatacagtattattaaagctcaattagccggatagctgctgatgaaaaaacttacattttaatcaaatgaagaagaaaagtgtagtgattaaaatgattatattaatcaccatcaaagagagctgctgcccaggaggcacactgatctcacacttaatttctccagttttattatttgctctggcggcattttctcttgttagagaaatctgggagcttgaggccaggccctcataattactacaaacatacaaatatctttataacatttatttcctaagacgaaatgaaattattcacaacgctggctacaaaagtaaaacactattcactgtcagaagaggcctctttctgaaaagttcacttacaacatacacagaatgaaaaacacacgatgccccaactctcgccttcctagtgagttggttcaggggcctggatgttgtcaaatattgagatctttagaaattccttcctcagttaattcctcaggcaacagcttttgattttcaaggctcgaaagactttggatttctttcaaaacccccaaacccacaagagagccacattctcccaagtattcagttaatagtcccagttagcataatgctttgaaaactaaagaaaatcacgttatattagaagccttaccctggtttcactttcgctgaagatatcactgtttgccacacaggcaatcagggagctaaaactgtagttaaagtttctaaaatgcatcttgctttcttacagtgaaagcgctacagacccacgcagtcaagcccctagtgagattcctttccaagaggctgtaggttccttcttgagctggtgcttataaagcagtaagggccagcccccactccctggggaaaaaaaaagtgcagcttccacagcatcctgtttggacagcaaattcctgagtcaagtcctgcatgcttgcaggcagacagggacaaagtgtaagtttctactggaaagaggtgacgtcaacaccttagtcattttccctatgctaattaactttgcttggggagaatggaaaaaacagctgaggtttgcttcacagctgctttatcaacctctcttgcagcatagtttccactggtagtaattccattcagctactcagacaacacgctcctcggccgaatgggacgacccttcttaagatggaaaatgttacaaaagaaaaaggatgaaggtctgtggcaataaacagcaattagactgtagggaaatttcaaggctttgggaaacctggaaaccaaagtccgggtgacatacttgatccctggaatttcctgaaaacctcaatcaaagtttcactttggggtattagagaaaacattttgaaatctgtcttggtcaataaaaattttaaaggacaaaaagaggaatcattttgaagtgtagttaaaatttttttccccagtgacattttattggatgaatgtcccaatttctacttgtatcccacagtggaatggagcaaacagaacctaaaacaatcctaggattttcatttgaaaacttcattattataatttgagaactggggatatgaaacacttcgatcattttcaaagcactactgaattcaggcaaaggatacaaaaacactagcctttgaaactgagcaatctagcctttgaaactgagcaaagaagcattaacccatttatgccagaggttgcaattttttgaatttttgccatcagaccttggcaatgaccttgagcaataggatataaataactcccacatgcttagcgttccaataatggaacactaggcataaatgggttaagaggtcctgcttaaagactcataaactaaatgtaaaaaaaaaaaaaaaaaggaaaggaagaagaaatggaaagaatgtacactataattgaaagggaagatgcagggaagatgcctggtttggagaagtgctctgcgatgcaagactgactctagttctttcaaaaggttgcaactcttgaaccttctaagtattttaccagtttagatccctatggcagcctgggtcctatgttcttctcactctctccaattttattatcacctaaaagcactcaagttatttaagcattctctgatttaggggcacacagggacagctctcaagcttccagaagttaaatggaatcctgccattcacatttaaaaattaacttcaaagaatcattaaagtcagccaataatttaaaatacatgcaagaggaagaaacaaagcagggcatttagccttccaaaaaaggaaaagcaaagtccttttggatgagtgagtgttgcttaatttcaacgcactgtgccttgctgccaactgtagagttatgtaagaaaccagttatggtgtttgctttgccaaattatccataactcccaacctgaaaagacataaacgcatgtattccaaaaaagtgtagaatactgaacaatgcaacatgcatcaaacaccaaggggaagtggtcatcctggatgatgcttcgagagggaatgtgtatgcttgcagtcctgcattttcagtacagggagcctttgtctgtccagcaggcacatgaagattgtggtggtgggcaggagaggctaaggggaaacagaggtgaggggagcagacacagtcctgcattccactcctccagaggggcttggaacttctctgatgttccctccccctctccaactctttgtctcccccttttctcttctcctggcatgcacctgggcaaattccattaaaaggtgatcagaagagacagaagaggctaatttagacacaagaggctgatttcactgtcttcttttctcttttaaaatcatgacacaaagttccagctcaattttgtgggcaaatctcaaacatctctgttcatctgagacaacagtgtgggctcacccgaatatacaattttgatttcgttatatggatggaaaaaaaaaaaaagaacggtgaggtatttgaagattattcaactgtctttgctcat

SEQ ID NO: 1562499 - DNA, 4001 bp, Homo sapiens
acagaagatcctaaggatgtgagctggtgagtcagtccaggtaggtgcttgtttactttgctcttccaatataagaaagtggtgtgaaaattttcactgatgattaaagctcacacacatccccaagagataaaacgaatgcccctatggagagggttccctttcagaacctaaccactggctggtattcaaagtggtttggatttcatcaaaataaccacagcacccctcctggcctgagaagttcccagaatctgaggcaggggagaaaaagtgcacagcctgggccagcatctcacctttgaactagtggtgatttgatgacactcgtcaccactctactggtgtttccaagaaacactggatttgagggttacggcaaaaagccaccactatctctgctgtgtagtctcctagccaaggacgaaaatgcaaagggagaggacaggcctctcatccacagaggcgtcacagtcacggtatggggctgcagcacgcactgccaccccagacacaggcatcacaacgattctgcagaaaagctggggcttagcggccccatcactcaatcagccgagcattcgaaaccaggtctgccaggcagcaaaggctaaatggtattttaaaaaggtgtcgcttctgagtgtatgtgttcaaggaatctctaggtaaaatacaagcatagcttccatgtagaaggtaagcttcattaaaggataaataattaaaacgtgctaaattgagccttacatatgaaccatcaaaatcaactgtaaacagtgaaatctacaacaacaaagaggtactgttcaagaacattctccctacctctcaaattatgcacagacgacaaccgacccaccgaatttaacacgggcggctctgcgtccttcccattcgtctttgttaccttgaacactcctgctaggtaggtacaggcaggttccattctgacttttggactgggaaactggggtgcaggagggccccatggcacggccacagaacttgaatgcaaggcccttccctagcgggtcggtctcgaaattaagtcagctaaaacgagagtgtgcggcgaggaagcgctgggcggacggatcaacaccccgggccccgtgccggaccccactgccaggcccgagccccggagctccaccgcgcaagcgccgggcgcccgggaagcctcgcccgagccaagccgaagcttccgaccgaaataattacagtcttacaccaatttgtgttccaacgtaaattactaagtaagtcgaacggaggctaactccactcacaaagcccagaggcccacatggcaatttttctaagccctgcgcagaccgcagcgccccggtgggtcccgggcgggccggacgcgcctcccaagggcgcgggtccgaggcgcaaggcgagctggagaccccgaaaaccagggccactcggggagtgtcaggaagcacgactgggcgccttaggacgtccgggcagacgcggcccccgaggagccccagaggagccccagaggagccgcctgacccggccccgacgtgcgcgatcgagcccgggctcgccaaagcccccgcgcccctccggcccggacaggccgagtggacattgtcggagccccgcggcctcgccggcaattggtttcccccccgaagctgctccgggggtgagttcgggagagagaggcaggaccccgggaccagagcaccccgaccccgaccccagcccgggccccagccgccccagcgccccgcccgggccgctcacctgtcgtcgacgtgcaggctgggcgagcacttgatggccagccaggtcttccagtggacatggcgcaccttgtacacctgcccgaagccgcccgagcccaccttctcccagcccgtgaactcgcccgcgtcgaaggtgcgcagcagcgccagggcccatggggtcccgccgtcgccctccatcgcgcacgtctagccagcgccgcggcggctgcccaggtgcccaggtgcgcgctccgccctgttacgtcacttccgtaggtcgtcccgcccccaggccccgcccacttacccgccccccgggcgccctctctgccagcgcccggtgactgcggacggatgaatagacgctgcgggtcactgcgctctcccctgggtgagcagagcttctcacgcttctcacgggtctcgacgtgcgcatcagctgccctgcttttctttgctttttttttttccttaattgcggagtcacatgcagttgtaagaaatcattcactttgcctagtttcccccagtgttaccactttgcaaaactttgccaaaaaaaaaagtccaatctcacaaccaggatattgactttgatacagtcaccgatcttattcagttttgccgttttactcgtcttcctttgcatgtattagttttacacaatgtaatcatctgtgtaccttcccgtatccacccccacctggccactcctgtggcgattttacagccgcaccccggagccctggcatcactaatctttcctctatttctaaaattgttttatttcagaaatgttatgtttagatacaggaatcatacagcgcctaattttttgaaattggctttcttcactcgttagtctaattccctgcaggttcacgtcttgcttttttacacgagtttcctctcagaaagtaactttttttaaaaaattacccaacagcaaatctaaagtccatttcaaatgcaagagttccctcatcctttcctaaataacagcctctttttacaggtagaacagatggtttgaaaaggaaagatttttttttcacatatggggaaaaaaaattcccagccttggaaggatatttgggttagaggccgaagtgcatcacagatcacgcacgcgtccacacctcagaaaacactcactcattcctgagacgcaacggtgagtgaaggcttatttttggccacaggagattaataatgaagacaggagggcggagctaaaggagagggtattttaacgacattaactgtgtttttgtgttagtaactcggaaagagagaggctgccccaagtcagcgcattgaaagccgcagacctagtgtctccaggctcccccttccaaacgggcgcggaccttctttcatagcctgtagcggggagccgcgtctccccactgcctccccactcccatccggccgctctttggagggaactcacacatcccaacatgacgatgcttgctcggggggcctcctggggggaccagggagccacttcctttcccacatactccggaaattaaagttggtctccttaaggctggagtggcaaatagttgttttaagcttgtcacaaatgtaacttacatttggactaatgttttaaaaaataattggagttttgaatctacgaagataccttggaagtaaacatagttattattttggtgggaaaaaaatgaatggacttgaaagtgagtcacctgtcctgttcccggggctcagctctagcaaagtacctttctccatctacagtctccggcacacagctccgcagctgggggtgactaagagcccacaccacgcaagtaataaaacgctccaatttcatttatttaatcatctgtgtgcttcatttgacaaatatttatggagtgtctgctgctagctcagtgcctggtgcctgggactgaagaccagagccccctggagaccaaaagagccagctcccagctgtgagcagatcgggtccaaagatcacgggctcggcggcaggaacctggtttggtatccggctcctctgcggactttgaagtgctttaccgattcacatgacaactggtaaaacgaaaacaaacacctttccaggaattgtgaattcgagttccagaccctctgggattccgggagcgcagctgctatttatgttaacagtcattggtcccaggctggtgaggttagaatttccaagtataaaagtaatttagtttcgttttaaatacattttagggc

SEQ ID NO: 1562500 - DNA, 4001 bp, Homo sapiens
ctggtcacgaactcctgacttcaggtgatccacccgtctcggcctcccaaagtgctgagattacaggcccgagccaccgcgcccagcctacgattatgcttttatagtgggtatgcttttttaggaaggagaagccaccaggagcccaatctataatgcgagtcaggtctgattaacaccttactcattcaggttccaactcccagaccccgaggcgctcctgggttagacgcccaagggacggccctgcgcagaaggccattcacggtccctgtattttaaaagacgatgccactttctggctggaagggttacctacaacgcccgcactgaaccttaccggccttccagttctggtcagctcagcatctccaggtgtctggatccaaggtcgccacggcgcggggctggaacggcaagcgccaggagagagtgaaccctgggcacttctgctgccttcaaactatgccatgagagctattcttagttccagtgtctgcctgaaaaagaggcaccggaccccccaggaactttccctggagttctcagggctgtggataaattactgtcatttgtgttttttctctcctgctacgtccccagttctctgtctccagttaagctttgagaagggaggtcccgaatctcacacaattatcagggaacccattagttgagagatttctctccctgcaaatcctggctgaattgttcaattcggggttccccaactatagctgtctactttgtccccggttaatttcaatcacaccaccttggtcacggaaggagattgattctacagagatgattttacagagttgtaggatgaaaaacaaacaaacaaaaaaagggggctgggcgcggtggctcacacctgtaatcccagcactttgggaggctgaggttactggatcactcgaggtcaggagttcgagaccagcctggccaacatggcgaaacccagtctctactaaaaatacaaaaattagccgggcgtggtggcaggcgcgtgtaatccctgctactcaggaggctgaggcaggaaaatcgcttgaacccgggaggcggaggttcccgtgagccgagatcacgccattgcactccagcctgggcgacacagtgagaccctgtctcaaaaaaaaaaaaaaaaaaaaaaaaaagagggaatctttctcctgcctggctacctggcccatccggcctacccggtcccttccctacctccctggctaatttgatttcctacaacgttactgtctttaaaagggttggtgcccagggacagcgaacgccgagcccccaatccagggacaacagaaacggctaccgagaaagtagcaaggtgagagattgcctttgcaaggctggcttaggagcccgagactgcagtgtccccggctggctaactgagatctcctctacacggaagcgtcggcccctttcctggccagctacatcctgggcctccgcacttcagagctgtgcgttggaaccggagaactgagcgcccctcccgggaacccggctgccggctcaggagcttgcttggcgtcgccgtcgagctccggagctccgctggggatcgggggttcagcagcgccccagcctcccgctcgctgcgctccccgcaccgccaccgcgcacgcctctcagcgcgtccaccggggcgcggggccaccctcacctctccggcccgcgcggtggcggaggcctccagggagcgtccccggggcagtgacagccgcgcccccgcgccttccgggctccggccgccgcttcgggctccatggtgccggcggagcccgcgccccttgctgcggcgccggcctacgagcgcgcctagatccactcgggctaacgcgctcacctacccgcgcgccaggtttaaaaacgggggcggggcggcgcgggcaagcgctgggagggggcaggacccgaggagctccgtgaggggtgcggagggggccgcagggtacgaaggaaaagcccgggtcggaggagcggaggggaccagagaagttccgggaggggaccagggagccggggatggggaggagacgagaaaagctcaaggaggtggcgccgggtgtcaaggaggggggtccggcaggcccgggcaagggtggggacgggacaaagaaaagtcggggagggggcaccagagaaggggtgaccagaggatggaggtaccagggattggggccacgagctcgggctggagacagcgggaagtgacccaggaacccgggagaggaaagcgaggcccgcgggctaggggcgtttccgtcgggcgcactccctcggggactggggggacctgcgctcacctgctgggcttcccctgccggatgtgggatgtgaggagtcccggcttctccgtccctctgtggtccccgcggcctcgggctttggtcctgtgcgagcatcggattccctgggtttccggagaatctcgcttccaccgccttagagcggcagcgggtcttcggggacatctaccgaatcctcgggtccgcgtgcaccggccttgccttcggtgctggacagtgggctcccggacgccccgacgccagggctcgaacccgtggcgaagcgggtggggtggggcgcggcgacccttccaggagacagaaggccaggaatggaaccgagcaagaggggtgctacgagcgcacccttcccaccgatggcggccttggaaagaatgcgaatttttaataaagcctggagcggcgggcttctccttcggttagccccagccaggcttagaaagggcctcccgaccagcagaagcgaccttgcccgaccctggggacacttccccgggcgtcgctggagcgccgctgccaccatcaccagcgcacggccagggtgggagaaagcggtttcacacgtagagcactgcgacagaacaccgaaggcgctggagggccttcaactaccccgggctcctcaggggtagttactttatataatttaagttactgtgatggatgttaaaaaatcgaagaactaggccaggcgcggtggttctcacctgtaatcccagcactttgggagaccgaggcaggtggatggatcacttgaagtcaggagttcgagatcagtctggccaatatggtgaaacccgtctctactaaaaataaaaaaattagccgggcgtggtggcaggctcctgtaatcccagctacttgggaggctgaggcaggagaatggcttgaatctgggaggcggaggttgcagtgagccgagagtgtgccactgcactccagcgtgggagacagagagagattccctttccaaaaaaaaaaaaaaaaatcgaagaacttccgcaaggcgcggtggttcatgcctgtaatcccagcactttgggaggcccaggcgggtggatcacttgaggtcgggagtttgagaccagcctggccaacatgatgaaaccccgtatccactaagaaaaatacaaaaaaatagccgggtgtggtggcgggtgcctgtaatcccagctacttgggaggctgaggcaggagaatcgcttgaactcgggaggcagaagttgcagtgagccgagatcgcgccagtgcactctagcctgggcaacaagagccagactctgtctcaaaaaaaaaaaaaaaaaaaaaatcgaagaacttcagacattaaagtgttttcacatttttttaattaagattttgagcaacaataattaaatctaaataaaggcaaacatttaagaggggggaattaatgggaggaggctagaaggaggcaaagaacattagtgggccatattgcaacaataaggtaccatatttaatctaaatgcagaatggggttttacaagaacactgggcagggcgcggtggctcaatcctgtaatctgcacactttgggaagcagaggcaggcagatcacttgaggtcaagagttccagaccagcctggccggagtggtgaaaccccgtctctacaaaaatacaaaaattaaccaggcgtggtgga

SEQ ID NO: 1562501 - DNA, 4001 bp, Homo sapiens
agagcgaaactccgacttaaaaaaaaaagaaaaactgggttgaccagatgcccatccatcctcccccgctgcttctgtacctgctctgctgctccccccactcacctggaggagtggcttgtcctgcatccacatgcaataaaacagtcctttccacaccttcagcagctcgtcgtgcgtaaaaccacctgcatcaaaacagcaacggttggaccaaatgaatcccacaccttcgagtgccagaaaggaagccacagaaacgtgactgcctgaatgagaccaaagtcccacttacggtaaaggcaactggggggcagaatctggccctccccttcaaacaatccttctaacccagaacctgccgcgcctgtggctatgcggctactccaggtaactgctacttcacgcacacagtaaaaccgactgagatctacaaggtatcaggcaccatactccattttggaaattcaaaattgcgaaccttgacggtttcctaagctggacagtggccacaaggttaatctgttggtgataattcatccagcattatactgagggcttctgcactctcctgtaatatatctcaaatactaaaagaagaaagtgaactcaggcattcagactacgagagaaacagaaattactgaggccaggtgcggtggctcacgcctgtactcccagcactttggaattgagtgctgaggcaggatcacttgaggccaggagttcaagaccagtctgggcaacataggaagaccccaatttgtacaaaaaatacaaaacttagctggcctggccgcacggtgccagtagtcccagctattggggaggctgagatgggaggctcacttgagcctgggaggtagaggctgcagtgagctgtaatcgtgccaatgcactcctccaccacggatgacagtgaggtctgtctcactcagaaaaataacaaaaaattttaatttaaaacattactcagttgacattcactgaagtcctatgtgtctggcaacctgttcctgcagcagtggttctcaggctgagtgtggggagcagaagcacttgaacagcttcataaagcagatgccagtcctgatttagtagggctgggatcctagaacttgcatttctttcttttcttttgcgatggaaatggagtcttgctatgttgcccaggctggactcctgggcctttgtgatcctcccacatcgacgtgccaagtagctgggattacaggcttgggccactgcgcccggcatagaacgtgtatttctaacaaatgtccaggggatgctactgctgatgggggaccacgctcggagaaccacctggtaccatgaacaagaagtagattctcggccctcagagaggtactctcgagtggaaatcggaaaacaatccaataattaacgcaaaacagaaaactgcaaacagtgggaaatgctgccatgagggaaaaatactgggtgcccaaacagcagggcagcaggagtacatggtctactggagggaggggacgcctgagctaggaaaggggttacggggctggggaggagcgttctcgcagagggaccagagtcaccgcaccacgagggaaagcggcggcgggggccgtgggccggtaacagcgggaacaggccagtggaccccgcctgcccggcccggccacgtggaggttccacagggctcggagggcccccagctccggccgccgccgcccacacccgcaccagcccagccggcccccgagacgccagccgcccacacccccgccaacctgcggcccgctgagtcctggcgacgatgtatttccggagcttcctcaccgcccggtcccgggtcacctgctcattccccgccaggcgctgagccagctggatctcaggcgggagctgcacgcgcgaaaccatgacgccgacggccgagaccccctgtcccggagtcgcctggtacccagcacactgagcacgcgcctcctgcgcccgcctcctcctggccccggcgcgtggcgtgacgtcacagcccgcgacaccgcccaggcgcacgccaccgccgcgcagtggccgagccgcgcaactgcagcccccggaggccgaaggctacagagggggcgcgcgctccctgcctgtgcgcatgggcggaaccagcgagcgcgcgcctgcgcctgcgcctgcgcctcgctggggctgcggtgggtcgggattctgaggcaaagatctgttgttttttaatctcattttatttataaccccacttgtatttttttcctgagacagggtctcgctctgttacccacgctggagtgcaaggcgcgatctcggctcactgcagcctttgcctcgcgggctccagggatcccccagcctcagcctcccgaggagctgggaccacgggcgccaccactctcggctcgaaactttatttttaaaaccaggggtgtgccgggcgcggtggctcacgcctgtaattccagcactttgggaggctgaggcgggtggatcacgaggtcaggagtttgagaccagcctgaccaacatggtgaaaccctgtctctactaaaaatacaaaaattagccaggcgtagtggcgggcgcttgtaatcccagctactcaggaggctgaggcaggagaattgcttgaatccgggaggcggaggttgcagtgagtcgagattgcgccgctgcactccagcctgggcgacagagtgagactctgtctcaaaaaacaacaacaaaaaaaaaaacggggaggctgcatttggcctagggccacagtttgacataccctgaagtagaaaaatattctttatttttagaaataactgcagaactctttggtaaaggtgacctgtcatgatgtctgtaattcattctgcaaaaaagtaaatcattacacgcacatatgtgtatgcagataagcaactatggcacactgttaacagttgtggcgttggccgggcgcggtggctcacgcctgtaatcccagcactttgggaggccgaggcgggcggatcatgaggtcaggagatcgagaccatcctggctaacacggtgaaaccccgtctctactaaaaacacaaaaaattagctgagcgtggtggcgggcgcctgtagtcccagctactcaggaggctgaggcaggagaatggcgtgaaccccggaggcggagcttgcagtgagccgagatcgcgccactgcaccccagcctgggtgacagagtgagactccgtctcaaaaaaatacaagtgtggcgtctacaggcaggaatacaggtcttcattgacctatcttctgacattttctatgtatgaaatttttcataaaaagttgaaaaggctggcagtggtggctcatgcctgtaatcccaaccatcacttggggaggccaaagcaggtggatcacccgaggtcaggagttcgagaccatcctggccaacatggtgaaaccccatctctactaaaaatacaaaaattagctgggtgtggtggcgagcacctgtaatcccagctactcgggaggctgaggcaagagaattgcttgaacacaggaggcggaggttgcagtgagccaagatccggccactgcactccagcctgggcgacagattttgaaactctgtctaaaaagaaaaaaaaaaggaaacatttagcaactggttttagaatctgaattagttcttgttgttgttgttgttgttgagacagtttcactctgtcgcccgggctggagtgcagtggcacgatcttggctcactgcaacctccacctccaggattcaagcaatttctggctaatttttgtgtttttagtagagatggggtttcaccatgttggccaggctgatctcgaactcctgacctcaggtgatcgggctgcctcggtctccccaaagtgctgggattacaggcgggaggcactgcacccagccagcctctcctcttcttatgaggacgtcagtcagtgtggacttaggcctgccttaatttagcatgacctcatgttaac

SEQ ID NO: 1562502 - DNA, 4001 bp, Homo sapiens
atttatgtcatcaggaggtgaacgagggaggacgggggtcctcccactggatgtgggccaggggaagaggatgaggaattcagaggagtccaggacaatcccgtgtgtccggctggaatctgaatggctggtgggaaccagcaaccaaaagaaaagaaaacaggtggcagtggagcagcagcagagaacaggatttcggggaaagaaaacagaactttttttggcatcctgagtgtgaggtgccaggtagagaagccaggctagcaaggcacatccgagctgcaagtaggaatgggctgggacaacaatttaggtttagaaaccaccagcatatatggggtacctggaactgtgagactaaacaaaatctcttggggagattcttaacagaatcaaagtcaggaattttggtctttattcctttttctatcagacttcccaggaaagtgtattttctttttttgggtagtctggtgatttctcttaaaaataaaacaaactgagaatgtcagtgatgggggagataatatctgttcttttaagcagattctaaatgtattagtaccatcagtaactaaataaaactttatcttaaaacctctattacacattgtagttcatattgtatgggctcactcaagagtttatagaaagtatttttggatcaggtaaatgaaatcatccaacagcagtgccgttaaaatctaaactacaaagccctgtgtgatctggccactgcctacatctccaacttcatctcataacactcgcccccccaaccccaacttattggtctttcaaaccactcctagggcacgtgaagctctttcctgcctctgcataggcggtttccgctcatttctcttcagatctgagctgattatcagcccagagaggccttcccagaacagcctatcaagaagagcaacctccttccctttttgctattatctggttttctttttccttttttcttttcttttctttttgagacggagtttcgctcttgttgcccaggccggagtgcaatgctgcgatctcggctcaccgcaacctccgcctcccaggttcaagcgattctcctgcctcagcctcccgagtactgagattacaggcatgcgccaccatgcccggctaattctgtatttttagtagagccggggtttcaccatgttggtccggctggtctcgaactcccgacctcaggtgatccgcccgcctcggcttcccagagtgctgggattacatgcgtgagacaccgcgcccggcctgctacctggttttcatttcctttactacacttacacaaggtctactttatttgcctgtttgcctccttgctttattactaatagatcctcgagggtagtgattttgtctgtcttctctcctgcagccccgtcacgtaaaggtgctggtcaaaggaaggcggcaatcaccgaccggacaccagggcaaatcagggcagcccagtgattcgagatgccggctggggaatcggacccatgtgggtcttttctcagcttccccgcttactgtgactttcataagtaacggaaccccctcaacccgtttccttaagtgtaaaaaggcactagacacagcaagaagcggttccggcagcgcggaaaccgaagcacacgctgggtgtcacgacaacacgtggaagccgcattccgtgccggggccctggccctagccccagccccggcccccggcccgccatgtggcgcggctgaccgcggccgtgcgcccacctgtctccctctgcgtcttcacgctgatgtactggcgcagcttcttcaccgctcggtcccggatgcccttctcgctggacgccagccgctgggcaaattggatctcggccggctgcatggcgggggccatcgcgcccgctggagcatccccggccgcgcaacccgcggtgccgctgcagccagccgagcgctgcggagcagccagccaccgtccgcccgggccgcgactgcacagaaggcggcggcggcggcgcgcgggctgatggcgtcacaaaggcgccgcggctcgcagcgcgctctgggagtgagcgcggcagtggccctggcagctggcggagcggcccagcccgtgtgcacgtggcgccggcgctgcctttcggttgccaaaattcaggctgtagacggcgaggttagccagggttaggacttgaccaggaagagacggaaggctgtttgtaaacggtctaggattttttgtttgtttttgagacagggtctccctctgtcgcccaggctggaatgcagtggcgcgatcttggcggtgatcctggctcactgcagcctcgacctcccagactcgatcgatcctcccatctcgaccgcccaagtagctgagactacaggcgcgcgccatcacgccccactatttgttatttttttgtagagacggtgtctcgctatgttgcccaagctggtctcaaactcctgggctcaagcaatcctcccgcggcggcctccctgatcgctgggattacaggcttgagccgccgcgcctggccacggtccaggatctttaatcccatttagcacacctcgttgagccagcagcttacctgcgatctccgtggcgtggagtttttaactgtggagcccccgggcccccgggtggagttgagactggaaggaaaggccggcactggggcctgttgagcgggtggagggctcgccttcctccagtgcctgcagaggcttgggcagatcggtgcgcccctaccccggagccctggtgccagtgcaagggcgcccgcgcaggcgtcccgaggcctggcgagcacgcgcgcttccaggggagttgggcagggcgggctgcttgctaattccagagagggaagaaatcttagctttgggttcatctaaaacccgaggccatcctatattttgcggactcagcgggcgtgctggggcaagttaatggactaggtcactccacacgtagcgggggttatctcagttgctccgctcagttgtctaggcgacctcccgaggtgcctgttgacacaaaaattcaacccttaacgtaaaagcgcctgaatccgagcgagggaaggcgcgcggaggcgaggtttccagcaaagactgcccatttgaacgcagtcccccttagtgtagcattcctcgccaaacaggaaaggacccatccgatttattttacttgacacttacatcaggggctgactttccttctgctttgcagataacaagtttaaaaccccggctaagccagaagagccaaagagggacctcgccaaggccactcctcgctctctaggccgagaatactgcgcaaattctgggaggtttgggcctggcggctctccgttcccgacccccggcgtggattcgttcccgcgctttctggcgtgaggggtcagagggcgcgccgacgctcaggcgaacggagcggaggcggcagcggccatgggcgaagcgggcgccgctgaggaggcctgccgggttagtgaggaagccctggccgacgccagcgtgtttgaaccgtcgccattcgctcccctcagggcctcgccccgtgcgctcggagacggctcgctgtcgcgtgcttgggggaagcctggagacttcctcccctaacggcgtgggctgggccggagcggggtggagacctggggcgggaggcgacttcgcctccaaacccacgcggggacccggtctgtgaggctgcgcgtggtgggggcactcagtggcgccaaagcgggcatgggagcgtgggatggatggtcactctcttctctgctccgtggaagcccagttcccctccgaaggccctggccccctgcttcgggacttagcgtcaggcttagagagaatctgccctccatcgattttataactgtaactgattgcatgcgatggagaaggcgcttggactggggccagatccgtgttcacatcctgcttccacccgttattaattgtgctgcattgagagtcatctagctcccgtgc

SEQ ID NO: 1562503 - DNA, 4001 bp, Homo sapiens
tgtgcaattcttgcccttttctagcactgtttggaccactaattcctgcctagaatataaggtaaaaatctgcgacctcacagatttgtttcagggttagtttacatcaaaatgtacaaaagtcccctccttctatccaagaggcttcccaatacacccaacactgagccgctggggtggctgaataagacagaaatcctttaaaatgaccccaaatgtgatctgaacctaaaaattataggcactaaaaagttacaaatcagtggggccatttgaggagacaaactagaaatcttgctggtcaagtgttgcaggttgggttcacctagaaacagaccctgaacaagtgatttttttttttttttgagacagagtcgctctgttgcccaggctggagtgcagtggcgtgatctcggctcactgcaacctctgcctcccgggttcaagccattctcctgcctcagcctcccgagtagctgggattacaggtgcccgccaccatgcccggctaattttttgtattttagtagagacagggtttcaccgtgttgcccaggctggtctcaaactcctgagctcaggcaatctgcccacctcggcctcccaaagtgctgggattacaggtgtgagccaccgcgcctggcctgatttttttaagtgctctcctgggagaaagtagtaaagagggcagggaagtagacatgaaagggcaggcagctaaggaaggatgcctttgcaggtgaagtcccagacttggcctaatccaacagggactctgggggcatcaatcgcactgcagactttgtcctgcttcttgcactagctactggctgtctggccggatgtgaatttcaggcacttctggctctccatactgggcaggtagttccagcgcacagaggtgatagcttgagtagcaaatcaggcggaagctgggagatgagtgcccagagctagcaaaaaggtctgggcaggcactgacagcaccactgcagagtcgctagatttttcagttaattctgaaagtacctcaactctgtactgtgcatgcagaccatagtggctgaggttccctatctgtcagccatggagaggtcactctctggagtagggaggaactactctctgggtgatagaaatattcccacacagaacccagctcacaggctggatgtgccctctttctcctctctgctgcctaactcaggaaataactccaaagacctgggtcagttcagatggggactgaagaaagcacatgtgaggatacgcctataaggtaatatcttcaggaaccctctcctgagcccagggcctcctcagcatttcttggaggctgccaggaagcaactatcctccatgcatctaaatgccgggggagcaaatctcagctacagaaatgacttattcaagggcagtatggcagcgtgggatgatctgctcatccgagaaaactgcctcgatgggaattaacacagggaggaggaaacttccaaagccttccgctgggaaatctttgcctttaatgggaggcaggatgggggtgggggaagaacgaggcggcatgtggtaaccagacgtcacagcgtttcacttttcaccatcaacttccaggacgcacgcaggtgtgtctggcgtggccttcgtccctgccggggatcctggggagctgtggctcagacctctggtttctgcgcctcctcactctccaaacccaacctcgaggttcccccgccgctgcgcaccctgggaagccctttctcaccaggagctctcaccccaatatcattctctccctcctcctccaactcctccgagcccaggtccgacatggtctcgccccagcctggatcacagccgcagcgcctctagcaggtgggtagcaaccgcctccaccgccgcgtcccgcgtcgccatggagacgcggccggtcccgcctccctcccagcccggaagatggggagcggggacaggcgacgcggacgaagcgggaggagccactggcagcctttgcgtactgtcatagcaacgggaagggcacctcgaccaatcaccgcccgggaatacggaggggcggggcggaagggacgaggtggagccagtggcagcactctggtgccgtcatagcaacgaggggccgcttcggccaatcactgctcgggaagcgagggggcggggactgggcagggcctgagcgggttctgtgcctggctgcccaccggctctctgacctggacctcgccgtcgctggcccctgaaatccatcacttttgtcggctgttctgtgacgccacaacgaggagccacctgggtactgggccctcaagaggaaggacgcgggaaacgcgtccgggccaactctcgagagggtttcacccctgcccagtgcgggcactgcccgctcccttccgcccccaggcctcgcaggcccctccggggatgctgcccacccccacttacctttctaggctctgctgacccttcgggattcgcggctagctgtgatgtgtccgccaagatctcttctcttgtctgtaaacaacttcactctcaaggaggcagctctggcctctcagcaggtgcggcctacagtgatgtccgtccgggttttacatccttccccgacctcgacatgagtcccagccccctcgggcctctgactctcaggtgtcccctacgatcgccgtcctctcctctcgctcctggctcccctacactgtcacacacccacacaatcacagacgcacacgcatgtacacgtgcaggcttggaaatctgctttacctgacgcactccgcctgccgaaggcccctcacatctcccatttcctctgccatcatcccagactgcaaagctgtgttatttgttgttgctgcaggagctggggaggagtgactgaataactataggatttggtcttgatgggagaatcccagaagccaaatccacgcggtgaataagctgctgatcttccagagcacacatcccctagagattcttcccaatgctaatatgaaaggttacaaccataacccatcatcaggcccaaatatattacttactgaataaatacacaagttacaacaacacacgagattccaaaattatgtcgttttttagatgcaaagataaaaatgttgtaaacaccaaaatttaacagcttttcttatggggaaaagtggggagttagggataacagatgattattattttcttctctacatattggcagttacccagttactacaattaagcatgtcctatttttataataaaatgccagaagcattttaaatgttagaaatctagaatggtaacataagtatatgcaaataaatactcgttttttacatttaaaatgtcagaaatttagctttcaaatttgtcctaacaatgacagtaaccagtgtttactaagttctgacactgtgtgtgggcactgttttaagaattttatgagttatcttattaaatcctcactatcattcctccattgaacatctaaggaaagggagttatagggggttataaactaaaaataacctcctaagccccaccacagccaactgaatggacccctcttggccaagagggccccagaaaccttaaaaactgcgttctcagccatgatgggaagggaggtcgaacatgcctcactaatacccttgtgcagtttagacacaacaactaacaagcattaatgttaaaatagagatcataagactgacagaatggacgctgtggcagtaagataccaacttacaaacaggacctaaggccatgccaggcatgagttaagtcatgcatccctacacttaaaagaataaactatattttaactacctggagaaggtcttatgactcgtgttttacatcctgtacttgagcaaacaatcttactgtgaatctctcaaatcgtatcatgagttcctcagactgttgatgtactaattaatacgtaaactactgacactgaaaaggatactgatttgtttctgaat

SEQ ID NO: 1562504 - DNA, 4001 bp, Homo sapiens
atcccccacatcccaagctaggaagaccgacccggggctgcgggggcccctttccagaatccggccccgcccgcctggccgctgccctcgcggatctcccccggcctcgccggcctccgcctgtcctcccaccaccctctccgggccagtaccttgaaagcgatgggcagggtcttgttgcagcgccagtgcgtaggcagcacggagcagaggaagttggggctgtcggtgcgcaccagctcgcccgggtggtcggccagcacctccaccatgctgcggtcgccgctcctcagcttgccggccagggcagcgccggcgtccggggcgcccagcggcaacgcctcgctcatcttgcctgggctcagcgcggtggaaggcggcgtgaagcggcggctcgtgctggcatctacggggatacgcatcacaacaagccgattgagttaggaccctgcaaacagctcctaccagacggcgacaggggcgcggatcttcagcaagcagctcccgggagaccaacatacacgttcaggggcctttattactgcggggggtgggggggggcgggggtggttaggggaggagggagactaagttactaacagtccaggaggggaaaacgttctggttctgcggatcggcctctgacccaggatgggctcctagcaaccgattgcttagtgcattaaaaagtggagactatcttccacgaatcttgcttgcagaggttaagttctgtctttggctgttagaaaagttcctgaaggcaaaattctcatacacttcctaaaatatttatgcgaagagtaaaacgatcagcaaacacattatttggaagttccagtagttaatgcctgtcagttttttgcaggtgagttttgtctaaagtcccaacagaacacaattatctcccgtaacaaggccacttttatcatgcaaaactggcttcagtcccgaaaagcaagagctgagacttccaaaggtagtgctactaatgtatgtgcacgtatatataaatatatacatatgctctacttcataaaatatttacaatacaatctgtggagaatttaaacacaacagaaatccattaatgtacgctgcagatttttttaagtagccttgaaaatcagcttcagtagttggagcagtgctgagctagaagtacttgtcatgttctctgttctctcaatgaattctgtcaaaacgctcagtgcagaaaattcagcgtttcagagatcttcagctaatcttaaaacaacaatcataagaaggcccagtcgatgacactcagggttctacagctctcccacatctgtgaactcgggtttggggatgttggttaagtttgtggctggtcctctggtttgttgggagttgagcagccgcagagtcacacacatgcaaacacgcactcttcggaaggcagccactgtctacatcagctgggtgactcagccctgactcgggcagcagcgagacgatactcctccaccgtcgcccagcacccgccggttagctgctccgaggcacgaacacccacgagcgccgcgtaaccgcagcaggtggagcgggccttgagggagggctccgcggcgcagatcgaaacagatcgggcggctcgggttacacacgcacgcacatcctgccacgcacactgccacgcacacgcaacttcacggctcgcctcggaccacagagcactttctccccctgttgtaaaaggaaaacaattggggaaaagttcgcagccaggaaagaagttgaaaacatccagccaagaagccagttaattcaaaaggaagaaaggggaaaaacaaaaaaaaacaacaaaaaaaggaaggtccaacgcaggccaaggagaagcagcagaggttgacttccttctggcgtccctaggagccccggaaagaagtgcctggcggcgcagggccgggcagcgtggtgccctggctgggtccggccgcggggcgcccgtcccgcccgcgcccgctggctctatgaatgagagtgcctggaaatgaacgtgcttttactgtaagcccggccggaggaattccattccctcagctcgtttgcataggggcggccggcggccaatcacaggcctttccggtatcagccagggcgcggctcgccgccgccggctcctggaattggcccgcgcgcccccgccgccgcgccgcgcgctactgtacgcagcccgggcggggagtcggaggccacccccgcgccccgcatccaagcctgcatgctggcccggggccccgcccgcgtgcggacccctttccgcagccacacgcaggcttgtgcggctccgcgagtggccacggtccggagacctggaaaaagaaagcaggccccgccggcccgaggaggacccggccggcgcgccgcacccggagaggcccggccccgcgagccgctgcaggcaggcgcagtggccgccacgaggctcccgaaccgggctgcagcccgcggacggccccagatcctgcgcggccgcccagggccaggcctccgcttccagggcgggggtgcgatttggccgcggggcccgggggagccactccgcgctcctgcaccgtccggctggcagctgcggcgaagcggcgctgattccttgcatgaggccggacggcgtccgcgcgtgccgtttgctctcagcgtcttcccttgggtcggtttctgtaatgggtgttttttaccgctgcgcccgggccgcggctcgatccctccgcgcgtctcacttgctgcgtgcgtcagcggccagcgaagagtttcctagtcaggaaagaccccaagaacgcgcggctggaaggaaagttgaaagcagccacgcggcttgctcccgggccttgtagcgccggcacccgcagcagccggacagcctgcccgggccccgcgtctcccctccggctccccggaagcggcccccgctcctctccccgcccccgtgcgctcgagcggccccaggtgcggaacccaccccggcttcgcgtgcgggcggccgcttccccctgcgccggtccccgcggtgctgcgggcattttcgcggagctcggagggccccgcccccggtccggcgtgcgctgccaactccgaccccgcccggcggggctccctcccagcggaggctgctcccgtcaccatgagtccctccacgccctccctgccgggccctgcacctcccggggcctctcatccaccccggggctgcaacccagtccccggatcccggccccgttccaccgcgggctgctttgtggtccccgcggagcccctcaattaagctccccggcgcgggggtccctcgccgacctcacggggcccctgacgcccgctcctccctcccccagggctagggtgctgtggccgctgccgcgcagggactgtccccgggcgttgccgcgggcccggacgcaggagggggccggggttgactggcgtggaggcctttcccgggcgggcccggactgcgcggagctgtcgggacgcgccgcgggctctggcggacgccagggggcagcagccgccctccctggacgccgcgcgcagtccccggagctcccggaacgcccccgacggcgcggggctgtgcggcccgcctcgtggccttcgggtcgcccgggaagaactagcgttcgaggataaaagacaggaagccgccccagagcccacttgagctggaacggccaaggcgcgtttccgaggttccaatatagagtcgcagccggccaggtggggactctcggaccaggcctccccgctgtgcggcccggtcggggtctcttcccgaagcccctgttcctggggcttgactcgggccgctcttggctatctgtgcttcaggagcccgggcttccggggggctaaggcgggcggcccgcggcctcaaccctctccgcctccgctccccctgggcactgccagcacccgagttcagttttgttttaatggacctggggtctcggaaagaaaacttactacatttttcttttaaa

SEQ ID NO: 1562505 - DNA, 4001 bp, Homo sapiens
cgtttgcagcttttcaccagtggccggtgtctctgtgttaccaaccaaacgacgctgcaagactagtgactaacgcacgtctgcatgattcaacttcactaaaattccctctgctgccagtaaagaagcacttgaaaactctttaatttgaaacttgagcttggttaatgacttgttttcttctctttctctttaacttctctcttgccatctccaacacacacacacacacacacacacacacacacacacacacacacacactctctctctctctctctctctctctctctctctctcatcaagttttttaatttcagggacccggaaacatacagccccgtgcattcacaatagcatttgctgtgataaagtggccggcaagccctctgcattcccctgctcacttagctgtatgaataaataatgagtcacagatacaatttgggtgctcaagagagtttgtagccagaaaattaattattctcccatcccagcccactccatctcagctttgccaaaccatcaagatacactttgcaggcactggtcagagtgcgtgccccgacgcacacggcaatgcctttgagacattttatgttattatttttgtttgtttaagcacagccctcttttaccacgaaagatacacaagacgcacatgcacacacatactcacacactcacagctcaaccacagctttgtccatttcaagaggctggtttcaaaaatggagacaggttttccaccctggctgttcctattcataagcctgtaatctaacgacttaagctgcgagaatgcttaactcgggaaacttctctattgcccttttccagagagacctcggtatgccacaatttgcttcctttctctcttgaaagatgctggttgtctctttgcattgaggctacaaggaaaaacacagcacagccccatgctgatgattttaacctaaccaagtctgtcagtctcctgtactctctgccttatagagacagctgccttgccactttggccctgaagtccccaggctggtgcaaggctatctgagagcctccgcctcctgccccacactggcaccagccctcctggctggctctgtgcatgtgcctgctaagccccagggcaggctgcattctgggccacacagcatgccgagttaaggataactcagacacaggcattccgggcaagggacagcaaaataaaacccagggagcttcgtgcaagcttcataatctctaagcctttaaacaagaccagcacaacttactcgcacttgacaaagttctcacgcaccgactgaacactccaacagcataactaagtatttattaaaacatttctgaagagcttccatctgattagtaagtaatccaatagacttgtaatcatatgcctcagtttgaattcctctcacaaacaagacagggaactggcaggcaccgaggcatctctgcaccgaggtgaaacaagctgccatttcattacaggcaaagctgagcaaaagtagatattacaagaccagcatgtactcacctctcatgaagcactgtgggtacgaaggaaatgactcaaatatgctgtctgaagccatcgcttcctcctgaaaatgcaccctcttctgaaggcgggggactcaatgatttcttttaccttcggagcgaaaaccaagacaggtcactgtttcagcctcacccctctagccctacatctctctttcttctcccctctgctggatacctctgggactccccaagccctattaaaaaatgcacctttgtaaaaacaaatattcaaattgttaaagattaaaaaaaaaaaaaaagccagcgccgccttggctgtgggttggtgatgctcaccacgctgcgaaaccctgtggtttgcattcagtgtgattcgtcctgcctgctgaccactatgctgggttcagacttctgacactgccaggctacccaacttgtggttctgtggttgtttatgaggcccaaagaagttttcacacaacccaaattacaaatttaactgttcccctttccacagcccatctcaattggttcttgccaatcatgtgacttaagtgatgtcaatttttttttttcttttctgagcaatgcccttccttccctccacctgccctcccccaggctgtgcaagaaaatagccgagtagactttgcaagagggggggatgtagaaaaaagtgactcagtcacttattatatctcaatggtctttgctgatttagtacaactcggctcctgttgttatttgtggtttttggaactactgattattttgataaagatttcattgctgcttattcaatagtaattcaacgctggcatcaagccgctgctccgacaggatgtggatcccatcatttaaaatgctaggcatcagctccgggagagttaagtccttggtaacgtctatcatggcataagtgaaactataaaagggaaaaataaataaaaagaaatgttttggtgagagtctgacccctacaacgggctggcaactcacaggtattttaaagcctgggaaagggaaagaattttacttttgaaataaaaggactgttttaatgaaaccaaaattatgtggttttattccccctaaatggacaactttagtatgtatctctttcagtaaagagataaaatcatagtacagtcttaacacacacacacacacacacacacacacacacacacacacaaattaggaagctaaaggaaaacaaagcagagagaatttctgtatttgggacaaagcagtggttactctgcagatgtttatttgtattgtcacttgggaaagctccctgtattgcctttctctagttcaattcaaatcaataggctaatttacacctgtaggtaaaactacactttgagcacatgaggatgccacaatagaaggggaaccaggaggagacacttctcctggggctgactaatgaatattatatagcgcgtcctctaccttagaaagacatgcctgtttgaagatgctaaaaacaggataattttgtaagtgggcaaaccactgtggtcacacgtatttcattttccggccccactggctttacctgctgacaactaaaacgtcattttgttttgtagttccaagatgaagaaaggcttattttcctgatttactaccttattcatttggctctgctctgcctacatccgccatagcactctgcgcacgtgaaatttcgacacatagggtcaagagaacctgtgtgatgatgggttgtaaatgccagtcctggattctaagctgcagtagccagcacaggcacttcagaaaggctgaactcccacaacactccctcggttttccctcatccacttaatttcacacacacaaagacccacaacgatagtagcttccatggcacaagtctttcaaaaggaacagacacaatttttacttactcctgttttgactaaagcaggaattgaaactcaacagaccgctttctcttacacttgtgagaagttagctggccacatgttgacactgctaacatctaaaaaagaataatagtgctacatctcttttatgaggctcgtgaatctttaaatgtgatgcgtgtttcatattgcttctcagtgcaaatcccctgtgaacataatgaacataatgggcctgtgttgttaccctccctaataaagtcaagcctgagttgaaccccaaaccaggttcatttttctctcccacacttaatattccctggaagggccctaagagccgagggctgtaatgtgcagctgccactgcagagtcgactcacacttaataatgacttagcaattcaaggggccatacagaatatccttgggagatttaattttagaaactccccagatgcttttagccttaggtgtccagatgcttaggagaagggtttggatgaggcagtgaacggcctgaattctcaacttttctctttgggcctagctctagccagatatctattt

SEQ ID NO: 1562506 - DNA, 4001 bp, Homo sapiens
actttgggaggatgaggtgggcggatcacctaaggtcaggagtttgagaccagcctggccaacatgatgaaaccccatctctactaaaaatacaaaaattagccaggtgtggtcgcccacgcctgtagtcccagctactagggaggctgaggcaggagaatcgcttgaactggggaggcggaggttgcagtgagctaagatcatacctctgcactccagccagagcaacagagcaagactgtctcaaaaaaaaacaaaaaagaatttttgtacccagtgaataactgctatgaagaaacctgaaaaagaaaacaaggataagggaaacaatgaggcagcaggggtgagactgcacacagcattgtcaggaaaggcctttctcctaaggtgactgtagggaagagactttaaggaactgaaaaaggaggccatgtgtttttcttggccaagagtgttcaagggaaagcgaacagcatattcaaaggccttgaggaaggagggtgctagaacagctggccagagcacagtgagctgaggacacggggaatagaagagtttagtaaggaaatgtggggcagtttatgttgggactagtaaagcatggccagaattttgaattttatcccgactgacatgtaagagctacaagagaggtttgacttatgaagatccccacacttgctgctatggagaaaagtgaaaggaaaagtggggtgaccagatatagacaccgcaataactagggagagatgatggtggctttgataggattatagtggtcaagttggtgagcttcaggttctggatacatgcagagaacagaggcaacaggatttacagatgaattacatgagacacggaagaatgactccggggctttaaggtactgaaagtatggatctgccatttatttagacgttgatggtcatggggagctgaagcttggttttagacacaagtaatgaagtgcctactaagacacctgttaaatagagaggtctagcaggcagttagatgtatagttttgaagtctacgagagactcagctagatatataatcttgggagtcaacacttatttggaactatatatttgtttaaagtctcccagggagtgagtaaagttgggagagggtgctattgaattggaggtatcgaagatgaaatgggattagcaaagaagaacgggacggagggactcttgaacggacaactacgggagtgatgtcacaggtcatttatctgccaaattattttcgcttaagagatttcagtccttccaaaaaaccctcaagataattttatgattcaagatttcagcgaatgctgtaagataatagactgtggccgggcgcgattgctcacgcctgtaatcccagcactttgggaggcagaggaagggggactgcttgagcccaggagttcaagatcagcctgggtaacatagtaagagctcgcctttattatttttttaaaaaataaaatatatttaagagaacgcagactgaaacttgagatttctgagtggaataatatcttttccttgcagatttttttttgaagaacagagcagggtaccccgcgacccaagccaagacgctctcaggaagaaagcccagcacgcagccgccctcgcaccctgattgcccccggggcgaggtccccggctggagcagggctgcagaagccgggaagcaacgccgaggaccgagccgaccgatgggcgcatgcagtgaggggaaccggggccgccatgccgggcacgttcccaaagggttgcactgggcgctgcagcgtgggaaacccccgtggcggtcaccactggcgctagctgaggcgagactcaccttgagccgtggccccctcactgctgtaacccgggttccatggctgcatggacagctcaattttcatcagaagggagcctcaaaattctagcatactgcgacccaaaacttacaaaccgcctcagctggcgacctaccggaaaaaaaaaaaaaaagcatgcggcgcatgcgcgtccaaggccgcggaccggaagctggggctcgcctgttgggagccgcgtccgccggtgttggtgtctgcacttggaaggacgtagggaatgcgttgtccctgctaggtacttttcagtcgcagagttctcttcttcttctttctttcttccttttttttttttttgagacggagtctcgctgtgtctctcaagctggagtgcagtggcgcgatctcggctcactgcagcctccgcctcctgggttcaagcgattctcctgcctcagcctcccgagtagctgggattacaggcgcccaccaccatgcccagataatttttgtatttttcagtagaaatggggtttcaccatgttggccaggctggtctcgaactcctgacctcaggtgatccaccggcctcggcctcccacagtgctgggattacaggcctgagccaccgtgcccggccggagtttttctacttaatacctctccatgccaaccccgttgtcatttcccagcggccgcctctataacgggcacttttcagggacaaagaattggtccgttaatgttcctcaaattcgaacgcgcctaggaatagttcggggatcctgttgaagtgcagatcaggattccgtaggtaggggtggggttccaaattctacatttctagtatcttcccacacgatggtgatcctccttgtccctgaatcatggaggagggcaattagggagatgtgagcctggatgcatggtggccttggctatcttaggtgttcttgcccattaaccaagctgggaggaaccgtgtgaatgcatatctatccctgttaataaaagggtagtttgaaggagatgctgacaggagaataattagaaatgtttttcttcccaatccaactatatgcaatacactttataatattcattttagaaatgtcatagataagatttgtaaacattgacatttagcaatactaaatatcactgctaggtctcccctccactttttttttttaaacaaaaatacgacagtatgtattgtaggtcttcataaactacgtcttctgcatagtgtttcatgagcgtttttcaatgtcataatttattttttcctccaacatttattatgaaaaaattcaagtgtaaagcgaagtcgagagaattttacagtggagcagacctcaagagaaggggaaggatggatttcccctctatttagcagtgtctgaagacattttgggttgtcacaactggaaggatggtattggcatggggtaggtagagcacagggatgttcctcaacttcctacaatgaacaggacatcccccgacaacaacaaatttgctggtccaaaatgttgatagtgttgaggttgaaaaacactgacctggagagtacagaattttactctaccagctttgtcacatacctcatcaatctatctgttttcatacatttaaaagtaaactgcagacagtacgcttctaagtacctctaatgcacatcattggagttcaaattaaggattttttaaggtaaaaatgaaatgcataccttaaatacacatcagtttttaaatgcacacgcctatggaactcaagccatattaacatatagaacgttaccatcaccctagaaagttctttcatgccctttcttagttcccaaccagttctccccaaaggtaaccactgttctgattttttcccccaccatacttatttttcttgttatagaacgtcatatggttggagtcatgcaatagatatttttgtgtaagggttctttcactcagggtaatattttcatctgatatcatgtgtatcactttcttttgattgctcagtagtattccatcatatgaatataccagttccattcttgttttgatagaaacctgggctgtcttcagttttttggctattataaataaagctgctgtgaacgttcttatatagcattttattgctcatgactttcttttcaataaatattta

SEQ ID NO: 1562507 - DNA, 4001 bp, Homo sapiens
tttggatgggtgacatgacaaaaacagctgtaaaattcatcaggaaaaataaatatggtagaattgccgcaatctttttgaagaataacagtgaaagttatttgatctaccaggaaaaaaaaatgtatcctaagtttaactgatcaaatgggtgtggttctgtcgcagggagggacagaatccagcagaaagctgagctgctgagcctgcattccacctccagtgtaccgaaagggtggctcattcactgcagtgactgggacggcgggagggggtgggggcaggaataggtgtttctctgcagctgtcaaagtaagagcccccctacctccctcacagcaagtaccttacgccacagcctacgaaccaaggaaatatctggtcagtctgggaatgaggcgcattttacaaaggttgccttgtcagttgtttcacaaaacagatgcgcagtcagagaaatttaccagcttttggccttgagttctaatcattaaataagaacgtttgcgctgtcataattaaaaacaaattaataaatcaaatagtgttgaaaaatcattcccatgttgaatatataacttacatcttaaaaataatttggaattattttatttatttctgatcctccgaaggaaacaggattgaagatttttttatactggccagatctttgctaaagtcattctattaataatcagtgtactttattttgctcttgagtccctaaaaatttgataattcacaaatagaacaattaagatggattaaaatctttaacatttcatgctttcttattctttgcactcaagttttcaattattgatatatgcatgtttgtatgtgtgtgtatttttttaaacaaaacaagacacttttacatcattctgatgctcctcaaagtccatgatgatttggggaaaaggaggttaaattgtttttctatgaattgtgactaatgggattattacaaaggaaaggcataaaacatgtatcccatatattagaacactaatagaaaccactagaaaatatggttttcttcataaccacactacaaatcaattaaattcttgttaaatttttccctttgacctaagaaatagttgatggtttatagtttatcttttaagagaaatggaaataaatgtccgtttctttctcacattctttgaatgtcctacattaatcttttaatattgagaacaagagaacttttgaactttaactccttagaaagacaagttacctagcgtgtgaggatccctctaaagaaggggttcgacctccctgagaaactgtgagactgaggaaagttaaaacccaccaaaaccccgatttctttgacccaatttatttgtaattgttacgtaatttctgagtggcgtcctggggctgtggggaccctggcacttcaaactgagggaaactggaaaactgaagagttacttacccagggcggtggaagaaatataaggagaaaagggaagcatttatttatgatataggactaaactagcattaggttctccatcatttttagccccagtgggaagcaaaatctttactcttcaaatagttacagaagaggcagtatttgtagtaccgctgggaaaatgtcaacaatcacttctgggccatgaaacctgacgtttctctgatttatggcaaaacacacctctagctgtctagggctgatgcagtcaggtgtccacaaagcagcagtaatgtggagattaaaacacatcatcctattgacacttctgaaatgctgccaattgtcctaaaggggctttttaagctaccacttagtttctacccctccattccgttccacccaaaagaaaagaaccatttcttcctgagcgtcctcttggcctggctctttctcacctcttccttgtctcaccccttcctggtctccttgctgcaggcgtcgtctctgctgcgggtcctgggcggcaggactggtgggcagaggcagcctcttattccctctgcccagggaggatggatgaaccctggtgcagcccactgcaggccgtggcagccaatgggagccgaaggcgggggtggcagggctgccaggcctgcacacagggctgcattgaccaagcagccccggggacttgctgggagccaggattgcacatgggctgaggaagaaaaaagggcctgtagggcaggaagtggggagtcagctttttgtgcgatttctttattacatgaatattgatgtcaccctaaaggcaaggttgggggtggggagaggagagagacttggattaattgattcaaacaaagcaaatgtgcagccaagaacaagcagcttccaagtacaggctgagcataggagattaagtggcctgcaagttggtttctaatggagaggcccctggagcttctctcctctgccatcctccaagtctggccccactgggcgtgaagttctgtggacagtagtgcttgtctgtggtcagccctgggctcaacggggctgcctcagagaagctgctgaggccagtgtctgcagggactaaaacgggtggtacttttaggggaaaacgtgatgtgtggactgtatcccaaggcctttccctccaccccagggtggaaggtcacagactctcagagttggacgatgccttagagatgtcccgttcgaacgctgttttacagaggcgtgtggacggtgtgcccccttgctgaagcctccagccagcctgaggaaggagaagtccagctgtcccctcaactcgctcgactggagcctctgaacacgggggccagtttatgggttcttcttcacaagaatgaagaagtaggtgttccttctgacaaattacacaagaacattggcccaaactctccaaaaatgtccatggtccccaatggatgcctgacccagcatcacgtccttctcccaacccagtttcaaagtggccgtgaaagggtttcccacaagatatctgtgtacatggctgtcttgctgtcattgttttatccaggacgttctctaccattcaggatctgtaagtgtgccctggaaatagcacagggctgagagctgtggtcttgcgtggctcagcctgccccagcctcctgtgaggaacagcctgagcagtgtggttggccctcacttcctcatcggcttcaccacccctggctgtggtctctgctgaaggatctgacacaggcttgctctgtgaagcacagagcttgcccaggcccaaggaaggcacaactgtgctctgtgccccttcctcgctcagatgttggagggaccattcctgtaagtgctgaccacttccccagagtggcagcctgagctctggattaacccttcagtgtccatagaaaacgctctagcctgctcctgcaggggttaaaaatagtttgaaatccactcatgcaatgaccgtacacctgtgcttagggcactgcgttcagcaggagggcccagccgggcctgccctctgcacactgcagcttcctgggatggcaagtgtggggccgtgggtccaccctgttcccaggtcttggaagcaggctgagagagaggatctgccacagggaggaaaagggctttcaagcgctctggggccccaggatggtattctttgcccaggctccccaggagctcgtggatacaacctcaccagcttcccacagattcctacaattgctgggtctgaatcttggctccaccatttaacagtggtttgactttggataaattcctaagcctttctgtgaaaggggtgaccgtagtccctactttgcagggttgttctgggtgtttttccctgaccttcacacttcctgatcaccctggcttacctgtcctgacccctcagttttaatcttatcccattagactggacagccaccagatccaatcatgtgtgactcccacattcacccaccccctgcagctacattccacaggaagacccttcgctaagtaatgagaaatgcattattgagtgagtggaacacctgaa

SEQ ID NO: 1562508 - DNA, 4001 bp, Homo sapiens
ggctggagggcagtggcgcgatctcggctcactgcaagctccacctcctgggttcacgccattcttccgcctcagcctcccgagtagctggaactacaggtgcccgccaccacgcccggctaatttttttgtatttttagtagagacggggtttcaccttgttagccaggatggtctcgatctcctgacctcatgatcctcccgcctcggcctcccaaaagtgctgggattacaggcatgagccaccgtgcctggccaaaaataatatttcttaaggtaatatttcataatgtaagtccttaccttatagagttgatgtgagatttaaatgagataatacatataaaatgcttaggaaaatggcaggcccaaataaaatgctcattaaaattagctattatttttcagtgaaatttcattataattgcaataatttagacagttcacttcacattttcttgatctcagtcaacacacgaagtcttccttcaatcaaaaagaaatccctggaaaaattttatgcagtcattaatttgtacacaaaggaatatatgaaatgttaatatgggtaaaagtcacaagagtttggttgctttttggaaagacaactcttgctctggtaacttttctgaaactgataaatttcactgattagcacttttgctatctgtttctttcccgacagtacaaaaccccagataagatgacacatttccgtagtctgcaaacttacccatgaatgtaggagatccatatctgagcaggaagacttgagacgtgtgtggcgaatacaagaggagcagtggtcccagggtccaacttgtgctatttggaaatcaagacatgtccagagagggttttcaggaaaaggcttccagtgatgccacatgtaagcttcaccttcataccaagctaatttatcttccaagttgcagttatttaaagtgctggatctacccagtgatgcagaaagagtatccaatctaatctccatttcttccttcctcctcgtgctaacactattcactttcttttctcgggacttggttaatttcaaacaagaaatcaacgtgtcatcttcatcttctgaatgacaaagaaataggttaaaaactatgattataattcttcacatataggaattattcttccatttatataagagaaataaatacactgcaatggataaaccaagaagtcattcaattttataaaattatttacagcagcatttatttaaaaagcaagttattttgctatataaaattttttgttttgtaaaagtcgcatttttctgacatttttgaaaccataacaattgattaaattctatctcactggaaagaatggaggccacatacaaataatatgctgaaagatatttgagaaaaaaatacaattaaaaaacccacctcttatgtttctattcttaaatatttttttaatttttaaggtcatgtgtataataaagaattataaggaaataaataaaattatttgccctacttaaaagaataaaatctcagtggtttggactgaaatcctactgacattctgaaattgtctattttaatatcaatctaccaagagatgtatggatgcagtgtgtctcacagtgaaatggttttcaaaaaacaagaacgacaaaaatttaaaaaagccatatctgtaataccataaagttcatttgtgagatctatatttacacaatgtggcaaagactctgatgaaatttctagtaatgtagaaaacagttacagaaaatagaaatatatatcacccagagtcaattgctctatgtcatggaatccctttaaatccaaacgtttaatgggtatttttaaaagagttcgattacttaaggcatgctattataaataaataaatgaaaatcaaagttgcatgccatggacataccaatttgttatgcttacatcaaaattcaaatacattgttttctatggccaaggaatggcgacagtggacactgctgagcttcctccattgctctctctcactgtgtctcggagcccggtcttgaaggcaaggagaaacggggcggtgcataaatacggggtaaaattcaggaacagatggggatgtctgttttaaaataacttggcaataaaaaaaaatcctcaatgtttaatgattatcttaagactttatcaaaatgggcttcattaacgtatgcttccttagttctccctcaaaggagttttaacagcttattgagttcttacttacggaggtttattaatgtcggtttcacctcatccagattctgcactctggctttcttagtccaaaccagtttctgtagtcgctttaatgtccccattgattccacagggtcactgcctgattttatggcctagcacaaacacagctcaaggtaaagacaaattattcctcacaaaagattaaatataaaatatgttgagatcataaatgtggaaaaattaataatgtgaccttaaaacctgaagcctgagtcaatttaagcactaacttgaaagcacaccatactttttgggttcaaaattataaaatatgttacaactggccaggcatactaaagcagagtggttttaccattttttttttttacttcaaaatacagcaaaatggattgaattcagaaatatctataaatgactcactcctgcccactgtgaaacagcggaaaaaaacaagatctttgcagtgtaatatagatggaacaagaggttcaaagttgctatttgctagtattggaatagactgatagtatacaaagtctacctgctaatattagataaagcagaatttaaatagtcttcattttctttttggaaatttgtggacaaacaacatttgtttcaagtatgaaaatttttcaaataacatacttttaaaaaaatagcctcttgctttctagaagatatgcactaagtgaaacaaaagatagccacagcataccacatcatgttttagaatatgtgtcacttgtttattatgacaaaatatggacaaaatataattaacattgcattaatgactcttgttttctttaaaagattcaggaatgtttcccactagtttactgttgaatttgtatttatacagcttttacttattatcttaagtatagttcctcttaaggatttcaaaatactttggaaattaactctttgtgtgctaagttttataggaattgataaaaatcattgtgttctgttgaattcactagatgtgatgtaatacatataggaatactttttcatccagaaagttctagactcagaaatatttctccacctgcttttgtctcattctttccattgaacagctgataaatagcatctacaaagacactgcagttttcaagaggtgaatatttgcttcctcattaatgtttgaatgagacatatttataataatgctttccaatccttttaaggagactataagcccaaataaatgtttggaagtaaaggatatctgacatgcaacatttccaatctttatactcagctgttatctttgttctttaagaatgactttgcacaaccagtataaacttgttgatctgtctctgcaaaatagcacttacgtaggaaatgtgacgtttttgtcagaggaaccctacctttttgcattaaataagtgggaaaatattgaaatcattttaatctttcagaaaggactgtgatgagatatgcttagaagcacaaaatcttccctctctttccaaaggccatgctctgctcaacacaatttctattgctgtttatttttttgtattatttctcagtgtttcttttagtgctttctgagttacttgattttatagaccctttacaactcaggaaaggccattttctactctttagaccctttcagaaataataagatgacattgcacaaccattttttctttgttgtgcttctattcttatggcaacttcttgttacagccaaagcttaattgctccactgaaacactggcaacaaaaatc

SEQ ID NO: 1562509 - DNA, 4001 bp, Homo sapiens
ctttattcatataatatgcaaagaaaattacccaccaaaataaatgtgaattatgaggaaaggagttattttaagacataattacaaatggaaaaatatcacttccatgttaaaaggaaacaatccaactgaatgtatgaaaaacatgcctgtgcctctatattcacatctctttaaattcatgcagaatgaaaccatctgtctaatgaaaataagaattcattcacaacaaaacttagcatttccaatgtgaccattttctgtgatatgttttgttcaaagatgtatattttttcaaaattttttttattttatgaataaggaagtcaagattaacaatattccaagtgtattataatagttactgctcttaagccaaatgatgatgatggagtaaagtatcattttgacaatagtttaatgttgtaaatatgactctaactcactataaaatacaggctttattaaatactctctctttagattttaaatactttgaggtatatcattctccatattaacttttatgatcttccctaaacctactattgttaactatttgttgtacttaatcaagtaaatatcatataaaattaatcttaaatggaagcacaagccatgcttttaaaaacttttctgtattatttggaaaatgttactttgagtttttcttatattagggaaaaagaaatcatgatacgttatctagctacattttaaactaaagatgcttgtctatccattattatgcatatgtgtcagaaagaattaatattcaaaatcatttattctcagtttccaaagataagaaatcatttatttttgtttccttcagaaaaacttggatggtaacttccaaagagtttcaaaatattgaccattgttcaatgtctcatcaattcaaaaggtcataacaaatgaaataaaccaatctctttctctgaaaatgggtgcctaacatataaagactgatagacaataaatcaatccttaaaaaaaatctggactcagctattgtttatctcagaaagagactaaaaattgtatttacctgagaaaagaaatgtacaagtattggagaaattttctgacattggtactttgtaaatagttgttttacgttattaataaatctagagttctacaatagaatttgaactttatcccatgttatactttttttttttaaaagtagcacttattgccaagacaaagaacagagtaacattccacatattaccaatttgtcaagtctaccagtatatggtgttttgatgcttctcaaaacacagcccgattttttgtgtagtaataacattagttcgagagaatagcaaatatacatctttacaacgagctatcatgatttaacattcaaaaatgagaaaagtcttatatttaaccataacatttccattttacaaccttcttataactctattttgaagagctaattacttaagagataaaattcattcagtagactgttcaatagacgttgacaatctcatagtcattaaaaacatgcaagaagattttataataacaaacactcagagaccactaaattgattttcttgaagttgaactgaactcaaacttcacttacagatgtaaatgttccaatatgcaccataagacaaaattacagagacaataattgctaggtgtgatttaaaatctaactttgcaatttaatttttccgtatttgccatgaggcattaaaccctatgtttgacttatgactgacagatgagaacattgtatgtgttcaaacacacatatgtgtttattttctattaaatagtttgattttatttaactatgtatgaaatcaccttacctttggtttttgatgtttctccttctctgaaacattggatggctttctcttgagcattttgaattctgactactcctagtgagtgcactttctgctgttacagaaacaactgaaaacagtcagcagtgtgctgtctaatgcacagcatcagataaggttgagcccagggacctgccacttcctccttcagtcaggatatgacttcaacatttacatgggtaatttttttttcttacagtaattctttggtaactctttattgtcttgctattttctatgaggtatgttccaaatctcatatttagacatgcctgcagttatgagagccataaggatttcaaaacaaaactcattttcttggtttatataaaagtaaaaatttacaatgcattccatgggtagaaaaaagaaaaaatcggagccaataactgaaataaaacttgagatgttggttttctattatttaaaaaaaaaaaaaagaatactcaaggtagtcaattttgtatatattttttctttttttgatacggaatctcactctgtcacccaggctagagtgcagtggcatgatctcggctcactgcaacctccacctcccgggttcaagcgactctcctgcctcagcctcccaagtagctgaaattacaggtgtgtgccaccatgcctggctaattttttgtatttttagtagagatggggtttcaccatgttagccaagatggtctcgatctcctgatctcgtgatccgcccacctcagcctcccaaaatgctaggattacaggcatggtatatttctaaataaacacagttagaagataaaataaataaacaatgttagaagataaaataagttagaacttaaacaatactaatcctacttaaagcatgtatgcatatattttaaaatatggattagacccattctaaatataaatgggaacatgactaaaagtaaatgtttatcatatgttacttttctaatgtattaagatgttgtaaagttctggttaacaaagagatcaattaaacagaacccccaattaaccatatgtctttgtgctacaaacgatgccatatactgataattgctgccctggtgatgagccaatggatcaacggtttcttcaaataaaacacccagaacctctatttaatagtcctggtagagctaatatgacttattaagagtttccccatggtttaaaaatgtttatgataatgaaaaaagcaaaatacccagaagtaaaagcaaaaagttcaagctttattgttaaatggggatttaccaaagggagatttgcaaaatatatgaaactctggttccatttgagcaacccagattaagaaaataaacctagatttctgtttataaatcctctgaattgaaaagtgtagtgccatattcttaatcagcagcttttccacgtgacaaatcaactgactctatttctcaaacttccctcacacttctaagctccaccccaaggcccaaattttactaattcatttaacaaatgagattcaaatttcactaatttatttaataaatattaaattgattgtctattatgtgcaatttgacaatatttcaaacctcttgactagctaaaaacaacctgtttttgttctataacagaattgaaagaatatacttttcatgattatggttaatatgcctattattttattaccagataataaaagcagactttgatttttgagaattattgagttagtgttttcaaaatactgacacagacagagaacactggaaaacctgagaatgttgaggtggggtaattccccagaaatacatcttttagactttcagtttgggcttgggttaagaaagttggctaggcagatcttttgcttcatctcttaagaaattgaaagtcataaaaatacgtttttaagtgaaccatttgcaccctcgacaccctcttttcttcatctatgaataaaaatttaattatggagttcaatcagtaataaaatggcaatgataatgcttgcacttagtacatggtagagttttgttgatagtaaaatgaaataccaataaaggacatacttattagatgattcatcatttcagtaatgttttatgtcaaaaaatgtttgtgaactctaaaaaggcatgaagtttcagtttg

SEQ ID NO: 1562510 - DNA, 4001 bp, Homo sapiens
tatttgcgaggcacctgttttgattggtagagaagcggggaaaagaactgaaacttcctgccctcatggagccaggagccaacatgccagtgaattctaccttcagaaaacaatcagcttccaaccctgaaatgtttggagcattatcacaaattctctggcgatcaaaaactaggacatattatttttattgttttgaaaatcatcacaactgaacttttacaagacactgtccaataccagttgcaacttctgcagttagggcattttatgtacccatcaattgaagaaaatcacttttaggataatttatatggcaataaattgtctcaactgcagtgtaattggaaagtcccatatattatggcactgcaaatctaaaggaaagttattgcaccataattgttacaagtaaacctacaaaatctgtgagatgcagcacgtttttaacgccacatccacacatctcgaactacaacatttgatttttcaatgttgctttatctttggtatttggaaagggaagacaatacaactcaacccatgacaatagttcccattctgtaactgcattttaaatcatcaatggtcaagtctcctcctcccaaatcgattctgacaaataggatgtatggactctacactccaaaagcaacacctggaatgatcagagaaacaactagagaactttaaggccgcaggcagctttgttcccagtttggagaggttttcacatgtaaatgtcctcgtagaagggagccgaggattaactacctcgggagggggtgcgagggtagggaactggaggacaacgccagctttctagcggactaaggcggagcgaatactcttctctcccattcaactttttaggcgtcacgttggggccatagagcctataagagggttatgttcacgactttaaattataacgagccaccccctctccgtttattagccctatttcccaagtgcgtgaatcccggagaagggggatgaacaccctcttcaactcctcccagacccgggatcagagtccagccgtcgacgcgccgcggcctgagcaacaggagagctgaagccacctctccgccagccccacgaccggcagatgctcccgctcccccgcccccaaccccacacgcccgcccgcgcttctttcttagccctttgcgggctcccggcactgcgaacccgacaacggggctcgcggagcagagagcgagggcgcccagacccgaaaaagggccaagttagaggaacaggcacagacttgggctatgggaggccgcaagggggcgaggggagaagcccgaggtcgcggtccgggggtgggcagtggggggaggggtgcggggtcagttcccgtggtcgccgcgacctctcccgggccacaggccccgctccgcgcaggccccgccgccccggaaccggggcaggaagcgtccccacccggaccaaagctttaaacctccggcggcgggagaaacgagccccggctcccgcagcaggcccggcacccccctgccccaaacaccccttacctcctggttgaaggcgttgacggcgtccatgttcgcgctgcggcggcggctgctccgggcccgccggtcacatagacctcgcgccgcggcggagcggggctgggaaaccagccgggcctggtggccggggggaggcgacgagcggcggagtccgaggcccgggcaggaagaggctgcgcccgaagcggcgaggcgggcggccgaggcagaggcggagaggtggcgggccccctctcagtcccgttcgcaggatgaggaaaaggaggcggcggcagcgctggtcttcaacatgtccgtttggtggtggcggctgcgctctgcgtctcgctgacacggccccccgcgccctcacgcactggctcacactggcccggccggcgagcgggcgggcctctctctccctctctccagcgggatggcggcagcggcccgagtccacgccgcgcggggcaccctgggacggctcaggcctcccggcgcttcctgtgcccggcgttcgccccgccccgtcgcgctggccccgccccctccccgcctcgtcccgccctgcgccgccctgcaccgccccgcgtgcagggctgctggcgcgtgacgccgggacgctgggcgctttcccgccggcggcggcggcggccgcggccgcgggccggggagacggccttgcagagcgcgggatcccagggctgcgagggtgacccagagcaagccctggcgcacgcgcgctccgctcgacgcggtgctcccggggtgcgtctctgcgaaacgctcggccctaaccggccctgcacccggcgggggcggcgggcactgagccgctggctctcggctgccgcgaacaaagggcgcaggatttaacctcggctctctgggcgtgcctttgcaggccctcgtgcgctctgctggggaaaagaaaaaaagcttctgccaatgccagtgcagctgtgtgtccgctgtagttgtgcaggttaattctgcgcgagcgaaaacaccgagaaagacgttcaggcactggatatccacgcaggccttaaggaacccctgtgcagccttgtgccacgagaggagtggattcactaactttcacgctgattcctcaaaccaagttgtttcatttttggccaaaactctttatgttgatcactttccttgagtacctactgtctgcctagtgttggagacatggaaataaacgataattgttttgcctgaaaacagcacagtttagtggagaggacagacaactgagcagatacttaccaaagcatgcttagtgttagggcacaggccctgggaaacgagaaagatgcgcctccgacaggaagtccaggctacatctggagggaggagaggcctgcagagcctgatgaggactgccaccatcacctcccccgaaggaggaccagctggagctgaggagcaaggtggactgagagaggagagtgagaccataaagaggctttgctcttccagagtttggattttgcccccataaggcagaggggagcccttgaaaggggaaggtggagtgatggatgcagtgttctctcagaaggatggtgcaaagtagtaagaggagacagggaaagaatgaccccagccccctgggaaaatgagggctgaaggtggtggcgatagagaaggaagaacagatgtttaggaagtggagtggaagggctgaggcagagtaactgtgaggttaataaagggggtgtcaaggaggatgcccacagcctgacttgatgaatgacctgggtggtgggtttatgagtcaacgtaggggatttatggggaagaaggcgtgggtttgagggaagacagaatgatggttaacacttgtcgcttaccatgtgccaacgtctgctgacatgctattctgtactctccgtaacaggcttctgggtgaggtgtccattagtaatgccctcattttataattcagggagtgagttaattaatgtgcccaaggtcacacagctggatcatttccctttggtgcctgtggagtttgagctgcgcctgggacaagtaagtgaggatgtctaggaggcagttgggtaaacacttgcagagtcaggagcgatggctgagatgatagaaatctgggagtcattagtgcacagctagtggtggaaggagctgaaatagatagggggaaaaagcccaggaacacgggtatgtaagggataagttggaggcaagaagaggtgaagagagagctctgaagtgatcagctctgtctggtgcttggagtagaagtccagcaagataagaattggaaagtgcctgacgggtgctacatgcagggagcttgtcctgcgtgtaggctggcgtggtgagggcaaaagctagactgatgtgtatcaaagaggggaaggcaggcaggagaaagtttatagaaacttggctgtgaaggcaagttgtgaagacaacagaaaaaacctgcaggaggaagtgaga

SEQ ID NO: 1562511 - DNA, 4001 bp, Homo sapiens
gtggcatgtacctgtagtcccaggtacttgggaggctgaggcaggagggaggctaagggaggagatcacttgagcctgggagatcaagccatgatcacgccactgcattccaatctgggtaacagaatgtaccttgtctccaaaaaaaaaaaaaaaagaaagattctctttgaacactgtgtgcctttgagaaaagctatgtgttaggccgagcatgctggctcacgcctgtagtcccagctacttgggaggctgaggcaggagaatcgcttgaaccggggaagcagaggttgcagtgagccaagatgacaccactgcactccagcctgggtgacagagcgagaatccgtctcagaaaaaagaaagaaagaaagaaaagctacgtatgaacaaacaagcaatcacaaaaggatttcttttttcattactggtactaaaagaaaaaccatacctcctcttgattcagaacttccgcagagttttcgtcttctgatccggcttgttctcccttttcctttctgcatgctaaaactgtagtttcttttttctgaaatacagttctattttttcaaaaaggacaaaactgtaatttctgtggaaatgctcaatctaaaataaaaaacatttctttgatttactttccagttatatgataatcactgttctttgtacctttaagtatacaaatgtatgttttggtaaactgtttctctcaagtgcttttgtacatgaaacgtttatactgtgagctaaatcatgatccctacagtaacagaattcccattatatcagtccctctaaaacagttttatcttgcagacctagtgactacagcttaatctactaaaaatacaaaaaatagctaggcgtggtggcacacgcctgtaatcccagctacttgggaggctgaggcaggagaatcgcttgaacctgggaggcggaggttgcagtgagccgagatcgcgctactgcactccagcctgggcgacagagcgaggctccgtctcaaaaaaataaaaaaataaatacataaataaaaataaaataatggctgggtacagtggctcacgcctgtaaaaccagcactttgggagcccgaggcgggctgaggtcaggagttcaagaccagcctggccaacatggtgaaaccccgtctctactaaaaatacaaaaatcagccgggcgtggtggcaggcacctgtaataccagctactggggaggctgaggcaggagaatcgcttgatctcaggaggcggaagctgcagctagacgagatcacgccactgcactccaacctgggcgacagagcgagactctgtcacaaaaaataaattaaaaaaataaaaataaaaaataaatctacttctaaaacatacgagggcagaaatgagcaagagacaagaactccaggcaatattaataccgcacttccgcagtataaggttcattatttgacctaacgaaagtcggcatgtccagctccagaggcgaacggcggctggttcggtgcgggtcccagcgctcagtccacagaccgcgccgggaagtgtccccaagactcccgggccctcgcgcgagctgtccaccatcaccctgctgaggaccacgtgaagcccggtgaccgccacagacacaggcaccgtccccgcccccatagtcctcaaactctagccgtgaggccgtcctacggtccgacacacaccgctcccgcagccataggccagccaggcgagcatcggacctcgggcctcaggctcctcagctttacgcagcgcgccggagcaacatgcgctaagtgtaggactccacaagatgagaggttactgcagcgcacacgataatgcctgccctggaggggacctgcgacctaaactcagttctttttacgctgatgaatgaaagactaaggaacgcaccccgccgactctgctcccgttacccgggcaactggaggcccgacccggaagtcctactagctcacctaggcgccggcggccgcttccaagatggaggctgcagtgggcgggcccaaggcacgtggaaataccaaacagccccagatgaaggcaagttaaaggaaccggccaaaactgcagagggagaggctgaaggctgtcgcgcctgcctggtgtccttaagcaatccaagtcctcagtctcccgggtccgccccttccgccgcgggcggcagcttccggctcgcgcatgcgcagtgttcgcggactcgccgccaacgcccagtacagtcggggacgaggtcggcacacccacagccccataacccctacgtcgagtcaggggtcagaaaacccagtaacccgcaggcgagcaagctgcgcactgaaaagccggcctgcggagtctttccttacgaagttaaaccacctagggcgcgcggccctgttcgcccagacctcgggctttcctgccaggctgggtttgccgggtcgagtcactttgctcgccaatccccgcccccattccaccgtttcattctggccccaggacccgcctcacaggaaaattctaaataatatatctaaataccccttcttccaatagcgggagctcgatttctgccccacccacccccactttgattatgggctatgcctagtaacttgattccaaagagtacagcctggaatggtgttggggactacagtggagaaacctggcaaacagtaccttaccgggtggtcaaggataacatcaggaagaaatcatgctgatagcatgttcctgtggtgtctctctccaaaacccttctatggaaatcttctatgggggaaaaaaaattagtactcctaaacatgttttctgtcatgaaaaacaagtacagttgtcccttagtgtccgtgggggaatggttccaggaccctgcggataccagaattagaatgctcaagtcccttgtatacaatggtgtaaacctaagtaacaaaagaggctccctaaaagaaaatgagatttatctgggagtagcattgcaatgggaatatgcatgccatagtaaactgtgtgcgttttgggggaggttgaggcaaggagatgtttttaaaaggaaaatgaagattatatgaattgctttaaatcaattatctttggctaaaagaatgaataacaaaggtagcatcagtccaaagttgctggacagatgtccttgcagaaggattttctgtgtttaagattgggcctttctgcaaggttagggtcttttgtgacaattcttgttatgaggcgtagtgcatgagaacccttccttcaaggccttccccagctgcatttatcagggttttgacacaagtgactccattttgattctgcaactttcacaatggtgtaatatttgcatataacctatgcacatcctcccatatactttaaatcatctctagattacttataacatctaatacaatgtaaatactatgtaaatagtgaaggggtggcctgccgctccacacctgtgggtgtttctcatcgggtgggatgagagactgagaaaaaaaagagacacagaggcaaagtatagagaaagaaaagtgggcccagtggaccggcgctcagcatacggagcacaaatcctatttaaactacagattctaaacacaaatgattttattcacccctgccccccaacactaaaagatttaaacactaacatagtttctaacagctgtaaactaaacaaatcctaagcccctactgactgaatggaaccccttttggccaagatggccccagaaaaaaacttagaaacttagttcccagccctgatggaatgtgaggtcagacatgcctcattataccctctctcttttacagtttagatacaactggccagcattgatgttaaaatagagaccatgagactgatggaacagactttttgtggcaataagatacaaaaattataaacaagacctaaggccattccaggaaagagttaagtcacttcaagaataaattctgttctaatggttacaagttttttcttt

SEQ ID NO: 1562512 - DNA, 4001 bp, Homo sapiens
ctcttgattcagaacttccgcagagttttcgtcttctgatccggcttgttctcccttttcctttctgcatgctaaaactgtagtttcttttttctgaaatacagttctattttttcaaaaaggacaaaactgtaatttctgtggaaatgctcaatctaaaataaaaaacatttctttgatttactttccagttatatgataatcactgttctttgtacctttaagtatacaaatgtatgttttggtaaactgtttctctcaagtgcttttgtacatgaaacgtttatactgtgagctaaatcatgatccctacagtaacagaattcccattatatcagtccctctaaaacagttttatcttgcagacctagtgactacagcttaatctactaaaaatacaaaaaatagctaggcgtggtggcacacgcctgtaatcccagctacttgggaggctgaggcaggagaatcgcttgaacctgggaggcggaggttgcagtgagccgagatcgcgctactgcactccagcctgggcgacagagcgaggctccgtctcaaaaaaataaaaaaataaatacataaataaaaataaaataatggctgggtacagtggctcacgcctgtaaaaccagcactttgggagcccgaggcgggctgaggtcaggagttcaagaccagcctggccaacatggtgaaaccccgtctctactaaaaatacaaaaatcagccgggcgtggtggcaggcacctgtaataccagctactggggaggctgaggcaggagaatcgcttgatctcaggaggcggaagctgcagctagacgagatcacgccactgcactccaacctgggcgacagagcgagactctgtcacaaaaaataaattaaaaaaataaaaataaaaaataaatctacttctaaaacatacgagggcagaaatgagcaagagacaagaactccaggcaatattaataccgcacttccgcagtataaggttcattatttgacctaacgaaagtcggcatgtccagctccagaggcgaacggcggctggttcggtgcgggtcccagcgctcagtccacagaccgcgccgggaagtgtccccaagactcccgggccctcgcgcgagctgtccaccatcaccctgctgaggaccacgtgaagcccggtgaccgccacagacacaggcaccgtccccgcccccatagtcctcaaactctagccgtgaggccgtcctacggtccgacacacaccgctcccgcagccataggccagccaggcgagcatcggacctcgggcctcaggctcctcagctttacgcagcgcgccggagcaacatgcgctaagtgtaggactccacaagatgagaggttactgcagcgcacacgataatgcctgccctggaggggacctgcgacctaaactcagttctttttacgctgatgaatgaaagactaaggaacgcaccccgccgactctgctcccgttacccgggcaactggaggcccgacccggaagtcctactagctcacctaggcgccggcggccgcttccaagatggaggctgcagtgggcgggcccaaggcacgtggaaataccaaacagccccagatgaaggcaagttaaaggaaccggccaaaactgcagagggagaggctgaaggctgtcgcgcctgcctggtgtccttaagcaatccaagtcctcagtctcccgggtccgccccttccgccgcgggcggcagcttccggctcgcgcatgcgcagtgttcgcggactcgccgccaacgcccagtacagtcggggacgaggtcggcacacccacagccccataacccctacgtcgagtcaggggtcagaaaacccagtaacccgcaggcgagcaagctgcgcactgaaaagccggcctgcggagtctttccttacgaagttaaaccacctagggcgcgcggccctgttcgcccagacctcgggctttcctgccaggctgggtttgccgggtcgagtcactttgctcgccaatccccgcccccattccaccgtttcattctggccccaggacccgcctcacaggaaaattctaaataatatatctaaataccccttcttccaatagcgggagctcgatttctgccccacccacccccactttgattatgggctatgcctagtaacttgattccaaagagtacagcctggaatggtgttggggactacagtggagaaacctggcaaacagtaccttaccgggtggtcaaggataacatcaggaagaaatcatgctgatagcatgttcctgtggtgtctctctccaaaacccttctatggaaatcttctatgggggaaaaaaaattagtactcctaaacatgttttctgtcatgaaaaacaagtacagttgtcccttagtgtccgtgggggaatggttccaggaccctgcggataccagaattagaatgctcaagtcccttgtatacaatggtgtaaacctaagtaacaaaagaggctccctaaaagaaaatgagatttatctgggagtagcattgcaatgggaatatgcatgccatagtaaactgtgtgcgttttgggggaggttgaggcaaggagatgtttttaaaaggaaaatgaagattatatgaattgctttaaatcaattatctttggctaaaagaatgaataacaaaggtagcatcagtccaaagttgctggacagatgtccttgcagaaggattttctgtgtttaagattgggcctttctgcaaggttagggtcttttgtgacaattcttgttatgaggcgtagtgcatgagaacccttccttcaaggccttccccagctgcatttatcagggttttgacacaagtgactccattttgattctgcaactttcacaatggtgtaatatttgcatataacctatgcacatcctcccatatactttaaatcatctctagattacttataacatctaatacaatgtaaatactatgtaaatagtgaaggggtggcctgccgctccacacctgtgggtgtttctcatcgggtgggatgagagactgagaaaaaaaagagacacagaggcaaagtatagagaaagaaaagtgggcccagtggaccggcgctcagcatacggagcacaaatcctatttaaactacagattctaaacacaaatgattttattcacccctgccccccaacactaaaagatttaaacactaacatagtttctaacagctgtaaactaaacaaatcctaagcccctactgactgaatggaaccccttttggccaagatggccccagaaaaaaacttagaaacttagttcccagccctgatggaatgtgaggtcagacatgcctcattataccctctctcttttacagtttagatacaactggccagcattgatgttaaaatagagaccatgagactgatggaacagactttttgtggcaataagatacaaaaattataaacaagacctaaggccattccaggaaagagttaagtcacttcaagaataaattctgttctaatggttacaagttttttctttttctctagcagctaaacaagcactcacctccacctaagcaatattaaaacaattaccgcttgtgcaccaccagatgttaactaaccccctgttccacaatgacagagcatcaccatcttggacaaccccctcattctaaagtgcaccttaataaaaaaccgcctaggccaggtgcggtggctcacgcctgtaatcccagcactttgggaggccgaggtgggcagatcacgaggtcaggagatcgagaccatcctggctaattcggtgaaaccccatctctactaaaaatacaaaaaattacccgggcatggtggtaagcgcctgtagtcccagctacttgagaggctgaggcaggagaatggcatgaacccaggaggaggagcttgcagtgagctgaggtagcgctactgcactccatcctgggcgacagagcaagactctggctaaaacaaaa

SEQ ID NO: 1562513 - DNA, 4001 bp, Homo sapiens
catccctaggaacctaggaacctaatatagagaaataaaggctatgctttttatgtggcatgatggagatggccccagaatagtgaaaggccatggctcttctccttccattgtgtacacagaaaagaacaccccttcgaaagcaaaagcaaaggccaggcacggtggcttatgcctgaaatcccaacattttgggaggccgaggcgggcagatcacttgaggtcaggagttcaaggccagcctagccaacatcgcaaaaccccatctctactaaaaatacaaaaagaattagccgggtgttgtgactcacacctgtaatcccagctactcaggaggctgatgcaggagaatcacctgaacccaggaagcggaggttgtggtgagctgggatggcgccactgcattccagcctgagcgatagagtgatacgtctcaaaaaaaaaaaaaaaaaaaagcaaaagcgaaagcaaagaaagattcaagggcagatttgcagtgacttatcatgtctacagactgggaaaagctggtagaaaagaggaggaaaccattctcaggaaactctacctttcaattcctccagtcatgagctccagggttggatgctcccgcaatggcaaaactccgctctcgttactgtcatggggccaccaccacccaccaagcatcagcccatctttccataatgtcaagtctagagtgacatttgtctaatgtttgcctacctggagatgttgccccgcccaccaccaccagcaaaaacaaccggcacccatcttatacggataattccctacctaaggagttctagaaatgcatggcccaccaaaactcagggtgggtcatgcatttctagaggaagaaatggtgatatggagagaaagcttgtcctaacccacttctaccaaagtaggattaaagtcaatttgaaaaaaaacacccgtttctccttttatataaaaaccaaatgcagaaactatagagaaatgtaataagcttgactctacacaaataccaaaatacactgtaaacaaaattaaaggtaactgacaaattgaggaaatatttgcaacgtatatcacaagccaagttttcaagcatcaaaagtccttacaaaacccatttttacaaagatgaatgtcaagttttaaaatggacaaaagacaggaaaatgcaaatcacacaataaggacaaatggcactcaagatatgggaaaaagtctattcttcctactaaaaaggaagtgaatacaattaaagatgccaatttttgacaataaaatgggcaaaaaaattttaagaaaaaagagaatttccaatgcgggccaagtatcgggacacttactggaaggcagtttccctctacctttagaaagcctcaaagtgagcatatgctttggccctgcaacctcgcttgtaggaatttatcctaaggaaacagtcaggggtgacctcaaagattcatctgcaaggatattcaacatggctttgatgcaggaaaaaaagtaaataaataaaaggaaacaatgtaagtcttcctaaattatgccaaattcctatgctgtcattaaaaaacatctataactccatcatctaggtgattttgacttttgctttggacttgcctgtacatttctaaattctctatgccaaacatgcattgttttgtcatcagattttgttttacaaaaaaaaaaaaaaaatcgtctttatgacaaggggttaataggggaactgtgcttcccaggaattgaccaggcgtctacacccacctactgactcaagttacctaagactgacagagccttaagaggtcaggagagcgccagagcgcgtgacaggctccctcgtctcggtgcggccacgcgggaaggcagggtcccgggcgccgaacagggacggcaggaggatcgtttacagacgtctacacaagaaactcacttcccgtcaccgaagacaaacgcgaggccacactgacctccaggcccaagacgcccctccccgccgcggctcctgctgcccgagtgcgcatgcgcgcgcccagcccccgcaggccggcgcttcccaggaggccccgcgcgcgggtttccatggggacgcgccggcgctgcggcgttggcgcagtcgtgggaacagcgcggagcaggtaacggccccgctgctgccgtcgtccccctcagccggttaccctgttacagccccagctctgggcccttccggaccctcctgctacgctctttctgggcttccagtatcgccggtcactcagtcctcgcccctgcctgcctcgctggcgccccgccgtttcctcctcgcggcacagtttgccaaggaacagctaccccggctcggcagtgaccgggcgccccggcgacacacgtactctcaggcccgctgggcagggggacggcctgggccgaggtgacctagcgctcccggggccgcgcctgggtctggcgagggggcggaggccgatctcaccgccgccccaccgagggaactttggggtttttctatctgaatcttctatctgacctccgattttgcctctgcttacttgctgttttgctttggattagtttttctttctaaccttagcgctggcatctccctatctcgtaggaatctaaatcttttgaaatgtcttctctgtctgtgtttgtcccccactcacccagcctcggggctctttatccacaccctcccctcagcgtgttaacgtttcgttgccacacttaagccaacggttaacttttttcagagaccagttttcacggctgaatgtgagcttgagccttttttctgtctacactcaatccctagatgaactcatccagtcgcctgtactcagagcctatctgaattccagtgagccccaagtgtgcattcccagccctcgcccctcccctgaacaccagatccctgcatttagctgcctgccacatccctacttggatgtctacggcatctcaaacacagctcgtccaagatagcgctcaataattccccaagccaagcctgtcctcccacaatcttaatccatcatagttgctggaaattccatcctccagttgcccgagtcttgcatcctgtttgagtcctgtttttctcttcctcaccttcagtctgtcagcactgccttcaaaatgcacccagaatagattcacaattctaccatttctctcaaccgccactgtcaccaccttggtccaggcccccatcatctggtgcgtggattattttacttgcttcctaattggtttccctgagtctgcccctcccccacttgagcatgacagtcttaatggtatttccccgttctctgttatttcgtatgagtaagttttttaaaggattatataaattacaatttccttatataaattacaacttccataggtaaaagtgcagtattttcagtatgtattttgcaaattgcaacttttaaaccgggtcagcaaggccatataagcatcctgctaacaagctaaaaatgtaaagacaccccttagctttgttaggtataaatatgacagtgcccctggaacagaactatggcaagagctttacaagggactgtcctgaagaacaaaagaacccagagccttcttcccagcgcaaagacaggaatcatgtaggagtttaagctcttccttttttattttttagagaagcaccaaaagaggcaaactgagatgcagacaaatgatcatccgtatgctgatcattttgaatagtaagtacctgggtgctgataccgcgatcaatgtgacaggtccctgccctcaaggagctaaggcccctagccaatctctctttttttgttgttttttttttttttaagacagagccttactctgtcggccaggctggagtgcagtggcaagatctcggctcactgcaacctccatctctgggctcaagcaattctcctgcctcggcctgagtagctgggattacaggtgtacgccaccatgcccagctaatttttgtattttta

SEQ ID NO: 1562514 - DNA, 4001 bp, Homo sapiens
cttgacaccatgcggggcacccacgcacatcatttcatcagtcctcatgacaacactatgatgtaggcactattcttatcctcattttacagacaaggaaattgaggcttaacaaggtgaaataactttcccaaggtcatacagttacaagtggcactgaaacatttgcttagggaaccaaaactaatggcttttccaagaccctgggatgaacattgcctctccaggtcatccaaagctaactaaattatgggcccaaacttcaagaacacaggacatcaaataaaccttaaaaatccattaacttattgattgtcttctgaagaatatgtagaccaggtctacagaatatatagaggactggctggtaagaggtaaagtttttagcaatgagcatcaacaacgtatttagagcccaccaaaaccattttcccccccaaaaaaatttttttatccaatagccaaaaaatttactccttctagatcaactgaaagtttcagcagtcatcaatagccacaaaagatttcgcagagtttcacatttggagtgtgttctcatctttttcggctaatttgttctagagatcactaaaacaatagctgctcagttgtacttagcaaaagggacagccaagctattttctcttgctttcttctcaccctctctggaaacctcatgaactttcggggctgggagtggtggcactcagcggctgcctttggggctgtcaccccagccaatggcttactctgggtactgtttctggcagagtggctgctgaaatcccagccgaaacctgagatcctccagaaactagatataaaaggaacagccgccttgctggtctctaactcttgggtttaataaaactgttttttctctccacagccttcctaactgctgctaaaatgctggtcgaaatatcagttccagacagacagacactatataggttcaagcctaaaatcaaagtctgacccatttccaaagagaaatgtgtcacttcatcacccctatttcttacggcaggtccagcttgcacagaatgaaggccagaattgaagaggtagatggtctcaagaaaattagacaaagcactggttatgaaggtcggctttcagctcttattttggggccgtctgaatgcctggagtgtttataactgtggcctgagagatgtctgctctggtcactgtgacatcactttcctcaaacaatggattacacatgctaactttacactttcagtatggttacatcattacatggcatatacaagtgattacaccccagagtcattttagcaatctggttcatcatccgctccaaacagtgttacacaaagtatcatttatttacaattttaaattagtttaagccttgcagaatgaatggcagaaacacatacaaaaaagtccctgcttctatgatattcacaaggcaacacaacacaaatcacatgttaaaaattctagtgtcaagcacgcctccttactcgaatcccttttcacacccagccatccagattacaccctttccatgctttttcaacactatgaaatcaaatgcagaaagcaaagggcgcacatacttattgcagagccacagctgactacacgcaaaaaagaaactgaaggccaacgttggccatatttccaaccctaagttattcagaaaagagtataggaagaaagagtccaccagacacctaccgctatggacccagaagatgtagcaacaaacactttgataaccatttcgacagttggaaagaggactccccccaacacacccctgtcagggaatgcgccgctagacaaatcctgacagtgacacaggcaagcaagtgccaggtcggggctggcagcagcccaggggtccactgggctccggcagtcccgctccaacttaagaggctctgtctctccaaggagcagcagaggcatcttgggctcctccctccattggcccaggaatattttgggatctgtcaggaaaatatttgattggtcgataaaagcagccactggaccctttccctatcactttaaacgcgcgacaacagtccctaaaaggccaggctgtgctgtgcaccaatcggagacctgtgcagagatgccttggggccaagggaggtggggccccggtaacagagcagcaggaggcgaaagaagtgagggaggagctcttgggagctggaaaagcccagaaaacaccacctcagtctaggaggaggctgggtttaaagggcttttggcaaacaaataaactggaagggtcagaatagccacagaggcctttaagtaaagagcaactttgttttttttcctggcaggttaaaaaaaattttttaagtaaactgtcatacaatagaaatgcctttaagagtggctgtttccagtgtgctctctttcccacctgtttctcctaaagaacagaaactgaccagccatgggccatctaaagtttcactgacatccagggaggtagggaaatagccgctggcttctcaatactcatggctgcaacaagccaattgtctcactattttatttacttgtcactgacttgaagtttattaactattttaaagtgcttggggaaaaaaccaaaataatctgtttataacaggctctttgtttacataggtattttgtgtttatttatatatatttgtgtttatacatgttaatatttatataggtattttgaattgtgttaaaagttagagaaggtccggggcagtgtctcacacctgtaatcccaacaccttgggaggtcaaggcaggaggattgtgtgagcccagaagttcaagaccagtctgggtaacatactgaggtacgactttaccaacaacaataacacaaaaaaaaacagccaggcatgttggcaggcgcctgtatctgtatttccagcgacttggaaggctgaggtggaaggatcccttgagccctttagccaggagtttgaggctgcagtgagctatgatcacacccacggcactccagcctgggtgacagaacaagaccttatctctaaaacaaaaccaaatcaaacaaacaaacaaattaaattaaaggaatacaaaatctagcaaagaagcccaaatgccagttatgcaaattcttctgatagatttcaaaatcaagatcaagggcattagggacaaagggctagtttttcaagaagcacttgggggatatttagcttagataactgagtctcttactgtctctctctctctctgttctccggctccctttttaaaatcccctgctgcccatcatggattgggtggcaccgacgttccgaagcagagaggaatctcccaggcttctgtactccctcttcacctgagtcccagagccccagaggcatgtttcccaccccctcaggtaggtgcctgcaacgagaaaagacatcccagtccccggaatatcccagttcctggaatatcgcttaaatgcccctacatcacaatgaatgattgaggtgactaccaacatttaacttttggcttcaacatgcaaagttagctgctccaaaaataaggtccttgatgaagatgattaatggttccccaaatttaagtcagtagaattataaattttattttaaagcacaccaaggattacagatcagtttttcttttctgcattttcaaaatttctacagtacgtattattttttcatacaattatatattttcacaccttaaagtctgccacataagcatgccatatttctccaaatattacttgaagaaagtgggggcatattttctaatgactttgtaagttagtagcataaactatagctggattctcaggtgctctagagaatacgcatctcttgattatatcaggtgaaaactgccctcaataatgacacctcctccatctgcaaaccctggggagaaattaatttcctactcaaataacagctaacaatttgtaggtgttgtccatgtgccagatctgctctaggtgctttgcataa

SEQ ID NO: 1562515 - DNA, 4001 bp, Homo sapiens
aatttacaacagacttctacacatttaaaactggatcaggttaggatactaaataaaattctaatgaagcaaatctcaattatgatccaaaagcaataaaataattgtaaatatatctgcacagcctataaaaatcaatctatttaccttatacaaccaaatgcccaacttccacacactccccaaaagggaagccaccttcagaaattgcagacttatgctgttggaaataaaatataacacatttgccaggattagcagagaaaggcaagctgaccccttacctggtaaagctttatgatgtgtggatggttcagaagcttcatcagctgaacctcacgatagattttctccaaattgcttgaatctaatcgtgttttatcaattatttttattgcaacctacaaatttaaaaagaaaaaggatattctgtgggtttttttaaaaaaagaaaagaaaccctcaacctaatttacacatttcattttttgcaagttaatttctcaacactctgtctccagaaggtcacaagaagttgggaaaacataaccaaagtaaccactaatgttatttaaaataatcagagttaagtaagtgacttaagtatttgcaggctcactttacagggtttagctctgagtccatgaaccactgcaatcttaggttggtccttttttttgctattatcctctctgctttctcccaatatatgtccaaattatgcagcaacataatataaagcattatttttctttaccgaactaaaaacggttactatttacccaccacgacaatcaagcctggagcagtgaatctgcatggggtccacccgccaaaggtcgggtcgccccgggtccagtggggaggccccgccggctgggtcccaccgcccccacgcacctgcgttttggtgactcgatgccgcgccagcttcaccaccgcgaagttgcctttgcccagggtccgctcgatgtcgtaaaaacccacccggaggggcttctgctggccctgaccctggcccgcggggtccgcgctgaactccgacatgataaccatggctccgcgcgcacctgcggggccgcacagagctcagagcccaccagcgcccccgccgcccgcggtcggctccatccgtgcccgcggagcccccagtccccacgggacgcagggacctgctcccacgcctgtcgcccccactctatccacgggcccctccagccccgtgggaggtgtggacccgcccccgccgcccgctccacccggacccccgaccctcttgagccccgcggggcgcacggacccgctctcatagaggcccctgccgcccgagtccggttccgtcccgatcccgggaccccctgagccgggattccacactcgcctcccgccgcccgctgtcggttccgtccccaccctcgacccctttagcacctctgggcgcggacccgctcccacacctggccctgccacccgaggtcggctcgatccggatcccaggaccgtcccctgccccgctcccacaccctgcccccgccgcccgcgatccgtccggtccccacccccgacatcccaggcacctcggggatcgcggacccgccccccacacccggtatctccgcccgcggtcggctccaacctgacccccggctccccagcccctgagccccgcggactcactcctaccccggccccccaacaaaggggagcccgagggcggccaggccgccaaccccgcccgcgaaccccgcgcgcgcaaggccagggaccctgcgcggtggctgcaaccccgagccccggcccggcgcccgcgcggagcccccacggcggccacctccgcccgcccggagcccgccgctgccgccgctgccgccgctgccgccgcctcacctccgccgccaccggagcgcccaggccaggaagccgcccgctcggccgctggcgctgctcgggtgcctactgctccggctgccgccgccgctgctgctgcctccggggccgcgccgcatgtcagcccggagccgccgcgctccgccgcacgcggcgcccggccccgccccggcccgccccggcccgccccccgtagtccccgccccctgccccgcccccgccgcccgggcgggggccgcccattgacgtcgctttgacgccagagcgacgcgcggccgagcgccgggcggagggagagcgggagatcgggcggttgccaagagactggcggctctgacgcgcgcgggatgaggccgttgccctggcgaccgcgggccggtgacgtcaggggcgcccgccgcccgaggcccgcccgcctgcgctccgccgggcgccccctcccgggcgctgggggcactgcgggcggccccaccgccgagggcgcgcccgcccctccacgctcgggcactcgggccgggtcccgcgggcgccttgtgctcgctccctccaggaggggacggctctcgggcaggggtcgccggcccctccacgcggcctgcgttcgtccagactcagagcctcgggacgtgcgggggcccgggggcctcgcgggctcgcgcgtggggctggcggcgcggatgccctggggcgctgcagaccccgagaggccgcttgcccgcggggacgtcagccgcttttgctgttaaaatctgaaatgttcagcaagttagaaacttgaaacctaaggaagcgtgaccggccgctctggaagcccccgccgcgcggccggtcccggccccggccctcagcggcgctggcgtctgcgcgtcccggggctgcccccgcagcatgtggggctgggaccctcttcccgcgcgggccccgggcggacgctgcgggcggtgacggagccaggccggccgcctgggtaggggacgggggcgcgggaccacttgcttgcccgtggccgatgcctcatccgaacggaaaacgttttcttcaggggagacagaggctgtgggcgaaggtattttttaagcctgaggacccatttgggagttagattctggatcgagcctagggtcagttttccttgtgttaaataacactacttcacagaagggggaacgagaattcaggggagttggcacaaaacttggaacccttctcgggaggctttcctgcctggacggacgcctgggaggagggcccggagaaacgaggatgagcttctcctcattcgcccgagggtctgaccacagatttcccaatcgccacacacacacacacacacacacacacacacacacacacacgggttgtttgggagtcagttggttttcaaaggctttcaaggaaatgaagagtcccaaagttttccttaatcgttcagagtgtttttctttgtcccaggtttatataccaagaatacgggggaatatttttagttcctttcagctgaacagtgtacaactgccttttttccttttggaggtcccaacaccctgttaatccgctcctaggagaactaaacaaaaacaaggctggacgtcgtgtctcccgcctgtaatcccagtgctttgggaggctgaggcaggaggatcagttgagctcaggagtttgagaccggcttggttaacatagcaagacctcacctctataaaatacttttaaaatagccaggtgtggtggcacacgcctgtggggccggctacttgggagcctgaggtgggaggatggcgtgagcctgggaggttgaggctgcagtgagctgtcattgcaccactgcactccagcctgagcaagagaacaaggccctgtctcaaaaaagaacaaagataaaaggcggggtgggggagaaaccaggcccctgatcacactcaccattcagtccctcagcctgtgacttgaaatactgccccccgcatccaggaagcaggcttccccacccctcccaccctagccagagtcttccaaaaggtcttaggtatttgcaaacacctggctggctgtttggaaacattgcatcagcaccaaataaaaactgcagccaaaactgcctccgcagaacaggt

SEQ ID NO: 1562516 - DNA, 4001 bp, Homo sapiens
aaatttacaacagacttctacacatttaaaactggatcaggttaggatactaaataaaattctaatgaagcaaatctcaattatgatccaaaagcaataaaataattgtaaatatatctgcacagcctataaaaatcaatctatttaccttatacaaccaaatgcccaacttccacacactccccaaaagggaagccaccttcagaaattgcagacttatgctgttggaaataaaatataacacatttgccaggattagcagagaaaggcaagctgaccccttacctggtaaagctttatgatgtgtggatggttcagaagcttcatcagctgaacctcacgatagattttctccaaattgcttgaatctaatcgtgttttatcaattatttttattgcaacctacaaatttaaaaagaaaaaggatattctgtgggtttttttaaaaaaagaaaagaaaccctcaacctaatttacacatttcattttttgcaagttaatttctcaacactctgtctccagaaggtcacaagaagttgggaaaacataaccaaagtaaccactaatgttatttaaaataatcagagttaagtaagtgacttaagtatttgcaggctcactttacagggtttagctctgagtccatgaaccactgcaatcttaggttggtccttttttttgctattatcctctctgctttctcccaatatatgtccaaattatgcagcaacataatataaagcattatttttctttaccgaactaaaaacggttactatttacccaccacgacaatcaagcctggagcagtgaatctgcatggggtccacccgccaaaggtcgggtcgccccgggtccagtggggaggccccgccggctgggtcccaccgcccccacgcacctgcgttttggtgactcgatgccgcgccagcttcaccaccgcgaagttgcctttgcccagggtccgctcgatgtcgtaaaaacccacccggaggggcttctgctggccctgaccctggcccgcggggtccgcgctgaactccgacatgataaccatggctccgcgcgcacctgcggggccgcacagagctcagagcccaccagcgcccccgccgcccgcggtcggctccatccgtgcccgcggagcccccagtccccacgggacgcagggacctgctcccacgcctgtcgcccccactctatccacgggcccctccagccccgtgggaggtgtggacccgcccccgccgcccgctccacccggacccccgaccctcttgagccccgcggggcgcacggacccgctctcatagaggcccctgccgcccgagtccggttccgtcccgatcccgggaccccctgagccgggattccacactcgcctcccgccgcccgctgtcggttccgtccccaccctcgacccctttagcacctctgggcgcggacccgctcccacacctggccctgccacccgaggtcggctcgatccggatcccaggaccgtcccctgccccgctcccacaccctgcccccgccgcccgcgatccgtccggtccccacccccgacatcccaggcacctcggggatcgcggacccgccccccacacccggtctctccgcccgcggtcggctccaacctgacccccggctccccagcccctgagccccgcggactcactcctaccccggccccccaacaaaggggagcccgagggcggccaggccgccaaccccgcccgcgaaccccgcgcgcgcaaggccagggaccctgcgcggtggctgcaaccccgagccccggcccggcgcccgcgcggagcccccacggcggccacctccgcccgcccggagcccgccgctgccgccgctgccgccgctgccgccgcctcacctccgccgccaccggagcgcccaggccaggaagccgcccgctcggccgctggcgctgctcgggtgcctactgctccggctgccgccgccgctgctgctgcctccggggccgcgccgcatgtcagcccggagccgccgcgctccgccgcacgcggcgcccggccccgccccggcccgccccggcccgccccccgtagtccccgccccctgccccgcccccgccgcccgggcgggggccgcccattgacgtcgctttgacgccagagcgacgcgcggccgagcgccgggcggagggagagcgggagatcgggcggttgccaagagactggcggctctgacgcgcgcgggatgaggccgttgccctggcgaccgcgggccggtgacgtcaggggcgcccgccgcccgaggcccgcccgcctgcgctccgccgggcgccccctcccgggcgctgggggcactgcgggcggccccaccgccgagggcgcgcccgcccctccacgctcgggcactcgggccgggtcccgcgggcgccttgtgctcgctccctccaggaggggacggctctcgggcaggggtcgccggcccctccacgcggcctgcgttcgtccagactcagagcctcgggacgtgcgggggcccgggggcctcgcgggctcgcgcgtggggctggcggcgcggatgccctggggcgctgcagaccccgagaggccgcttgcccgcggggacgtcagccgcttttgctgttaaaatctgaaatgttcagcaagttagaaacttgaaacctaaggaagcgtgaccggccgctctggaagcccccgccgcgcggccggtcccggccccggccctcagcggcgctggcgtctgcgcgtcccggggctgcccccgcagcatgtggggctgggaccctcttcccgcgcgggccccgggcggacgctgcgggcggtgacggagccaggccggccgcctgggtaggggacgggggcgcgggaccacttgcttgcccgtggccgatgcctcatccgaacggaaaacgttttcttcaggggagacagaggctgtgggcgaaggtattttttaagcctgaggacccatttgggagttagattctggatcgagcctagggtcagttttccttgtgttaaataacactacttcacagaagggggaacgagaattcagggaagttggcacaaaacttggaacccttctcgggaggctttcctgcctggacggacgcctgggaggagggcccggagaaacgaggatgagcttctcctcattcgcccgagggtctgaccacagatttcccaatcgacacacacacacacacacacacacacacacacatacacacacacgggttgtttgggagtcagttggttttcaaaggctttcaaggaaatgaagagtcccaaagttttccttaatcgttcagagtgtttttctttgtcccaggtttatataccaagaatacgggggaatatttttagttcctttcagctgaacagtgtacaactgccttttttccttttggaggtcccaacaccctgttaatccgctcctaggagaactaaacaaaaacaaggctggacgtcgtgtctcccgcctgtaatcccagtgctttgggaggctgaggcaggaggatcagttgagctcaggagtttgagaccggcttggttaacatagcaagacctcacctctataaaatacttttaaaatagccaggtgtggtggcacacgcctgtggggccggctacttgggagcctgaggtgggaggatggcgtgagcctgggaggttgaggctgcagtgagctgtcattgcaccactgcactccagcctgagcaagagaacaaggccctgtctcaaaaaagaacaaagataaaaggcggggtgggggagaaaccaggcccctgatcacactcaccattcagtccctcagcctgtgacttgaaatactgccccccgcatccaggaagcaggcttccccacccctcccaccctagccagagtcttccaaaaggtcttaggtatttgcaaacacctggctggctgtttggaaacattgcatcagcaccaaataaaaactgcagccaaaactgcctccgcagaaca

SEQ ID NO: 1562517 - DNA, 4001 bp, Homo sapiens
cccaccagaaccctgagcagcgcgcctcccagcaaagagtcaaatccttcgggccaggccgcagcgaccccgctgggagcagaggctctggaagacgcggcccggaacgcttgggacgccaaaaacgctcagacctgctgctcggaggtgcctggccgggcagccactgtcaccagcggcaaccggcgtgggcggcggggcagcccacccagcgcgccactatttcttcctgttccgagtcttccgcaccgcgggtcccagcgcccctggcccactggcacattttcaatcctgaaaagaacggcagcgctcagctctgtctgccattttcgaattaatcggacccctctctttcagccgggtctcagctcagcaacggcgggggcgggtctctcctgcccggacttcccgcaccccagcctcacgagagggcccggctcagcacaagtgttcgctctgtggcctcagcctgcagtgcttgggcctcaccgtgatccccgctgactcgcagcgcctgaagctgaccctccttcacctcctccagaagagacaaaaagagggaggaatgaaggaaaaataaagggaatcgtagaaagaaaaggaggaagggaaggagggataaagaaaggaagggatggggaaagaaagaaagcaaaaccagagtgaacttccaaagaaaggaaggaaagcagaaaaggaaagaaaacaaaccaatgcattggcaaaggaaggaaggaaggagggagggagagagggggccaaggaaggaaggaaggggagaatgaaagaaagaggaagaaagaaagaaaaagaaagagaaagaaagaaagaaaggaaagaaagagagaaaaaaatccaaaccaaaccagaatgcactggcgaaggaaggaaggaggaaagggagaaagaacaaaaccagaaagaactcgctggccgtgcgggctgggggactgcctgcccctggaacaattcgtaattcgccctcacccagccctggaccaggagagggtttggtcgcctgggccgccaaggccctggcccctcgccccaagccagcgccgaagccgaagaccctcacgcaacctccctcagacgccccagctctggacgccaggccgcggcaacccctctgggcgggctggcttgcgcttcccgcctgggccggggccgccgggctccccagcgtccccggccgcccacctgaggcctcaccttcggggaagacggcgcgcatcttcaggtagctcgtggtgaggcggatgatggacgctttgtccagctgcgaagtgatggccgacggcagcgggagcagcttggcaagctcgtaaaactcgccattttccttctccctcctggtcttggccgcattcttggacttctccttcatcgcgcctcggctccgggcatattagacccggccgtgctccaggcccgcggagccccgctcgggctgcggcggcggggatggggaagggggagccgggagccaggtgagtccgcggagtgggccgcgggcaggtgcggggggcctcccggggttccgagacgcctccccgcagccgccgggcctgagctccgagcaacccggcggcgccgcccgccgctgcccggagcgcagcctcctccgggctggaccgtcctgcagcaaccggagccccgttcctgctcgctcctgtttcctccctcctgcctctcctgcctcggccttcctggggggtgggggcggccggcgcggaggcggaggcgctgcttactccttcgtcgagtgctcgaaccggctgcggcaaggcccctccggaccggagggcgacaggggcggcggtggccgcggagccatggagcgggagcccagcggaggggagcgagtcgcaggcggctggggccgggccctggcccgggcgcgctctcctgcccttcctggcggctccctgtgcctggagacgcagcgccggagcccgcgatgtgtggctaggcgcagcacctccgctgtccacgtgcggccgagccgcgtttgtttatggcagacccgccttcgggcggagcactggccgcctgggtcccggaggggggagcgggaggggggagggaccgcggcgggggcgggggcggcgaatcttgcctccgaccccgccgcggccctggagtcacaggcgcgcctccgcgtcgctgcctccagggactctcccgggagagacccgcgcgctcccgggttcggggaagtcgcggtgagtgcacacggcgcgccgcggggacccgctcctgagcgccggtcgccggaccccggagctaggatgggcggcagggagggcgagggaaggaggggtgccgaggccgcccctgtggctctcgggaaggtcaccagcaggcgcggccgagaggaggcggcgcgactcgttggccaggcgccctgccggggaggatcgagccttccgagggtgcgctggtcccgcgtcctcgccctcccggtgttgcaggtccaagagctgaaaaggggaaagccgggagcccccctccccccattacacacacacgtgaaaacggcgcgagtggctccgaagtgacccttctgccctttctgtcctcgaaacactaaggtgcaaagagattgtcgccttctcaggaggagcgggaggccgcaggggcgctcaggccaggggaagggaggggccagggagcccagccgagtggtgaggcctctcccagggcgccggcggaaacagggcccaactgccggggcggcggcaaaagcagcccgattcagcgcagccggaattttgaggaatcggcgttgggcgattaagggccaaggtcgctgagccagggtcacagggtgggcgcaggtggcgcaggtggggcccatggtgatggggcagaaggcaattggagaaagaagactccgttgcagacgcggccactgggcattctggactctccttcagggtcattttggacctaaagagtccttttgtcccccctctgccctcccctgtccggctcccgcagcctggaaatgggtgtgcggcccaggagtcctccgcgcacccctgcagcggcggtcacataaccccacctcttccaggagtgcagctttcccggccccccaggccagagacaggctcagaggacgcagggcaattccttaccttggcgtcgagatcatgtggggactctcggccgtgtgccacaggctgcagagccgtggagcagtggggtgcgtgacctggaggtcagcaggggccgggaggacaccgggccgcggatgggggcgcggagatttgggttctcggtgtcactgctctcgccactggcccgggatcatgagcctgctgctccgaaaactcgccgtcggacagcgactgagtatccgcttccctcccctggccctcccctgcgccaggaaggcctggccttcggcaaccgtgcctgcagcaggcgctcctgaccttttccagggactcctttgaaggtcaaaagttcgaaggcgttcgaagccgagcaggctccctccaggggctggaaggtgtgcgcaaacccgggctctccccctgcctgtccctagccccttgcggagtccacatcgtggccagggctcgcaggcttggtgctccgaaaccgcgacgccacgcgagccggacgcacagagtaacagcgctttcctttggggtttcggatccaggagcgctttcctgttgcagcggcttgagcagagggccatgggctagcggcgcgggtctccaatgcccaagcctggcgagtcggacccacctccgcgcccaggatcccgctcctggctgcgctgacagctgccggctccgggcctctgggagaaggagctccaaggggttagaggctacggacccagcccctgccgcagcttccgcaggcggccccctgagcccgctctggcacctcctgggcttcgggaggatttaatgcgtttctcacccccacggcttccgaccctcaattatggacccgggagaattcctcctgggcttgaa

SEQ ID NO: 1562518 - DNA, 4001 bp, Homo sapiens
attccttccttggagagacagccagagtctccgccagcaaggggctgctgctggtcttaacagtcagcctctgctgccagcatactcaacttatgtgccgtgaacgtagcccactgacagaggcttggccatcacggcccagaccacctccaagaggaaagatagggaacttggtcaccatcatagaaacgcagccccaagccaggggacgcctagactccaagtgtccagaccccagcccagtcccatacagcttgaggcctcttcccggcatctgaaggaagtccccgaccagacaggagggccacggggaagcagagagaatccctgccttcaggagaaggttgtaacagcccctgcaaatccccggccccactgtccacagtgaccagccccacccaggccctgtccttccaagcaccagagaaggccagagacccgcaatcaaaacacaagcaaacgccacctatcattccgtgtttaaaccagctcctactctggaaggctaaccaagaatgttcgttatgttttttagaacgcctgctagtttaaaaagaagaagaagaaagcattgcacaccctcccacccctgttcagatgaccaagttcagggttcctaacagcataattagaccctccggctatcactgctgcaggcccaaacacccgagaagcactctttctcatctgtgtccagcagagataactgtactatctggaattataaaaatccaccaaagccccttcggaaagaaagcaattagcaattgcaacaagcagtgcacaggtggcacccaggcaaaggcggccagtgagatgcagcctggctcccaggcctggacagggcaggcaggtgcactgggccagaggcacctcggctctgctgattgaatctgggctgtgcggggatcctcgggtctccgtagggggaggccacctctttacagggcggccaacaggcgcctccaaggactttatcccaccttccctctggatgcattctggatttcggggccagcttagttggcctgtgtcctgaggccaggcaggccagactccccaggacaggagtttccgatggacaggaccctagggggatggctttcctgctgtagcggtgttggaaggacccactcgggaaaggctccagcggctgtccaggctctctctgagacgcctcgggattgctccgctggatccgcacccacagctgctccaaggggaagttgcacctacaaagcttctggcacaggagacaatggtctggagatgtgccaggggcccgccccacgcgtggctggcagggttcacccaccggctggcccgtcccgaagcaacacgtgcctgggcgcgaacgccggatccacgctttcctccagacccgggggtgggacttggcgccccaggatgacgcggagggcaggctgggggccgggactccccaccccattcgcaggctgcggcggaaagcgagcggcgggaaacccgctgcacagcaacggttctgccaggcgcccgggccaccgcgacccccgcggagaccccggcccacgccccgcaccctccccagggccccccagaccccaggctgcagaccgcagaccccggccacgccccgcaccctccccagggccccccagaccccaggctgcagaccgcagaccccggcccacgccccgcaccctccccagggccccgcggaccccaggctgcagaccgcagaccccggcccacgccccgcaccctccccagggccccgcggaccccagcgccagcccccacactcacctcacagggccctgcaaacctcggcccgcgccccgcactcaccccagggccccgagacaccccgcagcccccgacacgcggccccgtggccccgttccccaccggtacctgcgactcggcggggcggctgccctggggctcccggacccggccccgcgcacgcggactccgggactacagcgcccacaaggcggcgcggcgggcgcgcggctgcggggtgggcgggtccgtcccgccgaacgcgtcctgagggcggggcctcgcgcgtggccgggcgctgcggcaggagcgtccccacggggcaccctcccacccacggccgtctcccagccccggcgccggcctctccccacccggtcaccgccggggtcacgcggcccctcgtgctgcggccctacccctggggccgccccctgaccccgaccgcccctcgggcccccacccccgccggcgtcagcatcctggggtgccactcgcggaggtgtcggtccctcgggcgggcaccctgccatccctctcccccgcgttcttcccacccccggtcccctcctgaccccccctcctcgacgaggccttgtgcgttttccttttggcaccctggaacacctgcattcctggccgcaagctggatccgggacgcgggtcgggcccacgcgccctcaggggtggccctgggccgccttcgtggggctccaacagggacacgcacagcctgctcttggggaccgcacggccccgaactcggcgcccccgggaccccgccgcccgccctcctgcctgaccgtgacccgtacgggcttgtaccaaggagcaagccggatccaggacgtggcccggggccaccagtccccatcccagcagggacagcccgggggagacccgcgcaggcctcgcagacggcagcgcagtcacactcaggaaggggggcctgggccactctcccaggaaggcgtggggctgcggcagacagcaccgccgaaagcccaaggcctgtgcaggacacggggagaagtggggggcctcagggtcactttcccctggagttacccagggcctggctatggggagggaagccaagccgagggctgtgggggccccaaggctaaggaggagccaggaagtccactgcacagaacagaaggggacggccaccgtggtacccacagctcaagagtgcgggtcccaggcgaggggtgagtctggggcagcagcccctggaatgtaccccttccggagtgtagacagcacaatccgcgacctgcctcctggtgttgcgggggtgctcttggtctcccgcccaccagcagggcaaccccaccaggaagccaacacagggcccttgccctaaatggccgcctgcccaaagctctggcctgggccttctttccagagtcctgagtgtagcaagccacacgaacaaatctcaaaggaacttaaaaaggatttgttggctggaaatgggggatctggggtagcttgcagaatttaagggaacactacaggatggagcgcctcacctggagggaccccctgctttgtgggagccctggctctctcccctgtactggccttctccacgggtgggcagaacctggccctgctggaagacaggaggggcaacgcggaggaggaggggcccttccttccctccaggcagagaggagccagccatggggccagctcgccagggcagcctgctccctttacacgcaggacaggccaggaagccgaggggaagtggggatgaacagcagcggggctcctagaccccttcccacagaaggatggctcccacccccttcccgcctggagacagcaaggcagggagccacagccccaaggggaccccgcaggacccacaaagaccagtccctcacctgtctctccggtcaggtgtagccgagcgaatccgcccccggccgcgaggggcctgcccaagctgccctcgggtccccctgcgtggcaggagtcctgggagttccccagccacacaaggcccaggtttcctgcaggagctgcttcggagtggggaggtagggcttctgccaccaacagcacttggcagttgtaatctagaggcagctgctctgagggaagagccaggagactcgtgaagaacttacagaaacctccattgaggactgcgaggagtggccacagacagtggggcgtgggcttccagagggctccacccaaaatagagatttacaaac

SEQ ID NO: 1562519 - DNA, 4001 bp, Homo sapiens
ttcaccatgttgggcaggctggtctcgaactcctgacctcaggtgatctgcccaccttagcctcccaaagtgctaggattacaggcaccagccaccacacccagccagcttctctatttttaatagaatcaaaacatggttttatttcattttaaacaatatggaaaacacagctgtaacccatacacattcacaccagcacaagcttcttccatccttcctggagagagacaaaaacagaagacacagaaaggaagggcaggatcagggacagcaggttcgtgggagggactgttcgtgggggaacccggcaggggaagaaagacaggaaggggaagaaggggaaagagaggaagtggggtagggcagagggccctgggctgtgcactcccatctcacacttgtccccagagcaaggtctttaaggccagactccaacccaggagcagggaggggggcaaacgcccctgtagccgccctgcaccctcccaggagggggagcacaggctgtcagcctgcccacccccacctcctccatcacatgttatgtgggaacccagctccacagccttggccactgagctgctggtggacactccaggcctggcttccatgcctgtggcctcaacacacatccaccttccatgggaacgtggagctgggcacggggctgggggtgctacctcctacaggacaaggtcagaggacactgccccagactactacaggcaggcaccaaacgtcctcagctgtcttggcaggggccagggctgctgtgggcacacctgggcacacctgggcacagtccagaggaagaggccccacccctgtgaggccaagccgcttgccttgcccctccctggggactgatgtgggagccaccctatgcttggagcctcccctggggcccaggtgcattttcagcaggtggccccgcccacaggccccaccagaccccacctcagatccactggaggttggtaccagatgagccagcagggccctgctggactctgggcctccagcaggccccacccgactcaggcctgaccaccagtaaccccacagccccactcgtgctgccccaggtgacctcagcccctgccagccacacttggcaggaccaaaccctgggtcagcacgtggggtgctgcgccgagccacgccgcctccccgggggctctcagcctcgtgtctggcacacccaagatgtgtggcccgatgtgctcagagcccggccaccggctactgtgaacagctgggcaataggaccctgcagccaggccggcatgctgagaagcttcccaggggctcaggggaaggctgcccagagaccccacctcagggcaccctgaggtcgcaccctggagcctgcaccctcatggaggccaggctgacccaaaggctgtggtcccagcagcaccaggcacccaaggtccctccggcactccgtcctgctcaggacattccgggacactctgagggcaggttatgtgccaggaggctgagtgagcccgccgggtcacagagagcctcagggccagccatcggcttctgcactgtgtttacagcaatgtcctggggacatcaaacagcccctctgtgggcaagctctcctggctgatggcctgctcgactgggggaggctcctcctcagggccagcccagggaacccctgcagattccgaaagaagcggctcagaggcaggggtcctcctaggacctcagggacccccgacccccagacacaggaggctgcgtgggggcatgacagccccagcccctggccggggcacaggttctgcccacagcccagagtcaaaatggtagacagccagcagagaggctctccccagaccccacggctctctggaaaagggcggccaggggtcctagaagcctcacccacctccgaatgaatggagcatgcctcatttcctcttccaccaggagctggctctgcaggctggggcctcatcaggcacctcctggtcttagttgagggtctgagcgcagagctcccccttggcagccacccagagccctcccgctcctctccctgcacctcctcaacggcccctactccctcttcctcagccttggcaggcagacagcagggaggctctgcccagagctgtgacctgcgtcccacttacaaggctgctgggggaggggccctcacaacggtcccagcagggaggtggcatctgtcaggcggccacgactctgacacgaggacagcctcctgctgcctgagcccagcgtcggccctgctctccacaggtcttggttggggtccaggctgaatgggcagagtgcaggcagctgcgcccaaatctacgtccagacggcctcagggcggcttctctgaacagggaggcgggaaggtgggcaaggcccgaaggcaggcaggacgcgagggcagggccaggcgtggggcagcaggactggatgccacagaagggcacccaacaggggctggctggggacggggcatgggccgcaggtcaggagggactgctgtgcacagggtcctgggccggggggtctccctggaggagggcgggggctgcagctcccaccacacagcacagttccagcgggggcccaggcaacctcagtgcacccaggagcacctcacggactcggccggggaaagcgctctcagctgacactcaaagcagaaaccctggagggaaatttggccaaattcaaaatgactccagagaaacaccgtatgtaacacacaaccagtccaatcccaagggcacggggtccccaggaggcagaaaagggaaccaggtccgaggaggacagcaaccacagggctgccaggaaacactggcccacggcgggagaaatggcggcagagcaaatgtgagcaaaggaaaccacgctcctcacagcggccagacggccggcgctcagcagcccacccgagctggtgaggggaacgtgggcagcccgtggcaggctgcagaggaagcagcattcgccccaggagtgaactggaagtgccagcccgggccagctgggtcaaggcccactgcctgaggctgccagctcgtgctctacctgcagccatcacctgcagtgggagaagccggaatcccctaatcacctccagcaaagcagcagataagcaccttgtagttcaacccaggaggcgcagcttaagaacagcctcgaacccacgtggaacgtctctcaagtcagattgggcaggagagcaacttgcgaaagctgggtcacaagacaccacttacgtgaacttcctagacacaagcctggcaacaacaggggctggcgagtcctggcaggctgggcctcccttgcccccgaagctgctccccgcccacctactggtggctgcccctgcaccccggcgcccacgtgcctgctcccgcgtgaagttcttgtcgggccccaggagggagggcgtgatgaagctctccccgggcctctcctgcagccagaggggctgagatcgggggccccaccaagtggcaggtgcgcagagcacctgcacccatcgtccctctgatgatatccaaggcctggtggaatggcttaatttctggaatctactttttaatccgttaatgtacaacatgagagggcaggcagatgggatttaaacatttttgctctagagacttttcttattttgttattttaagggaaacgccacacataatgctcacccctataaataaccttggcggtggacagtggccctccactaagagcagagatgccatctggtcagtgggtggcagggagagggacggactggccaggagcagaaggcatttcatgaggggtcaaggagatggctccgccgctccagccccagccccgccaccgacagccggagccagggcaagaccctgtcctcgcctagaaagtgacccagcctggcggttagcagtgctggccgtgggacgagacacaatcacaccgcacggtgctctgagctgggcacgcgggaagggcagcac

SEQ ID NO: 1562520 - DNA, 4001 bp, Homo sapiens
tcaagcgattctcctgcctcaacctcctgagtggctgggattacaggcgcccgccaccatgcccagctaattttttgtatttttagtagagacagggtttcaccatgttggccaagctggtcttgaactcctgagctcaggcaatccacccaccttggcctcccaaagtgctgggattacaggcgtgagccaccgctcccggccctggtaaatttttttaacagtgtagattaatgtagaatttgccccccaatgggtctgtaatttctttctcatttccttgtaatcccctagtactcgacctagaagacactcagacgtagttaagcaactgatatcctgagagagccctcggaaaatggagtgtgatttaagaataaaaaaacaagaaaaagaaaaaatttcacgtcaatttttctcttttcctactgctgcataaagcacagctctgttgcaaaataatatctaacatttaatttgataaacctgtgttggttgagcacttactatgtgccaagcactgagctatgtccttgagttgctacccaacgtgaaattcgagtctatccaattttctgacatctcgtctccacactggtgtccactaaactgttttccctactggttttgatgcatcactgaataatctcacttcctgggtgaaaaatactttacatttctctcttgacaactgtgtttcaatagccttccattgacctacatacctcaggtatgggcgtgtgtgtatctggcattttcctccttgctgggtgccaattttatgagacataatccacaaacagttcaaatacctacttacgcttaagaatctacctgtctatatatttccagaagcttcagtctctccccacccttatgtatattagtgctaatgaatatgagcattaaaactaatctgttcgtcacagactaacttctgattgtcacaaacaactgacagaatcatctttggcagtttgattcttttcaagaaaaaaacacgactgaaaacgattaagataaacttgagttaaaattcccccccaaacatactgatagacaaaaggtgcttaacctattgtaagattaacagcagtacaattaatagtaatagctcccatttactaagtgctttactttgtgctaggcactatgctactctcattatgaatatctaattttgacctcacaacagcccattttacagatgagtagactgacttcagaaagaagtatacggagctagggctccaatctcgggtctgtctctatccactaaatggcaatgtgtgatactaccaacactattttaaaaagttttcgattctacatgtagatagaactttttctatctatatactctaatatgtttgtttataaatatgcatatatatgaaattggtaaatttaccagagtacaattattctaataaacaacctcatagttctatagttaagatggacctgaactcattttgttgaaagtccctgctttttatctgaacagtgcctacaaaaaaaaaatctgtttgcattttactgaagcccctcagttcttaaggccttttctccacactgtccaggagagctcagaagagacacacttagggactcagtcgccatggcaactgccaagctgcagggcctccagctgggaggtgggcctggaaggttgtggaaaatacagaaggcagccccagggtggtttcaacagtttccccggcctaggccatcccaccaggaagcagaaggcaccctgaccagcgcccctgcagagatcaaccatggccagcctgggactgtttttcttctttttgaaggggttaatgggtaaaaggaaatggatcgctccatttatacttaagaaggacaagaagatcatttcttacggaagaaacgaagtacagaggaaccgtggccactgttgccctccactctctcgagggccttcccctcggccctccctcctccctgcagagccgcacttgcgcgaacttcccacttgggggttatgggaagggcctctgtggatgatgggaaagctccgcaggggataatgggaatgcctcgcgggggatgatgggagacccctgccagaggaatatggacagccccttttgatttttaagtagtgaaagaggatttcctctcattttccagtaaggaaaaacctcctgatgatgtcctcatctttctgcctctcatctccccaccactcccacgccccaggaaaggaggaaggtgggctgaacaagcattttgagggccttcagaattggaaagcgctgcttctggcatcaccaggcatttccaggtcactgtggggttaggagtcagggatcctggggctctgagtgaggcatcgacttggcttgatgaagtcctcctggggcttcctgggtgcacagagaggtgcccagagctccgactgcctcttggcagctgtggctctcagctggatctgggctgggatgcagcttctttctggaaggaggaatttagaatccagtccaggtgctgctgcaggagatgccgggaggcccatcctgttgttcaccccttcttgcctttggtgtcaattatttggataattgccaaacccacagtgtggtgaaattactatagattgactgaaagatttgggagggaagaccctggctaattcgtatgggatagaaatcaaattgtaaaccttaggatttaatagctatagctagacgtctagctgctaatgatgtgatccagaacagggtttgcttaaccatgtggtttgcttaagccactctctggtgtttgcaatccaaggcatttgaactagtggtcctctgcttggtagatggtttagtcactgccagaaaactatagttatttctttatatcacagatctgggaggcagtatagtgatgggcaacagttgctcttgggtcagctggcttgatttgaatcccactagctgtatgatcttgggtaaggatcttaactgctgtcgaccaaagttaaggctgttgaggcggaaattgataaaggcttattgaaagccaaatttgaagattgaatggggaagacacaccaacaaagttgggtgtgttccaaagtctgttacaagttgcagtgcttttataagaaagttgaggaatgggaaggggactcctcatattgcagttgtcttttttcattggagggacaatatagaggttacagtcattggctacagatgacaacatacaggctaaaatgttttctgcatatgcacaagacaatcagtgaaacgtcatgattcagaaacaaatcagtatccttttcagtgtcagtagtttacgtattaattagtacatcaacagtctgaggaactcatgatacgatttgagagattcacagtaagattgtttgctcaagtacaggatgtaaaacacgagtcataagaccttctccaggtagttaaaatatagtttattcttttaagtgtagggatgcatgacttaactcatgcctggcatggccttaggtcctgtttgtaagttggtatcttactgccacagcgtccattctgtcagtcttatgatctctattttaacattaatgcttgttagttgttgtgtctaaactgcacaagggtattagtgaggcatgttcgacctcccttcccatcatggctgagaacgcagtttttaaggtttctggggccctcttggccaagaggggtccattcagttggctgtggtggggcttaggaggttatttttagtttataaccccctataactccctttccttagatgttcaatggaggaatgatagtgaggatttaataagataactcataaaattcttaaaacagtgcccacacacagtgtcagaacttagtaaacactggttactgtcattgttaggacaaatttgaaagctaaatttctgacattttaaatgtaaaaaacgagtatttatttgcatatacttatgttaccattctagatttctaacatttaaaatgcttctggca

SEQ ID NO: 1562521 - DNA, 4001 bp, Homo sapiens; identical to SEQ ID NO: 1562462

SEQ ID NO: 1562522 - DNA, 4001 bp, Homo sapiens
gcaccatggccagcacacagaaagcactgaatgtcagccattgttgttatgttaaatctctctccttccatgactggacatgccaacctgaaggatacaggctagcgacatccagggcaaaatgcagtcattccaagatagcagggcagggaataaagatcagtagcctgaggaccaggacaactggagatctgagctctactcttggtgttacccatggtgtggcatatgacctggggtaagtcattaaccctccaaaccaaagtgctgtcatttaaaaaatcagaatctaaagaacaattctgcaactctggaattcacaattcaccatcctctctgatatcacagaacctgactgccaaaatatactggcagctgcctcaacttcatacctggagtgataaaattcaagctctttaggaaagaaacatatttagagtcaatctgcaattgtagcagaagggctgtggtgaggtgggagtcaagagggtgaaccacactgacatgctttgctcattcccacccactgcctctgaattaccacttttccccacctcccttcaattacatgcccaagccagccattttcatagagtcttttgcaaatgagaagaaaaaagctaaaagtatcagtaagctatttgctctgctgccatatgtacacctaatgcaatattagaaacgagggagctggtatctgaaggttgaactgcaaaagccaacaaggtggggatgtttttgaggggcataaaatctaagaagtgcgggaaatttttaactttccctggacctatccatgatcttagcttaaaacacaaaagtaacaagtggcttagatacaactccaaatatttctatttccttcaccgcaaaaataccctgtcttcctttgtcaggtttctcttagaaacaaaaaagctattcgcttattttggttagaccaactaaagcaatatggataatgtgtcgtccacaatctattaatactttttcttcttggcacactaacaaattcaaggatcagtctatcgcttgctgtctccttccagccacgaatcatgctgcgccctttgtctgagctttctgaagctgttctcattcccggcctctacccttttcacccaacccttcacccaatcataaggaggggtaggtccagagagggggctgccaggtgaaccttgggcatcacttggccctctacacggaagcctgggcctacaagaaaccagccctgcccgatctcagctgcccagactccacaactcaacatttcagggatccaccgagaagcgatgacaggtgtccgggtctctccctgctggaagcccaggcctcggagggcgacgtcggtgcctgtgctcgctgtgcaaccctgggcgagtcgctgaacctctctgggcctcagctcctcctgggtaacctgggggctagttcagggtcctctccccatacccttcccccaacactcagggagcaacacccgccctccccaccccccgacttcccccagagctgcggatgaggaccaggggctgtcatcgcttcccccaccattccaggggattgcttgtctccctagactctccggggaccaacaccgtaggcttgaaccaatcctgggccccgcccgggccacgtgccagccggaacacgctgctcaacgggttgacggcgcccgacggccaggtccagcaggggcgccccgcaggtggggcctggcggccttcaccttccggatccccgacccggcgcgaccgggagccggcagacttttgtctaggagggaaaacccgagcgcggggccggccgcgacatcgcagcatcccaaagagcttttggaatttgggtcactcccttctaccccgacgtcacacacttactgctcccggcagcggaggctccagcgcctggccgcgcacaaaccacgacttctaccgtcctgccggggaaaactacaggtcccgaaatgcaccgctacgtgctcaggcgcagtgggccggtgccgccgacgagagtgcactactccgtgcgcaggcgcagtgggcccgggcagaagacctggggcgcgctgctcactgcgcaggcgcagtgagcccaggcgggcagccctggccagcagctcttgtccctgtggctggaggctgaagtccacgtaggccccggcggggagccgctggggtgtaggccgggtgcctttgtccaagcctggcggtgcgttctcactctgaactcacctgagctggagggtgggttgttgcgggacccttccgccttccgctgtctcgaattccctgggtgtctcctcgctgctgtctgcagctgaggacacgtgggtgcccttaagaagtttccagacgcagtgttcgtcatctctgacagcgtgcatgcattttcctttggggtaacgatatggtgccgcggtactaggtttccagatttcttcagtcaatatgcttagtaaacgcgtacagagtttgagcccactcagtgctagcgccatgtgagggcacaaactgggcacccaatacaaggaaagagaggaatgtgcagggagttaccaccatgtgctctgctccccttctaaggatgaggaaactgaggccaggggagagtaaggtggctggcaatagaaaacgcgcgaatggcagtggcggaattgagattcgaacccaggcagtgtaactccaaatcccatcaggactctttgtggttatgttagaatgttagagggtgtggagggaagaacaaactgaggggtggaggggttggttctgttaagggaagtgttcctggagaaagttacaaaaatagctttgttctaagcactagtggctattgcctaagtctcataacaaggctgtaagggacgtgctataatgataaccatttcacaaatgaggaaatggagacacagagattaaagtaattttttcgtggttttaaaggccgcaggtaccagagctgggacttgaccctgggtaatctgggtatagattctatcaaatcagccactatcctgggctccttttaaaatagcatctgagctatgctttaagaaataagtggtattcaggttatatggagccaataaaacaggcagaaggaactctaaaagcaagtggggtagaaaaaaacagcaagttgtttgaactggcattttcagttgctgggttgaaagtgaaaagcccaggtttggtgggagtggatcctagggtgacaatcttggcaaatggcttcaaccactagacacccaacatgcttggagagagtcagcatttctcccattccccaaaagtgaagttggctgataaccctctatgttaccacctgtactttcagtgatgataataaaatgtacttaattaggaaaacctcgattttttttttttttttttttgagatggagtctcactcagtcgccaaggctagagtgcagtgatgcaatctcggttcactgcaacctctgcctcccaggttcaagcaattctcctgcctcagcctcccaagtagctgggattacaggcacccaccaccacacccagctaatttttgtatttttagtagagatggggtttcatcatgttggccaggctggtctcaaactcctgagctcaagtgatcctcccaccttggcctcccaaagtgctgggattacaggcatgagctactgcacccggccagaaaaacctcgattttgctctccatgtgtttacctgtgtcaaaggtaaagaaagccagttaaagcagtaaggattgactgaaatcattagctattgccagagggaagaggcccagctcaacttccctttgtgcaaaggtaactgagtggggatggggcttgagcagagtccaggaagtggaaatgcatagaaagtgggaaggggttggtcagtgtgatctgggtttgttaattggctcctatctagagtagaaacaaacttctgtctgtgatggggagcagtaagttagagcaaggcacccatccagcaaggagagtt

SEQ ID NO: 1562523 - DNA, 4001 bp, Homo sapiens
  modified_base (3222)..(4001): a, c, t, g, unknown or other
gcaccatggccagcacacagaaagcactgaatgtcagccattgttgttatgttaaatctctctccttccatgactggacatgccaacctgaaggatacaggctagcgacatccagggcaaaatgcagtcattccaagatagcagggcagggaataaagatcagtagcctgaggaccaggacaactggagatctgagctctactcttggtgttacccatggtgtggcatatgacctggggtaagtcattaaccctccaaaccaaagtgctgtcatttaaaaaatcagaatctaaagaacaattctgcaactctggaattcacaattcaccatcctctctgatatcacagaacctgactgccaaaatatactggcagctgcctcaacttcatacctggagtgataaaattcaagctctttaggaaagaaacatatttagagtcaatctgcaattgtagcagaagggctgtggtgaggtgggagtcaagagggtgaaccacactgacatgctttgctcattcccacccactgcctctgaattaccacttttccccacctcccttcaattacatgcccaagccagccattttcatagagtcttttgcaaatgagaagaaaaaagctaaaagtatcagtaagctatttgctctgctgccatatgtacacctaatgcaatattagaaacgagggagctggtatctgaaggttgaactgcaaaagccaacaaggtggggatgtttttgaggggcataaaatctaagaagtgcgggaaatttttaactttccctggacctatccatgatcttagcttaaaacacaaaagtaacaagtggcttagatacaactccaaatatttctatttccttcaccgcaaaaataccctgtcttcctttgtcaggtttctcttagaaacaaaaaagctattcgcttattttggttagaccaactaaagcaatatggataatgtgtcgtccacaatctattaatactttttcttcttggcacactaacaaattcaaggatcagtctatcgcttgctgtctccttccagccacgaatcatgctgcgccctttgtctgagctttctgaagctgttctcattcccggcctctacccttttcacccaacccttcacccaatcataaggaggggtaggtccagagagggggctgccaggtgaaccttgggcatcacttggccctctacacggaagcctgggcctacaagaaaccagccctgcccgatctcagctgcccagactccacaactcaacatttcagggatccaccgagaagcgatgacaggtgtccgggtctctccctgctggaagcccaggcctcggagggcgacgtcggtgcctgtgctcgctgtgcaaccctgggcgagtcgctgaacctctctgggcctcagctcctcctgggtaacctgggggctagttcagggtcctctccccatacccttcccccaacactcagggagcaacacccgccctccccaccccccgacttcccccagagctgcggatgaggaccaggggctgtcatcgcttcccccaccattccaggggattgcttgtctccctagactctccggggaccaacaccgtaggcttgaaccaatcctgggccccgcccgggccacgtgccagccggaacacgctgctcaacgggttgacggcgcccgacggccaggtccagcaggggcgccccgcaggtggggcctggcggccttcaccttccggatccccgacccggcgcgaccgggagccggcagacttttgtctaggagggaaaacccgagcgcggggccggccgcgacatcgcagcatcccaaagagcttttggaatttgggtcactcccttctaccccgacgtcacacacttactgctcccggcagcggaggctccagcgcctggccgcgcacaaaccacgacttctaccgtcctgccggggaaaactacaggtcccgaaatgcaccgctacgtgctcaggcgcagtgggccggtgccgccgacgagagtgcactactccgtgcgcaggcgcagtgggcccgggcagaagacctggggcgcgctgctcactgcgcaggcgcagtgagcccaggcgggcagccctggccagcagctcttgtccctgtggctggaggctgaagtccacgtaggccccggcggggagccgctggggtgtaggccgggtgcctttgtccaagcctggcggtgcgttctcactctgaactcacctgagctggagggtgggttgttgcgggacccttccgccttccgctgtctcgaattccctgggtgtctcctcgctgctgtctgcagctgaggacacgtgggtgcccttaagaagtttccagacgcagtgttcgtcatctctgacagcgtgcatgcattttcctttggggtaacgatatggtgccgcggtactaggtttccagatttcttcagtcaatatgcttagtaaacgcgtacagagtttgagcccactcagtgctagcgccatgtgagggcacaaactgggcacccaatacaaggaaagagaggaatgtgcagggagttaccaccatgtgctctgctccccttctaaggatgaggaaactgaggccaggggagagtaaggtggctggcaatagaaaacgcgcgaatggcagtggcggaattgagattcgaacccaggcagtgtaactccaaatcccatcaggactctttgtggttatgttagaatgttagagggtgtggagggaagaacaaactgaggggtggaggggttggttctgttaagggaagtgttcctggagaaagttacaaaaatagctttgttctaagcactagtggctattgcctaagtctcataacaaggctgtaagggacgtgctataatgataaccatttcacaaatgaggaaatggagacacagagattaaagtaattttttcgtggttttaaaggccgcaggtaccagagctgggacttgaccctgggtaatctgggtatagattctatcaaatcagccactatcctgggctccttttaaaatagcatctgagctatgctttaagaaataagtggtattcaggttatatggagccaataaaacaggcagaaggaactctaaaagcaagtggggtagaaaaaaacagcaagttgtttgaactggcattttcagttgctgggttgaaagtgaaaagcccaggtttggtgggagtggatctatgaggtttnnnnnnnnnnnnnnnnnnnnnnnnnnnnnnnnnnnnnnnnnnnnnnnnnnnnnnnnnnnnnnnnnnnnnnnnnnnnnnnnnnnnnnnnnnnnnnnnnnnnnnnnnnnnnnnnnnnnnnnnnnnnnnnnnnnnnnnnnnnnnnnnnnnnnnnnnnnnnnnnnnnnnnnnnnnnnnnnnnnnnnnnnnnnnnnnnnnnnnnnnnnnnnnnnnnnnnnnnnnnnnnnnnnnnnnnnnnnnnnnnnnnnnnnnnnnnnnnnnnnnnnnnnnnnnnnnnnnnnnnnnnnnnnnnnnnnnnnnnnnnnnnnnnnnnnnnnnnnnnnnnnnnnnnnnnnnnnnnnnnnnnnnnnnnnnnnnnnnnnnnnnnnnnnnnnnnnnnnnnnnnnnnnnnnnnnnnnnnnnnnnnnnnnnnnnnnnnnnnnnnnnnnnnnnnnnnnnnnnnnnnnnnnnnnnnnnnnnnnnnnnnnnnnnnnnnnnnnnnnnnnnnnnnnnnnnnnnnnnnnnnnnnnnnnnnnnnnnnnnnnnnnnnnnnnnnnnnnnnnnnnnnnnnnnnnnnnnnnnnnnnnnnnnnnnnnnnnnnnnnnnnnnnnnnnnnnnnnnnnnnnnnnnnnnnnnnnnnnnnnnnnnnnnnnnnnnnnnnnnnnnnnnnnnnnnnnnnnnnnnnnnnnnnnnnnnnnnnnnnnnnnnnnnnnnnnnnnnnnnnnnnnnnnnnnnnnnnnnnnnnnnnnnnnnnnnnnnnnnnnnnnnnnnnnnnnnnnnnnnnnnnnnnnnnnnnnnnnnnnn

SEQ ID NO: 1562524 - DNA, 4001 bp, Homo sapiens
tgggaggccgaggcgggtggatcacgacgtcaacagatcgagaccatcctggccaacatggtgaaacgccgtctctactaaaatataaaaaattagccaggcgtggcggcgcgcgcctgtagtcccagctacccgggaggctgaggcaggagaattgcttgaacctgggaggcggaggttgcagtgagctgagatcgcgccactgcactccagcctgggcgacagagcgagacttggtctgaaaaacaaaacactagtactggtgaattatgtggggagaagtaaagagggacaaaaagaagtctgacaaatgaaacagcaaaatggagtcaaatgccaaagaaccttttccagaaaatctggagacctattaaagaaaaaggctaaactcattatctccctcacatatatttcagacatttacacagactaactgttcctgtcctctcacgtttctgtaaacccctttaaagactgaatctcattcgtatagtaaatattccctcatgatttttaagccgagtgcaagagaaaattttccaccagttggtaacttcactaaggttctggggacagtgttatcacaagcaccttccttgcaacacgttttgtaattttactgataaaagttctgaaaatatttctgtatattttacaagagtcgttcagaagtttgtctctgaccatcttagcaacctgcctactggcagagcaattttaaagccactttacgaaaatgtggcttaagaaatgctccgacaacagttattaagtgccaattcggtgtaatggaaactccaggtcttctaatttccaaatacgaaactccacccactgtcctcaaacgacagttctcaatcgtaggtgcacatcaaaatcacttttggaaactttcaaaaaacagcaatactcaccctgcactaggacaggttttgatgtaattggtcggaggttgggctctggtgtatttttagtaagatcttcaaataagctaactgtgcacccaaagttaagatcactgccctcaaaaatccccaaaagggtcagttaaacctctggctcccggagcttaggaggaggaaaaggacctctgttcaaggctaccttctctgcccttgcagcccaatcatgacctagaacagaggccagcaaacttccctgcaaagtgtcacacaaacggtctctgttgcgtatttttgttttccaaagccttttaaaaatataaaaaccattcctagccttagagctgtacaaaagcgaagactccctgacctagagcgctgaagccggaaagcggagagggatgcgaagacaccaggcgggcccaggcgcagtcgccatccccgggctgggcctggcactgcgccactcggtgtccgcgggaccctcaggaacgagaacacggccaagcaagggacgagcacagccgctccaggcaccacgacagacccgcggcggcggcccaaggaccacagagggcagcacgcccgcccccgcccctccccggcccgcggcaatccctccccgcgctcccgccacgcgcaggcccagccccgcggcggcctcggtcccacgccccgcgcccgggcccgcccggtgactcagcacttgggcaccgcaccgctgggggcgaaggcaccgaccgggcggcacgggccgggaccgggcgctggaccagggcggccccgaggcctggcgggcgacccgctcctagcaaaggtgcgcggggggacgagcgggtgggagcggcctcgcaaacaagcctccgtcccagcccttgccttctgctcgaaattgatgatgccctgcactgggccgtcgcccttcagcacgcacacggccttcgtcgccataactcgctaggccacgccgaggtcctggttccgaggactgcaacggaaaccccagacgctgcaggagactacgacgcaaaccagcaccccgtctccgcgactactttataggccagacctccgcgcctcgcccactctggccccaaaccaatcgcctcgcacgcgctcagcccgccccctgcggcagcctcgggtcgcgagtggccgggaatgactgggggcggggccaaggggccgcgtgcgccggagactccccccgccccgcagccgggaaacgtccagaaccccgaaatgtggagaaaacaaccttcttttcacgggggcgtggcccgccggttgcagtacgcgaaattggcaaaatgatgtaaacagggtacgctttgaaaatctgaagtcactttgtctagaaatgtcattagttatgactgagtttggccacagcgtctcatttgttactcagcaattgggacgccccaagatggatgcttttgtagttttcatttttttgtcttgttttttagttttctgagggtatagaaagtcgctacacctcaatcccgggacttaccttttcttcccctgcaattttcttagtccttagtatagagtttcttatttggttggcagaattcggtattctttttatatttttcctgtttggcaaggccacaaccctacagataaccaaacggcaactagttggcttctaggcatcacctgcgtttttgtctggcctaaaggccacaacactcaaggagggtagaatggtgaaataatttatgatgcctccatacaacaggaatgataaatatgacttacctttcaagggaaatatttcaaaaacatattgtgaaatgagaaaatagtgcaaactacttttgtccggggcgagggggttgtttgtttgatttttgagacagggtctcgctctgtcacccaggctggagtgcagtggcgccatcatagctcactgcagcctccacctcctgggttcaagccatcctcctgcctcagcctcccaagtacctgggaccacaggcatgtgccaccacacctggctgatttttgtattttgggtacagatggggttttaccatgttgcccaggctggtttcaaactcctgagctcaagccagccatctacccacctcggcctcccaaagtgctgggattacagacatgagccaccacgtccagcctagtacttaatattgagtatggcaaaatactgagacttaattgaagtccagtgtgaaacaacaatagaagctattccagcctcgtttggagtacactactatcgatttatttacttatttattatttacgctatttagaccctcagactctaatgcatcctctatcagagaaatacaattcacatttttttatcatcctctaggaagtatacatatttgcagttttgcctgttgtatttggtagtagtctccagataattcgtatattctaaacggttgcataaacagtgcaaatgctggccaaagggcctttgcccaaggctaaagtttctttgggttccaggaagttcggcagatttcagttcattgtaaacttgccaagggatccgcccacagacacgagagagctgctttgggacagtgaattactcttcttttgagacggtctaatgatgcctgggtggtgccttcgtaggatggtcgtcacacctgaacaagggggtccctggccccaggccccatgctttactgggccctgttctgtccctcttctggcatcatctcccatggagaaaagaatgtgttgaagccaagaagatgctccccccgcaagaatatcatctctgctagaacaggggtaaggaatttaactctgtgatatttaagagtatttatatcttcctaatgcagggcatcgaatgtgggcactatggacattttgggccagacagttctttgctgtggaggctgtcctgtacactgtaggatgttcagtagaatccctagcccctactcactagatgccagtaataccctgtccctccctgccaggctgggataaccaaaaataattccagacgttgccaaatcactcccagttaagaatcactgtttttatttatttatgtatttattttgatatggagtctcactctgtcaccaggctgga

SEQ ID NO: 1562525 - DNA, 4001 bp, Homo sapiens
atttacataaaagcagatgagaaaaaaaacagctcactgaaatggcaaataatcaaaaacttgtttgcagactgataacgcattatgtgttgaagagaagctgcatattcctctagtaataaactgcttcgtctaatattatttttagatattccttctgtagcactttattttacaattttcctaagcatttatacataattatgacaaatttgaaaatcagaaaagtaattatggttttaaaagttaatctacaaggaagtaatgatttcatcttaaagccagcaatcgttaaccgcatttactgaaaagcaatgaaaatttcaaaccacctaaatatgcaacagtatattcctacaatgggattctatgcagccatgaagaagtccaaaagactgagactgagagggataaacctgttcacaacgtattagctggaaaaatgatcaatacaaaacaagatgatcacatatcacacaatacatggggggggaaatgaaatgacatgagaatatcaataacgtgagttttttcttttctcctttttcatgtcttctaaattataataaaacgctcattttctaaaggaaagactagcttttaaaagctacaaaaacacacctcgttaaactaagcaaacaactacttattgcagccagagatttgtcaggaaaattatattctcttagctcgggtctcttctcatccaaaacactactagcaatatcacaaaaatttaaaaagcaatgtgagtggatctatttccacttaaaaaacaacacattctgcaaaagtgataattctagcaataatacatcattgccctaataatcctgtattactttgggcacttacaactggttttcggcccattttcaaattcacgtactgctcttgctctcaacttttaaaatacaattaaaaacacttgaactcggaacacttacgtttcaagatctctttcctacttctgtactttaaagaaatgagtatcttatacaaaagcaaatatcgagagacaaccgctgaacatgacacactattttcctaagtaaacaaccatttctttaacaatctcttcgccttcaaattttgtgaagccaagcgcaaattatgtaaagtctaccagcaatgacaaaaatagcgtgtcaactggggcaggggtagcaagaaaataatagacctacacacaaagtccactttcacttgctgtaattaatcgcaaccatttcaaagtccccttccatctttatctcgagtattttaacaaactagcaagtgcatcagtttgagttcgttttaattgaaacatttaactatcagaacggctgacagatactacaggacactaggccccgaataatcttattaatagatccagacccccaagcggtctgaagctcgcaataataaagaggatttaagattaaccaagaaacggccgttagagaccctttccggtcataggcaccggccggcaaaatccgcggaggcgagagggggaggggatacgcggcggcggaggaggagctgaggaaggaactaggcccgtccctggcggacaaccgggcctacgagtagctaaacggcaggggggacccaaacaggggagaagggtgaacatcttaactcggttctgaaacagggagtcttgggttacctcggaaaaggcgaagttcctcgagggaaaaggaagggagcggctgggggggcggttggggggggcccggaaaatggatcccaggcccaggcggggccctagcggggcctgagccggggaacgactgcgtctccgaagaaaggtgccaaagaaggctaggtgagggcctaacggtccgttgggagcagaagaatctgggaggcgtttacctggaaagctcctgttgaatttcccggaatttactgaccacgaaagacctaaaaatctgctcgatgttggtcgccatggcgtccgctccgttctctcaactcctcctcgctagtcctccaggctcccagcatgcctcgggaggaggcgcacgggccaattcggtctctcgccttcctgattggctccaaagggaatgcccggtccggcccgctccaccgagggaccaatcagtgagcacggccctgctctcctctgctgtttctgagcggctggggtagaggtgctgacgtttgcgccgcgcacgactatgtccgccatgttagtgtctgacgcaggcgccattacaggagccgtctctcttgaggcgaccgtgtccgcataagttgtcagtccccagcagtgtttgggagccttaacaggcttgctaagtgcctgagattaaaggcgaagaggaagaagagcaagaagggcaacccggtgtttaacacacggctttcaggcgctctcaggtggcgccaagttcagtttcgacagggatatgcatccgggagagaatttttcagcccccgcccccactggcatgtgagaggaggaactcgctgttgccctgtgtcttccccagtgcgttctataaccagcctcatttttttttttagcaataggccggatgtcctaagcgaccggcattcaaagcccggtgcattttagtctcatcaggagtcaggcgtgtcacgagatttttccgcggtagctgctcagctctgactcgtgagcggcgcacaattggctaagaatgggtttagcattttggcgctcccccccggcgctcctggaaacactgcgtggcaccccgtaccactgtcacattataaacgtgctaaggcttgggtgtctcggctggggagcagtcaggcagcgcccagggcgggagggaatcagactagattctcgccgcggagacccagggccgcgcggaccaatggggcagggaagccgtcgtagggcggggcagtgaggggcggtgccgcgctggtcccgcgccggtcccggtgggccgacttccggcgagcgggcaagcgggaaccaggtggccacccggtgtcggtgcgtaaaccccctccgcttttacacggagcgcgcttaggctttggtttggggatttaagatcgcgaactgagtgaaaccatagaaactgatttgtagaaattttcctgttgtttgtaaatgcggtgggtgggggttggccatgtgcttttcacttgctactgttagctggtttctatttgctcttttacttttcctgttttctaagatgtcaaggcctttttgtgtctttatacatttttaggacataaccctaaattggtgtactttctctttatgcacccgttgtctctggcagattacttggttaattttgtagttggtttctactttattctccatatcctctgatacggctttatttgcctgtcttattctgcttatgttacccattctgaggaatgaggcccaaggttagtgaagtcccccaaggtcttcctgctagtatggggcagcgtctctacccaggccaaggcgctgtgtgagactcaggagcccaggcgtcctcaccactgggtagtaaggctattttcagtgatccactagagtaaacagaattttcccacactactgctatattcaaactaaagatgtaacatttgctctagatttaaagatctgtttatttctggccggatgtgatgtaatcccagcacttgggaggccaaggtgggttgaccattggaggtcaggagttcgagaccagcctggccaacgtagtgaaaccccgtcgctactaaaaatacaaaaattcgcctggcgtggcggcgcacgcccgtaatcccagctacttgggaggctgtgaggcaagagaatcgcttgaacccgggaggcggaggttgtagtgagctgagatcacaccactgccctccagcctgggcgacagagagagactgtctaaacaaataaataaataaataaaataaaaaatctgtttatttcagatacacatggcaagtaaaatgtgttttcccgttacactaaagtagctgttccttccgagactgtaatttaacagggttttttt

SEQ ID NO: 1562526 - DNA, 4001 bp, Homo sapiens
acagcagaacccaccacctggtcttgctttactcagacctgagggtgtgaaaggtgcccgtgacctcccgcatcagggagctggccgccaccctcgactcccggggagcaggcgtcccgcgaccccctcatctaccaggccatctgagctgggcggcgcctcacctccgctcccgggggagccggcctcagggtaggcatgcgccctgggtgggagcaggtcgtggccgccgccctcctggcagctctggctgagcagccgccgcagcatctgattctccttcaggaggcgcacctgcttcttcaggtccgcgttctcgctcaggagccggctcatcagctcgccgccttcagccatggcgggtgcgtccctccttgtccctcacggctcctgcagccccatggaggtgggagcccagagcccgcaggcaccacagaaacagcccaggcacggagttccgtagccaccaccgccttccacgccttgtgatgtcactgccctagtgatgaggtgcccagcaccctgcctgcccccgcgatggctcatggccccgttgaggcagtgaagctggaggcccgtggcgtgcacaggcagccactcccacattatgaccagggcccgagaatgccaaggacattaggcagctacgggatgtagcgactgtactccaagaggggcgtccaagccactccccattgagcggcccagccagggtcgggtgtccaccctgtgtggtgtcctcaagctgggtggggacgctgccttcacccgagtaacatgtgggctgcacttcccataggacctgcccaggacacagggttcccagtgcagcttcctgtggaccctggcacccagggcagcaactgatgtgcaggtgttcatcagggtccgtccttggcacccacacttgaggagggagggactggcaagggcagtgggaggagaccagcatgtgggggagaccagcctggtggggagaccagcttgtgggggagaccagtctgcgggggagaccagcctggggaggagaccagcctgcaggggagaccagcttgcgggggagaccagcctgcgggggagaccagcctgggcggggagatcagcctgggggaggagaccagcctggtgaggagaccagcctgggggaggagaccagccttgtgggggagaccagcctgcgggggagaccagcctgggcggggagatcagcctgggggaggagaccagcctggtgaggagaccagcctgggggaggagaccagcttgcgggggagaccagcctgcgggggagaccagcctgggcggggagatcagcctgggggaggagaccagcctggtgaggagaccagcctgggggaggagaccagcttgcgggggagaccagcctgcgggggagaccagcctgggcggggagatcagcctgggggaggagaccagcctggtgaggagaccagcctgggggaggagaccagccttgtgggggagaccagcctgggggaggagaccagtcttgcgggggagaccagcctagggtggggagaccagcctgaggcagccccacgatggcccccacatgctttggagcactgggtggccctgagggctgggctggaggccacctactgacctcactccctgatgagaagggtccagcagtgcatgtccacccctcagaccacgagcgcccgtgtctaagacaccaattgttcctgactgcactgctcctgcctgcacgtaactgaggacgcccccaacccatggccacggcccctcgggccgtcacacagggctgcggctcatggggccctgctagagcaggcgtctgtcctcagtcagtgcgaccgacttgaaacccaccctgactccctgcttcaattacttgggaaagtaaatcacctcagtgttgtttcttggctccgagggtcttgttttatcagcagccgggatgcaacagatgggtcatctcatcctcatgggaagggacgtacggcagaaagcacaacccagtgggccggccacacctccagccctgtgacgggcacccaccaccaccaacccagtgggccggccacacctccagccctgtgacgggcacccaccaccaccaacccagtgggccggccacacctccagccctgtgacgggcacccaccaccaccaacccagtgggccggccacacctccagccctgtgacgggcacccaccaccaccaacccagtgggccggccacacctccagccctgtgatgggcacccaccaccaccaccatcccagtgggccggccacacctccagccctgtgacgggcactcaggaccaccaagggcactcaggtgcagatgcccctgggagaacaccaccttcattcagcccgggcggccagattaggggaaggttgcttctaggagagaaagtcttgagtcaggctttgtggagaaaggaggtttctacaccccaagcgttcctgacacaacccaaccagcctggtgttgcaccacagggctcacacctcagatcaagacaacgggggcccagccacagcccactgacgagggcatgcagggcgtccaggatgcagggcagagagagaagcgagggatgagtcacggatgcgccccccgctctgagcccgacggggccctgaatggcttttcctgccctggctcctcccatcatattttaaatgccgtcttcctcccgctccaaggaaaccttctcttgacgtcaggtactctccagccacggacctatcaacattctgacagttttctggtcttgacacattatccttttaatatagcgctggattcaatttattaatattttaagtatttttatgctcacaggggaagtcgatctgaatctccttttcttgtgatgtctcggtctggctttggaacactggccttttaaaatgagccgcagagattctgcgccattttctgggtgttccttcttaaacgtcggatagaattcatctgtgaagctatctagaactagatttcttctggaaaagttttaaatttctaaatcaatttcttaaatagatacaacgctacttatattttatatttttccctcatgtgcgttttgctgacaattgtggctgtcaggtagtttgttgataataggggaggctgtgcatttgttggggcagcgagtggggaaatctctctatcttcctctcaattttgctaagaacctaaaactcctcttaaaaaagtcttgaaaaagacaaaagcacgaaggaaaccagagaatatttcaagttgaatgagaataaaaacatgacattagaatttgtggggtgtagttaaagcttgatgcccgtgctccacaaccacaggaaatggacaaaccctaccaaagttatcaaaagagaaggacaccccatctgtagaaaacagtcagaagattaggcagatgtggtggtgcgtgtctgttgtcccagctactcggaacactgaggtgggaggattgcttgagcctgggaggtcgaggctacagtgaactgtggttgcgcggctgtgctctaacttgcgtgacaaagtgagaccctgtctcaataaaatactttaattaatgaaactgaaactttctgctctgcaaagaatgtcaagaaaatgaaaagacaagtcagagactgggagaatatttttgaaacgtcctgcagcaaagtggtacttttttgagacaaggtcttgctctattgcccaggctgaagggcaagtggcatgatcacggctcactgcagcctcaaatgcctgggctcaagagatcctcctgcctcagcctcccaagcagctgggattacaggcgcgcacacccacactcagtcccagagtggtccatttgttacagctgatgaatctacatggacacatcgtcaccacccaaagcccacagtttacaatggggctcactcttgatgctgcacattctctggctttggacaaatgtataatgacctgtatccaccatcacagtgtcaggccagagca

SEQ ID NO: 1562527 - DNA, 4001 bp, Homo sapiens
actggagcctgagattgaccacatggcagagctaagtgtaaatactgctgagaaaattaatatcatatgtattttattacatttactcttcattaagaggaagccacctacaaaaacataaaggacatttatatttgacctagttttaacaagtatttaaatattcaaacaaccccagagtgggagaactttgacttcactggagtcaaaatgtaaaaagcaaaggtcaccccaaatgccatctggatagggcaggtttccctggagtctgaccacagcaagcagagtgcagacttccatagaggccgcgaccatggttcctgacggttccatcccacttcccgccagtgtctggcactgagcctccaccctcatctgtaaagggagggtggtcacctccaggaccaggccagtatcagagacagcctctttacagagccttcagctctagtcatcttccactgggatgtaacatagaggccgacagtgcacaccaagggcttcggaaaggttctctttttatgaacactggagaatgcgactacagaccctcccgagaaggaatggccagtgcacctgaatgcagggtgcataccccaggactgagactggagggaggcacaccccagcatggcaatgggggagactaaagcccacccaaggctggataaggaggggtgggcgcgcatggtgggggaggcgcaatgcagagaagtgggcgcacaccgtggggcgtgatagggaggggtgggcacacactatagggggcgtgatggggaggggtgggcgcacatcgtggagggggtgatggggaggggtggacgcacactgggggtgtgatggaaagggggacgcgatggataggggtgggcgcacactgggggacgcgacggggaggggtgagcacacactgggggtgtgatggagagggcgacgcaatagggaggggtgggcgcacaccagggacgcgatgatggggacgggtgggcgcacaccaggtggcatgatggggaggagtgggtacacaccatggggggcgtgatggggaggcgtgggcgtacaccggggggcgcgatggggaggggtgggcgcacaccgggggacgcgatggaggcggtgggtgcacacggggcgcgatgggtgggagtaggtgcacactgagggcacgattggggagacacgaaggagaggggtgggcgcacactgggggacgcgatggccgggacacgatgcggagaagtgggtgaataccggggtcgcgatgggcgccctggaaggacggcagtgctgctcacaggggccaggcccctcagagcgcgccccttgggggtaaccccagacgcttgttcccgagccgactccgtgcactcgacacaggatcccgcacccagggcgatgccgggggagagggcgaccccaaccagcaatgactcaggagaggagcacgcaaagacgcttcggggacactgctggggcgggatccgagggcgccgcgctctgcaggagcagcagcgcggggcccgacaccgggcgctcaaggaggcgctgggcgcgcgccttcccagctggggaggagacgggcgtggagcggaggcgtggccaggcccggagggggcggagctcgcggcacagcgcgcttcgcgggggcagagggggcgcaccttgggcgggcccacttaggggcggggctctagagggcggggaggggcggagcctgtcaggggcgggacgcggggcggagtcggggtgggggcggagccgggctgggggcgggacgcccgcgatagacgcgcgtgcaggcggggtcgccgcgcttaccttgggcttctcctcggacatggctgcgcgagcggcgcggggaggcggcgcgggggaagcagcgcggagcgggcgagtcacgctctcggccccgccgctctcccgccgcaactgtgcgcggggccgcgctttatcccccaaatcccggcgcacccgttggccggcacgggggtcacgtggctgcgcgcgttcacgaggcgcgctccccggggcgtcgggcgcgcgcaggccgggccgcggctctgggcggttggagatgcgtcacggggcgggtcccgcgcgaccccgtcgggcgcggaagccctagggcgctgtggggcgcgggccaggagcgtttacggggagcccgggccctggggacccttgcccgcctccccgcgtcgcccgggccccgactcctttcctgggggccgcgttcctggggcgccgggaagtgaggccggggccgccgcccatggccgcagggacctggggcggaggagggaggacgctgggggtgacgttccctctcaggagccgcggacagagcggagaaggcggcccgcggggtcccgtccgcgggggccgcgcgaatcgggccagcaccctagacgattgggggcgccacccgcctccctgccgccgcggtttcctgtcagccccaggccgggctcctttggccaacgctcctacggggctgccccgggccctccacacccgtcctcaagaagacccgttttacctgtgaagaaactgaggcactgggaggtcaaaccacccccaggtcagcgctggtgagcggcgccgagcttggccaggccgccacgtcggcgagcgcgggcaaacccaggctggacgccgccagtgccggcggaacggggacctcgtggacgcgggaaacgcgctgggccggcaggacggcctccccggacttgcgggcgccattcctggggtgcctggcccgccccggcctccatgtctgtgatcccagggcctcggatggaacggacctgagggcggacacccctgcgtccctcaggagtgcccgggtggtgccagccggggcgtggcggaggtctcatctgatggtgagcccggccgaaggcgggggaggccgcacttcaggctcagctgggaaatggcagggcctggatttgaacctaagcgtctgagccgtttctgtcctgcctgggaaaggctcagccaactgagcaacgtcgcaaagccatggagacaagtcttcatggaccataacttcacaaaccgtcttctactcaaaaattcactttcttggctagagcccccacttaggagggggaaggctgctgaagtctttcggggagagggtctgagagtcagccccagtcccaggcaggtcataaggtgtggtcccttccttctggaacctggagcccagggcctcagcagaggatgtggaggtgggtggccagctcagacggtcctgggagggggctccgcaaccagccccttccgaggggacgtggcgcctcagagcccacagattgctggccctggaagtgccctagggcaggcagggttcagagagttatcgactccaagacaccgttaatcataaaacaacacgaccgtaggtagcacagacacactaaactccggcaggctgtggatgacggcagcccgcttcagtgttgtggaagtgagaaacacgcagcttagaaatcatgagacacagaacccaaatgtgttaccgctcgaaattacgccagttgctgtgtcacgaagtgatgcgtgactacagtcatggataagggaaaaagaggctcagatgacattaggttttaaaaagccaggctataagacaatggtggtctgaattcaattcatgctgtgtctgtctcccacactgtgacctgccccgaatccttcatgtgacagcaaagatgcaaaaaggctctgtcgcagctgtggggacacaaaggacaccgctggtggaccgaacgccaagaggtttctgaaggacacagccaaaggggatcgaatggacggaggaaccagagctcaggaaaaaccgtggcctaccacgagcacagggtaaagaacccaaatggccagagcccctccggagggtcgccacacctggcgatggtcccaacaagaagactcatgagaaggcagggaactggcaaatgagtaacagcattgctgacatgaaagctcgaccc

SEQ ID NO: 1562528 - DNA, 4001 bp, Homo sapiens
aatcaatccgcccacctcagcctcccaagtagcggggactaaagggcacacgacggagccgaactactttttgtattttttgtacagaaagggtttcaccacgctgcccagactggtctcaaactccccgcctcaagcgatcagccccccttggcctcccaaagtgctgggactacaggcgtgagcccccacacctggcatatcttacattaagaaagacccagtatccaaattaattttaatttcatccatctgcccctaaaataactcaaacattactaatctatttttcttgtggtacaatagtccttttctttaaattagactatcaaaatacttttaaaaataatacaaaatcaatcatgtatctcacatgaaaatctagaggttgtttacaattcccttaatgaaaacacaacggccataacagaaatactccaacaatattggataatattagataatacctactactataactgacctaccagtaaatatgtcaagcaagacactgtatgggtttatgtgatacatgatacaaactgaaacaatatttctttggaaaaaacatttacttttagaagcagcagcagaacccaagaaagcaaaatcctgcaaccaaaacctgcatctccctgcaccccctcaacaaaaacctgttaacaaaaagtttgcaggaaaataagtttgattaaaaggaaatacaagcataatctgctagaggaaatacagtgaaagggttgtcgggctcttttctaaaaaatggttgcatctgaattgtttcaaatcaaaacagagaccatgacaaattgggctctaacagatgacttacagagcacagcgacagccccagactcgaacatgagacattcttccttatgcctagtttccactatgaggctgaaaggtgggggatccaatttgtgatagatccggaatcctttactgaacgccattctcctttcttcggaggcagccctgcgaaaaccaagcaaagcaaagcaaatgaagctgatgtttccttctgcagcaaggactgcaaagcatccaaaagtccctccccgccaggttttgatggggggttggggtgggaaaaaacagacagctctgggagaaaatggctttttccaaaagataagtcgtcacttaattttaccaaaaagcaagaggaaaagctatcaattctcataccaaggcaagacaaggttttagcactgtaagtcaatcaacggtctggttgagtttcccgtttaatttatgcttactgaaaggaaaaattttgagcgtatttcgtccggagctgtttatcagcttcctgcttcaagatctgtcactacgttgaaagggaacctatttggaaacttcaagcagttccttcgaggtgaaaggagcggaggtgggagggaagggtgacaaggctggttcaaagctccttagggggcaggagaaggaaaaggattatcccacgcgacaggctctcccgggggtggcgatgaagggcaagggaaaaggcacaggttaccgccgcctctcctgccccgggctaccgccggctggggggacggcaggcggggccgataaatacgaatggccacccgggaagagtcacgactcggggcaccgacccgactggggctcctcgggggtcccgggcagtcgactgcccgggaaagcggctccttctcggagagacggaagagccgagcagcccaaaccctccatttatgcgccagaagagataccccggcgcccaggcggattcggttcgttcccgcgggcgggctgacagccgctgtcaccacagcccccagcctgacgcggcaccccgcacaaccagtggtctgctcacaaccccgcccgtcctcccgcaccccggctgctcgcggtcgcccctcaccgctcccgctgacgctgcggaggcagagactggtcttggaggcgtccgcccgcccggctgcccgtgggtctggccgcagcagctccccgccccccgccggcttgctcacctcttcctccggctcctcctcctccttctcccgcagccgccgccacagccgccgggagcgtcacttccgctccagcaggcccatctcttccgcattgcgccgcggccgggggcggaagatccgccccgcgcgagggaaggggcggggcatcaggagggagaccacgcccactctgcgccgaccggctgggcctggcacccgcgggcggccccagcctcagtctccagctacctttgcctcctgcggccgcccccaggcagagctgcgatcccaccgccgggggtgcagggagagggaagatctggcctccttggtccttttgcgtgggctcttcagagcgtgagcgccggggagggactccggagaaaagcttggggggctgcgtattgctgctccccaagctgggcgtcaggaccaaccccgccgcccccacgggcctgacgggagaggaggaagggctcgggacggtcggctcgccgagccaaccaggtggcgcctgaagagctgtccatggtgtcgacagcccagcaaacggcaccgagttcctagtctgagtgtctggataggtagcagaagaaaaactaatgcctgctctgggacagttctgttcggtgccttttcttgtgtgttctggagctcacagggttctatcgaagagtgcttaggtgtatacgatggagagtgggacgtcacaaaccaggatctcaaggctgagtccaacaaaacatggccgtagggaggccacgacagctgtggttgtcaccgacggatgaatagcttttgccaaccgtggaatttagtaactaaaggcacctaacccttttatctcatcctcatttttcaacaaatggtgcttcctggctaatatcagcgtgtcccatagatttctgcttccattgaatagacctaataagaaagagaatgaagtcaaagccaacagggcagaaagaaattgaaaacctgaagaacccagcactcaaactgtctccacttgcgtttgctttttctttacctcttctccttctggttttcaacagccaaagcaggatttaaatttggttatgttgcaaaaatcatttccctcttcaggccctgtcatgtgacttgattttttcgtccattttagagaagctgtacccaccctggtttcaggacacggaactaaatttattagaaaagaagccacttcaagtcatgaaggagaaacacaaagattcttggatttagttctaagaactagaggggatttctatgtcagtactgtctcagaaaaaactgttgatatcaaatgtgttgcttgagaagtacctttttttttttgagacggagtctcgctctgtccgcccaggctagagtgcagtggcgcgatctcggctcactgcaagctccgcctcccgggttcacgccgttctcctgcctcagcctcccgagtagctgggattacaggtgcccaccaccacgcccggctaatttttgtatttttagtagagacagggtttcaccgtgttagccaggatggtctcgatctcctgacctcgtgatccacccgcctcggcctcccaaagtgctgggataacaggcgtgagccatcgcgcccggccgagaggtaccttttatgacaactgaaatcattcagtttcaagaggagttgggtactgaaaccaaacttgcttactccaaagcccaaaatcctttccaccatgcctgtgtgtctgtaaggctacactagaaatgcttcctttcttatagtgggaagcatgggtactaagctcttttacgaacaagtgttctgcatattcctggttcctttttattttggactgaggagatttaggtcaaaatttctgggttctgggttggaattccagcttctttcttcaaattaaactggggggtagcaagacttattcctagatttgttagaaggccacagcttttccacatctcattttagtcatgaaaaagacacatgcccagagtttgaaaaacataaag

SEQ ID NO: 1562529 - DNA, 4001 bp, Homo sapiens
cgctgcccagactggtctcaaactccccgcctcaagcgatcagccccccttggcctcccaaagtgctgggactacaggcgtgagcccccacacctggcatatcttacattaagaaagacccagtatccaaattaattttaatttcatccatctgcccctaaaataactcaaacattactaatctatttttcttgtggtacaatagtccttttctttaaattagactatcaaaatacttttaaaaataatacaaaatcaatcatgtatctcacatgaaaatctagaggttgtttacaattcccttaatgaaaacacaacggccataacagaaatactccaacaatattggataatattagataatacctactactataactgacctaccagtaaatatgtcaagcaagacactgtatgggtttatgtgatacatgatacaaactgaaacaatatttctttggaaaaaacatttacttttagaagcagcagcagaacccaagaaagcaaaatcctgcaaccaaaacctgcatctccctgcaccccctcaacaaaaacctgttaacaaaaagtttgcaggaaaataagtttgattaaaaggaaatacaagcataatctgctagaggaaatacagtgaaagggttgtcgggctcttttctaaaaaatggttgcatctgaattgtttcaaatcaaaacagagaccatgacaaattgggctctaacagatgacttacagagcacagcgacagccccagactcgaacatgagacattcttccttatgcctagtttccactatgaggctgaaaggtgggggatccaatttgtgatagatccggaatcctttactgaacgccattctcctttcttcggaggcagccctgcgaaaaccaagcaaagcaaagcaaatgaagctgatgtttccttctgcagcaaggactgcaaagcatccaaaagtccctccccgccaggttttgatggggggttggggtgggaaaaaacagacagctctgggagaaaatggctttttccaaaagataagtcgtcacttaattttaccaaaaagcaagaggaaaagctatcaattctcataccaaggcaagacaaggttttagcactgtaagtcaatcaacggtctggttgagtttcccgtttaatttatgcttactgaaaggaaaaattttgagcgtatttcgtccggagctgtttatcagcttcctgcttcaagatctgtcactacgttgaaagggaacctatttggaaacttcaagcagttccttcgaggtgaaaggagcggaggtgggagggaagggtgacaaggctggttcaaagctccttagggggcaggagaaggaaaaggattatcccacgcgacaggctctcccgggggtggcgatgaagggcaagggaaaaggcacaggttaccgccgcctctcctgccccgggctaccgccggctggggggacggcaggcggggccgataaatacgaatggccacccgggaagagtcacgactcggggcaccgacccgactggggctcctcgggggtcccgggcagtcgactgcccgggaaagcggctccttctcggagagacggaagagccgagcagcccaaaccctccatttatgcgccagaagagataccccggcgcccaggcggattcggttcgttcccgcgggcgggctgacagccgctgtcaccacagcccccagcctgacgcggcaccccgcacaaccagtggtctgctcacaaccccgcccgtcctcccgcaccccggctgctcgcggtcgcccctcaccgctcccgctgacgctgcggaggcagagactggtcttggaggcgtccgcccgcccggctgcccgtgggtctggccgcagcagctccccgccccccgccggcttgctcacctcttcctccggctcctcctcctccttctcccgcagccgccgccacagccgccgggagcgtcacttccgctccagcaggcccatctcttccgcattgcgccgcggccgggggcggaagatccgccccgcgcgagggaaggggcggggcatcaggagggagaccacgcccactctgcgccgaccggctgggcctggcacccgcgggcggccccagcctcagtctccagctacctttgcctcctgcggccgcccccaggcagagctgcgatcccaccgccgggggtgcagggagagggaagatctggcctccttggtccttttgcgtgggctcttcagagcgtgagcgccggggagggactccggagaaaagcttggggggctgcgtattgctgctccccaagctgggcgtcaggaccaaccccgccgcccccacgggcctgacgggagaggaggaagggctcgggacggtcggctcgccgagccaaccaggtggcgcctgaagagctgtccatggtgtcgacagcccagcaaacggcaccgagttcctagtctgagtgtctggataggtagcagaagaaaaactaatgcctgctctgggacagttctgttcggtgccttttcttgtgtgttctggagctcacagggttctatcgaagagtgcttaggtgtatacgatggagagtgggacgtcacaaaccaggatctcaaggctgagtccaacaaaacatggccgtagggaggccacgacagctgtggttgtcaccgacggatgaatagcttttgccaaccgtggaatttagtaactaaaggcacctaacccttttatctcatcctcatttttcaacaaatggtgcttcctggctaatatcagcgtgtcccatagatttctgcttccattgaatagacctaataagaaagagaatgaagtcaaagccaacagggcagaaagaaattgaaaacctgaagaacccagcactcaaactgtctccacttgcgtttgctttttctttacctcttctccttctggttttcaacagccaaagcaggatttaaatttggttatgttgcaaaaatcatttccctcttcaggccctgtcatgtgacttgattttttcgtccattttagagaagctgtacccaccctggtttcaggacacggaactaaatttattagaaaagaagccacttcaagtcatgaaggagaaacacaaagattcttggatttagttctaagaactagaggggatttctatgtcagtactgtctcagaaaaaactgttgatatcaaatgtgttgcttgagaagtacctttttttttttgagacggagtctcgctctgtccgcccaggctagagtgcagtggcgcgatctcggctcactgcaagctccgcctcccgggttcacgccgttctcctgcctcagcctcccgagtagctgggattacaggtgcccaccaccacgcccggctaatttttgtatttttagtagagacagggtttcaccgtgttagccaggatggtctcgatctcctgacctcgtgatccacccgcctcggcctcccaaagtgctgggataacaggcgtgagccatcgcgcccggccgagaggtaccttttatgacaactgaaatcattcagtttcaagaggagttgggtactgaaaccaaacttgcttactccaaagcccaaaatcctttccaccatgcctgtgtgtctgtaaggctacactagaaatgcttcctttcttatagtgggaagcatgggtactaagctcttttacgaacaagtgttctgcatattcctggttcctttttattttggactgaggagatttaggtcaaaatttctgggttctgggttggaattccagcttctttcttcaaattaaactggggggtagcaagacttattcctagatttgttagaaggccacagcttttccacatctcattttagtcatgaaaaagacacatgcccagagtttgaaaaacataaaggcaatttgactagtggcttgattggttctatcttctttttcttgtccctctttcctatttatacttctacttttgttacagcatttgacaatagttggaaa

SEQ ID NO: 1562530 - DNA, 4001 bp, Homo sapiens
ccgagatcccgccactgcactccagcctgggcgacagagcgagactccgtctcaaaaaaaaaaaaaaaaaaaaaaaaaaattatggaagccactgcattttcaacctaacatgttagccttcccctgggatccttcactggatcgtagagcctccagccttgctctgagaataagtgggatcgtgataaaggtacagtcctgcactgggtggccctggccacagggacccgtgggactttaatgacagcaagcactgtccaacagggtccaatgaggaagatggtaaaaatcaggaaacttgctgggatgatgtgaggcatgtcaactttctgattttctttaatgaagtttttaaagtctggtgccttctcctggattagaggagaaaagctggaatgttaatattttctttaactccctgccctgcctcccatccaccaagagatacggttgcagagggggaaagagccacatgccccttggagaggaagtacagaatcagtgtcccggggtggtgcattcctacaggggtccagcaagggaaagtccaatgacgggcctcagggacaggaatcagggtcccgcctggtgggactaactctgtccccacagagctcaactcactggcatctccccagtgttgcagtcctccgtgagaacctcggctgccacagctgtcttctccatgacagccccagctcctgggcacgggtcctctgggtgggtgccctctttggggtccctggcctcgagttgacctgccagcatcctggttgggaagggaagggctatggggacacttgaatgcagccctcctaccccgtcagtgtgggctgaaggccccagccccaaactaagggtgagcaggacccgcagccgctccttctccccctgggtcatgtgcacattcccaggcccgaagctgaccaggtgaaaggacaccacagacagagggactgagctgtccacacctggctctccaccatcctccgtggaaaatgctttagatcctagaagatcagcctgacacctaacacactccagtcatccaaagaggggtgtgagtggggtgtgagccggtgtgagtgggatgtgagtgggttgtgagcaggatatgagcggaatgtgaatggatgtgagcggatgtgagcacgatggtcttggggtatgagcaggtgtgagtggaatggtctcagggtgtgagcaggtgtgagtggagggtcgcatgagacaccgagggaattctcagccctttaatcagcacccacctggaggggcacaggcagaccctccaccgtgttgagtatgtgtcttgaaccatcagggtgacatttgtgaattcatggtgaagatgtggaaaggaaacacctttttataggtacagcatttatgccagttctaggaagttcacagcaattagagaacaaaaacgaaagagaaaaacgcaaagctttcctgcaagcctgcagggtcgtctctgaaagctgcctccacccctgccttgccctgtccgttttaggaagccagtggcccccaacgaaaccccgactgtttaattcataaacttctaactgtgtgagaaggaacagtttaaccacagtgatcggagaaatgctatttaaaagagagtctcctgatggaagcgaatcgaaggtctagagcaagacctaccagtaaccagatcactgccattccttccccgcggagactgggaatgtttctgcggaagtgggctggggtcacggtcctcacagccctgagaaagctccttctttcctgctcctctgaggggacaccccagtgtcctcggccccaaactcatgaccccctcagtccagggaagaccctttccttcagccccaccaccagacctcgtcacctcacctggtccccaacagtcactactgccaggatcagatcatctgggccatgtccccacagttgtccccaagccctcctgcctcatatccagagaccagagagcagcggacagttccaacggactttctgtcttaaagggacatgaacgtctcactcagcgtcaccactgtaccagctcagataataattaaacatccccaaacctgcaattcttaatatagaagctcatcgtcagtggagtccatccatccacaaaggacattggagagagtcaaactactcctccaaattgacaaaaaccatgtgttttatatccagtcttcaatacgcaacgtgtagtaagagctcatttctctgagcatacattcttggagaaatacaaactttcttcggatatcaaattatttactagaaaaaacatttttatgaagggaaaataatatatgtgagtttaaataggagacaggattcaaagtttcatcatttcactaaatgcatctccatctgaattgtccgtgtgatttttgtgatagagaagagaatgaggagcaagcaagagtcgatattcctgttaaaccctggctgtccttctcatccatggtgctgcgtgtggacaacatacacctggggctcacctgagcctgcttgggacgtgtgtcacttggatagttctgcaagcgattcgcatgcaataggcagtaaatgccgacgtcatgaatgaatgaagagaatactacaaagaggaaacagaaggcacttttgtccccatgtgtcattctaactgtgagagtgtgtgtgtgtgtcctgaggtgtgcgagtgtgtgtgtgtgtgtcctgaggtgcgtgagaggttgtatgtttgtcctgaagtgtgtgagagtttatataggtttctgaggtatgtgaggggttgtgtgtgtccctgaggtgtatgaggtgtgtgtgggtcctgaggtgtgtgagtggttgtgtgtgggtccctgaggtgtgtgagaggttgtgtgtgggtcctaaggtgtgtgagtggttgtgtgtgggtcctaaggtgtgtgagaggttgtgtgtgggtcctaaggtgtgtgagtggttgtgtgtgggtcctaaggtgtgtgagaggttgtgtgagtcctgaggtgtgtgagaggattgtgtgtgagtcctgaggtgtgtgaggggttatgtatgggcccctgaggtgtgtgaggggttttatgtgtgtcctgagaagtgtgatgaattgtgtgggtcctgaggtgtgtgagggtttgtgtatgagaccctgaggtgtgtcaacattgtgtgtgagaccctgaggtgtgtgaggggttgtgtgtggattcctgaggtgtgtgagggcttgtgtgtatgagcctgaggtgtgtgggttccttatatgggttcctgaggtgtgtgaggggttgtgtgtgtgtcctgaggtgtgtgaggggttgtgcttgggtcctggggtgtgtgagtgggtgtttgtcctgaggtgtgtgagaggttgtgtgtgtgtcctgaggtgtgtgagagtttgcgtaggttcctgaggtatgtgaggggttgtgtgtgtcctgaggtgtgtgagaggttgtgtgagtccctggggtgtgtgagagtttgtgtaggtttctgaggtgtgtgagagtttgtgtagcttcctgaggtgtgtgagaggttgtgtgagtccctgaggtgcgtgaggggttgtgtgtgtcctgaagtgtgtgagaggttgtgtaggtttcaggctttgcagctcccctcctgagcctcagccgggcggctcccagggcagggtccccccatccctgtctctgctgcggctctctgtgtgttgctcttcccggcctggccaggacattttcttcattgagtcttccccagattctcaccctgcagcaaccacgtgcggcagcaggtcagggcggaggctcctgggcgtttggactgtggggcccttctcttctctctgataaggccccggttttctgttcagcctcgcggtgccttagccgcatttcaggcatggtcttccagggccctctggtctgaacattctgtagaggaaaccacggcacacctttcactcatcttttaaaatcagaagccagttcct

SEQ ID NO: 1562531 - DNA, 4001 bp, Homo sapiens
cagagcttcaggctctgagctccgcggaatcaaaggtctcagaaagcaacctattaggatctggtggttgacagcctgcagcagggggtgaaagaggagcccagagcaccctccggtccctgtccctgccttggggcataggaggggaggaactcagtctggccacactggctcaggtgagggcgccccaggggaggccgagaggggctgttctcttgtctgctttgctatcagggactgcctcgagatgtctttggagaaagtgttcctggcttgctgggaaggatccgtgttcagctcccgctgcccagcagcttccatgggaaccttgccctcctggggtctggatccatcgcgacgtgaaggtgatcatcgcccacccccgggacactgtgggggtcaagagaggccccgtggtgagggaggatcatcatcctgggggtcgggggggtttcctcctcagggaggaagatttccagccccggtgctctgcctccggcagactctgtcttgcccacccgctttgtctttgtcgcatgatggaaataaatggaaatggtttccacacacgaatgcactaaactgtaatcacaattttctagatttcagttgtaacaggatcatggacctgagtgacccgcaaagacgctctgagccttgagccagagggtgtgtggggtggggaggggagtttgccacggcctctgtgatcccacagcacagggggcagagctgggggctggggtgggggcaagggcgcaggcagatgggcctgggggtggccagcacggggacccacccagttcgttctgtacaccgaggccacttcctctctcgggttccaaagctcccccgctccctgccatgggcttgggggtcttcccactgcagcccaatgctggctgctcttctacgctgcccaagcccacccctcaggcccggtaccccacagcagagatcaagaggtggctggagggcagtgggggcacggacagcaccactgggcgctccctcttcaggcctctctggaaacccttgctttggaaacgtagaaagccctttctcctgcccccaccttgaaactgtacctaataacggcaaataagttattcagctccccacagctggcaaagtgcaagtcgcagatgctgccacacagcatttcctgacagccctagggcagaccgttgatccattctgcaggtaaaggagttgagatgcaaacacttcccaaggaagcaagaatggcctcctcctccactccctagaaggacccagggcaaccgatccacttgacaacaccagggaatatgggttgccagccacgcactcatgagagaggtggctttgactcccagagcatggatcccaggggagcccaggaacctgtaggagagggtctcccagttggccaccactgggacgggcattcgggcctgtgggagagggtctcccaggtggccatcactgggaccggcatttgggcctatctggatgggccttgggagggtctgcccctgggggagatgttggcatgaacagtcaaaagcactattctgagaccccacgccaacacttcctctttgaaacatgacacttgggaggattgtatagtcttcctaacacaggaaaacagccccgactgaaggcagccccctcctcgtcgcacttctcgaaggtctccgggggccctgccaccctgagttactctccacctgcttttgccgatcctgtaaattggatatacttttaagggcctagaacagcacctggcacaaaacaggtgctcaaaaatatgtatgtaaaacagtggctcctggcggaggctgccagagctggctgtggccccacagagcaggaagaagcacgccttacctgtctgggcctcggccagggtgccgagggccagcatggacaccaggaccagggcgcagatcaccttgttctccatggtggccattgcctcctctctgctccaaaggcgaccccgagtcagggatgagaggccgcccgagccccggattttatagggcaggctctgtttgcttaaagagcgttagataacatttgcctaaggaggcccggggatcctctgagacaataatctccactgatttttatcaaaggtgtttcctagacatggtcaagctacatggaaggatttgctgatagacagagacgacatgtggtgaggtcatcttggctgagggatctgagattcagaaagtccctctttcccatgggagtctcctccaacctgaccttaatccaggtcctactcatatctgagaggccctcccgccagggtaaatactgtactcactgcagaagtgattcatagtgagagatggccggaaaaaggcttggccgtgacaacagtggctcacggggtggccaccgtgaccttgcagggggaagggaaggagctcatgaagcccattccgtctaggcctaagctaattcttttacagtggaattgttttaataatgaaattgtaggcctggcgcagtggctcacgcctgtaatcccaacactttgggaggccaaagcaggcggatcacttaaagtcaggagtttgagactagcctggccaacatggcgaaaccccgtctctacaaaaaaaaaaaatacaaaaattagccaggcatggtggcgggtgcctgtaatcctagctactctggaggttaagtcaggagaatcacttgaacctgggaggcggaggttgcagtgagtcgagatcaccctactgcactccagcctgagcgacagattaagtctccttctgggaggggctgggggcaggagggagaaaaaaatagtatatacgagctgccatcaaaaactgacaaagtgaacgtggttcactcccctgtgtctatggggctccctccctccccctcccacaccttcccagttggtcccctggactcctgtattttagaggacagcctcctgctctcctgtaccatgcctcactcccctcccctgctcggagctttctctttcatagctcttattacctcctggtggataaaacaagtgactgacacattatgttggttatttattcattgcactcctccctgcagcagacgggagggcgcatgggagcagaagtcctcatctcctagtgccttgaggtggccccagaccctagaacagtggctttgattggcattcgagaaacagctgttgaagagctgcatgaagaaatggacaacaggagaaatcttttcttcttcagtgagaaattaggccctgaggaaaatgcatgctagcctaacaaaggtactatcttttcttgggtgacctagtcagtacatttctgcagcccctctgggaggggagcctgggccagaatgggggcggccatgttcctcttcgctccatcccaggacccagcccctcctccagggctgccactcctgcaccggggtctccactcctgggccagggtctccaggaggggcctgaccgcaggacccagggaggggccgaggcctggtgtcctctgtggtcagcttaagtttattgaaaacaggacgggggcaccaggcccagggtggtgctcatagtgacggtggttttcgctgctctaatttctcggatcaaaatgggggctcttggaaatgggatgtaaattgcacaatcatttggagaaaaggtgggcagtgttcggtgaggtttaagccatacagattttacagctcagcaaattcttctgtttccaggcctggtctcttaatcccagaaacatgttcatacttgggcagaagaaaacacaggcaaagatattctttttagcattgtttgtaacagctggaaacagggaaagaaggaaggaaggaaaggagggaaagaaaagcaaaataaatattcattaaccagggaaagggaaaatgaacttaaaatacaatgcagtcgtcccttagtacccctgggggactggtttcaggaccccccacccagggatgccaaaatccacaaatgctcaagtccc

SEQ ID NO: 1562532 - DNA, 4001 bp, Homo sapiens
aacctgggctagctccgattaaccaacctgggctagccctagactaaccagcctacgctagccctagactaaccaacctgggctagctccagactaacaaacctaggctactagccccagactaaccagcctatgctagccctagactaaccaacttgggctagctccagactaaccaacctaggctactagccccagactaatcaacctgtgctagctccaaactaactaacctgggctagccctagactaactagcctacactagccctagactaaccaacctgggctagccccagactaaccaacctgggctactagccccagactaaccaacctgggctagctccagactaaccaacctgggctagccccagactaaccagcctacgctagccctagactaaccaacctgggctagctccaggctaaccaacctgggctactagccccagactaaccaacctgcgctagctccaaactaaccaacctgggctagccttagactaactagcctacactagccctagactaaccaacctgggctagccccagactaaccaacctgggctagccccagactaaccaacctgggctagctctagactaaccaacctgggctagccccagactaaccaaccggggctagctcgagactaacccacccaggctaaccctagactagcaactgggcctcctccggcccctgctctgggctccgcctgtgaagctgggtcctgggttgccagctgctggcccaggaagattccctggaagattaccttgctttgggagggggtggaaacaccaggggaccccagtgacactggagtcgaaacagcatccattgtcaaaacactggtcactggtgattccagggaagccgcagttcgtcctgttatgggggctcagcctggagcactggcagggggctgtggaaagaccctcagtcggccccaccctggtaccccagaccacactgctccttctctcagaggttctaggggatgcctctactgtcttgttgccacatagagaaacacaaagtcttatcttgcccatatttaagcaatgcggtttcctcctgagaagccgatagggctttgctgaaattgttatattagtttaaaaggaaaaaaaaaaaaaagccaggcatggtggctcatacctataatcccagcactttaggaagccgaggcgggcagattgcttgagctcaggagttcaagaccatcctgggcaacatgtcgaaaccccatctctacaaacaatacaaaaaaaaaaattggccgggcatgatggtccacaactgtggtttcagctactcaggcggctgaggtgggaggatcacttgagcctgggaggcagaggttgcagtgagccaagatcacaccactgcactcctgcctgggcggcaaagccagatcctgtctcggaaaaaaacaaaaacaaaaccctcctagaggagggtgaacagatggacccaaggccaagatccaggcgagaggtgagtgctctgggactccaaggacccttggtgggaatgccctcctggcccgacacggggcccgctgacacctgccgtcactcagcctttccctaggagggaggcccttcttggagccaccctcctgagcagtggcaaatcccatgtgaacaacacacattgccagatgcctttatagccattccccctctcaagttaatttatggttgtgctttttttttttctttaagagaaataaagaaagcacataaaaagaccctctccttcacttacagggtttctcactccccgccagggcacatagccccaggacgaggagcgctgccaggagctgggcgtctcgccgtcccatgtctagctcagctgcaccccagggtggcttgcagaatgcatggtgtccactgccgggtatgttttataatctcccctctgtttgtccaacaagcagagataacctttcttctctgccccgtggccccagcccttccaccgtggaggcgaagaggaggcaagaggcagctgtgccctgtgcaggcgaggcttccgggccagggtgactctctccctgctcggtgatacctcttcctgccctggacagagagttgggtcatgccaggctgccagcgtggaaaaccggccacgtgcaggtctggggctgggcacacacagggtcacacccaggaagggataagctatgcatttctattgatagagtgggcagggaccacaggaatttagaaaatattagggccaagtttactggggaaaatgtacaggccagcagatagcatggaaaagtcccctccctgaggaagggaagcatctcagaggaggtaagagactgctcccagggctgtggttagagcctccccaaccgcagcacgatgccctttgtcccatcttcagcaggaggggctgctctccatggagatgaggctgacagggtcagcggagtagcctgtgacaggcaggttttaataagttcattttcagccaacccctgaaatgggttatttttgttccatgggaatgctctacatcttctgaaagatggcacctgggacccagcccatggccttcctggggtaggatgtgctggagaaggattctgtggacctgacagagaagacagaagccagagagtagacacccggaaagaaagagggaaaagtgtggtgggaaggacagaggggacccgaagttccccacgccagggaaatgacagggggttgccagtctgtttctgatggttgagcagtcaggggcccagagacgcaggaaacccaaaatccttggtccaccacggggctgtcctcagggtctggagagcaggccccatactccaggcccccatcctccaggccctcgtcccccaggctccatcctccaggcccccattctccagggctccatcctctaggcccctgtcctccaggcccccatcctctaggccctcatcctccaggctccatcctccaggctccatcctccaggtttcatccttcaggccatcatcctccaggcccccgtcctccaggcccccatcctccaggccccatcctccaggcccccatctttcaggcccctgtcctccaggctcttgtcctccaggccctcatcctccaggcccctgctcctccagaccctcatcctccagaccctcatcctccaggcccccatctttcaggcccctgtcctccaggccctcttcctccagaccctcgtcctccaggcccctgttcctccagaccctcgtcctccagaccctcattctccaggcccccgtcctccaggctccatcctccagggctcctctgggtccgggtcaagtacctccaggctctctgctgactgttcaccactgggcaaccacagggactcgatccatgaaaactctggcaaggtcagtttccttgttctacatccctgtcactttagtcaccatcatgatataagtgactgagtcattgttttctctcatattcccacccacctctcctctctgcttcctccccatcaactcgacttcccaccgctcactgcagccccttcaggattcctgctgcgaccacctgacccatgcaaaagagaccacttctcagcctctctcactctcctggccctggcggaagcctgtgttgtcataggcatgcttccctggaatcctgctcaggcccccacgcagggacactgagtgcccacagagttgggaaaccattacacgagatgggacgtctgcaatagagtggcatcgctagttgaaagtggagctgttcacaacctccacaactgtacttggtggccacgtccccatcacatgggctcagactgggggctggacattgactttgagccccaagtcttcaccctcatgcaaaaaccatcctccttggagatgcaggctgggaagggcgccatgtccggagtccctgccctgctgtcatctgccgacctttgtgcagcctgtccctttcgttaagaatttcagcactgag

SEQ ID NO: 1562533 - DNA, 4001 bp, Homo sapiens
cctgtccttggctggcacggcacactggtttgcagctgtcccagacaaagccctgtcagctgccagagcccttgctgggctgcggtgagtgtgtttgcttcactttgcaagtttgcatcctcccgctccgccccaccccgccgagttcaaccactgctgaaaccctcgcccttaggaagatgcactttccctgtgaatatttaaagagaggcagtctgttaaatgctcagctcggggactctggccatttgcctaagtgtctttctccttggcacgctcttatcaccttctcgggaagtcacatacggacctgggtaccttccagctggcaggaacccctggggaatctggggtcccttgaacccagaaacaaagttacccttcattgtttgaccaacaaaaccttgcccctttgttttaaatgaaaaccgtgacaggagaggcacacgccatagagatcattgcaacgcatgctgcctgcttttcacttttttctgcatctccccttcctgaattgttgagcatgtcccaccctcccgggacatccttcagtccccaatattttcatgtttcaggcaagcctctatgtctgtatgtgcagcagaagttcactgcgtttcattaacgaactgagtatttccttaggaaaatggcaatcacgtgcagtgtcttacattcccttctcttgctcccagtccgtaattgcttatcctcctggcatccaaacttcgctcacactggaatcagctgcagagctttaaaaatgactgacgttggctgggcatggtggcttacacctgtaattccagcactttgggaggccaaggcaggaggatcacttgaggccaggagtttgagaccagcttggccaacatagcgaaactccatctctactaaaaatccaaaaaattagctgggcatggtggtgcatgcctgtaatcccagctacttgaagccgaggcacaagaattgcttgaacccaggaggcggaggttgcagtgagctgagattgtgccactgcactccagcagtgagtgacaaagcaaggctatctcaaaacaaaacagctgaggcctggatcttgcctggagatgccctgatgtaactggtgtgccccaagcattaggatttttaaagctctccaggtgattctaatgggctgcaagttcgggaaccactgcctttgaccctgctcagaagacacccagataaaagccatgccctcattccttcaaacttgggttaatggagcagccacaccccatggcagggttgctatgcaatggctaaatgaaccttgtgcctgccggtattgacagtgttctgaagtcagggtttttctcctgcatctttcctttttctttgtaaatgtggaacaatgcataaagacctatattgtaatttagaaatctccagcaaagatggctatggggtcataggggatgggctcaggctcaaaccctgatttcaacacagactgggcagggctgccttggataagttgttaactttctctgagcctcggtttccttgtctgtgaaatggggacaataaagacccacttcaaagggctagcgcaggaaaaagtgtatatgtgacaggtggccattattaaatgaatgcagaatccccccttatcctggatcccttcccttcacgcccaccctgccaccggggcagtcagggcagtactcacacaggcccacgtactcctcagcagagctggaggacagcaaggccaggaccagccccagcatgcagagcgctctggcagccatgaccaccgtgggctccgggacgcagctcaggactcgcttcatggtccaggaggcctcatttatgcaccgttgtttgcacagctgctctggattgtttgcttggggaaggctctccctcctggctgtggctgctcctgttctctcctgcatgcctttgtcaagctcccagacagtttttctctcccaaaggggagaggtcagttcagcccccactgttttggcagcaagcggtaagggcggattccagttctggttccgggtcctctactggggagcggatgtgtgtcaattgccctcctagcctggcctggtgtagtgtgcaggagccatgtggggtggcaggaccagggtgtggtgtccgttccatctcagcctcccagccagaagccctcagaacacccctggtcccatgacaagagagccccaggctgcttcatcccagatcggcctcggagacaggcagctctgagtgagtcaggaccctgcggctctctcacaactcctgaaacacagagattccttgtctttcctttttgctttctcccctaaaaattagtaactacattttaataagtggatgaaatgaattgattgaaaatatgttagtaaaaacatggtacacataattgatttttaaaatcaaataatacaaaagagcctttcctatccagaggcatctattgatctattgtgaacacttttttaggtatcctttcagaatttttctctctggatctaagcacgtttttttggtttgtttttgtttgtttgtttgttttgttttttttttgttttttttttgttttttttttttggagacagggtcttgctctgttacccaggctggagtgcagtggcacaatctcaactcactgagacccccgccctcgcggggctcaagtgatcctcccacctcagcctcctaagtagctgggccacaggcatgtgtccagctaatattttgtatttttttagagaccaggtgtcgccatgttggccaggctggtctcagactcctggactcaagtgatctgccttccttggcctcccaaagtgtcaggattacaggcatgagccactgcactcggccacatttttaacacaaacaggaactgactctccacctttgcccagcgtgctcttttaaaaactaaagactacatctcaggaattgttttataacaacatatcagatgagacagcgatgattctatccattttccagaggaagaaactaagactcaacatttccggtgcctatcagaggttactccagtgtccctggtatagctggtatttaacccactcccaggaccctaagcctccgccctcggcatccgcagcatcccccaaccccccaacctcctgcagtggactggctggtagtgggcaagagactaatctcattccaggaaaacgggcccctagattttgtgttctccgtgtttcttttccagggaggcattttgatgacccccactggcccttccaggagcctctgtctgaagggtggacttggtttatcaccccgagaaatgggagcgcctggctgcttggatttagcctgcagctggggtccccggtggtgtgtgcagggcggccttgagcctccaagggtgcatccacaaactgcccttccccgagtgacccatgggagctcgatggcgtacgtgctgagcaccaggatgtgtcctgccctgtgactcccaggccccgcccttgcgctcagcacgccctttgtggatggatttgagggcccctggcctctgatgtgccactcccgctgaggccagcgaaggaggaagaaggaaagagcgttgcctgccttgttttcggggcactcactttttctgggagacagcggacccaggttcatcaatggacagcaggattttcatgttattaaaaaggtcattgtaggggaaatccctgggggatctggtgagatctccctgggggatctggtgagatctccctgccttcccactgctcctagtacccagaggccaggccaggtcgtggtgcagggctgagttccaggagggtgcaaacaccccaggaacagactgctgcccctccggccctcatgacctgctggggaaggacccccgcaaggagcttctgcaggtgctgtggtctccacctgctgcactcaaaattgcctggagtggggagaatatcaatgcctgggccccgccctgacaggtggttctgtcgcctgtg

SEQ ID NO: 1562534 - DNA, 4001 bp, Homo sapiens
tccagacatctctttgttcaaacctccctccttcctggacttaatcactttccacagcagtccttggttcactggcaactgctttccacctggaagggtttttccttctccaaacccaggtctgggtcccagcagaatcttgaagaagaaagaagaaacaactaaaacctaatggaaattcaaacacatttttaaaagggctgcaagcgattagataaatctaattaaacctaaggccaagtaaaacaagtcctgtttgaagctgagaacagcagtccttcatgccttttataataaaaagaaattggggctgggggagtgaagaacgcagaaaaggaaagcgacaaggggccatcctctattacagatttcctctaacacagaatcaacaggactctaatatttcatacgtggctgtcactgtgctttgaggttaatctatatggtcgtttaagccccgcccccctagaggttattccttatccccactttacagatgcgcaaactgagacacaggaagatagaatagctcggccgggatcacccagcttgtgagtgacaccgagcaggtactggaacccgggtttgtttgacctcagcgcacaggctctaaacctctgctccaactcaaagtatgcgccaagtcagcgtgcatgggtaacccgatccggacggctctgactcgggatgcggcacagctgccctgcggggccgcgcgggtgtcaccgaggcgggcacagactgcacagtgtccccaagggctcgcgcacgtccttcaagacctgccagcgcgcgggaaaaggcaggctccgagtcaaccagggctgacccgggggcaagaccaggagacgcgacgactggaaccgggtgagtgtggccgagtcggcgccccgagggccgccagcctggaccccaggctgggacacgggcgcccccgggtgcaggggacctagaggcgccgtgcgcggcgggggctgggcgcgaaggcgccgagacggcatctttcccctgcagcatcccgccccgcggccggggggagggggcgtcacctgacagcgcgcaacaacttctccaggtttcgagggggcaagcggcagccgccggggctggggggcgcacggcgcgctgctctcgcccaatggcgaggtctgtaaacaaaagcgggccccacgcgggtccccagccgggtggcgaggggcgcggcgcagcagcatcgcagcggcagagctggtgagagggcgaggcggggacgggatagggcgcggggacccagggcacagtccccgggacccgaccgcccggatgaggcattgtctgcgcacccgcaggattccgcttttaatgcccccctccgggggttcgtcgcgggtccccagctccgtgcgccggcccccgggctttccgcccggtgagcccggccccgagggcggcacggatcgccaaggtgagcgcccaggacgcgtcgccgaaaagccaggcccggaggtgcctaagtcagggaccgagacgcaaacatagacacaaggatgcacaagcacgccctccccgaagttgacaaaaatcagccgataaaatacaaagtgccgcggccgccgcaggtcagcgctgacctcctgctgccgagaggaccgaatgccgacgtccggacgctgtcatttccatccagcgaaggcacctgggctgcacggtctcgtctccctccttcgcgcgagggatgcctcctcctgcctctcctccccgcatctccccacctcccaagtgtgtgaacacgaaaacaatacgtggaaagcccgatcggggggagctaggacccgccgggagccccagtgtgcgggagacgggggtcagaacgtgcccggcacgggcaccgaggctccgggcatcctcgccgccgtctcccggggcggctccggccggacgcccgcgcaccccaggcccgcggtactcacccgcgacggtcgtccgggatctccgcgacggggccgggcacgatgcggggcagccgtgcccctggggctgcgggcgccaaggcgtccgcggagctgcagagctgcgcgcccgacggcggcggcgctgctctgccggccgcgctcgaacccgctcgtggtctgccaatcggagctgtcagggcccctccgcctgcggcctcgggggccgggccgcgggagcccgtgggaaaccgagctccgattgggccgcctgacaatcgctccgcctccggccagccaatccgaggcggtggatgcaggagcggggcgttcggagttgggctgtagagcgactatgggcgcacgccgggtatccgcgccgcagccaggctcggagcgcgcggctggaggggcgcgggcggcgcgcgctccagagatgccttcctgcgaggctccgtcagcgcggcccggggagatcgcccgcaggcagcggaggcgcggcgggccgggggacgaccagggagcccctaacaaagcagctttgggagggccggaggcctctgcctccctcggcgataggtccgcgaagctgcctgtcatctcgcataggtggaggtggccaatggcgtgcacagacggagctctagttggcgcgcgcgcgcggctcggcatcggtgggattggtcggaggtaaaggattttcctgccacctaaggcggagaggaagggggatcgaaacgggggaggcgaagagtcaaaaaatgttgtgcctgggacaagtggtctggcgcgggaggcgtgtgcctggctctagggggagacaggaacttttttacgagagaaaaaaatcctaacgcaatcccttcccgtggatgctagaggatgttagaccctgagcagcctccaggtagggcatggtggccttcaccagagtccaggactcccagggttcacttaccgtgcccagcaagcgaacttggaataacagcgtggggtttgggccttacgcttacctgctgggcagagtaagtgactcgggcagggttcacgcagacctcctgggctcctctgtaaaatccggaaactacagttgcagtttacctctcgcaaggttgtggagaacgcggaaacggagacgctggcggtacagcctcgagcgaaacctttccctacacgaggccggagcttcctcctctcctgaagagctctagacttccccatttacaacaaaggctgggatgtatgttccttacaccttgattccatacacacgtgttcgccccgggagctgggaaggtctgcgctcccggggtgatcttgttgaaaacaaaaagaattgcccacgctgtggaagataaacctaaaccggaaaattgaaagtcatccctgattcctccttcttcttaaccctctcccatccatttttgttaacctcccaaacccattcctcccatcctgtctcacctggacctcagtaaagggctcccatcgtccttctgtcccaggccttgccccctgaaatctgttctccactttgcagaatgatccttctaagcagaaaaatctcattttgcgctcccaactctgggtctcttttctttccccagaacacgtcaacccccagcccctcccttcacttcactaattcctacccttcttcagatcccagcttggccgccaaggcatccatgcagtaggcattgctgaactactgctcttacagaccccgggaagcctcctgtaccctgtcaaggttagatgccacatttccacttccagtgcttccaccccctgtgctcccctcacaggcctgtatgacacggggctgaagttgcctgttgcactgcagccttccatggaagccggaatcttatctatcttccctgctggatcccagtcctagcacagtgtttggcacatttggggcactgaaaaaacatggaatccatgaattatagaggagctataattataggcaagagctttaaggatttgaagtgcttctaaaacatcagtttgagaagaatgggtagcatggtagctcttgaacggatgcgtccaccaggttccatg

SEQ ID NO: 1562535 - DNA, 4001 bp, Homo sapiens
ctgtagtcccaactactagggaggctgaggcaggagaatggcgtgaacccaggacgtggagcttgcagtgagccgagatcttgccactgcactccagcctgggagacagagcaagactctgtctcaaaaaataaataaataaataaatttaaaaataataataatacactttaaaaggccaggcgcggtgcccacacctgtaatcccagtactttcagagaccgaggcaagcggatcacttgaggtcaggagttcaagaccagcctggccaacatggtgaaactctctctctactaagaatataaaaattagccaggcatggtggcaggcgcctgtgatcccagctactcgggaggctgaggctgtaaaatccctttaaccctagaggtgcaggctgcagtgagcagagatcgggccactgtacttgtagcctggtcaacgagggagactctgtctcaaaaaaaacagaaaaggaaaatgaggataaaatacgataaattctttaccttggcccccagaagtgaattcagaattcagaaaagactagccagtgtaaggctgctgtaaccctagttgacagagaggagggattggggtggtgagtgggaaggctgtgtctccggaagaagaaatatacgtccccacctcactctaattaaacctgcttttccagcgcgataaatattcaagataacttttggtttgcatttcaataacaaagtcttgcaccactatcttcagtttaaaaaaaaagtttaatgtttgctctacgtttgaaatgcatgcaggtttaaaagacaagaaacaaaatgatgaaaaagtgtgaccggcctgagagttcagagcctctgaagtgtcaagggatccacagtgcaggtaggatgaagagtctgagaagggagatgggatcctccgaaaagagaaaatcgggtcttacagcgcgatgtaagacgatgcggatgccacttccctcccaccccgtcccgtccgaggcctccgccccctgcccctccgcaccccccgacccaggcacgcgcagcggggagcagcccagcctagcccgtctcactgctttggttttgaaaggtcacgtatttaccttagaatttcagcaccttccaacttactgttttaagtacctttaaccagcctattggctaaaaaccgaaacggtcctacccgcgactaccactgctccagtgacaatgctctgctgctacttatttaacggagctcaaggtttataattctcgaaagaatgttgttccccttccctttcccctcccgcctctgtacttgactctcgtaagaatgaaatcagaaaagtgcagaaaacacaggctcctagcaatggttcggggcaaacgggaggggcgaagaagggctggagccgccccggggccctcgctccggcctcgggagggcgtcgcggccgcagcagggcgtcccgaaaaccgtcgcctccgtgcccgccgcgcgagaaggtgaaaggcacgagatggagcctctccagccctccccaggaacgcaacctgacggcgtgacagcgcggcagggcagcctccccgggctgcttgcgggtcgcggcggcgccacggtcacggtcggcccgaagggacgcgggcaggggcaagaaggggcggcgggggctccgcgggcccgagtctgcaggccggcgccgaacgcagggaaaacccggctggacggccccacagcccccagaaggccgggccggacagggcccgacgagggagcctccttacgcgcgggcggcgggcgcgagccctctacggttgcctggcgccggagacccacagacaggactcacccagcttcctcaaacgcccacgccgacttcaggcgcgcgcgcaggaaggagactgctgcgccacaaccctgccggcgtcccgcggctccacctcagccccgggagcccggagctgggagcagacgcgaggatagagcgccggtgaggcggggcgaggcgccgtgtgcaccgcagcgaccaatcggagcgcagcaagtggccggccgggggcggggcgggacgcgagggggcggggagagggcgttggctgggcgcagcgggacgccgggcgctcctcgcgaccaatcggcgtgcagcaagtggccggccgggggcagggcgagctccgagggacggggtgggctgctctgcaggcctcccggagccggagttcagacccagctatctacggttccgggcagagcgggacgggcctctcctgtcccctgccggtgggcggccgccgccgggctcccactgctgcgtttctgcacgctgacttgaagtgcagtaccgtgagattacgtgcggacggagctcgagacccgggggaccagggtttcccttcgcctatggccgatcagtcttgtctgtctgcgagctgcccagagtagggaaggtgctccgggagggttctcgggaacggagggtctttagagatgcctttttctaatcccctcaattcagaaatggagccccagaaagttgaagttagtaaaccagggctacccagcgagtgctggttacccgaggtgatcctcacaatacaactagtcttctgatttcgctcggcgctctcccgtctattcacgtagatttttgtctttttttttttttttcgtctttcttatagtcagatatctttcagcctcttggattttcaacataactttaacagcgtttggaagccccgtctaaatttcctacagaaatgcctataaccatttagttgtttgggggaaagtcgagctttgttttttgggtggtttgtttgtttgttttgagacagggtcttgctctgttgtccagggtggagtgcagtggtgtgatcttggctcactgcagcctcttacctcccacgctcaatcaatcctcccacctcagccttccgagtagctgggattacaggtgcgcaccaccatgcttggctaatttgtgtatttttagtagagacgggatttcacctggctgatcctgaactcctgacctcaggtgatccacccgcctctgcctcccaaaatgctgggattacaagcgtgggccactgtgcccagccaagtagagttattatcagtggaaatctaaaaagcattttacttgaggcataatgaagtaaaaggttttgtatcatggaattatcaccaaaaatgccatcctggataatgttctcctatagctcttatacatgggctaggatctaggtgttcaataaatatgtgctgaataatttacttttgaaatatgtcacaatgctggcattccaccagaagagaggatacagaagggaacactctcctctctttaagaaccttttgaaaggggcgggggttgcatgtaccatttttgttttcattctgctagtaaaatagtcacttgactacaccaaattgcaaagaaggctggaaaatggggtttcagtactaaggaaggaaaactagatattaggggacaattagaagtttccaaatctcatcactttttttgggggggtgggggaggcatcccaaagggcagactggtttattaggcagcagccaggaaaatcagcggttggacttgtccccacactccagctcatccttcttgttgatggcataggagctggaggaggccttggtggcattgatgagctcatccgccaggcactcagcaatggtcttgatgttccagaaggcagcctcacgagtgcctgtgcacagcagccagacgacctgattcacacagtgcagtggggacatgtccacagcctgttgtctcacagtccctgctcgcccaatgcatgtggagtcctcccagggaccactgttgatgatggcgttcaccaggacctggagagggttctcgcctgtgagcaggtggatgaaatcgaaggcatgcttgatgatgcacatgatcatgagcttgttgctgttgttgcagccgtgcatcatcatggagttagtgaggggctccacaatggggcactgagctttgc

SEQ ID NO: 1562536 - DNA, 4001 bp, Homo sapiens
gatcattcataccccaaacctcaatatatgcaatatacccaggtaacaagcctgcacatgtgccccctgaatctaaaataatagtttaaaaagaaaaaaatagcagtatgcattatgatctctgatgtattggtaaagcattaactcgaatccctttttatatttagctgttcactgttaaacagtattatcacttataaatatttattttctctttcacttgtaaaataactaacctttgtatgtttattgaacaacagggattccaatggactttcaaatgcttatagatccttcaagttattcacagcaattaaataagaccaaaacagccatttttctaaaagtttaattcaatctgtattgtattttagtactttgtataattttataaaatatccacactttctttccctttaaaatatagcccgtgtgtatgtctatagtttttaaatagaccaggaattatactaaaattatttaataaaactatggcatgtgcattacattctaatttaaacttacttatttactagaataaaatagctaacccaacaattgtgaatttaataggtaaaactaaaatcactcacaatggaaagatacggtggctcatgcctgtaatcccagcatttggggaggccgaggtgggcagatacgaggtcaagagactgagaccatcctggccaacatggtgaaaccccaccgctactaaaaatacaaaaattagctgggcgtgatggcgcgcacctgtagtcccagctactagcaaggctgaggcaggagaatcacttgaacccaggaggtggaggttgcagtgagccgagatcgtgccactgcactccagcctggcgacagagcgagactctatctcaaaaaaaaaaaaaaaaaagagagaatttatatgcacatatatatatataaagttcatcattttaaaaatgtaaaaaattgtttttaagagaaaataaactgttaatacgtaggttattgctatgctttcaattttttaaatttaccctataaatgaataagtggtaagatggactataagttccagagcgggattgtctagtttggaatcttacttctgctacccactaataatgtgaacttaagcaagttacttctagtctctgtctcagatccctcatctgtaaaacgagcataccaataagctttcatatgttgtagctacacaatacatttgaaggtattttaaaagctgttggtacaaagttagctctaactaagagttatcatttcttatgctttttctgtttatcggagttgctactcagtttgtgacctttttaagtctacatttatatccaagttattttatattagtagaattaaaatggttagactgataagagaatgaagatagaaataaacaatattttctgttaactttgcatgtttatctacttacatattcaacaacatgttaatatgtttgtgatttaaattatatcaaaacaaaatcaggggccatgaaatctacttgattatatgttgaaaccaagatacttatttaacattatttattttaaaaactactcagtctcatgcttaaattctgcattaagtttcaaattacataccaattaattttcctaatattctctgaagggaactacagagaagtacatgaaggcaacataaatattttgtcatgaagattaatttgaaatattagattgaaagcccaaaataatgcatttagttggcaatgaataaaatagacttacagaataactgacactaaagtgtgtacattcagctgagagcaccttcacgagccaactccatgtgacttacctcgttgggattccttgattgtcaggcaggatactgcaattaatccagcacagagcactaccaatatggcaaagagagctgcaaacatgatttcataggagctgagagaatgatgcctagaagatatgcctcttttcgaccccatttttggttttgaaggcttgctaatttaagaactgaaagagaatataaataattctaccaactgaagagaaaaatctctcaaatttttaaagatgtgtaaagcaacaaccacctgtctacatgcataccagtcagtgtaagtgagttgtgtatgtctctttggcaaaattatgtctctatacattaagtatcattaaaagggtagttaatctttaagaagatataaatgagtaaagatgcctagagttgtaaatgttaactacctgaacaggccatttgccaaggtgaatcaaattaaattcatgttgtaaacaaaagacattttatcattttgagaactattaagaaaaatgtgaaattcatgacagacaaattagtcactaggcacatgcatctgatattcatagagagagttcctaacagatcaaccttctaccctctgactcagatgattcttaagacacttctcttatatgttgatatagaccttctaaaaataacttttaggtgcagatgtatataaagcctaacatatatatactctctctgtgtacatatacatatacatgtattccttatggaaacaatcaaaagtgttgcaaactttgttatgtcacccaggtgaagttatgcaatgtaaggcagtattacataagggaaagtacacttaaacaaggcgttctatggctactctttatggccttgtgcagttattaatgaatggtagtacctgtcataagaggaataaaatatgtgtttctattctaagaaaatagtctgggtggggaagacattgctcacttgccctggactttatctctttaaatatgccaattagaacaagagaacaggttaagataatcatagttatagttgtagatatatgctttatggaaaaatcaaagtcattttctgataattaaattacggtttagcattgggattattcacaccatgaataatgatgagttcaggaactttaaaacacaaaaattaaaactaaataaaaccgaatctattctgaagtaaaccaatgtgacttttattctggtaaataaaactggcaggaggtaagaaagttttagattggaaacccctaacacactgaaattgtggcatattataatgggctaagatgaacagtagctgcttttcttcttctttacccatgaaagaagagaattgcctgttgcccccaaactcaagaatttttgctgataaaaatagaattatgagtaaacaaatgtatttcattgaaaatatttatatttttagctaattgacttaaatatatatatgaaatatatatatgaaatcagagacaccacttatggacttgggagaagtttattttatttatattctaggggacaattacaataggccagaccctctgataaaattggaacctacaaaaagcgcctcttgaatttggaaagccaaagtgaaagcacaatgactgttttctttgtatggctagtgcagaagcaaaccctttttagaatatcatatagcgctttaagttacatttcttttgactttatagaaggaaagcagaagacagtgagttcacatgtctgcttcaagcatagcatggattaatggataaaatattagattgaaagcccaaaataatgcatttagtttcagaaacaaaactttcactttcgatcacaaattctcctcaaataatgttttaaataattatatttagtatcaagcaaatgagtgaaagaatagcttttttaaagaaggcaataatttatggaggacagactgaaattaaacaaacagatgaatgtgaaaaatcaaatcacatatcttgaaattttttgaaaagttattaaaataaaacaggacttgccctatcaggtaacaaaactcgttacaaagctgtgatataaagagagtgttgtatcagtcccagcaaagaaaactgtctcagcggaattaagtgcccataagtgtgatttgcatatggaaacttcatatatgaaaaacgtagggcattaataataggttagaaaagagtg

SEQ ID NO: 1562537 - DNA, 4001 bp, Homo sapiens
tattataatgccagtgcagccaaatatactcctacaattaaggtgacttgagttcaagatagagtggccaacggtgccaggcaggccagcacctagcaacctgggaggccctgcctgaggctccagcaacagcacaagcttgttgttagaaggttgtccttggctggtgggaataagggaagctgctggggaccaaacaaatgtccaagcagagaacaaaagcccagccagctcaccagctgataattaaaaataaccagaggccgaggtgtagatggccatctccaggcagaggtctcagcccgtaggttgcaccccgaactctccagcctagtgtgtccttacccgagggtgttgctaggtttcattctaacctcacctgtccagtagttctgtagcggagcagggcaggtcctacttcttcaaaagcactcagtaaaggtggggaagtcctgagcaacctccagtgactttctgggggagctcccggttacctagcccaccaggtcctcccttcacagcagcagctcaggagccaggactgacttagctacttgcgtccccaaggccctttgcgctggtaaactctccctgccacactcccaacccccatccttccttcaggggaggctggctgcatccccacttcctggagtaccttcccagatctcctgggacaggtcaacaaacttagtctcactttaggttttccaaatgccttgtaactgggctgcgtagcctttgtaattttccatgattcgggaggttctcgcggctgggagctccgtgaggtcaggcattgccttgggcgcgatgcgctcatctttcccgcgggaccactgcacaggttcgcacggagggaagggctgcgcagcctcgaaggcgagccctgggtgctccctgcccacagggctcacctcgggccgccgtgctatcctttccttcccaaacaagccaccaggattcctcgtgattagggctgccaccagggcgttctgaacaggattcagggccaccgcgctgtgctctacggcggagcgggcgaaggccctcctctgccacaagcgctcagggctctcggcgcacaaactttctggacatggggcagtttttcagctggacccgtgctcgagcagagcgcccactgccagactggagcacttgaccactcagggtgccactgtgccgagccgggcaggacaggatgaggtggaccgaagcgcccaggtgccccgccttccccccaacccggcacggagcgcaagcggaggagccagaccggctcctcccgggcgggttcctgccggtgccgggtgtccaggaggccccggccctgatcgccgccagcgggtcgccgcaacggggcctgagtcgcgagcagtccctccccgagactgactggccgttcgcacctcgcccgggggccctccagcagcctggcccagcggtccccgccgcgccggccgtatcgttcccggcatctcagcgagtttccagtttctccctacctcagtagggaaccaagaagcagaaggagttcaggtaacactgcgggactgcagagatttcccccaaacaaagaagccaaccgacagcactcccagtcctcctccccaaagagaaaaggcgcaccggtgctcccaggcgggggccgtggagggcaggcggactaggagccagctttggggaccccgggggactctcttccaccaactggctagggactcgcaggaccacctgccccaacctcgcgatgccaagccaacaggggcggcgagggctctcggccgtgcgcaaggggtcccaggcgcccagcactctcccagcaccccgggaggcgccctgcccggctggccccagcgctcgaccctcgggcgcactcacctgccgcgccgcgctcctcacacccgctttcacctccgggcggggcagggggcatcggcgggtcccaggcgcccaggttcccctccccagcccggaccccgagccgggaccctggtaccggcgccgctcacctgccgcgctccaggcggcgctccccgcccctcgccctccgcctccgcctccgcctcctgcttagctcgcgcctactcggcccggcccgccctggctctcgctttaatctcaggaggcggtgtcccagggtccagggcgacacccccaagcgggtcgcgggtcaccctgggcgggcgggggcgggggcggcgggaggaggcgtttcccaagggaagtccgggacgggttccctgcctggctcaaccccggctgcggagggacccataagggactctggggcgcttcccgggcccggccacagcggccaacctgcccctctccggtccgcggcgcagcgctgcccgagggctcgagtttgggttaaggaaggggattctggggagcgctcctggagtcctgggtgagcccccggagctgctacctcacgagctcctgtaggcggccggccccgtcttggcctccggggaacccactgtagcctctgggcaaggacccagggtaggccttggggactgctggcccaagcacgagtggcggggacacagcgccggacgcccaagaccctccccagtccgcctaggctggcatttcttggcccccaccagcgtccggtggaaagtgctcccccggatggtcccaggtctctcggcaccaccggccagggcgggagtgaggaagtggtgggacacacctcagccaggaagacgtggctgttcccgggcacttgagaggttctttctaatgtttgcaattgtgggggctcagaattcaccagaatttaataggaccgtagaccagaattcatcaccccaagtaggactggaggagaccagaatctgctaccccaacatagtcctctttggcacattgatgatttggaactggttatgttgaggaactgcagacaccagagtacctctgagaaaatgcccttttgtaaaggaaatttgcacctataaaggaaatgtttgttagtcagcagatctgtaccaggaagagagctgttcccggacaacttttatcacctgggaaacttttatctgcctcacacggcaacctgcgttcaccagacacctcctctcctcacgctcccctcactcctccaccgctccccagaagcctcaaacccccatttctttctgtcactcagagtgacagataagcctcaatcatcgggctgctgcaccttttttttttcgtgtgtttttttttcccccagaaggggtctcactctgttgcccaggttggagtgcagtggctcaatcatggctcatggcagcttcaacctcccagggcacaagtaatcctcccacctcagcctcccgagtagctgggactagaggcgtgtgccaccacgcccagctaatttaattttttgtagagatgggggtctccctatgttgcccagactggtctccaatctgggctcaagcgatccacctgccttggcctcccaaagtgctgggattacaggtgtgagccctcgcactggacccctcactcacctggcctgttctttaagtctcatattcttgtgggattcccatctgtgagtacatacattaaaacagcttttctcctgttcatctatttgatgccaatttaatttgtagactagctgaacgaactagaagggtagaggggaagcatgttttctcctcccctgcataatatacaaatcaacatgatttgctttaaaatgaggtggaagcagaaaaaagccccattcagtcccatcccaggctgccttggctcactgctcccttcctgggaagctctcccggaagcctcctgtggggcaggactttcctagtaaacccttccctctcactccctcctttggcaccttttgtggtctgctggtggcacccacaacagggattgtccccaatatgccccagccctccccatcccccacactgccctgcgctctgccccagtgggaaaccctcaaagaccctctccagcacatagggcaggtgcag

SEQ ID NO: 1562538 - DNA, 4001 bp, Homo sapiens
tagcaacctgggaggccctgcctgaggctccagcaacagcacaagcttgttgttagaaggttgtccttggctggtgggaataagggaagctgctggggaccaaacaaatgtccaagcagagaacaaaagcccagccagctcaccagctgataattaaaaataaccagaggccgaggtgtagatggccatctccaggcagaggtctcagcccgtaggttgcaccccgaactctccagcctagtgtgtccttacccgagggtgttgctaggtttcattctaacctcacctgtccagtagttctgtagcggagcagggcaggtcctacttcttcaaaagcactcagtaaaggtggggaagtcctgagcaacctccagtgactttctgggggagctcccggttacctagcccaccaggtcctcccttcacagcagcagctcaggagccaggactgacttagctacttgcgtccccaaggccctttgcgctggtaaactctccctgccacactcccaacccccatccttccttcaggggaggctggctgcatccccacttcctggagtaccttcccagatctcctgggacaggtcaacaaacttagtctcactttaggttttccaaatgccttgtaactgggctgcgtagcctttgtaattttccatgattcgggaggttctcgcggctgggagctccgtgaggtcaggcattgccttgggcgcgatgcgctcatctttcccgcgggaccactgcacaggttcgcacggagggaagggctgcgcagcctcgaaggcgagccctgggtgctccctgcccacagggctcacctcgggccgccgtgctatcctttccttcccaaacaagccaccaggattcctcgtgattagggctgccaccagggcgttctgaacaggattcagggccaccgcgctgtgctctacggcggagcgggcgaaggccctcctctgccacaagcgctcagggctctcggcgcacaaactttctggacatggggcagtttttcagctggacccgtgctcgagcagagcgcccactgccagactggagcacttgaccactcagggtgccactgtgccgagccgggcaggacaggatgaggtggaccgaagcgcccaggtgccccgccttccccccaacccggcacggagcgcaagcggaggagccagaccggctcctcccgggcgggttcctgccggtgccgggtgtccaggaggccccggccctgatcgccgccagcgggtcgccgcaacggggcctgagtcgcgagcagtccctccccgagactgactggccgttcgcacctcgcccgggggccctccagcagcctggcccagcggtccccgccgcgccggccgtatcgttcccggcatctcagcgagtttccagtttctccctacctcagtagggaaccaagaagcagaaggagttcaggtaacactgcgggactgcagagatttcccccaaacaaagaagccaaccgacagcactcccagtcctcctccccaaagagaaaaggcgcaccggtgctcccaggcgggggccgtggagggcaggcggactaggagccagctttggggaccccgggggactctcttccaccaactggctagggactcgcaggaccacctgccccaacctcgcgatgccaagccaacaggggcggcgagggctctcggccgtgcgcaaggggtcccaggcgcccagcactctcccagcaccccgggaggcgccctgcccggctggccccagcgctcgaccctcgggcgcactcacctgccgcgccgcgctcctcacacccgctttcacctccgggcggggcagggggcatcggcgggtcccaggcgcccaggttcccctccccagcccggaccccgagccgggaccctggtaccggcgccgctcacctgccgcgctccaggcggcgctccccgcccctcgccctccgcctccgcctccgcctcctgcttagctcgcgcctactcggcccggcccgccctggctctcgctttaatctcaggaggcggtgtcccagggtccagggcgacacccccaagcgggtcgcgggtcaccctgggcgggcgggggcgggggcggcgggaggaggcgtttcccaagggaagtccgggacgggttccctgcctggctcaaccccggctgcggagggacccataagggactctggggcgcttcccgggcccggccacagcggccaacctgcccctctccggtccgcggcgcagcgctgcccgagggctcgagtttgggttaaggaaggggattctggggagcgctcctggagtcctgggtgagcccccggagctgctacctcacgagctcctgtaggcggccggccccgtcttggcctccggggaacccactgtagcctctgggcaaggacccagggtaggccttggggactgctggcccaagcacgagtggcggggacacagcgccggacgcccaagaccctccccagtccgcctaggctggcatttcttggcccccaccagcgtccggtggaaagtgctcccccggatggtcccaggtctctcggcaccaccggccagggcgggagtgaggaagtggtgggacacacctcagccaggaagacgtggctgttcccgggcacttgagaggttctttctaatgtttgcaattgtgggggctcagaattcaccagaatttaataggaccgtagaccagaattcatcaccccaagtaggactggaggagaccagaatctgctaccccaacatagtcctctttggcacattgatgatttggaactggttatgttgaggaactgcagacaccagagtacctctgagaaaatgcccttttgtaaaggaaatttgcacctataaaggaaatgtttgttagtcagcagatctgtaccaggaagagagctgttcccggacaacttttatcacctgggaaacttttatctgcctcacacggcaacctgcgttcaccagacacctcctctcctcacgctcccctcactcctccaccgctccccagaagcctcaaacccccatttctttctgtcactcagagtgacagataagcctcaatcatcgggctgctgcaccttttttttttcgtgtgtttttttttcccccagaaggggtctcactctgttgcccaggttggagtgcagtggctcaatcatggctcatggcagcttcaacctcccagggcacaagtaatcctcccacctcagcctcccgagtagctgggactagaggcgtgtgccaccacgcccagctaatttaattttttgtagagatgggggtctccctatgttgcccagactggtctccaatctgggctcaagcgatccacctgccttggcctcccaaagtgctgggattacaggtgtgagccctcgcactggacccctcactcacctggcctgttctttaagtctcatattcttgtgggattcccatctgtgagtacatacattaaaacagcttttctcctgttcatctatttgatgccaatttaatttgtagactagctgaacgaactagaagggtagaggggaagcatgttttctcctcccctgcataatatacaaatcaacatgatttgctttaaaatgaggtggaagcagaaaaaagccccattcagtcccatcccaggctgccttggctcactgctcccttcctgggaagctctcccggaagcctcctgtggggcaggactttcctagtaaacccttccctctcactccctcctttggcaccttttgtggtctgctggtggcacccacaacagggattgtccccaatatgccccagccctccccatcccccacactgccctgcgctctgccccagtgggaaaccctcaaagaccctctccagcacatagggcaggtgcagttgtctttcagcggcaactcacttatttctgtcttgacagtgtgtttggtgcctactaattccacccagaaaccagggagtaagtgctgccgc

SEQ ID NO: 1562539 - DNA, 4001 bp, Homo sapiens
atgaactgtattttctaaattgttcttctaatgaacaatacattactctatttacaaggaaaagtttttgttcctccccactacttagtcatagcaaaataatcaaaaaataagagaaaggaatattatagtgctattaatattcatattatttatattataaaatattaggaacaactataggtcaaactatgatcaaatggctgtgtaaattgcatatctacttgatggaatactgtgattccataagaaaaaatttataaaaaccttttatggaaaaaacccacctgcctatatctgtactgtgcatgaaaccacacatacgggcaaaagcaggaagagactttgcagacataaaaaccaggtaagttttgggagtcaggtgattgcaagatttttttttctttcattgacacttagctaattttgagccatatttttaaatgtgtgtcttttcagttacttgaaacctcttctcccacctcccatcctttccaaacctcctccaagccaattttccagttggtttaaaagaaatcattagggtgacccccactcccactttctggaacctcaggcagagctcctgtggttcctccctagcaccaatgtgtcaggaatctgcctgcgtccaagccctgacttccagaaccggcaaccccacagctccctttgaccagtcctgactatctctggtcaaaaagatcctagccgtataggttgctagagagtccactgttttatcaggcatttgtgacttatttacgaaaccaacttttttccttcagttgttaggagccactccgtcatctgctgctggattttaatctaggcctctaatatctttggcgacatccagtttatcctgagttttcggagggactggtggccactgcttctcaggacttcctggaggactcagagatttcctggccaggatctgacctccttcaggattgacaggacaattgtggagccccagtctctgaaaacctccaacaagagaagaaaacaccggtctccagggagagagcaaagggcttaacgaaacgatcccctctccaatgccccttctccctgagattctgcagatctagggaagtgcaggtgtccagcctgtgggtgtcagaatggctggggagatatttcccccacagggacagtcagtcacattggtcacctacatgagggtatgggcagaaatcacagagtcctcacctgggtccacttacctggtgcaacaggacttattttcaaatcatcaaggccaaaaagcgatcggaatgagaagggggcttcaacagcaggcggatcattttcccccatggtgactatttcaggacctctgacatccggctccgcctccacctctacctccttagccgaggaagaacagaaagcatttgttcccctatttatacttgtagcatcaggtgcatcttggtcatacggtaaatctttgaaattcgacagtccacacaaagcgcattcagtatcgattaaccaaaaacagtcatctggtgagaatgcattttcgtctgagctacagcagataacagaaaagcttctagaattagcaaaaaaaaaaaaaaaaaaaaagtatgaacttaattctgctaagacaatgactttcccattgtttgtccaaccaatcttcaaatcgattgctttagagggactccctctcaccatttagaagttgccatattgctattgttcagaagataaattactctcaaagccctttccattgcttttttgcgattgttttcacctgtcccacataaacgcaattctttccctgtgcgtgtggtacacctaccataagcataagtagtttcggtactcacataattcccgagtcccaaaaatgtagatggcaccacggaagagatagtaggccacagtgttactggcttcccataaacacagccctttcctggctcacacgggcatgacctaattaagaacgaaagtacccgagccgtccggtgcccggtccttcccccacatagcaaagtggggagtggctttggaccaacggcttgcatcaaaataaccccggggctgtgtttcctacgaaagaattccacctatcacaatgccaaggagaccagagacctttctaagtcattccctgtaactctgagagggcggaggaagcagggaaatagcagaagattcccaattaaattctagttccctctcccagatatcaggcatggctgctctgggaacctgcttcctccaagggctaaaatccacaggggctccagcaggcacatcagcacagacactcagatcatccgctttcattccctttgtgactacctgttgtaacgtttgaaattccaaagggatctagtaagccatttgaagcaacccgtgtttcccaagatcatagtaaaatctaaacaagagttctgtgccaaaaatgttcatttcatttctatcgcaagaagagcttgaaagagtaacttagaaaagcaagaagttcatgttgggccattttctggctttcattcttgctgatacctctgtttattatcagcatgtagcaaattacatcgtttatccatataaaaagaataagtgggcaaatggcttctgaaagatggaacctgggtgagaacatcccctcccaaacaggctgtggttggcaagctgtacaacactgagaagtgttgagaagcatcttctctcctcacacccattttactcaccatttctggagctgccatcattaaaagcagaaataatttcctttttcattataaaaacaagtgtgatggtaagcaggccgccaacaggttagtccaatcggggaatattttccccaagtcactcagccttgtcgactcaatcatcgcagcaaatggcattatcgcgggcatctgtgtaacccaagctgccgtgggcctatcaaatagcccttggtggtatggctgcagagaccagggagggaaaaatgtggcttccctttaattagtcagtaaggtgagcaaaccttttcagaagctttgcatcagggagtgatcggaacacagccgctccttttacttgaaagaaggggtaggctctgcccagtgctgagcatgtgaccgtcaagagggcagacatactctctggtgggggtttctgtccctccctgtaactgagcccccaagttcaattctgcagctactcctgcagacaaaagatggggagcctgaagatgctcatcacagcctgcgctccacaaaagacacgtcatgtttccttcctcggaggcctctgcatcccaagaggcttctgcacacagcactgcttaaaggggtttaaccgctgctgtggggaccagagcgctgagcatctttgaagggctgaatttaccattgtggatggcaactcgcaaatccatgcatttattcagcaaatatttagcaagcatctgccatgggccagactctagacacagtgcagccagcaagaaaaacaaagtgctcccatggggccccagatgttaagcgctaggaagagattaggccggggagggtctgagagagatgagggcagagtggtacaggacggcctctagggagagtgttgtttcagcagggaccttgatgatgttttagtagagaccttggtgaccagtgaagtgagtcttgtgaaattcctccaaggagggcgaccaccagctccaaagcctggaataggggccacgctggagtgtttgaggaaccccaagaggggccgtgagcctagaaagcagggaacagggaatagccgatggcagatcccaaggcccaggggcatgggaagggctctggtttgcctttgatgtgtggaaagccttgggcgatctcaatggggcaaatttgggttgacaggcagggcatagagtggggtaaggatggggggacacaaggacagccacaaggaggctgcacctcatgggccacaagggccatgactcggcacgagtggtgatgacggtgaggactggctgcctgaggttg

SEQ ID NO: 1562540 - DNA, 4001 bp, Homo sapiens
tctgctgggtggggaaggagagggattgagctgagtttttctgcataacagagcagagaggccttggggtttgctcagacagagcggtggtcctccaggacagaggaggagggcagagagaagagaaaaggaggccccccaacaccccccacccaatgagtcagaggaagaggctcagcggggaagagaaatgcccaatggggaagctctcagctgtgtgcagtgtgtgtgtgtgtgtgtgtgtgtgtacctcttcctccttgtctctaaggagtaatacatcattcctgaagacgttagtgtggatgatttttgctcttctcattgaacttgaattgcagctcatttctgaatctcagttggtgtggagggagagggaggcagacctcagggctggaggctggagggcattttggcttccaccagctttggggaaagacagccgagaatatgattcatggaatttgaaaactgagactctgtggaggactcagggcagtgtggctttaacgaccccatctacttgagtgcaaagcagaatgcagcctgcctgctttgagtgctgagacttgagagcaaaggggagtaaggaggctgctaggggaacccgtggaagtacagcggccgcaggaagtcagaaggaaggggccaggggagagaaggaggcccatgcctaggccaaaactgtgtcactccaatgcaaaaaatcatgtaggcaacacaaacactaaaaagtgaatagtcaactgttatagttctttgttctacatgttgctaaacaagtgttttggatgattgtgtcttcactaaatttctgactttcaacaattggttctgtggggttcttggggaagcgtgcatggacattgatgtgaccgccaggaccaagcaggaaagtgtccaggaagctactctaggagctgcaagctgaggagctggagggttttttggttttgtttttgttttctactttgaaactttttattgcatgttcgtatctccgatcctggcctggccctgggaacccccaaacatgccacttcccatgtgccttgagcaagtcacttagcctgtctggccttggtttgcttgcctgtgaagtgaggatgatatcgggcatcctaaggtggatgtgaggatgtaatctgagagcgttaaagcacccaatagtgcccaactaaatggtagttgtctttctttattgttatcctctctgtgttttgcccatgggttggaaatgctctttaacttaccttgggaaacccagttgggcacaggcaacatttgcgtagtgacccttccagtcatcggagcacatggtcttccacgaagcagctgtgaacacctggagcacggcattctgaccacccacccggactggccgatgtgcagaaagaaaggcttattagtggccagtggaaccctgagaccataggcaggggtttctccacagccagctcaaacccctcctctgccaaatctgacccacttcttgtccacggcagcctccccatcacagagcagtgactctggatccctgagacttctcgctggtctcatcttattgcttatgtggtctccccaagagagccagagctccatggaaggccctccctgaccccccagcccaacatgtctttgggcaaacgccagttcaatcccagctgaagacatgacctaaaaatggcaatgacttggacccattttacagatgggaagggtcagggttggcttctgctgcttccttctgtttccccaggggaagagccatgaccttaccacagcggtactcgtcctccccgtctttgcaatccgagactccgtcacatcgagctatcagctcgatacacttaaaggatgagcgacatctgtacttccctgagcagtcgaagtggactgggaaaagggaggaaggcaggaattaaccaacagctctttcagagtgcaacactaacaactgtccccctgccacacagtgcggagctggcccgtgaataatgaaacctgtattgaaattgcgtccctgtcagcagcctgtttcctgcagcccagtttctgttttgaattccaaggggtggggctgctgtgccccactttatctcgctatgtggcctggcccaggaaccacagtgcaaggtgaatttagactctggaggtctcaaggtcaagagagaaactgcatggcggggggccgacctgctgagccagccgagcaaggagtcctgactgagaactgctcggccttcctggtttctcttaccgaaggcagaaagtgaacgaagtgtggaccacacagtggggcaggtggcgaattgaactgacctgtgattcaggtatttgaaagaaaaattgttccctattagagaccctccatccaaatgacccactttctcaaaagccacatgcaccttattgtaaaaacagctggtgcgcctgcattgcatgaataggtctctttgtcttctccccgctgccccggtcagtgcctccctcccacctgcaggattctatttcatcagctgcctttggccactcctaaccgggcaggttccttggtgacaaagccatgagcatggccagcagcccttgcggcaccccagactgactttacattcatgtgggcaaataaaacttcaagtcagcaaaccaaaaggatgtttgcctccagtaattaaggctgggcagcagcaaaatgctgggatgagagggggcgctcatgaaagtttaactacttggctaggtatttgagatcctactaaataatgaattgtactcactgcccagaccaatggccagtgctaatatcaatgcaatgatcccaatgacgatgattggaaaaaacttcaatggcagcagtgacaggatctgtgcagcaacagcatctgcatctgaaaaccagaaaaaggaagagcagaaagccacagaacctgacttggagtgccatgaaacttacaaatttaactatcctttccccctcccctctttgcagagaagtctcagcccaaagaaaggtgccttaattagggaaagggccacccaccaaggggcacattctctagttcagtcctacctgctccacctctgacccggttattccatgggggatgaggggatgtgctatgggttgaatagtatcccccagaaagacacgttgaggtcttaactcttagtacctcagaatggcatcttatttggagatggcctggagagtctttacagagtcatctagttaaaatgagtcattagggtgggccctaatccaacgtggctgttgcccttataaaaagggggaaaacagccgggtgcagtggctcactcctgtaatcccaacattttgggaagccaaagcgggtggatcacctgaagtcaggagttcaagacaagcctggccaacatggtgaaaccccatctctattaaaaatacaaaaattagctgggcatgatggcaggcacctgtaatcccaactactcaggaggctgaggcatgagaatcgcttgaacctgggaggcagaggtggcagtgagctgagatcgcactgctacactccagcctgggcaacaagagcaaaactccgtctccaaaacacaaaaacaaaaaggagaaatcaggacacagggacaaacatgcatgaagggaagaggatgggaggagacacaggcagaagccagcctcatgaagatgaaggcagagatgggaacaatgcatctacacaccaagaaatgccaaagattattggcaaaccaccaggagctaggaagaggcagggcacggtgccctatgggtttaagagggagtatggccttgatgacaccttggaattcagacttctggcctccagaactgagacaataaattcctgttgttttaagtcacccagttttggggactttgtttcagcagccctatgacactaagatggaggggaagtagcatcccaacttccaaggctgtttccctgcagaggagggggtgaaacccacacggggggcttgcaggcaga

SEQ ID NO: 1562541 - DNA, 4001 bp, Homo sapiens
atgagaacacgtggacccaggaaggggaacatcacactctggggactgttgtggggtggggggaggggggagggatagcattgggagatataccaaatgctagatgaggagtttgtgggtgcagcgcaccagcatgtcacacgtttacatatgtaactaacctgcacattgtgcacatgtaccctaaaacttaaagtataataaaaaaaatactgttctgccatacatacagatactcattaaagatgagggagaagggcatggggtgggggagaatgtaccaaaaccaaagaccacaggataataacctcagagcagagactatctctctagttattttttcttttgtatgtaatggagaggattattatttactctgatgaagaagtttacatcaagtgttcagcttcctttgtgggttacagagaataaccagagggctcagttatgctctctgaataactatgtttgcttagtgttttctaaacaatattaaatttcactaaaatagacaaggttgataggacttgggggcataactcattgactcaagctatcattttataggattgtgagaaaacaaatagatgaacatttaaaatacactcatattctcgctagaaaagaggattttgaatattcttacatcaaagacatggtaaatgtttaaggcaatgaatatgctaattaccatgatttgatcattatgcaatgtaaaatgtactgaaacatcacattgtacctcataaatatgtacaatttattatgtgcgaattaaaattttgagtataagaaaaaataaacttcaattgtaagaaaacaacccaacttttaaaaaacgggcaaaatacgtgaacagatacttcactaatagagatttgcaactggcaaataagcaaatgaaaaactggtcatcatcactatctattagagaaatgcagattaaaactacaataagaaacaatgctgcccgtccagacgcattgttttgaccgtttccaacttgtcccagcccttcccggggcatcgctggggaccctacgccgacgtcccccctccgcccgcgccccaagggccgactgggcaaattgggagacccgccccgcggggcgacccaacttttcggaacagcaccccaccgcccacccccgcagacccccggacccccgctcccggcggagactcagggaaccccgcaccccaagcccttctaaatcgtgcagcgtgagtgtgacggccaagagcggatgcagcccgggatcgcccgcaccttcccgtgggcggaagcgcaggagccagctggggagggggcgccctagaggagcggctagaaagcagacacggggaactcaggtcatcctggggggggacaagacaacgagagccgggcgcctcgggggcggcgcgggagcctccgcaggaccgggcgggcgccccggctggcgcgggcggggggcgcgccccctttacctgcggctccggctcctaggccatttcctcacgcggcggcggccgggactgagctaacaccactcaggccggccgggtttgaatgaggaggagcgggcgcggagaggaggggacggggagggcggagggagggagggaggcgtcgcggagtttttctcggccttttgtgcggacacctcccggattccgcgcccgcacccggccccccaaaagacacggggagccgcgggcgaggggttcagccatccgccgaggcgcctagtgccttcgcgcctccaagacccccccccaacaaaaaggagcgtcccccacccctacccccgcccggaggacttagggcctgggctcacctcgggcgcggagctaagtgtaggcgccgggggtccctagagccgccggggcgcagcgagtccggcgctgggtaactgttgggtcagaaactgttcaggtagcagctgttgtgccctcccttggccccgccgctcggagacgccccgccccctgccttgaacggccgcccggccccgccccagcgcccacgtgactagcataggcgcgcccccgttccgcccgccgccgcagactccgcctccgggacgcgagcgagcggcgagcgcgcgcactaccagttcttgctcggcgactcccgcgcacgcgcgcgccgtgccaccctccccgcacccctcctcccgccatccggcttaacgtggcgggcgcgcgccgcggcagtagccgtgacaggtacccggcggggcggggggggagggggttggcccgcgagggtgtgcgcaggcacagacccgggtcctgtccccgccgccccctcctctgcaaggtgtgcctgggcgaggggaggggcccgcggcccgaacccctgggtcacccccgaattacaaacaaaaaccttaacgccattgctcgcgggttagaaggcagctgtgcgtgctcaggaaaagaagccacgcacaagagaccgcacgcggcgtggatacagtgacacgaaacacccaaaatctcttttgaaagggaaaccaggcacagtggctcatgcctataatcccagcactttcgggggccaaggcgctcacctaaacccgagagttcaagaccagcctgggcaatacagcgaaaccctgtctctacgaaaaatataaaaattagctgggcatagggctgggcacggtggctcacgcctgtaatcccagcattttggaggccgaggcgggcggatcacgaggtcaggagttccagaccatcctggctaacacagtgaaaccttctctctactaaaaatacaaaaaaaattagccgggcgtggtggcaggtgcctgtagtcctagctacttgggaggttgaggcaggagaatggcatgaatcagggagcggaggctgcagtgagctgagattgcgccactgcactccagcctgggggacagagtgagactccgtctcaaaaaaaaaaataataattagctgggcatggtggctggcacacatggtcccagctactcaggaggctgaggtggaaggatctcttgatcccggggaggtcaaggctgcagtgagccaagatggcatcaccgcactccagcctgggccacagaccctgtctcaaaaaaaaaagagaaagtggggaagaaaatgtaatacaaattaatataccaacagcaattagtgagtactttttccatggagctgggagagggaataaatgtttgtaaaattaaaatgttctacgctagaaatcaactttccttctatgctttctttacttcaccccttatagctacttagtaaatctcacaaatcctatccttctgatctctctgaaatgtatgtaccctttcccttctattctcaccacccatgtttctttgtttccttctagcctgtgtaataatctcataatcgcacctcctgtacctgccttctttctagtccagaatacgttttcctaaattccaccaataaccatcctgctactgctttgtgtgaaattctccaaaaaaaattttacttttccaaaataagtcaggctccctctcttaggatacaaaaccacaccatggtcccagccaatctttcagcctgattcactcagtatatatttattgacctctcctttctcccaagcacttggctagataataattaaagagtgcggcacaaaacaaattggattcctcccctcatggagcttgtattttcacaggaagcacagacattaaataaattaaaacacaaaaaaatagacaagcatataattacagtatgtatcctagagaaatatcactcatgcagaaagcatacacaaggatgcagcactgtttccaatagcgaaaagctagaaacaacctacatgttcaccaaaagaaaatggccacataaactataccatatccaaattatccaaattttagaatatagacaacaggttgggcgcggtggctcacacctgtaatcccagcactttgggaagccgaggcgggtggatcacaaggtcaggagttcaagaccagcctggccaacat

SEQ ID NO: 1562542 - DNA, 4001 bp, Homo sapiens
atctgtaggaaagaaaaccgcatccttcagctgtccgtgatgcacgcatgtacaaaactaaacattaaatatctccaacactggcaaccagataacaaactttacccctttagttatggttgaatccaatagagcttaggaactttctcctcagaaatgtatttacataatgcctataaatacatattgctattgaaatgtaagcaagctaggaggtagaagataaaattagatgtgtggatgtccgtacaggcaatgaatgtgtatccagcattcacaacgtgcacagcactttaggagaaaaatgttcaacctctggaagacagtaaaacttaacatgaactgcgcatggcttcatcttccctgagcactgggaaagcccctgggaaattgcagggcctgcagaccagctctacccacatctgccctctggggctgaaggtgcagagtaggaaaagactttcagctgacaaatattctggggaggaaaaaagacagctactgctgaactatgcaagtctccaattttaaatgagacacagtccacttccctaagaaaagtctatcatctcgtctaggtctctgtagaaaaaaaagagagaggaggagaggagaagagacaaaataaagcaaaaggaaggaaagaaataagtctatcacctaaagctgaagcaacaaaattcaaccttcaatatacagtttctcagggatctaacaggaaggaacacagcaggtgcacacccgctgacagagtgagagggaaacaggagttctcacgacatacagtctactgtggcctgggcacccagattttgcaacagagagtgcttcctttccaagcacgaaagacaactagaaaaaaactaactgcatacatgcatgaaaatacagaatactgtcaaaggtcaaaaatcgtaacagtctgaaacacctctctgcaagtcacctaaaagccaaccaacaaacatttcaatacttcccataagctcactgttcttaaccgtatttaactctggagagtcacacttctaaaatttagggaacatttttcccgtaacagaaaaacagttcctttgtgtatgcattaaaggaggggtgcggggaggacacgacacccaagaggcaccaggtgtccgtagtgtagactcgagcgggaggctgttcatggggagcaagctcgcctaagcgcccgagcctcggctttctcatccgtaaaatggtttgagtgcgcggcggggaagtgtgtaggagcgaaagcagtcccggcggctctgcctgacgcttcaccccgcaacaaactgttcctacttcgccaacgcctgcaactctgcgagcccccaaggacttccccgtagtcggggaaagggcgcccgcgggcaaaaccgcccggcggaagaggccggggcccccaggtcccgggcgcgcggctcaacgggggcgggacggggcggtggcagcccccgctcctcgccctcgacgccggcgcgcgcccagtcccgggcagagtccgccgggttccaccggctccaactgcagccggcccgagggcgccccccaggggtcagaggtcgcccggcgggaaggtcagagggcgtccccgaaaagtcagagggccccgcctcagccgcagccctggtcacacctccaggaagcggcccagcccggagcgcgccgggggctgaaggtctgggggcgccgggtgcataacgccagggcccgggcccgcccaacgaccgccgcgccctccccgcctccgggcactcacaggtgacgatgggcttgttctccatggtgtagatcaccggcggcagcggctcctcagaggcgtccatgggcgtccggcgtcaccggcccggccccccgcgccccatgggcagccccgaggccgcgccgggcccagccggagcccgagcctgagcggcgccgcccgcccggccgcgccaggcagctccggagccggttgcgccgcagctgccgcccgctgctgccggcctcagccacttccggcctcggcgccgccgcatgaccatttccggggcgcgcgaggcttcacggggcgggtcttcgccgcgcttcgcctccgacggaagtgcgcccgggccggccgcgcgggaccgggaggtgggaagtgggaggcggagcggggctcccgggacacgtccatcttcctccctcggcagtgggcgccccgctgggccctgcgccggagctgaggccaggactcggcaggcgggcctcgcgcgcggtgagcgagcctggacgctcccggaccagagacgccggcctcgctgccctcgcgttccccgcagctcgggcgtcccgcggcgggccgctgctccccggccgggctccttatcgcgctgggggctcccgcaggccctcgccgctgagtgtccccggcgcgtgccttccgcctaccgctgggctcttcccgtttccctcacgccgcaaatgtttttgtggggacctggccctcggcatttcggaatgccacaaaataaacctcacacttaactgcatatgggcttcttgtgcacgtaaacggggggggcggggcgcgggtgtttctttttctttttttctttggagcagggtcttcctcagttggctcaggctggagtgcagtggcgggacacggctcactgcagcctccaccttccaggctcaagcgatcctcccgccttgtttccccccgccccaccccctccgccagtaactgggaccacgggggcagccaccacgcccagctaatttttttcttttcttttcttttgtcgggatctcactatgttttccaggctggtttcaaactcctgggctcaagtgatcctccagccttggcctcccaaagtgttgagattacaggtgtgagccatcactcccagccataaaatgacaaaaactgtcaaccaaaaataatcaaaagggtcagaatctagagtttagtcaaatgcgaagcttgaggcgcccaggaaacattataaagaatggaagtcagtgttctcaaacgtagaaatttggggtcgtttctatagccagcgtctcgggaagcctaaccgaatttcagcgtcttttctgtataaggcctaatgcatagttacaacagtctgtttagtcgaggtggtctttttctttggggacccactgaagatgaaacagtcctggggtctctgtgctgtctggtctaagtcaggtacaggacaatggagacagctaatctgtaacaaaaatcaccaaatgggaagggggagacctggtctttcttagtcattaacagcagcagtccccaacctttttggcaccagggaccagtttcatagaatgcagtttttccacagacaaagttggggtggtttcaggacgattcaaacacatttcatttattgtgcactttattatttttatgttgtaatatgtaataaaatacaacttcccataatgtggaatcagtgggagccctgagcttgttttcctgcaactggacggtcacatctagggatgatggaagccagggacacatcattagggatgagattctcataaggagcacgcaacctagacccctccaatgtgcagttcacaacagggttcaccctcctaggagaatccagcgctgctgctgacctgacaggaggcggagctcaggcggtaatgccagcgatggggagcagctgtaaatacagatgaagctttgctccctggcctgaagctcacctcctgctgtgtggcctgaccggtatgtgtctgtggccctggcggtcggggagccctgatttacagagcagccacaatgaggaagacacttgtgctcaagaacaaggaggaagagcattaaactgtaatcgaagaagcagaattgcaaacttgctactgactcagtctccagggcttaacttcacccttggcatcataagtttagagagtcctgaagttttttttaacaaaatgtatatatgagatagtttgggtgtgaacacagctgctaaatgtgtgaacatagt

SEQ ID NO: 1562543 - DNA, 4001 bp, Homo sapiens
cacacagttacagcacgacagctgggatcaaagagaaacacacggtgcggtaggagggaagctcacttcctggtagaggttgtatagtcacggaaggctgcacggcagaggcagcatctgcaataggccttgagggataagtaggagctcaccaggcaatggagtaaaaggaggaagcgtgtggcccatttgtggaagagcatgaaatgggtgttgctcggggagggcacacaaacatgaatcaacactctgtccgtgcctaaaggggcgccaactgcggggagcaccatcggctccggagggccatatccagccactcagagacagtggccatgttgcctgggcgggggtcttggccacacctgagtcgtgggctctgtggggaggaggggcaaagggggctctgtggggcctgggggcaagtcgggcctctggctttggcaagctgtgcaggggggcagtcttctggccatggactctccctaaggcccttccagttcctggaccctgggactctctctcttggggtgggggcaggtgtggaaatgagaggattagaggatgcatctgtgttcacaccactgggcctcgccgcgcgacagtgcccttatgaccctgaacaagtcacctaaactctgcactttggtccctgcacctgcgaggcaggatgagggtcaactgtccccgacaggaggcttgcaagggttaggtggaaatgctctgtggactctaagcctcgtatggagacagaggtatctccagtgacccttcactgaggccctgaggggtcttggcctgatcagctactccatgtgggatcggaaggaagaagtcagaggtcttacacacaaatcacgtcacttacccagcatcagacagtttggaactttccacaaaatacacgcattctttcttcttgatgttttcaggaatccacgaactgaggctttcttgctgaaggtaaagacagcacactgagatcttccaacattcgaaagagcacacccagccccctggagacacatctgagctccttgaggagctttcacactatttgcttgaaggaaggaagcctgcgcgaccctgagccaaagattagaagcaccttgccaagactctccggtggggattcaggagggaggaatgaatctaagaaatcatttcctcttgggaccattttgaatgtgcgcgcactttacagtttctacagcaccaccaccttccttgggaacaacatggtgtggtggaaaacgtggaggctggggatctggggacctggatcttgcaccatcggaaaaagggcagccaccctcctgcctgcctggcaaggggactgcaagatgccatgtgctttcaacatacttgtgtctttgtatccagggctttggggaaagctagcccaggcccaggccctcccaatcggataaaggatgtgaaatcattatgcaacaaggtaagcacgggtaacagatttccaggactctagcgcaacatttttgagttaacccggtgatttcccaatcagaccaaccatgggaaatggtcatgcaacccacagaagacgagacacgcatcaccctccccagttctgttctcccaaaggtatggttgggcaggagcccccaaggtcagcagaccctttcccacccccgtcgtcacagcctcaagctatgacctgcccaacggtgacctccgtggccacgtgccaactgcaggctgaccagcagaaagcctaccttgtcattgttgccgaaggggcactgtagcctccagctcttgaagaggctgctgttgctgcgccggagattggagaccatccccaggtcagtgacccttctgggcagcccctcaaagccctcctcctgctccgagccagctttcctcagggctgagggctccattctgagacccccacgccagctgcaaccaggcctgctgccctcaggacagtcctctctccagctcgctacactggggttctagagacacatggggtggttgctgaaatagatcagagacaggaagatgaggctgatgttctgagaggacctggccacatgcttcctcatgtgaagccctcatccggttctcttcatcagcctgcacatgttcccagctgcctgagctgtgtcccttggctggggcccccggacactctgggggagtacatgcacatgcgggggtcccagcggccgttcataatggtaacaacctcaggtgactgcagggccagagaaagagctccctcccccacgggtgcagctgcactgagcaccgcacagggaagtctccaccgccagcaccagctgccagcgacatggtttcgcaactgtacaattctgcacagctcctgcttccagacaccagtgactactttcatattccaaaatttttttaaatagccctcactgtccacaaaggaagtttctttttcttcttgttttttgagacggagtcccactttgtcgctcaggctggagttcagtgacgcagtctcggctcactgcaacctcggtctccctggttcaagtgattctcctgccttagcctccccagtagctgggattatgggcgccaatcaccacaccctgctaattttttttgtatgtagtagcaacagggtttcaccatgttggtcaggttggtctcaaactcctgacctcaggcgatccaccagcctccgcttcccaaagtgctggttttacaggcgtgagccactgtgcccagcctagaaaggaagttttggggagtaccacatctctccactccaggaaaaagacaataattcaaatgaatctttttctctcatatcctttccccctggctctgatgtggccttcatcaccgaggccacaagaagccaccggatgactgccctccctttacaaatgagaaacataagcatgttcaagccctgcggggcctccctgagtccctgacacccacagtgttctcatgaggtcatccatggtcatcccctgccactgccccaaaggtgtcaaggggagggttgctgggatgcaaaagatctgactggaatcccccctcatccctgccctgaaaccagatctctggccacgtcctctccactacacacgacggtcactgtcagacaagcctttgctctgccgtcccctcatcacattaggtgactgagcccctcttcggggccacgcagctcgaagctcggtgccgggctcttggggctgagctacgggctgctgtcctggggcgggcactctcaggcaaccccacctccccctctccctcctcccctttgccccttggccacactcattccgagacccgtaaacttcactggcaggatggcaggggtgccctgcccggccttttcctgcagttctcagagcagatgttgtgccgcatgccagtggggtctttccagggccatgagctgtccccgcagccactggcccggcttcacaaccagcttccgagggaagcagaggggcagagatgtccccagtggcaggaggaagaggaggctctagagagatcgcagtggcaccgcaaggggacccagactgcaggtggctccccaggcaggcggtccaccctgcacgggatgaggatggctccacgctggaaacgaagaccccagcatcagacgggagggtccacggtgtgggactctctgccttaagaccagcatgttctgttcacacgctcatctttcaggcagctgtccacctcagcacagcccctggggtcttgtgcaggttcctctaatcccagaggcaagcaggccctgggaagcaggtcagacctgctccagcaccacccgactttgcaggaggcagccaggagcccctgtgagcatctgatgcccgctgtgggggggccaatggctcgacccagtgcccaacaggacgggtgcctcagcctcagcccaggggtgcagaaccctgaaaacccaggcctggcaacgaccttccaagggcccatccagccctttctggggttcttctacccaaaattac

SEQ ID NO: 1562544 - DNA, 4001 bp, Homo sapiens
cgcgaccgcctgtgacctgcgggtcaaccacccgccgcggctccacgccgtgggcacagactcagggagcaggatgagaaagctgagacggcgcagccacggcccggtgccttcacgcgcacagcgacacagccccagccagcggggcccacgctaaggcggaatcccacagaagcctacagagcgagcgcgcgcctgtgcttcccaaaacggaatggaaccaaggtgacttctacagaacgatctgaagccctggctggcccttatgctagtctcttgggagcgttccaaatgcagctcaatattacttacttgacttttatctttcctccctggttcgtggtatttataactgggtcatcttttaactatttgcaacgtagcttcaggggagagggggagggctttataaataacctgtattattattatgcaggttgattctgttccctgagctaaagggaacatgaaaatacatgtctgtgactcatgcccccccacccccactccagggtgtgctgaggagtctctcagctgccccggggtcctcgagcaggggagggagaaaggctggcgctgcgccctccatcgcgtgaagccaggggattttgctctgcgacaagctgacttggctctcgtattgtttgcagaatcacccagttccaaggcagtccctgcgggcaggtgcagctgtgcgggagcttcagtcctgtccccaacacccaggcagtaatggttccagcacggaaggtctacctacctcccactgcacagcccgagggctgtcctggaggcacagccatccgtccctgggtgggcaggcacgtttatgacccccacccccacccccaccccccacgcgagtcagcacgttccatactcgggtgatcgtgctcatcccctggtcatgtcatcgggatctgagtgccatccgagcagagagctgtggcccggtgccgggggtggacttcatctattccagggaaccaaggatgcatgatttgcaaacaaaaccagaagcgcaagccatctcctcgcctcccctgatagccgtgctgcggagcctgagtgctggagtcactaatttactgtccagtaactgagtttctagcgaccaggtctagttgtcgtgttactttattaaattttggtttgataagtaaaatccctcagtagaaactctagaaaagtattagcgtgtcatggtcatgagcaagccaaacagcctttctaaaaggtgggaaggagacccccaggcttcgccaggaccccccagtgagccagcccagggctctccactcagaccagattacgccccaaagaaccgagcccttcactccagaggtggttgtgtttggggctgtgtctgtgtctccagctttttgctcatgtggggaaggagcagggccggtgtggcccttcgctttgctgagtgcaggctgggggcacctccaccagctaaggaaatggctcgtgcacagtagcctcccgggctgctgcgacttcattcttcattcccaaagcaggtgtcagcctttcccgggaggcccagcaggtaagcacttgtggaggccccggtggctgctggttagctcttgaagctcgtccccaccctgcgtgcgttctaaagagccgcgtttctattgcaactgcctgccctgcgctttcatcttccccacctgtgctcctcccgcctctgcccatctccacagggtgctacctgccagtcctgccaaagcgtcctcgggcaccgcggcttgaatcagtgttagaaagtggcatttgtgactcgacacccctcccagctccccggcaagatacccccgcccgagttcccatgcccctgccttacctgtgcagggctcccaaccctgcgtgccgtggccgggggccgccaggggcagcacaaaacacagactcagcagggcagacatgaggggcttgggtgccaagctccatccagggctccgctcagcctgcagggaagtggctgctcctcagacgtctgcgtcagcctttccaggggcggccgcggggcccccgggggtcactgcgacggccacatgccagcggcctaaggcggggacagaggtggccctggcggtcgcagtggggaagcttctggttgctgcctgcgggaggcaggtggcccctggcaggttgggctgcagccgctggtttatctcttcatttccctgatgggcttgggccctgcgtgcaggtgacaggtgataacaatctcggcccggcctgggattagtcgctggcaaagcacactttccaaaaggaaagacagaaatagatcgtgctgcggagagctgagaacaagccagagaaacttaggagacccgtttccctcaggcgcaggctccctgggctcaccgccttttaggaccaggggcacaggcgaccatggcaggccgggagcgggtggggcgggtgcactctggctgggggtttgggcagcaggtccccacagtctgctggagggtcccagaggcaggtcggggctctgctagggggtcctagaggcaggtcggggctctgctgtggtggggagggggggtcccagaggtaggtcctgtgctctgcggggggtggggggtggtcctggaggcagatcccaggctctgctgggggtctaggcggcaggtcccgggctctgctgggtcccccggcggcagcggccgtccatccccaggaggggctgggctccctcggagggctttttatctggtgcccagccctcccgagggtgtgtgggtttgtcaactgttgggtttcaggaatttccctctggagggaagtcggtccttaaagggaacagctaatgagaaggagtgggtgagtgtccctcagggaaggggcacggccatggtcactcatccagagccgaggaccctcgcatctgacctctcgacactgcaatgggcatgccactcgaggggagcagctattaactagaagtattctttttacaaaagtgccctgcccccctaccctctccaaacagcactgaacgcagcattcttgcagaaatctccaacgcaactgggtgctgcgtttctgtgcctggtgtggaggccctggcaaactggtctgaggccgatggctttccctggttcacaggcccacaaagtgcacacactcctgctagtttcagaaggaagcccccactctgggacctctgacacaatgagttttccaagagcatagaccctgtcattagggcttgtggagagagacagagatggagggagggaaggagaaaggggccgaagagagggacagagactggggaaagacctagagggagagggagaaagtggggaggcacagagagctcctggggctctggaggctcttcccataaacagcccctgcgatgggacaggctcattctgtctccctctcgcttcctcttttacccggccctgcccccagggatattaattcatagttaatattaattcacagatattaattcgtagtcctatttatgaggcttgagttaactggcatcatatgaagggaggttgaaggtctcccattatatgtgactcctcttccagcacccaagtgagccctggggtggggtgtgtctccctcaccccccaggaccccctgccagctccggtgggcatgcagtgccaggacagaggcttcctgagtgggctccccaccccactggggctcagcagctggaaacgctccacatagcaccattcctgacaaccctaacctaatgagggacgacgtggttcctcagaggagcgaaaggcctgatcgttgtgtaaatggaataaatggagtcttcctcttttgtgtcccaatccatgagaactttgtcctgggccaggccgctcccaggccagctgcgggtcacagtggcctctgagaccacgcccctgaggggatggggactccccccaaatgatgggcaggtggcactccagagctaatttaaacaatcacaattaagctgccttgaacccttccgg

SEQ ID NO: 1562545 - DNA, 4001 bp, Homo sapiens
gcaattctataccagcaattaaaatgaatgaaccaaagataacacaatcattcaatttgttcatatataaacctcaaaatatgatgctgagcaaaaaaaaaaaaagcaagttgcaaaaaggcatgtatattttaatgccattaaagtttaaaaacaaacaataatatatattgtgtatggattcaccttgatcaaagtataaaatatgcaaagtaaagatatacacaaacctcaacgcagtggctatctctagaaaaggaggggaaggaactgagagcaattttatttctttaaaaaaaaagagtatctgaagtaaatttggcaaaagattaaataatcacgtctgtaaaatctgaatcatggattggttagctccccctctgtatttgatatctgaaatattccaaaaattaaaagaaaaaaaggaaaattagacaataagaaaattgggcagaacaaagacaccaaaacgcagcccttgagcgcagagcacgaaaccttgagcaatcggagcagtagctgggtctctaaggggtttgaagtttcttaccctaggtatccttatactatatcccattttccttaggataaatcgcaaatttcttgcaacaaaaaatgtcctaactagagtcgtagttataaggaaaaggctctctccggaggagtaaaatctgtaaaatttctaccttgtttccctcgccaggatcttgggcaaaatggaaagagatttaggtgaatgccataaaatactctataaaccattaaatatcatcaagaacgcctaaggaccgcatcgcccagtaggagagtgcatatattttgaaaggtctctgcaactgagggggttttggcgtccagggcgccactggaaaaggcacggcgcactggtaccagcccaaattcacctacgtctcggcttcattttttatctttgatccccctattctgtctcctgaacaggctggctgaagaggccacactggcagcgtcaacactgcggagcagctggccagactcgatcctgtccaccccccttcccattagcgtctgtgggagagaatgctcagaaagaggcgcgggggcgaggggagcggcgaggttacccccctcctgggtccgttccgtggggacaggccctggactggactgccagttcacacgaaaacaggtggcaacagagtcgtgacacgcacacacagcaaggggtgtgcacgaacgttcacgctcaccaacgaaacctgcacacaagagatacccactcgacagaattaaatccgcacacaagagatcacgcactcaacaggacccatgcgcagacactctgcgtcactcggagacacgcaaggacgcacacttgcgcgagcaaggctctaggcgggggtcgcaattgcagaaggcgcggccacgcgcgctaggggacgcgcagcccacagacaggggcagtaacacaaaggggggccacctgcaaggccgagagcgcccacgcagccgccagggagcgcggacaccgacacaaaaggggcgacgaggcgacacgcgagcgcctccacccagcggaggtgtcagccacgcaccggccgaggcacgggcagcggggggttgcgcacaaagggactactcacaccctcgcaccggcatcccagggcctcgctcgcgaaggggcaccagaccaagggggcaaacccactggggtaggcaatggcggccacaccccctcatcgcgcgggacccaacccatgcagacacagtaggcacctcagcgagggacgcgaggagacgcgcacacacccacactcaccacacacccacggagggggtgtggaaggccccgctcccccggcatctcggctgcagcgggacaaggtgacacatccgggagcccggcagcgcgccgggtgtgcactcacccgggcccgccgcccgcgagcctcggacgcgggcagcagcagcagcagccgccgccgccgccgccgccacctccggccctccacgtcagccgacggcgggagggagcgggtggcggcgttgaagcgaggtgcgtcacgtgggctggcagcgcgcgtgcgcagtcgcaccccaccgccccctccttcgccgtcgcgagccgcgggatcacgcccgcccccgcgctcgctggctcccacccggggagggtcgttgtgcgcctgcgccagggtgggggttgccgtcgcgcctaggcctttccctcaggttttcctcttccccactgcggctccccagtcggcgcttgcgcggagaactcagcgctgaggtggccgaggtgtcgggaggggcctgggtgggcgtatgaaggacccgaggtcgagggcccccccataccccgcctcgaatgagaaatagaagtctccacgaatgggcagggcccggggcctgggcgccgcgacctagtaggcccgcatgctggtgggcgccgcgcgagccttgttccctgccctcccctcccacagggaggccacgcttgcagagctggagcgcgcgtctatcgccccagaacccccctccctgccctatcctccgccaccccttctgttgcggggcgcgcgccagcctgggtgtctgtatgcgctcgaggcgggggcgcgggttgcggacggaggcgcgggaggcggttctgcgcggcgggggccgtacccgcggcggagcgaggaggcgagaatggatcaatggtgccacggagcacatcgctgacgctgattgtgttccttttccacagattgtctaaagccccaggaaaaatggtggaaaattcaccgtcgccattgccagaaagagcgatttatggctttgttcttttcttaagctcccaatttggcttcagtaagtactttcctgatggatggccaggggctttttctggcgttcagtgacaagggaagaatacattggttagactgtgcacacatgaactgttgattctttctccctatgtctctttttaagaaaatctgaagggatctcgtgtttgctgagtgttccgtgtgccagcactagcctaggaggttttagtctctacaaatatttatacagcaccagacgcgatggcaaagtggataaagcctggtccctgcccttaaggaggtcgtggtcttgtggaggagacagatgggtaaatctacagttaatgctcagtgtgatgagtgtcagggagcacggtggagagacattgaaaccagactggaaagtcaaggctttctacagaggcctttccccctggcactgatgctgattaggaaagagtaagagggagggaagaagtggaaaggccttgaatgagggcgtgagagggtttggacccgaggagcttgtgatgtcaccagtgtgccctgcgggatctggggaacaggagaagtaggccagagaagtcgggttgaaaggtgtgtcgtttgcgtcctggatctcccttaatttaaccccataacattccattttacagataaggagactgatgctcactaagacactaatatgcccactcacacagcaagtcccaagtctctccccaaaatgatttgagaattttgaggcacacaaaagggagaaaattgagtgcccgtgatccaacgttctgcaactgtttggaaaccaggaaagtggaggagtggtagtacttctgaaccctaactaaaatatatcagcctgcaccatcagcacagcttgcagatgaatgtaatggccaggctattaaaactgaagtgaagtgaagaagttacaactgagttcgaattctgactcctccacagattagccatgtgagctgggaccctcagcaaattttttgagcctcaggttccttatctgtaaaagggtagtgataatgatggttattaaatgcttatgacgcatgaaacagttctatggggtaggttctgttattactgtcctttaaagatgagcatcctgtggtttcagtaacttgctcaagattgcaaagctactaaataaaagccttctaaatttgaacccaaatacactggctgact

SEQ ID NO: 1562546 - DNA, 4001 bp, Homo sapiens
gatctcggctcactgcaacctccacttcccgggttcaagcgattctcctgcctcagcctcccaagtagctgggactacaggtgcccaccaccacgcccagctaatttttgtatttttagtagagacaggatttcaccatattggccaggctggtcttgaactcctgaccttgtgatccgcccgcctcggcctcccaaagtgctgggattacaggcgtgagccaccgcacccggccttgtattttgtttttaactagagaggcaatgtgacaaagtggttaagaacagggactctgcagccaagactctgggcttgagtcctggctctcttgtttccttgggtgtgtgatcttgggcaagttacttaacctctctgtgcttcctctgtgtttcctcgcatatcaaatggggataacgatactacctacctgatcaatctgttaatacatgtaaagagcttagaagagtaccaggtatatgggaaatgctataaataccagctatcattaacattaatgttagatgagtatttttaaaatccactgtttggatgcttccagctaaatagtctaccttaattgctaaatccaaagagcacttttcagcttacaacttacttgacgctgtggaccacttcctcctcagaactcttcatttggactccaaagaccatcttctcctggttttcctcctattcgtctggctgctcttcctcagtttccttcatgggttcttcttctccattccccgccacccaatgtcaactctcttttcttctcactcttactctctccttgggtgaatttatccaccacacccatgacttaacacagcactttctgaacttgcatcgtttgcatagcttcaccgtgatttttgccatttccatgtatcacatatatttttagttaatatttcccttttattgagctcacttggcctaagtgataatgtccatgattatcaaaggttagatgtgcaagttatgtttctcatacacattaaattcctatctattaaaattttttcaagtgtttatctatgtaccagtttaaattatctcatatgcactgcagtaaacaatggcttccaaaattccaaatgctgaagactcccaaatccttccaggcggggttgtatctcttgacttctagaccctactagaactactacaggatcttaaccaagatgtcccacaagcccctctgaatcaggaagttcaaaaacaaacatcttttcctcaaaaacaaacatatgaaatgaagttctttcctctttctgtatgctgtttatcagttaattgttctacatgtcattttactgcccaaacctaaaccctgggagtcaacctagactccccagtctccttcaatatttctgtccaatggaccactaactcttgtcatttctgcttccctaagaaatctaaaattagcacacatatacttcttcatgcccagtgccactgccttcactgtttctcctctgaactaatttaacaagcagtctcctaactggtcagacttgccttcaatcttggcatcctctaaaactctgatcatatcactttactgcttaaaaccatgcaacagcttcccttcagcttgagaataaagtccaacttccctaatataagcatagaagaccttttgtgatcttgctcctgcttttatccccagtcactccacaacacacaacctagaagccagtcatacccaactgcttgtccttcctaaacaaaacttattctgcaaccacctaatgtctattagttcttaatactcaatttcaggaagcatttcctgatcttcccactaccatcaagttgatttttgcacctcttctctgtaaacaagagcaccctgcccatgtctctgacagcagttttcacattgtttgaccatcacaggtttatctctgcagggtcactatggatccagaggatatattgtgcaatccatttgccatctgtactgctatttacttaatacttttctttaggataactcaaatcttaacttagatgtaaactagttttaatggaaatgttggtatcaccaagaaagcttgcttggtaccataaaattttttataatacaatcaaacaaaaatatactactaaaattaaatattaaaataaagagcttctgatcccatcagttatggtcaactatacactctgggggaatgtactgttgggaggaaaaaggtatatcctagattaaaaaaaaaaacactttttggatgtttttgctgagctcatagaaataggggaacatgtgaaggcaccctctccacgcaaaagcaacaaaccttgagctagaaattaaacctggctacagtttagtgctacaagtagtggtgccaagagcagtaataggatcaggacactgagccctgggccagaagcaaaatgtaggaactcaaaagtgatgccagctaaactttctggctcccagacaaagctgatagaaatgctttcagaaagcaagcatcctcaaattagactctcaagatcaccacaaagatcaaacagaagttcataatcaatgatcaccaaacacatgaggtgacagctacattgaggagagacaacagaaaaaaaaacaaaaaagcaataaatttagacatccccctcctcaaggatatcagacattgggaatgtctgatatagtctacagaatagctatagagtcacaaaaatcagcatataacatgagaacatgaagaatgactggacatatcaaaaaagaaccaggcagaacttttagaaattaaaaatgcggccgggcatggtggctcatgcctgtaatcccagcactctgggaggccaacgtgagcagatgacgaggtcaggagatcgagaccatcctgggtaacacggtgaaaccccgtctctactaaaaatacaaaaaaattagccgggcgtggtggcgggcgcctgtagtcccagctactcgggaggctgaggcaggagaatggcgtgaacccgggaggcggagcttgcagtgagctgagatcgcgcctctgcactccagcctgggcgacagagagagactccatcttaaaaaaaaaaaaaaaaagtaattaaaaatgcaattgttaaaagaaaaaaaagagacaggatgggttacagaggatattaggcacagttgaagagaaaattggtgaactaaaatatatgccttatgaaattatccagcactgtaaattctggtaaagagaaacaaagagataaaaaatatgaaagataaagaataagtgatctggaaacagtttagtgtatatatatatccagttaaagttccagcaggagagaagagactaatgagacataatatttaaagaatacagggctcagaaacttctagatctcatgaaagacaaaatgcagaatcatgaaacacatgcatccaaaataggataaatataatctctatctagacttagaagtgaaatgatgtaacacaaaagacagaaaatccaatgtaactaaaagaaaaatgatattttcttcaaaaaacgcataaataggctgggtgcagtggctcacgcctgtaatcccagcactttgggaggctgaggcggacagatcacgaggtcaagagatcaagaccatcctggccaacatggtgaaaccccatctctactaaaaatacaaaaattggccaggcatggtggcaggtgcctgtagtcccagctacttgggagtctgaggcaggagaatcgcttgaatccaggaggcggaggttgcaatgagccaagatggcgccactgcactccagcctaacaacacagcaagactccacctcaaaaaaaaaaaaaaaaaaaaaaaaaaaggcataaataaaactggcagcacactttgtataagcaacagcagaatagtattcctaccctactgacagaaaagaaacaccaacctacaattgtacatccatcaaaatgatctgtcaagaacaaaggtaaaataaaaatacttttagattttttttaatatct

SEQ ID NO: 1562547 - DNA, 4001 bp, Homo sapiens
aaaaactacctcagaatgggcaagccctgggcctcaacaattaatatccaattattccacacaattaaactacagacaagctattaggatatccctgaatctagaaaacatctataacttcaaacatataataagctaaacattttttaattggtagagatctatattttattcttagcttaaataataattaaagttaatatgaaccatcagcttcatttttcaggagttgatcctgttccctggaagctaaaaccccacgtctccctgaaaagaaaacacaagtaacctagattaaataatcaacttttctgaattaaaaccatgacctttatagtatagcccaatagattgaaatgtggttgcttatagcagaaatatagggagatagacttttacaagacagaagtcatgccacatgcaaatatgaaaaggagaaattaatgatgccccgatcctacatgtgttagttcttcaccctaaactcagaagagtctcttgttccgatagagctggtctattcattcgccaagatcataccgtgagttccttaaggataatatccaaattttacccatgtttaagtctccagaaactgacctatagttgacccccactaaatgtttctggagtgactataactggtagattttggcttaaaattttgctagaaatatagcctcctcatccaaacaacacaggagattctaccatgtgtgaagaggacattttacaagatagactccatcctggaaaagagaaacattttaaatagcgtttgaaaaaagtggcattaaaaacatctatgacaaacttaggggtttatcattgaaaacataaagtcatgttaactttgtatggcactgaagaatgccaagataactaaagagtagattaagccagatgctgagtctttaggttttcaaagtaagaattatccttcaaacgtctgaaaacattccatttagtctaaactacagccaactcactggaaattagtacgtgccaaggtggcaattaaagctgaaattaaatgttttgcttttaacctaacgattgattagggaaggcatgcaaccttaaggaaaaaatcaaaacatctttttccttatatcagaattgtgtcttcaagaacagtcaccgacttacaaattttcaacttagatgatgggtttatcggggtattaaaggcattttcgattcatgatgggtttatcggaacgcaatcccatggtaaatccaggagcacctgtatgttaagagcggatcacgtctcttgtggttagatagttaatccagtagtctccaccatactttttctcgtcatatctccttactgccggcccagcggtcgcttaaacaggcaagaggctggctaagtggataaaacaccaacgcttaggaccctaagttagataagcgactgaatactggcgaggctggtaccagagcttgctcgacaggacattcacagccgaaagttggaacaaacgtgtccacgtccaaaaggcccggatgctccaggcaactttcagcgcggctcgaggcggcttccgggagtcggcgactcggaggcccggacgtcgggcgatcagccagtccggaccccaaggccggagaaagctcggccgcggcgccccgaaaagagaccccattcattctgcccgctccagttttccgccgcgcggcccacgaggcggcggctccggagggcgcgcaaggggccggaagggccaccgctccttcccgccgcgcgcccctcccccgccaccgccgcgccggcccgcctgggcctccccggtcgccctcccaccgcctcaaccaccctgcgccccgatcgcgcccaacccccggcggggggctcccactcacttgtctttctcggtgccgaagatggaggccagatactccgccatttcccacccgccgccgccgctgccgtcgacactgctgccgacgccgccgaccctgccgacgccctcgggagacgtcacccggacgcgacgacgctcttccccgccccgacgtggcagcgctacccagtcaggcgaggtgctgcctgcgcgtgggcgggacgcatgcgcgtagggagcacgtagtgcgcgtgggaggctccgccttttcggtcctgggaacccgcgccccctgccggtgccctccccgcccggccctagctctctcgccttctcgcccgcccggcgctggccctgctggatcctgcgcgccggggactgggggctggcagtgcagaccgaacccggggccgaggggcttctccacagagccgcctggggctcggtggggggcgctcagctcgaccccagctaagggagcactaggaagtgcgggcgtccccttccctgcacccttgcggggcgggaaccgtcgacctagaagaaaaaaaaagctgaggcaaacttgatataagtagagaggttatttgggccaagtttgaagattgcaacccgggagcatagcttcaagttgccctgaacataggatttgcaacagtgacaagtgggtttataaagcttaagaggggggcagttcttaaatagctcaccaagaatttacatgaaaataacaagctattaattggctgtacgttgttctttatatcataattccaggaaaggaagttcatgggtgaaggcagcgggtccggagcaatagtgcctttaaacaattgccaggcatgggtggggaccgctgaagccgcatagacctgtctctccgggccggattaacctcgcacgcctcacatagctcggacgctctgtgttgtttttctcttctcacacccctctccgctttaccctccctcagcgcttgccaggtgcgacctccccggggccctgcactcttgcagttgcctggccaaggccacccacaggtggagctggaaggccagtgacctgcctctgggataccctttcagtctcctcatgtcacaaggctggaaccattccgttggaagggttctattcctctcctgcgttttaaccccatcaagcagccattttcatctggtttcccacattcatcaactcacctgcgatttacctaatttccaacgcaactatcaactctgattaggtagaagtcagagagacagggcctattttacttacctcctccacaagatgagccccagactgtggggcaggaccatgggatcctcttagctcggctagagctgaatgctgagctctagtgtttgggcggatttgcgtgttagaattgcatttctcttggcaacagagcatcttcctacctgggaaagatgagcaaactggaaacctgtattagaaacagtagggcctcagaggtttaaaccaaaaagtatcttgagacagggctcaatcaatttagaagtttattttgccaaggttaaggacaatgcctgggaggaaaaaaaacacggtatcacagaaacagtctgtggtctgtgcctttctccaaagatgactttgagggcttcagtatttaaaggggaaaagtgggctggaggggaaagcggaacagtgtggtaatccacacgttgcaagagaaaagaagcaggttgggaacagtcgactgtgtacagctcactcctcagcaaatcagcactttacataagagaagcggatgttgaaccttctatctgtagccgtctgcttaggaacgaaaggaaaggcagctgcttacatgactcagctttcagctcattcttttccttttgacagagtgaactggggtcctgacttttgtgttcctttcgcagaggtgaggccagagaagtgacaagacagatgccagtccagcaggtgggcatgtccagaaagtgcagcctcaggacacggtctgggaacaaagactgctggagagttggaagctggcaagaggctctcagctgtgaagtacctggggtgggggagaagtggtcggagaaagcagaggtaaggtctgtgcgtgggaactgaactgaaatccacagctctattacaaggaattaatctggt

SEQ ID NO: 1562548 - DNA, 4001 bp, Homo sapiens
aaaaactacctcagaatgggcaagccctgggcctcaacaattaatatccaattattccacacaattaaactacagacaagctattaggatatccctgaatctagaaaacatctataacttcaaacatataataagctaaacattttttaattggtagagatctatattttattcttagcttaaataataattaaagttaatatgaaccatcagcttcatttttcaggagttgatcctgttccctggaagctaaaaccccacgtctccctgaaaagaaaacacaagtaacctagattaaataatcaacttttctgaattaaaaccatgacctttatagtatagcccaatagattgaaatgtggttgcttatagcagaaatatagggagatagacttttacaagacagaagtcatgccacatgcaaatatgaaaaggagaaattaatgatgccccgatcctacatgtgttagttcttcaccctaaactcagaagagtctcttgttccgatagagctggtctattcattcgccaagatcataccgtgagttccttaaggataatatccaaattttacccatgtttaagtctccagaaactgacctatagttgacccccactaaatgtttctggagtgactataactggtagattttggcttaaaattttgctagaaatatagcctcctcatccaaacaacacaggagattctaccatgtgtgaagaggacattttacaagatagactccatcctggaaaagagaaacattttaaatagcgtttgaaaaaagtggcattaaaaacatctatgacaaacttaggggtttatcattgaaaacataaagtcatgttaactttgtatggcactgaagaatgccaagataactaaagagtagattaagccagatgctgagtctttaggttttcaaagtaagaattatccttcaaacgtctgaaaacattccatttagtctaaactacagccaactcactggaaattagtacgtgccaaggtggcaattaaagctgaaattaaatgttttgcttttaacctaacgattgattagggaaggcatgcaaccttaaggaaaaaatcaaaacatctttttccttatatcagaattgtgtcttcaagaacagtcaccgacttacaaattttcaacttagatgatgggtttatcggggtattaaaggcattttcgattcatgatgggtttatcggaacgcaatcccatggtaaatccaggagcacctgtatgttaagagcggatcacgtctcttgtggttagatagttaatccagtagtctccaccatactttttctcgtcatatctccttactgccggcccagcggtcgcttaaacaggcaagaggctggctaagtggataaaacaccaacgcttaggaccctaagttagataagcgactgaatactggcgaggctggtaccagagcttgctcgacaggacattcacagccgaaagttggaacaaacgtgtccacgtccaaaaggcccggatgctccaggcaactttcagcgcggctcgaggcggcttccgggagccggcgactcggaggcccggacgtcgggcgatcagccagttcggaccccaaggccggagaaagctcggccgcggcgccccgaaaagagaccccattcattctccccgctccatttttccgccgcgcggcccacgaggcggcggctccggagggcgcgcaaggggccggaagggccaccgctccttcccgccgcgcgcccctcccccgccaccgccgcgccggcccgcctgggcctccccggtcgccctcccaccgcctcaaccaccctgcgccccgatcgcgcccaacccccggcggggggctcccactcacttgtctttctcggtgccgaagatggaggccagatactccgccatttcccacccgccgccgccgctgccgtcgacactgctgccgacgccgccgaccctgccgacgcccgcgggagacgtcacccggacgcgacgacgctcttccccgccccgacgtggcagcgctacccagtcaggcgaggtgctgcctgcgcgtgggcgggacgcatgcgcgtagggagcacgtagtgcgcgtgggaggctccgccttttcggtcctgggaacccgcgccccctgccggtgccctccccgcccggccctagctctctcgccttctcgcccgcccggcgctggccctgctggatcctgcgcgccggggactgggggctggcagtgcagaccgaacccggggccgaggggcttctccacagagccgcctggggctcggtggggggcgctcagctcgaccccagctaagggagcactaggaagtgcgggcgtccccttccctgcacccttgcggggcgggaaccgtcgacctagaagaaaaaaaaagctgaggcaaacttgatataagtagagaggttatttgggccaagtttgaagattgcaacccgggagcatagcttcaagttgccctgaacataggatttgcaacagtgacaagtgggtttataaagcttaagaggggggcagttcttaaatagctcaccaagaatttacatgaaaataacaagctattaattggctgtacgttgttctttatatcataattccaggaaaggaagttcatgggtgaaggcagcgggtccggagcaatagtgcctttaaacaattgccaggcatgggtggggaccgctgaagccgcatagacctgtctctccgggccggattaacctcgcacgcctcacatagctcggacgctctgtgttgtttttctcttctcacacccctctccgctttaccctccctcagcgcttgccaggtgcgacctccccggggccctgcactcttgcagttgcctggccaaggccacccacaggtggagctggaaggccagtgacctgcctctgggataccctttcagtctcctcatgtcacaaggctggaaccattccgttggaagggttctattcctctcctgcgttttaaccccatcaagcagccattttcatctggtttcccacattcatcaactcacctgcgatttacctaatttccaacgcaactatcaactctgattaggtagaagtcagagagacagggcctattttacttacctcctccacaagatgagccccagactgtggggcaggaccatgggatcctcttagctcggctagagctgaatgctgagctctagtgtttgggcggatttgcgtgttagaattgcatttctcttggcaacagagcatcttcctacctgggaaagatgagcaaactggaaacctgtattagaaacagtagggcctcagaggtttaaaccaaaaagtatcttgagacagggctcaatcaatttagaagtttattttgccaaggttaaggacaatgcctgggaggaaaaaaaacacggtatcacagaaacagtctgtggtctgtgcctttctccaaagatgactttgagggcttcagtatttaaaggggaaaagtgggctggaggggaaagcggaacagtgtggtaatccacacgttgcaagagaaaagaagcaggttgggaacagtcgactgtgtacagctcactcctcagcaaatcagcactttacataagagaagcggatgttgaaccttctatctgtagccgtctgcttaggaacgaaaggaaaggcagctgcttacatgactcagctttcagctcattcttttccttttgacagagtgaactggggtcctgacttttgtgttcctttcgcagaggtgaggccagagaagtgacaagacagatgccagtccagcaggtgggcatgtccagaaagtgcagcctcaggacacggtctgggaacaaagactgctggagagttggaagctggcaagaggctctcagctgtgaagtacctggggtgggggagaagtggtcggagaaagcagaggtaaggtctgtgcgtgggaactgaactgaaatccacagctctattacaaggaattaatctggt

SEQ ID NO: 1562549 - DNA, 4001 bp, Homo sapiens
aacagccctttccaaagcacccaggcaggcacttgttacggcttacacagtccccttgcacccacggctctcccctgctagaccaagaactccctgaacacaggactgagtcttattcatcacggtaacccgggacgtaagtacattgcattgaattgggcagaactggaccaaatgaaacagaatggaatatagcaaaggtaatttatcaggaatgcagactggaaacagcgggcgtccatgaggaacccaccacatgatgccgaatgctgctatttgggtgggcaccgatggggctgtggccacctggagaggtttgaacaaggcagccttggtgcagggcacttactatgaggtgctctggtgtggggaaattaacacacatttctcttcctccaacatgtgcttaatgtttaaactggaaggaattttgagtagaagtccatgctatacgtttagtagtaaaatccagcgtggactccttcaaaggcatggaaagctggttcgggttccacctccgccactaatgcactctctgggcccagtgtcctgcctgcactgggtggtgagcagtggacaaaagctgccttgtctgtaatgcctggacggtgcccggtggccgccctgcacatgcctgaccccactccccattcaaaggcccctggcttagcttgaacataacagtgacgacaaagccctgatttggggagaagaaatgggtttgtctagcttcagagttacttcacccaatttggccaagcttttgttatagtgtggaaggaaagtttagctccttccccaacccaaagttacctaaagtgtgtttctgatacatttttccatgtgaaaaaatgaatgggtcagatttaaagtgtgtttctgatacatttttccatgtgaaaaaatgaatgggtcagatttaaggcactggtttgccatgaaagctgtaacccaatgttggtgtcgtggcctccctctccgagagtggtaactctgaaggctaagctcttccacatgcaggcctttcccttgggtaagcagggtcgcgctcacactgtgtctgaagtttcctacccatttgtttcgttatcagacactcaagggattgtctctgaggacaagtgactttccccgggcagcgtggaagcacagccctgctgacagttggtcccagtgttagagactcagcgggctttggggcctttcacgttagagtttgaatatcttgaaacgccactttcagagtcactgagctgcacacaaagagattacaaccaggccccaatctcctccaaacccccaaaatggggcacccagagtaatacatggcttctgattttcacaaatttcagggtcccccagtcagccagccgagctggtctttaaaaggtcaagaatatcaggggtattcttgtgcctccctgggccacacataaaatacgctaacactaataatagctaatgagctaaaaaaaaaatctcataatattttaagaaagtttaccaatttgtgttgggcagccaacacaaattgaacagggcagccttaggaggctgaggtgggatgatggcttaagcccaaagctgtcctgggcctcatgtgggttggacaagcttggtcaagatcacctcatttacgagaagcagaagagggccctgtgaagaggcagtgtcttaccctgcaaggtgcactgctttggcaggaagccgtaccctacacccctgcagctccatgccgggggccgcagcagggtctggcaccagccttactggctgggccccggggtctctgggcagtactcacgcggtgtgcaccgggaagcccatggccaggaggggctccaggagcgaggggctgctgcggctcttgagcttgttggagaccttggcgtagagctgcgtctcccccgctgccatctcttcctgcccttaggccaagaagctcgcctgcacacagaaatgaggagataaagcaagagggggagaggcaaggctgaggctgtgaagaaaaacctcaagctctttttgatctttctgacaaaagttgatatcctgtttgcatgagatatcagttttcagaattctgtttgcaggatgctgggtgcagcgtccaccaatcctaactgtttccaccacgggagtttgaggctaaaggtccaaccgagcccctgcacgggatcagcctctgtagggacttggctagtattcgggagcaagaatgcgtgagagcatgggggaaggaagcggaggagaagtcagggaatgagttccctcctggatcctgctggccccctgccctgacccaccctggatcccagtctccttgtctgtgaacaagacattaaaccccactctatctattgtctcggattgctggaaaacttactggttctttcagtcattcattgacttgtttttttattttaaaaactttaaaagctttatatgtgtacagaaaagttgatgaatcatatgtgtatagctcaaggaatttccataaatgagcccacacccctaattcccccacgacccaaaatcaaacagggcaaccaggggaattttgtacctcctccacccaaggggacatttggaaatgtctggagacatttttgtttccaaaatgaggcgggggtggtggtgggtggggtggacatcgtggtaccggcactagtgggtagaggccgggaatgtcacagtgcccaggacagtctccccaacaaaatttcactagtgccaaggtggagatagcctgctctggaacattctcagaacctcagatgcacctctgcccccagctcagcctcctccagttatctcctccctcccccagaaagtaaactgctgtatcacttgtatatgaattgtgcctgtggttgagccttatgtaaatagaaccatatagcatattctctatcatatctcatttctttttcctcaaattatgcctgtaaaatttatccacattattgcttgtagccacagttagttcactgttattgctgtgtagtatttgattaataaatataccagccaggcgtggtggctcacgcctgtaatcccagcactttgggactttgggaggccaaggggggggtggatcacctgaggtcaggagttcgagaccagcctggccaacatgttgaaaccctgtctctactaaaaaatacaaaaattagttgggcatggtggtgcatgcctgtaatcccagctactcaggagggtgaagcaggagaatcatttgaacccaggaggtggaggttacagtgagcaaagattgcatcactgcactccagcctgggacagagtgagactccagctcaaaaataaataaataaaataaatataacataattcatttatccatttctctgttgatatgcattcaggaagttttcggttgttttgctattgtaactaatgttgctgaggacgttcttgtatgtgtctttgagtgccttgtgcatgcatttctgttaggtgtgcatctaggagtggggttgttggatcacagagcacgtgaaactccattaggaactgccaagcagttgtacaaagctctatatcctcatgcacacttaatattatcagtccctaattttagccactctgtggtgggggtggtgtgtagttgtatctccctgtggttcccatttgtatttccctgagggataatgatattgggcaccatttcacaggcttattgcccatttgaatatcctctctggggaagttcctgttcagatattctgctcttttttttttttcactagggtgtttgcttttcttatcaatttgtgggaactctggttagagttttctgcatcctgttcaagagattgttgttaatccaacatcgatgaagatcatctatgttttgttctagaagttttgctacttttgctcttcatatttagctctatgatccatttgaattcattctgtgtatggtgtgaggtaggggtaaactttcatctacttccgcattgaaagggctatccttt

SEQ ID NO: 1562550 - DNA, 4001 bp, Homo sapiens
taatcatttctagcttttgatttgaagtgggtagagtgcaactcttcacttcaacacttgagcccactgtacagttactattggcctaatttcaatgttgttttgtctcagggaagagagaggccgggagagagatggggaaacagccagtcagtgaagcacacacaacatttattaggactaccatcttttatgggcatagtttgtgatgccccaaaataattacaatagtaacatcaaagattactgatcatagatcacagtaatagattaaaatgtaagagagagacacgaagcgagcaaaaatggtgccaacagacttgcttccatgcagggttgcttgtaaaaaacttgtaaacttgtaaaaaatgcaagatctgcgaagtgaagctcaataaagcaaagcgcgcgggaaactgaggtgtgcctttatgttctgctttagcagacactaggtggcgagcgttatttgaacgtttacaggaggccctgtgtatctgcggctgcatatccatggattcgaccaaccaggaatacaaaatatttgaaaaaaataacaataaaaaatgacgatttaaaaatacaagtaaaaaaaatcagtgtaactatttgtgcagcacttacattgcattaggtactataagtaaccttgagatgatttaaaagttatgagaggctatgcatacattaaatgcaaataccacgccaccttatagtagggacttgagcatccgaggattctggtatctgcagcggggcctggaaccaatcccctccagataccaagggaagaatgaccatacgtgagtgagcctgtatttgcaacgttttggtctgcttaagccaaacatcaactcttactgggcggtgtcaccaatagttttacgaaatcaagctacatgtatattcaccacttattttttttctcacattcattcttttagcttaactttcttccaaaattatcctcaatctaattacaaaagcagcagctaactttattaagggttacacatcaggtattttgctaagcacttcacctgcagtatcaagtttaaccttttaagacaaggaaactgcagagacagagagaggaacaaggtcaaagagctaacaagcagagaggccgggtctgaactcaggccctgctcttagccggctactatctcgtctccatcggcgactcaggctcctggcgctttcaacacaatggtattccaagacttctcgcagcagttcttccaagcgggcattcggtgtaaaacgatggaatgccgagtgttcctaggttctcatttctcccttcgctctcctcagacattagaaatatctaatttaccgggtaggaaagcactcaagaggtttcctcaacactacctaggaggagtgacaggtggcactgttcaaaaacccttttccttcattagagggaaagccaaaatctgacctttcaaagctccaccaacgagcctttccccttttaacgcatacacttttccctcctaattccgcagcagcaagtcaggccttcttcctcaagctctcactgcacgttctcaaggctgccaagaaaagaaaaaatagaagagaaaaaaacaagcccgcaaagactcaactgtgtgtgctctcaactaacacggcgccggcgctgcctttactgatgctgggaaggcttctcttcacgacttcacgcgtgagagtgggcagcgggcgcagggcgcggcactccgcgggacccacaggggggctcacggtggaggccccgggcccggctcccccgccaggctccctgccccagccccgccggacgacgcgggcccgggagcaggaacgcgggacgctgctgacggcccgggtccccagactcacgtttgtactcggccatcagcctcttgagcgcggtccccgccatggccccgcaacagctgcgccgagcgacctcgcctcagccgcgcgcgtgcctcctgccccgacaccggggactgcttccgggccaccgtcgcgggcccaggaactcttccggggcgtggcgcgtgcgcgatcgccgaggcgcgctgtccgggtggtgggagctcaacccgcgaccgcggctacgattctcttggctcctgccctcgccttagtcgctctgcggggttggttcggtcccggcacttccagaggcctcagggtcctggtcttgtagagacttcctgaacggtggcgcctgttccagtgtgtgtgcgctaactgcctgttctgtgccagccgcgcgtggccgaagggcgggaggacgggggttgtggaggggaggatggaggttggggagacagggcggggacgagataagaggtcggggggtggggaggatggtcgcggggcggtctggggctggagacaaggggcctgaggtgcgggtacgcactgaacattccaaccgtccccagccggccgggtttcaggtttgaaaaggtgggaaggttagctgtcctggcgcttttcctccacgtgttgtgcggctccgctggagttcgggtccagcaccttctactccgagggagagagccgcggggagagccctgttcgggcccgcggctcgaactgaccgccggctctgccgagcagcctcgaccccagggcacccccgggagagagggcgcggctcaggtccctgcccgaacccctggggtgctgagagactccccagcgccccgcgtgggctcccggcctctccacagttgaggatcctgtaaggggcgagccctttttcccataatggctgtagtgagtgggtgtgctttcccgattgacccgctgtgaggtgagcgattttaacccacatccttactgacttcacagcacagtaggtgcttcgtggctgtccggtgcaaggatgtatatacacacacacctttgcaaaaaaagtttgcatctcttgcctggctgtttgttgcaataatctatcatttgtcttttcctttccagcattgcagatgatcccttgaaaagaagtctgatcacattcacactctgctccgcccatttcactcagtaaagctgaagtcctgcagtgctttgctctgcctccggtcaccccgccatactcccagaccctccctccctctcactccactccagctgccctggcctggttcagagtccctgactcttccctccccggaaacactttctggcggctcttgtccccgactcttcccacctgctctttcagtctttgctcaaatgttgcctcttcagtgtggcctaggccgtcaccacccggccttcaccgcatacctttttctctgcaacacctactcaacacaccgtactatagaacttactggcatgctataaatgtattacccttatctgttgcctctaaccaaaagcgtgttccatgagagccatgggtccctgcctacttctgtcttgtttctggggcagcctctgtacctggacatcgtatactcttaacacggatttgtcaaatcaaatgaaatttaacaatacaaacttcacaagtatgcatagtgtaggaaaattccccaaaattcaaaatttcagtctacctccatcttttcaaatgaccacagtgctttataaaatgacatggtcctttgagactgtttcagagagtaatttgtgcaaatgcaatgtgcaaaaagtcacagtggaggtgtttcctcccccattcaagagctgctctctctctaatcagacagcaccccacaccccaaggcagtctgtccagtgctcctaaaggagagcagctccccttttccagttatgggagatgtgggcaataaagcattactgtcaatgccgtgatgttcactgcaacatatgcttgatgttttcataattttatccatctttttcagacatcttactgcagaacactgtatgttttccaattattatttttcagaaatgtggtttacagcttctatcaggattagcttcagcttcaagtgacaaaagtcacttgaaatatgagttgctgaaacaagatggcagtc

SEQ ID NO: 1562551 - DNA, 4001 bp, Homo sapiens
gacttgcatgaagaacggtggaatatggccggaaggaacgcgctcacctactcagtgaccacgccgagctaggcaaaggccgaggacttcctgcaccaagaacttagcagagtggatctagcttgcgtttttcatcgtaacctgagcagagatgccaaccacattaaggacacttacagctcctggtctctagagaggtgccagggccccacctgatcgttacatggccccagctggtccgcagcagagccgtcctgcacacatgcgcacacgcacacacacacacgcgcgcgcgcacacacacacacactcatctcctgtggaacccgggagatgtttgccctgttttgtttttaacattttatccgaggtcacgtgccatcccaagcctggcttcttggccaagcccagagaagaaagcagttagcagatcctgccatcccgcaaagacccacaagggccatcagagcaggagccgggggtcttggattccggtctcagagatgggaaagcctaatgctctggggccaacaagagtcctggggtcagatggacctgtgctcacacccaggctcacaaacccctgttgcatgattgcgcccatgtcatgccctcccagtgcccctctcttgtcatctgtgaaataacagccatgtcctgtggctgcaaaaggctgaagtggggtcatgcctgtgaaggcagtgctggcacacagggaaaattcggggcgaccacgtgtggggttgctgaggttctgccccgtgtcctcatatacaatgaggggttctggaaacacctcctaagaccttctccagcttcccaggatacccacccattatgcatctgaactgtggggtctacacattacctgttccaatgggaaaatccatttcacaaatcacaaagcaaaatcctgcttctgggtgaaaaacgttaaagtagtacaaaaacatagttgattttagaaacagaatggattcctttaaatttgtaactgaatatgacagattttaagaggaaaatgattttaaaattccgcagtcccatttccctggattctggggtttcagaactcccgtgtgtttttaagaagctgccctgctctccgcatgcctgggaaaactccggacagagccctggtgcagcctctggctcctgtggtgactctgccctgtgagctgtgtggcctgggcaagtccctgatccattctgggtctccctttcttttttgtttttgtattgtggctttttttgtttgtttgtttgtttgtttgggggcttttgctctgccgcccaggctgcagtgcagtggagcaatcttagctcactgcagcctggacctcccaagctcaagtgatcctcccatcccagcctcctgtgtagctgggaccacaagtgtgcaccaccatggctggctaatttttttttttttttggtacacatggggtctcatgatgttgcccaggctaggtctccttttttttttaaatctgtaagtgaggacttgaatgcaccaaggttcaggagacctttcttctgcgtctgtaggagctcactgttctcagtgggatctgaggacccacagcatctgcatcacccacagacatgtagagttccaggccctgcaccccagacctgctggctaagaatctgcattttacccccacgaacgcccaggtgattcagcaacaggttcccactgggggagtcctcttcccaaaaccctacccggcactcctgccccacctccacagctgctaccatgtgcgcttaccaaaaagcttgtccacaaaagaacagatgtcgcctctccaagcagaggcgtccttgcctgcccaggtctccacagggggctgtcctcatgagacccatgccaggaagcccctgtccttaagaactgcccatgccaagcccagacccctcacctgtgaagccgctggcctggcttgggcccacagcactgaccagagccagcagtgccagccccgaggtcctgagcatcgtccggcagtggtggcagtacagggctctgggcctctaccaagaagcctgggtctctgctacgccagggctcataggggcctgagctgcctggacctggagaaacggcctttctgtcccctgtgctgctgcaggtggcaatgacttcagaggaagcaccgctgggagcagtcccttatgcctgctcgttaacacccaccattgccatggccgtttccctgggggctcctgcgtgtcacagcctattctgctccaagcagatggcatcttttaggaaaggtgagtacccaaaagcccagaccgcatcgctggatcccatctcgttgttacgcagaaaacacatttgagactcatatctgagtctctccatcaacacggagtattctcttaccctatcgttctgaactggcagaagaaaacagcatcaaatcaaagtggaacatcacgttcagaaaagcgtccttcacacggttccacaatgcacttcaaaagtcacaaaaatgtccaggtgctttgacccagtcctctcctcccggagcttgggctgagagcacgaagctgtggtcacagggatgtgcattacctattatgacttaaagtgggaaattacataattggacagccacaggagagtgggagagtaattattacagagcatctggatgcagcattacacgggcgttgaaatgctcaccatgaagttttagtagcacaaacaaatacttaacaatgtgaagtcaaaacagcaacgcatgcaatttcatctccatgaaagtgacaactctgtacagttatataagcatggagaaaactccagaaagggccctgggacaggaagaaaacattttgaggagtgataagaatacaggtgattaatgttttatttcagtagtcatcatggtatatgtgaagtagatttctaaatctcatgttaagttctttctagctcatgatgttttcatactgcaccgttgattgcctctcacttcttagtgttgactgctgaagcccaatttttaacattggatgaagaagatcttgttgattttactgaggaaacattcagatgaattaacaaagattcacgttggctgcatggttcgggagcataattccctggtgttctagatacaaaacgattcctccagaagggaccttctcgcctaactcccgcaccaacgttgctacctcttttattctctgtagattaatctctgagatgatgaactgctgcatttgcttggctaatgactaaatgtcagatgccatgacaagaatacaaaaaggaggctggaaatgatctcacagcaaaggggctgcgtacaacgggtgtccttggaacacagcagcttttatagaaaaccaaaagcttcacacagaattggctcattaaaaaacgttttcatacgaaaagaataaatgttaaagctattatataatactcaaggaagtgaaattttattaacactaaaagaataaaaagtattatgatttaagtaaatctgaacattttaaaatgcaagatgaatttgtattatcttgtatatatcatctcaaaatgtttgctactataatgtatgaatgtctataaaatatcaaggtaaatcagggataatattacaggttaaaactcaaaattcgtctggtgcactgttgtctctcatcttcacgattgccctatgaaataggtcctttgtccctattatataggtgagaaaacaggttcagaaaggccacacagccagtaaacaagagattaaacccaggcttgtctaagcctcaagccgcagttcttcacactccactccactgctggtctgtcatgatttaaccacagaccccaagacaggggaacaaaatcaagacattttaccagttgaggacttcataataatttataatcatccataaaatgtcattgtaacatgctgtctctttatattaaaatgattaaagaaaaaaatcccaaaattaacagtctgtttctagcttggtgtctc

SEQ ID NO: 1562552 - DNA, 4001 bp, Homo sapiens
caataaatgattttaaaattctcagatatgcgctctttgtcaggattctccagagaaacagaaaactgattttaaaaaaagaaaagaaaagaaagaaatttgtgggccgggcatgttggtgcacgcctgtaatcccagcactttgggaggctgaggcgggcagatcacctgaggtcaggagttagagaccagtctggccaacatggcaaaaacccatctctactaaaaatacaaaaattagccaggtgtggtgttgggcgcctgcagtcccagctactcaggaggcttaggcaggggaatcgcttgaacctggaggcagaggttgcagtgcgccgagatcacacctttgcactccagcctgggcaactaaagcgaaactctgtctcaaaagaaaaaaagaaaagaaagaaagaaatttgtgattctaagaaattgaaattggctcacacagttacggagctgacaagtccaccaccacctgcaaggtgagtcagcaagctggggcccaagagagccaacgtgtagttcccgtgccaacgtaggcagactcaagacccagggagaggtaatgtttcagttcaagtccaaaggcagcaaaaagctgatgttccagttcggaggccgtccggcaggaggggttctctcctcctcgggggaaggggcagcccttttgctcttttcagggcttcagctgattgcatgaggcccacccacattctgcttgactcagtctattgattcaaatattaatccaatcagatcagaggagggacctgcagaggcacggccggcagagaaactgttgggctgaactgccaacggagaacgccagggatctgattcaccagcagccttggggacattcacctcgggctcgacagactgccagaaaccccccaagccccaaggcatccatataacggccaggttatttcagattgacacacatcctaatgtacgagtcagcccacacatcccacaggcgctgagcatctcttgtttttcaccccaaataaactctgctgaaactggggggccgcagggtgtcgagaaaagggaagaagggcagagggcagaagtgggtggtttgctctgctccacccatgggaggctggtgcacacggctgcttccgaaagggcttcctgctttaattgcagtgctgagacacaggtggctctcacgccctctaattcaggcaaagccgccactggggccaaggggagccgggggacaagcaagcggccagttgggagcaatgttcacgatagctccttgcgtgcaccagtcccagagtcttagagggagggattcctccagggggtctgaggccagaggtttccactgctcctgtcctaacgatcaggtgagcagcctccctgggctcctgggtctaaggcatcgctcaggaggaaggaccttcaccacatttgccaggaaggtctcctgatacccatgaaaggctgctcacctgctgggaagctctttaaaaaatcccaatgcctggcctccagccccaggaaagcagcttagaatctgtttgggggacaccaggggggactccgaggggcagcaaggttgacagcctcgacccagtccaaacacagggcagcttgccaatgaggaagtgaaagtgaagggcccttggcccaggtcaccctgtgcagcgggctcagtggcagccccctgcacccctgcaaaagatatgtccaatcctaaccccaggtacctgtgaatgtcaacttacttggaaaaagggtctttttgcagatgtaatttagatgagatcatcctggatttaaggtgaacctaaatccaatgactggcatccttacaaaaggaaggagagagagatttgaggtgcatggagggaagccctgagaagccatggagattggagtgatccatctacaatgagcccgggatgccaggaagggctcaccccagagcctgggagaggcaggggacggtttctccctcgcagcctccagaggaaaccagcgctgtcagcccctcgatttcagacctgcagcctccgagctgcgagagagtgcaggtctgttgttcagcctcccagcctgtggttctttgtttgtacagtagccccaggacgtcggttaggggtgcagccttgctcactctcacggggcccctccattggctcttctcaccatccacttctgccctctgcccgtctccccccttctccgcccctgcgagtcccgccccagttccggcagagtttatttggggtgaacaacaagagacgctcagtgcacgtggggtgtgtgggctgacttgtacattaggatatgtgtcaatctgaaacaacctggccattctctcgacgcctttgggcttgggggcatttctgacaggttgtggagcccaaggtgaatgtccccaaggctgtcggtgaactgattcagatccctggtggtcgcgactgacagttcagcccctccctggtttctctgccagctgcgcatctgcaggcccctcccttagatctaacgcatctgtaatgctttcatctcactgagaaccctccgcctctggcaggttagagtagcactcagggttggatgtattatctcaccacatctgcttcggtttcccctgcagaggcggctcggcgttggcactggcgctggctgggcacagccctaactaacttgcttctttgcgatccttcccccactttcatttggaaacgttctcacactctctgcttcttgtaacctcaacagtgggtgatgttgagaaagtgtcatttttgtcccaaggcctttctccctgttggatggtcccagggctcggcacagcagccttagcagggcggagagggaaaaggccaggagcccagcaccgggtgcagtccagggtcccaacctagattctctgcctgccgcgagttcacgtggggaaggccaatttgtcctgaggaaaccacagctcaagtgctcaccatgatgctgatgacagtggccatcagtccccactgtcccgctgcagatcttgctgattttctgatacagagatgacctcagagccttttgggtggagaagaaagcacccaagatcaaagtcagggccggccactgggtgccactgcataggattttgccctggagataagttgagggaaatgagggcgcgagaagacgctgcctcacctgcccctgagagagccccacggggcagtgttcaagaccccacttcccgcagggcaggggctggggcttgctggggacgtgtgtgggatctgagcacagggacagcctccagcctgtaacccgttgccgcttcctccttccagaaaaaaaacatgcctcgcaggggcaggcccagccctgtggggtttcaacttctgaagcagttcaggcgaaaggccgaaaacaggaagtgagacttgggtggtgggaggagggtatgggcaggcaggagggatgctgatacagaaaattcacatttgagaagaacccaacatataagaaaggagaggaaaagagagagagaagacaccagcacgaactccccgtggatgtgccgggtttttcttcagctgcctatctgagagccggcctctgccctgccccactccttccacacacatttgccggccctgcctgctgcaggccagcctggggcctcagtgggacccgctcatggcctccaaaagccttaaagtctcttgggggctaaattgtgtccctcaaaaagatatgttgaagtcctacccctccgaactggtgaatgtgactgtatttgggaacaggatttttgcaggtgtagttaaaatgaggtcaaattggagtagggtgggccctaaatctaatatgtccttataaaaagagagacatttggatgcaaatgaatggagaagggagtaccatgagacaacagaggtggagggggagcgaggcggctgcagccagggcacaccagggaccaccgcctccgcccacaccagcacaggccaggagggctctgtccagacacc

SEQ ID NO: 1562553 - DNA, 4001 bp, Homo sapiens
tggcacatatacaccatggaatactatgcagccataaaaaacgatgagttcatgtcctttgtagggacatggatgaagctggaaaccatcattctcagcaaactatcgcaaggacaaaaaaccaaacaccgcatgttctcactcataggtgggaactgaacaatgagaacacatggacacaggaaggggaacatcacacaccggggcctgttgtcgggtcggggggaggggggagggacagcattaggagatatacctaaggttaaatgacgagttaatgggtgcaggacaccaacatggcacatgtatacatatgtaacaaaggggcacgttgtgcacatgtaccctaaaacttaaagtatgattaaaaaaaaaagaaaagaaaagccacttcctcaggggagccttctttgagctcccagattagatccaaggtctgttaaacaccctcaggcaccatgtacctctcctttggaaaactcgtgcttgaaactgtatgtatgtgattttactgaccaatatctgcctgccccactcgactgtttgtaaaccccacaatggcagaggctttttgacatttttattcatcactttatctctaccgtagcaaataatagcctctagtaatacttaatgaattcggaaataaataactctatgctaactaagtatcatcttcctagctgtgactagcaagtacaggtataggtatcaaagtttaaaaacaggccaggtgtggtggctcatacctatactcccagccctttgagaagacaaggtgggaagattgcttgagactgggagttcgagggcagcctggacaacatagtgagattccatctctacaaaaagtaaaaaaaaaaaaaaaaacatagctgggcatggtgttgtgcacctacaatctcagctacttgggaggctgaggtgggaggacagcttaagcccagaagttcaaggctgcagtgagctatgatagtgccactgcacttcagcctgggcaacagagcaagaccctgtcgtttaaaaaaaaaaatgaggacaaaaattggaagttgaagatattttggccattaatttaatcgtttatttaacctgggagaaaaactgccactgttttattttagagcaatgcttccacatggcaacacgttcaattgcgtttttcccaaaccatgttactttccaaacgattacaagtagtcgcgaagggtggtcacactttacaaaaagtgtaattaaattatagagtcggctacatctcagtcactggcccattcctggtcaactgacaagtagctgtggtggcttctagtagcttgttacaagtcatcaagtcagtatgagtgttgggggatggaagctattgaaaacggtgctgacggcccaaggagtagcaaactgtctcatgaaccgtcctgagccgactcagtaaggactcaatagagaaggacacttcatttacttccctgacaactgcaataaagaggttttagagctcgctgagggatgctgcctgggcaagggaaataaatgtgttgtaacatgaaacggtcccaatcaagcaagtcggggccctctcgctgtcgccgacagtccagagcaaggaagtacacagcagtcctgaacctcagttttctgcaaaccagaggcttgccactgagcctatgtgacccgaaagctgcagaaaggagaggctgtgcccggcacacggaggccgcctcgccagcctgtgctcccgaccctgcgcctgccgccccggactcacctggcccggggccctgcgggtccttcagctgagccttgaaccgcacgcccgtgagctcttctttgcgggcgcgcttggctgcacccgcggaggaagccgcgccgtcctggccgcccgaggccttcctcttggggacccccatggccgagagggcggaagcgcgacggaaacgacacacctgaggggacccggcaggagcactggcacagacagcagacacgcgcttcaggcccacatggcgcaggaagaggcggggctggcggaagaggcggggctggcggaagaggcggggctcggggaaaggccggcggaaggggccgacccgcgcgaggctgggaccggcggaaggggcgtggcctgcagaaggggcggggcgatagggatccagagtcttggggatccagagtcttggggctccatgtgagtttgctgtaccggttgtcccggtcacggcatggggcgagcggacactccacgacaccccccgcccccggctgcagggtttggggtccaccggggcgcatttctgatcccagtggctcttcgggtgctcttggccggaagaactcccagacctttcactcctggcctggccgatccacgaagactcgggccccggcgcgtccaagcagcacaatgagtagttcttgacccgaggtcgccctgaaggtgtcgcatgaagagcttgcttcacacacaacaggattcgatactttgccaattcaaggccctggtggctggccgggaaggtggattcgccttggctaggtgccaggcaggtccgcctgtgcgggtgcccctgacttcgacccctagcttatgtcacagcccgaaccagatcgactggtctggtagcagcctgtcactccagactgtcctccaccccagacttccgcaaactgatgggctctttgcgccgtgcagggtgggaggagaagaccaaacgaagtaacgtctgtaaaaccccttcctggacagcgtaaggcctccacatctaagttcctgtcattaaaatggagacagcaaagccgaccctatccagtccttgggactgttatgaacagaaaatgatgcaatgtatgaaaaactgctttgaggagaaaaacaacacagtgtgtttttggaagatgtgattgatttgtaaaccgcattaaatgctctgaaataaaatgaaagtaaaaataagtaaaaacaggctggtacatattttaatacgacttcatcgatacttaggtatgtgtccaaataaatcatgaaccagcgcattagataagtaacttggtgattactgaaattctccatcaggttgtcctctagtctaagaaaattgtgtttcatattctgtaagcagatgtgttttgaacatctgaggatgtgggcttttgtggcctgttggggtctcagagtttctagtagaaaaagcacgtgtgttgacgctgagcctctgtcccgacaagatgattgtgcctgtggagatgtctatgttgtaggcaggtcagagagagggtgtcacccctagcagatatgagctaatgcagcaatgttaagagaggggaatatgctcaaaaagtcatctgtaaaaggcaacactcattagtgaatacagacttaattctgactgattatccacactggtcctcttctttggttaatcgctaaccaccaactttgttttctgccatggtggtcccaaccaaaaagttatcagaaagagttaggaaacagtcaaaagccctgagttcagtttctgcctgtgtgaccttgggcaaattaccatccctctgtgctggtttgctttacaaacaattaaagagcatgaggaacttcccaggattatccagctagtaactggtggagccaggactcacccagtgtatcctagtcccaaattaaaaacaaagaaacagaagttggcagtgcccatttacagccttagccagagatgtatggatggcaagtgtggctcagaagtgcatttggatgttttagactaagttaatgccatgaatcattgatgctgggttaaccctttgttcagatatgaggctcaccaacctctggatagtgacttgtctttccatatcaaagctttgtattatttgcctccaggagcattctggtttgttgcagactatgtggtactgctcctaggacattctaagctgaggaaaaaagcccgagagcttttgtacttgttccctctctttgaaactctttgcccagagctcaagtggct

SEQ ID NO: 1562554 - DNA, 4001 bp, Homo sapiens
ttgaggccagaagttcaagactagcctgggcaacaaagcgacactctatctctaccaaaaaaaaaaaaaaaaaaaaaaaaggtaaaatgcagatgtttgggtttcaagaccaccactttttacctgccaatcaagtctgtctctttttttttttttttttttgagacggagtcttgctctgtcgcccaggccggagtgcagtggcccgatctcggctcactgcaacctctgccgcccgggttcaagtgcttctcctgcctcagcctcccgaatagctgggattacagacgcccaccaccacacccggctaatttttgtatttttagtagagacggggtttcaccatcttggccatgctggtctgaactcctgacctcgtgatccacctgcctcggcctcccaaagtgctgggattacaggcgtgagccacagcacctggccaagtccttctcttgtactccactccaaaacactttgtaccctccccgccttgatgtctttgatttctagctgtaatattctatctaaatcttaccaatcttggaagctctccatttcaaggaagccttagacaatcattctactctaaataaacctctccactgaacttccccagtatttatggtatgctctagtcatcttgtccccttatcccatattctagtgaatttcttaaatctttaatctgggtttatgttatttctgtaagcagaatctaaagttcttagaaaaataaatggtttcaagcacagttttggaactgcctataatatctagcataatgttagtacatagcaggtcctgaagaaatacttcttgcattgaaatagaaaaatagaatagtacctgaggcataaaggatgattacaaggtgcaaaggtaggtacataagaatgaagcaaacaagttctggtgaaaaagaaaagggtgaaaaatgagaagtcagaagtctgcagtagtgaagacagcactagtaaatctggtttgaggattgcagcagcttagactccataggaaaacttgaaagacgaattgttaattactgcaggcagaggacagaggggtcactccagtgctgcggaaagagcctcagtaaagttctgacaactataaaggcaactaatgagtcatgaggagagcatattgtgacttccatcagctataaaacatcaataaacttaatacacttttcaagtagtgtcatcggatgagcattaacgtcttagtgaaatgactcttcgcaggactccatacaaaatctaaatcaaagatagtcttgccggttctcatattattccaagtctcttcactctctgccctcccagtcttcccctgcctactcggttccattaaaaatgtaagcgtgtggaaaactttgtcagcaggtgttaacgtggctttcaagttttgcgtatatcaatcccctcctagatatagtcaattggataagtgacagatcctgcttttcctaccagccgtatgaacacggctgcaaatccagctccaacccatagggaagtccctgccacgcgccacccacccatttgctcggcgcctgccacaccttccctctcctccccttctaactgctccgatcccacgggggaacctctgggtccacggggtcgagaaggccgccagcagcggcatctcattggccagcttctggaactgacagaacatgcagccaatgagatcgcagtaccggaaagtagccgggttacgtgcttaaggagagcggccttcaagaagagaacgaagttggggcggaaaacaggagctctcccagcgcagaaagccaggcgagcgacgactgccaggcagtgggaccagaactcacccacggcgacagagcccataactgcatcccctcatgggcctttgggctgggcagccagctccgtcttcctcctggtgacgaattgagagcgacggagtcgaagccagagtgacccctggaaagcaataacttccggaacgcggcattatgggaagtggctaggccaccaccaccccacccccacctcccgggaccatcggctctgacgctagtaaatctgcgcctgcgtgcggcttgcgccggatgttcgggtttaggggtttggttgtcaatgggttttctcgtctctgacataaccacgaagttatataaatgctcctgaagtgtgggcatccggtggtggtctgagccttggagtttcctagatggttacctttctggaacacattatatttggagctaaaagggggaacgcttaaatttgtttccgtaattctgtcctgtcgacttctaaaactgagtacctaagttgtcttgaatttaccttcctgcaccatgtcagaataaaaaacgcagcgagtgattttttgtttgtttgagacggaatatccctctgtcgcccaggctggagtgcattcttctgcctcagcctcccgagtagctgggactacaggcgcacggcaccacgcccagctaaaatttttgtatttttagtagagacggggtttcaccaattggccaggctggtctccaactcctgaccttgtgatgcgcccgcctcggcctcccaacgtgctgggattacaggcgtgagccaccgcgcccggccgcgagagtgaatttttaaagcaaaaccgaaagacggtgtcagataaattgcgggggaggaggggattttcaaatatttactgtccattctttgaaaatttgtaagtgcgagccctggcgcggtggctcacccctgtaatcccaacactgggaggccgaggcgggtggatcacgtgaggtcaggagttcgagaccagcctggccaacgtggtgaaatcccgtctctactaaaaatacaaaaaattagtcggtcgtggtggcgggcgcctgtaatcccagctattcgggaggctaagggggagaatcgcttgaagtctggaggcagaggttgcaatgagccaagatcactccattgcactccagcctgggcaacaagagcaaaactccctctcaaaaagaaaaaaagaaaatatgtaagtgcacactttgtgccaagcctttcctcaaatgaattaaacataggcctctctgccctggagtcttagtttagtagagaagatagtaatcgctaccgtgggggtcgggggagttgcagatagctatagaaaaatagatatgtaaacaggtaattcaccataaaagaacaattggtcataaaataaatgtccatccttactaatcagataaaaggagtttaagatggtggcatactaaccaccagagtaacatttggttaaatttgggggaaaactagctctcttgctttttactgctgagataatttttgttttatttacttatttatttatttattgagaccgggttgcactctgttacccaggctggagtgcagtggcacgacctcagctcactgcaacctccacctcccgattctcccacctcaccctccccagtggctgggattataggcacgtgccaccccaccacacagctaacttttgtatttttttggtagaggcagggtttcagcatattggccaggctggtcttgaactcctggcctcaagtgatccacctgcctcggcctcccaaaatgctggattacaggcataagccaccggacccggcttagtttcatctttctctgtattctgacaacattatgacattacagtccaagagatattgggctggtccttgtttggtctctggtgatttagatgaggcaggactgagcccccacgaatgtattatctcaaaaagttagtagcagctactgtgcaaagttcgaaggcccaagtcaaatcctgggcatatccacggatgtgtggtagggcataggctccagctctcatgcaaaaaagaacaggagtgggatgagataattttttaaagctttcttctccaagctccagaaatgcaggctttttgcccccacgcattttaaaacagagccttagggtcattgtaccacgtgcttcctgtcagaaag

SEQ ID NO: 1562555 - DNA, 4001 bp, Homo sapiens
atcaaatgaaaataaaaaaatcctaaacttacaaagttcttcccattgttcaaacttaggaagtgaaaaattggtatttctcactttgaaacagactttaatattcaacactgaagacaattataaacaaatggtaccatacatattaaatattgcttagcgttcacatgaccatgtgctctttcctaagccttaagtctttaaaaattgaacttgaaggtattcaaaatagaatagggaggattaggaaggaaactcttttaaattctcattattaaatcttgaattatttcactgtaaataaagtgcagtgtgcaatatccttctaactttaccaataatatcaactaacatacaagtctcaaaaacaactttcccaacgtgcctaaaataacaatgcactatccttgctttccaaacttgagtatcttcgattactttaaagcagtatcataaaattctaaaaataatctcaaagcaaaaatttagcaggctgtatgtagacagcccattttagaacaggtcttattctaaagtcaagcacaggtagaatattgcaatctacaccaaatctacaacagggtggggcattcattactcacccagataaaccaaacataactctggtggttgatcacagtaaaccctaactgtccccgtaataccaacacaactaaggcacggtttactcttttgcccaaaatgcttttcacgcaaattaaaaattaaaaaaagaagttaaatcatggccaactactcttcagaacatggtgcaagccatgatagtgcacttaagattctgaaagcaaaatctaaaatagcagaatgatctctattcactttaaagatataaagtttcacaaacagttttttaattgttttctttagtgagtgaccatttgaatgtgtgactgatgcaagagtaaagggtgaacgaaagaacaaggtcaaacttaggggacaaaagattcctggaataacatggccagaaaggtttcctctcttagggacagtttctatattgaaaaaaaaaaaaaaaaaaaaaaaaacagaaaagaagaagaagaaagggaaaccttaaaaggaaaagaaaccaagcaaaccacctacttctagagtccacctggtcaacacgcctgccccgcgaggcaggtaattcgattttggtggagaccgttttgcaaaatagcaggcctggtacactactacctttgaaagacaaaatcggttcagaaaggatgacaactagctattctttctcatttaaggggagagaataaagtttcattaagatgccacacagagcactgtaggaatgtgagggtcgctctcaatacctggcaccgtctgctacgggaaaacaatcggcagaaggaagtggattgaagcccgcaaactacactctgcttcccacacgcagctgggctctgggcgcgacgcccccgaggcgatgggcaggggccgggggtgaccggggaggaagcccgggaaggcggcggcggcgaggccggggcgcccggccgcagcgggagaggacagcccgtcggaaggagaagtggggcccgccggctggcggactcgcctcaccttctgcgccgcgctctgctgcagcacgttctgctccacggtcatggcccccgcggcggcggcggcggcggcggcggtggcgcccggctcctcgcgcctccgccggccctggctgccgcgctccgccgagctccagggagcggcgcggacggcctgggaggacagcgcccccgccagccaggcgcgaaggcgatggcggccggcgtgcgcgggcaccgcgggcaggcggcgaaacgccgactgtgagggccacggcggccgcctcacgtctccacgcggcccgcctcagcgccgctcgtccgcggcggcccgggccatgagcgggcggaggacgccggggcacgggagagcgcgagccagtcgggcggcgtcacgcgttcgcacgttcctttgctgccggtccgcgggctgctttggggaagggagagaggggacggagggagcggccgcccggaatggcgttgtcctcctccctccgcgagtcctcctccctcccctcccccacgcgccatccccgcccccgcccggcggctcctcccccgcagagccccgcccgccggccgccctaaccctacattgtgaccctccgggcggcggggcggggccgccatggagccccgcccctccctgcgcgggcctggcgttcccgggtggggcgagggcgcgcctggctgcctggcccgggagccgcccctgcggcaggttgcgcgacgctggcgctgggcttcggggagcgcgactggaggccggagggcagcgttcctccctgcgcccagggcttgtcggatccctagcttacccaaagcctccaaagcaaacatttccctccatgcccataacgtcccaaaactgcgtagggtcccgaactccggcccctttctgtgtcacgcgttctctcccctcgcctttctaggaatttcacaagccttgaacttgcctgaagggaaaagtcaaataagcaaagggttgccagaaatctttatgctgggaagtacttttctccttaactaatcattacgtaaatgaatatagacattttctatctaccttcattcattcgaatatgtgtcagtcactgctaggctctggaaaaataaagtttatcttcccaagacttaatataaatgaaataggatctatctagcaaacaaccttacaaaaatatcactgcctaatgatacataattctaatatcccagttgccaaattaagcaaacaattaactaccatgcatggaatgcttgactatatatggaattgtaaggaaaatctaacattaagaaagcaatctctagccacaaaaatatctcgagttccaggagctaatctgggaacggaggtgagagtgcagcagtgtgaggagagaaattatcaatgcatattgtcacaaatagaatacacttgaaaatccgggtataatttttaatccaatgacaaggaaagcaagcttggcaaatgctaattgaaatagtatgtggtgttatttaataatcatggattatagtagctcttaaggctttgtaacagttctgtgcactttacaaccatctttgttctgcagctcagatgtctggtaccacctgttgtcaccttttccttgaagcttcatatttgttgactcatttgatatttaacaaattgcaaatcttattatattaatatcctatgtcttttctagaggaaatgaaaagtcatgaaacggttggaaacagaaatttagaaatactgtcacatctctaatctcacgtatcgatttttttataactctgaagcccaaggagggtgacctgtcaaagagagcttatcaaaacccatttttcttcatttatagatcaaagtttcttcttttcttgtttatatgctaacttcatgtttctccatatgagggttttggttttttggtttgtttgtttgttttttagaaatcaagctcatacatttgaattcaagaaaattaaatttaacataaaaatctagtaatctagtaccatgggaggaaaaatgttgccagatactaaggtttaatttcaagaatttggcaatacaacttttctctgagttaaatttgttacttccatacagaaaaaaaaagatgatcttacaatagataatcatcaaatagagcttttatatggtagacctatttgcccactgagactgttcattttcagcttacttctgagggtttcctacttactcagcatttctttaaatatttttaactgttgtactgaagaacattgagaagaaaatttcaagtttcctcataggcattcctttttagaaggcttacaattgggatgaataattagagaaatttgagcaattgagataaattggcacacaaaacccatcgctgggatttcctaactcattttttaaatttgcgccgtgacaattgtgttgtatgagtc

SEQ ID NO: 1562556 - DNA, 4001 bp, Homo sapiens
tcagggaacagttaacaaactttatttgcttaatctcttattggagtacgtcatactgcatagttctgtgggaaaaaaaagttcagtaaaacaaatgagggataaatactcaacaggaattaatatgctattcttttaggcaccacaaaatctatgcgacatggttataagaaattacgggccgggcgcggtggttcacgcctgtaatcccagcactttgggaggccgagatgggcggatcacgaggtcaggagatcgagaccagcctggctaacacagtgaaacccccatctccactaaaaatataaaaaattagccaggcatggtggcaggcgcctgcagtcccaactactcgggaggctgaggcaggagaatggcgtgaacccgggaggcggagcttgcagtgagccaagatcgcgccactgcactccagcctgggcgacaaagcgagactcctcaaaaaaaaaaaaaaagaaaaaaaagaaattatgttctgatactgttgagcgttcagtgggattctgtatacaaatttcaaagagccattactatttagaaacatatctcacctacctgaaagtgttcccatgaccccaggcacttaccaacataagaatcacccattttccatactgaacctaaacttcggtttatcccatcctcaccccctggcacgtatcttgtacatatttatagcctttaaagcgagtgcaccaaaaaactttccatatggaaccgtggacttgtcttccaagtcagaaactccaccagccactagaatttcctcaaaatgcaaagactgaaggtaagcaaatcatgtctaatatatccacagctcactctggcagatattagaccgtgagtctctaaaacaaaatcatctgggatatgtgacgggtttctgagtacaatttttgtgagacctaacttaacatcgaattggctttctaaaaccaaacgaacaaaaaatatacagtatatctgacagacacgtcgtccgtttcaaatatgaaatcacaaataacctgggaaaggaaacgaggggctgaaactgacagcactactaattgctccgagagtcctgagttaggactgttccatcaacaaacatttactaagttaaaaatcccctgcgtcgtcctagcactggcgatacactaaggaaggagaataaaattacggaaagcaaaacccgagccgtgcgaagggccactagggaggtgcgcactgcgagctccacgtgcacccttgggttgggtaagtgtcggagatgacttggagccctaaggagcaattaaggccaggtgagtggatgcaggccgggaagagggaacagacaaccctgcaaaaagagggagcgcgcttggaggtcagtgagctcgcagtgagtaagcccctcccttctcaccagggagacccgagacccgcttcttcccagttctgcagagcgtgttcggccgggccttgctgactggtcagcgtcgccccacgtgctctacctacccggtccccgccggcgccgcggagaccggaagcgacccggcggcgctaaccgggcaagaacaccgcagaccagccatctagtgcaaggagcgcgccggagccggggagcggacgccgagagcggacggcgaaagcggaccctccaggcgcagagacgcggccaggccgagactgcggcggaggactcgtgggctggagcggagttccccggggtcaccccagagtgggtgcgaccaggcggtgcgggagaagcggggtcgccaggacccgacgcgcgcccgcagcctggtctccctgttccaagaccaaggccccctcacctgcttgctatggaggtggccaggaatcggctgccgccccgcaccaccaacgtctgcccgcacaacgccagtcccacagagcccgccatgtacccgcccgcctcaccgccatacacatgtgccagcccagagcctcttcctgtccgcaccggtcggtgacgccaggcgcagacgccgagagatgacgtataccccacgtaccgcgcatgctcaaggacgagcctgccttgagcatgcgtgaaaggtgctgtgaccgccctccgggttgtggctggtggccttcggtgtttcgggtttggcagttcactcaccaaggtgatctgatggagtgcacttcgcacgattccaagtacttgcctaatgttcatcctttcctctagacggggtagggctggttctggatctttttccgcggtagctggagagacgtaggacctgatgatggctactagatgcctggtaaatgatccttcaagaagtgaatgaaccgggggccgtggctcacatgaagtcagcagttcgagagcagcctgaccaatatggtgaaaccccgtttctactaaaagtacaaaaatttgttgggcgtggtggcgtgcgactgtagccccaactacttgggaggctgagacagaagaattgcctgaacccgggaggcggaggttgcagtgagtcgagatcgcccccgctgcactccagccagggcgacagagcgagactctctctcaaaaaaaaaaaaaatgtccaagatgtggtcatgggtgagggtgtctcgggtggcgtcaagtctgaggtcgctagaagtaagcctactgaatctttgcacttagacaagccacagatgccttaaaatctccgaactgtagtgatattttcaacccaaactatggttagtttccagtgttcatcccaagatccccaaaagcctcttacaatcccagcatcaggcacaaaatctaggatctcacggtctgttttagattggcttgtccggtgcagctcctcttgatccagagacttacaaactaaaaagattaattttctctcccgtgcacgcaatatatgatggtgagccgggaccagataaccacaataaatacttgcatgtgaaaatgagaagaggaggagacacagtaatcactggtccaaagcaattctgaaatcctactggaagatgttttcaggccctacaagaataagaagtcttaaccaggcccgagttctgcttcctgggagtatctccccaggctgtatctcagcacagctcttgcctctgccctcttgggtgtccctccttttccagcaccttcttggccatgttgaagaatgtgccctttgagaaactttctcaacctccttcctgtcattagcaaattgtgagcccacagaccttttttcactctaaactgttctgtccacattttggcagctggtggtgctttgttcactacaagtcccttaaaagctttatgggcttctcaagaatctgattcaggtgctctccatgcccaagaagccactcccactagtcttttttttttttttagacggagtctcgctctgtcgcccaggctgaagtgcaacctccacctcccgagttcacgccattctcctgcctcagcctcctgagtagctgggactacaggcgcccgccaccacgcctggctaattttttgtatttttcagtggagacggggtttcaccatgttagccaggatgttctggatctcctgaccttgtgatccgcctgcctcggcctcccaaagtgctgggattacaggcgtgagccaccgcgcccagccacttgttaacatttaaatcattgagatcaccttgacttcagcattattcttaaggccatattttattagcgccactctgaatttgatctttggcccaggttatgacttactttgagaacttgttaccaactattgggtctaataatactttccccagcttcaacccaaagtgtgctctaaattctgctggccagtttgtttgtttgtttgtttttaaccacactcttttctataagtgtctcaacatattcaagcaaaagaaacacaggttaatctcaacattatactgatatgatctttttcaagtcccagagttcagtagttgcctttttctctgcccatcttactgaagggcaacaattttacaaatccttcaccg

SEQ ID NO: 1562557 - DNA, 4001 bp, Homo sapiens
aacagttaacaaactttatttgcttaatctcttattggagtacgtcatactgcatagttctgtgggaaaaaaaagttcagtaaaacaaatgagggataaatactcaacaggaattaatatgctattcttttaggcaccacaaaatctatgcgacatggttataagaaattacgggccgggcgcggtggttcacgcctgtaatcccagcactttgggaggccgagatgggcggatcacgaggtcaggagatcgagaccagcctggctaacacagtgaaacccccatctccactaaaaatataaaaaattagccaggcatggtggcaggcgcctgcagtcccaactactcgggaggctgaggcaggagaatggcgtgaacccgggaggcggagcttgcagtgagccaagatcgcgccactgcactccagcctgggcgacaaagcgagactcctcaaaaaaaaaaaaaaagaaaaaaaagaaattatgttctgatactgttgagcgttcagtgggattctgtatacaaatttcaaagagccattactatttagaaacatatctcacctacctgaaagtgttcccatgaccccaggcacttaccaacataagaatcacccattttccatactgaacctaaacttcggtttatcccatcctcaccccctggcacgtatcttgtacatatttatagcctttaaagcgagtgcaccaaaaaactttccatatggaaccgtggacttgtcttccaagtcagaaactccaccagccactagaatttcctcaaaatgcaaagactgaaggtaagcaaatcatgtctaatatatccacagctcactctggcagatattagaccgtgagtctctaaaacaaaatcatctgggatatgtgacgggtttctgagtacaatttttgtgagacctaacttaacatcgaattggctttctaaaaccaaacgaacaaaaaatatacagtatatctgacagacacgtcgtccgtttcaaatatgaaatcacaaataacctgggaaaggaaacgaggggctgaaactgacagcactactaattgctccgagagtcctgagttaggactgttccatcaacaaacatttactaagttaaaaatcccctgcgtcgtcctagcactggcgatacactaaggaaggagaataaaattacggaaagcaaaacccgagccgtgcgaagggccactagggaggtgcgcactgcgagctccacgtgcacccttgggttgggtaagtgtcggagatgacttggagccctaaggagcaattaaggccaggtgagtggatgcaggccgggaagagggaacagacaaccctgcaaaaagagggagcgcgcttggaggtcagtgagctcgcagtgagtaagcccctcccttctcaccagggagacccgagacccgcttcttcccagttctgcagagcgtgttcggccgggccttgctgactggtcagcgtcgccccacgtgctctacctacccggtccccgccggcgccgcggagaccggaagcgacccggcggcgctaaccgggcaagaacaccgcagaccagccatctagtgcaaggagcgcgccggagccggggagcggacgccgagagcggacggcgaaagcggaccctccaggcgcagagacgcggccaggccgagactgcggcggaggactcgtgggctggagcggagttccccggggtcaccccagagtgggtgcgaccaggcggtgcgggagaagcggggtcgccaggacccgacgcgcgcccgcagcctggtctccctgttccaagaccaaggccccctcacctgcttgctatggaggtggccaggaatcggctgccgccccgcaccaccaacgtctgcccgcacaacgccagtcccacagagcccgccatgtacccgcccgcctcaccgccatacacatgtgccagcccagagcctcttcctgtccgcaccggtcggtgacgccaggcgcagacgccgagagatgacgtataccccacgtaccgcgcatgctcaaggacgagcctgccttgagcatgcgtgaaaggtgctgtgaccgccctccgggttgtggctggtggccttcggtgtttcgggtttggcagttcactcaccaaggtgatctgatggagtgcacttcgcacgattccaagtacttgcctaatgttcatcctttcctctagacggggtagggctggttctggatctttttccgcggtagctggagagacgtaggacctgatgatggctactagatgcctggtaaatgatccttcaagaagtgaatgaaccgggggccgtggctcacatgaagtcagcagttcgagagcagcctgaccaatatggtgaaaccccgtttctactaaaagtacaaaaatttgttgggcgtggtggcgtgcgactgtagccccaactacttgggaggctgagacagaagaattgcctgaacccgggaggcggaggttgcagtgagtcgagatcgcccccgctgcactccagccagggcgacagagcgagactctctctcaaaaaaaaaaaaaatgtccaagatgtggtcatgggtgagggtgtctcgggtggcgtcaagtctgaggtcgctagaagtaagcctactgaatctttgcacttagacaagccacagatgccttaaaatctccgaactgtagtgatattttcaacccaaactatggttagtttccagtgttcatcccaagatccccaaaagcctcttacaatcccagcatcaggcacaaaatctaggatctcacggtctgttttagattggcttgtccggtgcagctcctcttgatccagagacttacaaactaaaaagattaattttctctcccgtgcacgcaatatatgatggtgagccgggaccagataaccacaataaatacttgcatgtgaaaatgagaagaggaggagacacagtaatcactggtccaaagcaattctgaaatcctactggaagatgttttcaggccctacaagaataagaagtcttaaccaggcccgagttctgcttcctgggagtatctccccaggctgtatctcagcacagctcttgcctctgccctcttgggtgtccctccttttccagcaccttcttggccatgttgaagaatgtgccctttgagaaactttctcaacctccttcctgtcattagcaaattgtgagcccacagaccttttttcactctaaactgttctgtccacattttggcagctggtggtgctttgttcactacaagtcccttaaaagctttatgggcttctcaagaatctgattcaggtgctctccatgcccaagaagccactcccactagtcttttttttttttttagacggagtctcgctctgtcgcccaggctgaagtgcaacctccacctcccgagttcacgccattctcctgcctcagcctcctgagtagctgggactacaggcgcccgccaccacgcctggctaattttttgtatttttcagtggagacggggtttcaccatgttagccaggatgttctggatctcctgaccttgtgatccgcctgcctcggcctcccaaagtgctgggattacaggcgtgagccaccgcgcccagccacttgttaacatttaaatcattgagatcaccttgacttcagcattattcttaaggccatattttattagcgccactctgaatttgatctttggcccaggttatgacttactttgagaacttgttaccaactattgggtctaataatactttccccagcttcaacccaaagtgtgctctaaattctgctggccagtttgtttgtttgtttgtttttaaccacactcttttctataagtgtctcaacatattcaagcaaaagaaacacaggttaatctcaacattatactgatatgatctttttcaagtcccagagttcagtagttgcctttttctctgcccatcttactgaagggcaacaattttacaaatccttcaccgtgacat

SEQ ID NO: 1562558 - DNA, 4001 bp, Homo sapiens
tggaattacaggtatctgccaccacgcctggctaatttttgtagttttggtagagacggggtttcgccatgttggccaggctggtctcaagctcctgacctcagatgatctgcccgcctcagcctcccaaagtgctgagattataggcagagccactgcgcccagcctaacaatgatttttaaaagagcactttgttaaaaaaaaaaaaaaaaagttgattttttttctctgtggaacaaaaaatatttgcacactcattaaattaaaagttgtatacttgacaagaaaactgtctagatacaatatttcagggaacagttaacaaactttatttgcttaatctcttattggagtacgtcatactgcatagttctgtgggaaaaaaaagttcagtaaaacaaatgagggataaatactcaacaggaattaatatgctattcttttaggcaccacaaaatctatgcgacatggttataagaaattacgggccgggcgcggtggttcacgcctgtaatcccagcactttgggaggccgagatgggcggatcacgaggtcaggagatcgagaccagcctggctaacacagtgaaacccccatctccactaaaaatataaaaaattagccaggcatggtggcaggcgcctgcagtcccaactactcgggaggctgaggcaggagaatggcgtgaacccgggaggcggagcttgcagtgagccaagatcgcgccactgcactccagcctgggcgacaaagcgagactcctcaaaaaaaaaaaaaaagaaaaaaaagaaattatgttctgatactgttgagcgttcagtgggattctgtatacaaatttcaaagagccattactatttagaaacatatctcacctacctgaaagtgttcccatgaccccaggcacttaccaacataagaatcacccattttccatactgaacctaaacttcggtttatcccatcctcaccccctggcacgtatcttgtacatatttatagcctttaaagcgagtgcaccaaaaaactttccatatggaaccgtggacttgtcttccaagtcagaaactccaccagccactagaatttcctcaaaatgcaaagactgaaggtaagcaaatcatgtctaatatatccacagctcactctggcagatattagaccgtgagtctctaaaacaaaatcatctgggatatgtgacgggtttctgagtacaatttttgtgagacctaacttaacatcgaattggctttctaaaaccaaacgaacaaaaaatatacagtatatctgacagacacgtcgtccgtttcaaatatgaaatcacaaataacctgggaaaggaaacgaggggctgaaactgacagcactactaattgctccgagagtcctgagttaggactgttccatcaacaaacatttactaagttaaaaatcccctgcgtcgtcctagcactggcgatacactaaggaaggagaataaaattacggaaagcaaaacccgagccgtgcgaagggccactagggaggtgcgcactgcgagctccacgtgcacccttgggttgggtaagtgtcggagatgacttggagccctaaggagcaattaaggccaggtgagtggatgcaggccgggaagagggaacagacaaccctgcaaaaagagggagcgcgcttggaggtcagtgagctcgcagtgagtaagcccctcccttctcaccagggagacccgagacccgcttcttcccagttctgcagagcgtgttcggccgggccttgctgactggtcagcgtcgccccacgtgctctacctacccggtccccgccggcgccgcggagaccggaagcgacccggcggcgctaaccgggcaagaacaccgcagaccagccatctagtgcaaggagcgcgccggagccggggagcggacgccgagagcggacggcgaaagcggaccctccaggcgcagagacgcggccaggccgagactgcggcggaggactcgtgggctggagcggagttccccggggtcaccccagagtgggtgcgaccaggcggtgcgggagaagcggggtcgccaggacccgacgcgcgcccgcagcctggtctccctgttccaagaccaaggccccctcacctgcttgctatggaggtggccaggaatcggctgccgccccgcaccaccaacgtctgcccgcacaacgccagtcccacagagcccgccatgtacccgcccgcctcaccgccatacacatgtgccagcccagagcctcttcctgtccgcaccggtcggtgacgccaggcgcagacgccgagagatgacgtataccccacgtaccgcgcatgctcaaggacgagcctgccttgagcatgcgtgaaaggtgctgtgaccgccctccgggttgtggctggtggccttcggtgtttcgggtttggcagttcactcaccaaggtgatctgatggagtgcacttcgcacgattccaagtacttgcctaatgttcatcctttcctctagacggggtagggctggttctggatctttttccgcggtagctggagagacgtaggacctgatgatggctactagatgcctggtaaatgatccttcaagaagtgaatgaaccgggggccgtggctcacatgaagtcagcagttcgagagcagcctgaccaatatggtgaaaccccgtttctactaaaagtacaaaaatttgttgggcgtggtggcgtgcgactgtagccccaactacttgggaggctgagacagaagaattgcctgaacccgggaggcggaggttgcagtgagtcgagatcgcccccgctgcactccagccagggcgacagagcgagactctctctcaaaaaaaaaaaaaatgtccaagatgtggtcatgggtgagggtgtctcgggtggcgtcaagtctgaggtcgctagaagtaagcctactgaatctttgcacttagacaagccacagatgccttaaaatctccgaactgtagtgatattttcaacccaaactatggttagtttccagtgttcatcccaagatccccaaaagcctcttacaatcccagcatcaggcacaaaatctaggatctcacggtctgttttagattggcttgtccggtgcagctcctcttgatccagagacttacaaactaaaaagattaattttctctcccgtgcacgcaatatatgatggtgagccgggaccagataaccacaataaatacttgcatgtgaaaatgagaagaggaggagacacagtaatcactggtccaaagcaattctgaaatcctactggaagatgttttcaggccctacaagaataagaagtcttaaccaggcccgagttctgcttcctgggagtatctccccaggctgtatctcagcacagctcttgcctctgccctcttgggtgtccctccttttccagcaccttcttggccatgttgaagaatgtgccctttgagaaactttctcaacctccttcctgtcattagcaaattgtgagcccacagaccttttttcactctaaactgttctgtccacattttggcagctggtggtgctttgttcactacaagtcccttaaaagctttatgggcttctcaagaatctgattcaggtgctctccatgcccaagaagccactcccactagtcttttttttttttttagacggagtctcgctctgtcgcccaggctgaagtgcaacctccacctcccgagttcacgccattctcctgcctcagcctcctgagtagctgggactacaggcgcccgccaccacgcctggctaattttttgtatttttcagtggagacggggtttcaccatgttagccaggatgttctggatctcctgaccttgtgatccgcctgcctcggcctcccaaagtgctgggattacaggcgtgagccaccgcgcccagccacttgttaacatttaaatcattgagatcaccttgacttcagcattattcttaaggccatattttattagcg

SEQ ID NO: 1562559 - DNA, 4001 bp, Homo sapiens
agctcagtgcagagggccttcccacagaatggcaccctggcaagaggcatcagggccaggcatggtgatacaggggtccccaagaaagggcagcctgacacaggagtcagggtctgtagggtgagggagacagacatacaagacaagaaggaaccctgccagggtcggagcccaggtggggagaggcatgcattcacttgggtaacagtgggcggtggacaccagagattaattacaaaagggtgatcacagaaataaacatattgagagtaacggaagccagtcttctcactttcaacaaagacacttagaaagatgcctcagcctggcatggtggctcggcctgcaaccctaacactctggaggccggggtgggaggatctcttgtatacaggagttcaaggctacagtgagctgagatcatgccatgggactccagcctgggcgacagggtgagaccttgtctcaaaaaaaaaagggggacaaaagaaaaaaggccaggttcggtgtctcatgccaataatcccagcactttgggaggccaaggcaggtgaatcgcttgagcccaggagttcaagaccagccttggcaacatggtgaaaccctgtctctacaaaaaatatgaaaaattagccactttcataacctggtgaaggaaggaagggaagaagggaggaagggagggaggaaggaaggaaggaaggcaggcaggcaggcgtctcggagagaagcagaatgaatcttgtggtgttggcttcaattggagatctgtggtttccacagataggcagagaaatacagacataaacaaagaagcacgctccccaggctggcctggctggtccctgtgagcagaggggccccgcatgacctggaggcccgcctgcgcagcccccgcaggcccctgttccctgcaccagccccagccgtccactctccagggaacggcccggccacggcaccgggatgggagaggtgactggagcgcaacggaggagtcggcagtgaccgccaggtggcgcccgcagatctgccgggaaggcctagtccaaggactgcgcgggcgccccaagaccagatccctcagtggcgcctctggcacctaccccaagggatcagcgaacatccccaaatcccagtcccacaccagcggatgagacacaatgagaacacagcactgcctctcagaaatccctaccaagtatcagacatgccagtaggcgtcccttctgcgaaatcactggcctctgacacccacaaatgacagccatgaaagtcaagggaagactgggaaactcctccagacaggaggctagaggccgggaaatgcaatgcatgattccgaactgggtcctttccctgttaaggacattactgcgaaacgtggggaacctgcatggggtctgaggatcagatcgtggtaacgtacttgacgcctgcattagatctcggctcactgcaacctcgacttcctgggctcaagcgatactcccacctgagcctcctgagcatctgggactacaggcctgcaccaccacactcgactaatttttttttagttttagtagacacacggtttcactatgttgccagtgaactcctgagctcaagcgatccgccagcctcggcctcccaaagtgctgggattaaaggcgtgagccactgtgcccggcccccaagattcttttgaataccaaagtatctcggaatgagggggtttgggttgacaacttccaaatggttcaggaaacaaaatcagttatcggtattgactgtatataacttttctgcacatttgtgtttgtttcgaaattttaaaaatagattaataaagacgaaatgttatagtgtatctaaagtgtgcctggcacacaataaatcagatccccccccctcccccttccagcttacaggtctcctccgcctgccgcacagtagggacaactctccatttagagcttggaagccgcgacccgccagtcgcctgagggtgtctgcgcatgcgcgtggtttctgacccgcccagtgatgccgcctaccagcgcctgcgtgatgaggcaaaagtggggggggggagtgtggggagtagggggggtggaggggtctaggggctcatgcgcagcgtgttcactgcagcgcagcttctggcagcctttgcgcagggagtagggggttcaaatccagctctctttgtggtgcctctgccctggccactacccagcactataaccgaaggagctatactccagcctgatccactctggagaaggaaataggaatgggccaaattctcttagatgaatcacaaaattatctttcaaaagcaaggaaaatctacagacactgctaaggactttttgataatttcgccttatacaaattacacttcaataaatctgacttttaaaaccatattttaaaaagaaaaagagattccaagacattatttagcattatagggaatacacaaaacaactcaggaatgggaggtgagtgaaggcagaagggtgaacttcaggaaaactgaaggcagctttgtaaggttaacaaaaacaactggtgcttgaaaaaataattacatctattacatgtataagcacaataaaaactgtctgagccaggcgcagtgcagtaatcccagcactttcggagactgacgcgggaagatcgtttgagcccaggagttcgagaccaggcggggcaacatagcaagacccaatctctaccaaaaaattaaaaattagtcaggtgtggtggtgcacgcctgtggtccgtgtggccccagctactcaggaggctgaggcggggagggagggatcacttgagcccgaaaggttgaggctgctgtgagttatgatggcaccaccacactacagccttggcaacagagtgagaccctgtctctaaaaaaaaaaaagttttaaagtataaatttgcaaatatgtatcaatgttaatccaagacccacgtataagtgttaaaatgttctagaatcatgcagtgtaagatttaatatgaatctaaatgtaataatgcaaatattaatttttagaacaaaagtgaatctctgaattaattgatggcatgacaacgtgcacaccccgtgctagtccctgccagcagtagagcaggcaaacccaggaaccaccaactcaggtcaccctgagtccctgaacacagaggacagggtcttccaactcaggaagctccagaccctgaacagccccagatgccactctcggccaggaaccctaccggcaagggcggagaagcgggcagctctccaggccaccagccccagtccttggctgctgcccccacgagagccccactggaggccctgcccgcacatgcgcacttcacaagcgcgcttctgagtcacaggattctggggtaggtcctgtgaagcagagagtcgtcctcctaaactaatacttggggaccattcccaagcctggtccatggcagggactcactaagcaacggctctgaggaaaagggtgtgggggcggagggggtgctctctaagaagatgaccacagaggcaaaccctgcaatatcctcctctcgcttcagtcccctagaggaaaaaggaggtggccactctttacagcagaaagtgaaggataatttagaaaaagttgaatctcaaagggcactcggcccgtaagcccagaaggcaacacacgcagagtccttcatctgcaaagctcggattgagaggaagggcctcctggcgcctgcgcagtgcatgtggctcgtgtggccactcagcccacaccagctctggggcgcctgcgcagtgcgtgcagctcgcagggaccctgagccagcgccagtcctagggcgcctgcacagtgtatgcggtttgcatagactctgagcccgcgccagtcctggagcgcctgcgcagtgtgtgcggtatgcgtggactctgagcccgtgccagtcctggggcacctgtgcagtgcgtgcggcttgcatggactttgaccccgcgc

SEQ ID NO: 1562560 - DNA, 4001 bp, Homo sapiens
aggtcaggagtttgagaccaacctgggcaacatagtgagaccccgtctctattaaaaatacaaaaattagccgggcatggtggcaggtactggtaatcacagctacctgggaggctgaggcaggagaatcgcttgaacctggaaggtggaggctgcagtgagccaagatcaggccactgcactcctacataggcaacagagtgagactctgtctcaaaaaaaaaaaaaaagaaaatgttctgggagcggggccacgtgcagtggttcacacctgtaatcccagcactttgggaggccaggatgggtggatggcttgaggtcaggagtttgagaccagcctggccaacatggcaaagctctgtctctactaaaaatacaaaaaaatacctgggcgtggtggtgcatgcctgtggtcccagctacttgggaggctgaggtgggaggatcacttgaacctgggaggcagaggttgcaatgagtcgagattacaccactgcacagagccagaccctgtcttaaaataataataataaagttctgggataatggttgcacaaaaatgtgaatgtacttaatgccactgaactgtacacctaaaaatgataaagatgataaacttcatattatgtgtattttacaattaaaaacaagaagatgagcatgggccagctcatcaggagtcttttatgcaatgcctgagacatcatcttaaagactggatagcatcaggaaagattctgaaggagactcaggggttaaaagagaattccctatatctcaggacaatgcagacagtaggacaattgagagagtaagaatagagttttgcacaaaacaggcactcaatgaatactggtggaataaaatatcctccactactaccaatttatcttaggagagaaaagcaagaactgttttccaagacaacgctgaaacgaatgcgcccaatctttgaggactccgcctttgcccaacagctcctcatttctgctgtgggcatacggagggcgctcattctcggggacagttcccaaggtacccccgccttccatggccacaccccaccacgccctgtccaatttgccaccaaatccctatccctgctccaaaaggcaatcaaatctccacctccagtcactaggtggatgacttagtgccaccactaaattctcttgagccagactcctccgggaggtaaaggagggtgggatgataatactcgcctctcccagcagccgtgagacagaggtaatgtactcactacctggcagaaagagagtgttccccaacctggttgctcccttggatactgaaggcatcacgctgtactgagattctctctacacctgtctcccaccctacccaccccaagaatgtgggctcctggacgcgaggatccatctctccgggacctggaacagctgacttcgcccgccaggcctctgggaaaccctggccgagggctgctcgaatgcctctaggaaccaggattaacggaaacgaggctgacagcggggcactaggaactcccagtgtgaggttcgccgccgccacccacagccagaagagtccagggttgcccggtgtttctcccaaccccctagaacccagaaagtctgattttggggtaaagcgtcgtaccttttagacgctaacaactatctcaaaaaagcttacggaccaaccaagacgctactacggccttcagtcgcccagttgagacccctgtacctacgccagacccgccgggggactggggcggcatccccaccggcccttgggaggccaggcagccacttacgaaggatgagaaggacgggaggaggatcctaagaacattgcatccaaacacgaagctgagcaccagcaaccacgcccagtggtcggccgcggctgagctcatcccggacgctcctggctgtgctgggtccgctacggcagctccatggggaccacaacaacagcggcgaccgcgcctgcgcggtgaagccaagcgccccagaacaggcgcgccgacgcgcctgcgaactgcgtcgccctcgcgggaggcggggccgttttttcgtccggctccagttggagcggttaacacgttccgggtttctcctgggccttcggcggttccgtagccttctagcacccatccctactgaaccagttttctgacgtccgtgtttctttttttccttctttttaaaattaaaaaccttctcatagtaccaaactctggtttcaagtgctaacgactccctgcttttgtcataattagtactttctttaaattaacttttaattctagataagtttaagaaaaactcttccataaatagaaaactaccgtttttatagtagcaggtaactgtcgtgttccaagcagttacatggaaaatgccttacgttttcgttccagatctaaacactgtagtaagtctaaccaatttacacaactgcatacctgaaaaataagtttaatagaatgcactgttcacaatcattagtaatagttaataaattaacctgaatctaggtgaagatcaggttttgcagcgaaagaatcccaactcaaatgtatgcaaagtgagcagggcgaggtggctcacgcctgtaatcccagcactttgagaggccgaggcgggcaggtcatgaggtcaagagattgaaaccagcctggccaacatggtgaaaccccgtctctacgatacaaaaattagccgggcgtggtggcgcgcgcctgtagtcccagctactccggaggctgaggcaggagaatcgcttgaacccggaagacggaggttgcagttagccaagatcgcgccactgcactccagctctggcgacagagcgagactccgtctcaaaaaaaaaaaaaagtatgcctagtggataaagcaagacatgttcaactgtctcttctgccatgctgccatgactggtttctgaggactaattcctaatcaaaatgatgcaagattgcgggtacactggctcacgcctgtaatcccagcactttgggagatccaagcaaggtggatcacaggcccaggagtttgaaaccagtctgggtaacatagtgagatccccatctctacaataaaatataaaaattagccgggcactgtggcacgtgcctgtggcctcagctactagggaggctgagatgagaggatcgcctgagcctgggaggtcgaggctgcagtgagctgtgatcacaccactggactccagcctgggcgacagagcacaactctggctcattattatgaaccagttaaaataattatgcggctgggcacagtggctcaagcctgtaatcccagcactctgggaagccgaggcaggtggaccacctaaggtcaggagttcgagaccagcctgaccaacatggcaaaaccctgtctctattaaaaatacaaaaattagctgggtgtggtggcgggcacctgtagtcccagctactcaggaggcagaagaaggagaatcgcttgaacctgggaggcggaggttgcagtgagttgagatcgcaccattgcactccagcctgggtgacaagagtgaaactctgtcaagaaagaaagaaagagagaaagagaaagagaaaaagaaagaaagaaagaaagaaagagagagagagagacagaaagaaagaaagaaagaaagaaagaaagaaagaaagaaagaaagaaagaaagaaagaaagaaagaaagggaaaggaaaggaaagaaagagagaaagaaagagaaaaagaaaaagaaaagaaaagaaagaggctgtggttctacaaatttctgtgtcaagaaaacatgtgaagcaaaactattctgtagtggtagagtgaattccttccctgaaaggacttattggttaagtgacttctgaactgaccaaaacaaagagcaggagtctggctctcctccatagccttcccttccacctggatggaccacgcagcacggcagccaggctcctggctcctctctcactggagattgagatggattta

SEQ ID NO: 1562561 - DNA, 4001 bp, Homo sapiens
gactaaaggatacatgtgtttgaaatgccaagttgctttcccaaaggattgctccaattcctgctgctacaatgtgggaagccttgaatgaagtcatctacagaatgtagataataacctgactgctattacattgagtttgttggaaatatttaccccagtctgtttattttcagtgttgttttaatttttccaatgtgcacatattcattaacgaatcccacttaaaactgcaaaaatattgcagaagcagtttgcttctctcttctaattcactgagagcattaggaggggaaggggggtggacgctagtcacctttttcttttcttttttttttcctgagacagagtttcgctcttcttgcccaggctggagtgcaatggtgtgatctcagctcactgcaacctccatctctggggttcaagcgattctcctgcctcagcctcccaggtagctaggattataggtgcccccctccacctcccgcccggcacaaccacacccagctaattctttgtgtttttagtagaggcagggtttcaccatgttggccaggctgatctcgaactcctgacctcaggtgaaccacccgcctcgggctcccaaagtgctgggattatgggtatgagccatcgcgctcggctgtcacctttctttttcctgctgggttaccagtgtaattgtagactctgggtgatgggcctcgatcagtggaggctgaatatactgctctctctacttttgtgtatatttgaaaattttcaaaattaaaattaaaaatcatgtctgtaacatatatacttataggcaccatggagcctagcctataatataattaatacatgaaatttaggccgggtgctctggctcacgcctgtaatcccaacactctgggaagcccgaggcaggcagatcacctgagatcagttcaggagcagcctggccaacatggtaaaacccccgtctctactaaaaatactgacaaaaaaaaattagccaggcgtggtggccagcatctgtggtcccacctactggggaggctgaggcaaaagaatcacttgaaccaggaagggaggttgcagtgagccgagatcgcaccactgcactccagcctgggtgacagagcaagactccgtctcaattaaaaaacaaaacaaaacaaaacaaaacgacaggaaatttactctgggaagatgggctagacaagaagaggaacattttttttttacctcatgaaatggaaaagaaagcacatcggttgggacatttctatctctgtagattctattaatgtgctgaatattcttgttgtcaacacagatgatccccaggtcaaatttctgcactcctaaaatcctccttacaatctcgatcttactgcgaagtggcgctctcctgatggggatgactcgctgcagatttctaatcaccaaactcatttcaggaagaataaccagccctttaaaaatgtttgcaacggaacctggggttaaagtgtaagagaagaccaatcagtacaagtgataatacggtctgtaaaaatacagatgcacgcgcaatcagatcactttatttggtggaactgattgaaaatcttaagggaatttacatttaccacaaggaggaagcaacaacgagggtctatggaaggatgccgcggaatccggccagaaggactccaggcgggcggagcggaaggagcggttcccagagaaaagggggcgggttgggggtgcgcgcggagagaggcgcgcggacgcggcggggtgcggggaggggcaacggctggggagagaaggggctggaatgggggagggacaggagaggggacaggtaagcgttgggggccgggtcctctggggtctggggcgcccgcagacccacgcgggtgaatgcgacgctctcgcttgggagactaaaaacccgcccggacgtaccggtgtctggacccagcaaaggacgcgagagcgggcggaccctcccgaccggaagccccgccacagagcgggttgtggggagcggaaccggatcgcagcgggcggggcggaatccggtagtgctgagcgaaccggaagtcggtccgcggcgttttctgcccgcggtgcgcagcgctgagtgtcgcggcagcagcctgtgcttgcgcctcaagtctttccgaggggccagtgggcagcgcgggcctcggggtcctggggcgagacggtgagcgtgggggctgggccggcgccaggggcgccgtttccttcccccacgcagctccgcgcgcccgggcctccacatcgtcgctaacggagcgttgcggcgccggcgacccctggcgagcccggggcgggacagtggccaggccggcctgggcccagcgcgtggcctccgccgtttcgggctgtgctgggtggaagattaggctccccgggcacgccgtccccgccgagaggcctcagcttcgtggcagcgccctcgtccttccagcccgctcgagggtggccgccagggcgcgatgaaggaatgtgagaaagtgcttagcgctccagccgctccgagggaagccaggtgggaggagatcccgaaacgctaaggttttgacagcgttacagtgaattctccggctgtagagattggaggaagtcgggagaaattcgtctctaagttgtaaggtggaacagcattcattttcttactgccaatggaggtttttcatgaatttactaactcagtaaaaagattcggcttttttttttttaatcttaaaggatcacgctttaaacctctgtaacaaagtaattatttgtaccactctctaccccaccctccaacaaaataacctatcggctctcagaaaataataaccctttgcctgcctttgaaatagttatccttttagtatgacagtgttcaaaaattcttttcttagacttgtagcagaacatagctatgatgatctgaatttttctctttcagcttgttctaaagacgaaggggaactccctagtgctacaggctgtttcaggaagccaattaattttgtacacataatacttaattaccttctaataattggagcagaagatgaacccaactaatcctttcagtgggcagcagcctagtgctttttcggcgtcttctagtaatgtaggaacacttccatctaagccgccatttcgatttggtcaaccttctctttttggacaaaacagtaccttatctgggaagagctcgggattttcacaggtatccagctttccagcgtcttctggagtaagtcattcctcttcagtgcaaacattagggttcacccaaacctcaagtgttggacccttttctggacttgagcacacttccacctttgtggctacctctgggccttcaagttcatctgtgctgggaaacacaggatttagttttaaatcacccaccagtgttggggctttcccaagcacttctgcttttggacaagaagctggagaaatagtgaactctggttttgggaaaacagaattcagctttaaacctctggaaaatgcagtgttcaaaccaatactgggggctgaatctgagccagagaaaacccagagccaaattgcttctgggttttttacattttcccacccaattagtagtgcacctggaggcctggcccctttctcttttcctcaagtaacaagtagttcagctaccacttcaaattttaccttttcaaaacctgttagtagtaataattcattatctgcctttacccctgctttgtcaaaccaaaatgtagaggaagagaagagaggacctaagtcaatatttggaagttctaataatagcttcagtagcttccctgtatcatctgcggttttgggcgaacctttccaggctagcaaagcaggtgtcaggcaggggtgtgaagaagctgtttcccaggtggaaccacttcccagcctaatgaaaggactgaaaaggaaggaggaccaggatcgctccccaaggagacatggccacgagccagcagaagatt

SEQ ID NO: 1562562 - DNA, 4001 bp, Homo sapiens
gaagcctgtaatcccggctactcaggaggctgaggcaggagaatcgcttgaaccagggaggcggaggttgcaaaaccagggaggcggaggttgcagtgagccaagatcacgccattgtactccagcctggggcaacaagagtgaaactctgtcaaaaaaaaaaaaaaaaaaaaaagaaaaaaagaaaagaaaagaaaaaattgtccctttaattatctcatttccatcgagagaccttcttaacttaaccccaattttgttatttacaatttttccttcagagtgtacacatctaatattcaacagtgtaagttcctcgagggcaggggttatatcttcttcaacttctatttcaacagaatgaagcacattatactttcaataaagtgttaaaaaggaaaaataaacaaaaagttacttttaagtaaaccagcacttcaaattttgactttctttttaacatcaatatttaggggtgcttaaatttaaacttaatgactactagtccttagagatcatcatttactccaagtacacgaggaaagctttaaaagataattttccatgagaaatctttctaaaatggattaacccactttcttgtcttcttaaacaaggtatgaggaccgtaatgtaagctgcttaattgaggactcagggtcatcgtgtgaacaatcgctggactattttgtaacacacgcgtgccctcggaggctcggtgccagggctgtgagcgcttgcacgaaaggaaaaaccccaggccgtgtgaagtctaactttccccgtcctctcggtcaggcaatcccaccggggcacctgtctaaaaacaccccgcctccgaacgcgcgctcttgcggaattctcccgaaccgcagagccctcgtggctgggaccgcatagcaaccgggggcagagtgcgagcccccagcggtgtgctgggatggaaaagcaggagccgctgaggatggactacggggcgtgttcccgaaaagccgggaagagatgtggcggggctgccgcgggcgtctctaaggccggcacgggtggcgtcttgactccctgcccctccagccgcggacctcggacggggggaagggggctcctccaagcggggagacggtcgccggccgagcagcagggctcctggccggcggagggtgctatgctctgcgggaccgccgggaagtcccagacaaggtctgcgggggctctggaggaaaaaaaacgcgctgtgaggtccaggcgtccgcgggaggggccgggggcggggagggagcgtccagcgggcaccgagcggtcacgctccggccaccgggccgaggacggggcggcggggctaggtcccggaccgtgaagggagcggcgggtcgcggcaggtgcggggtccccaaggccgccggccagcttccgcgcacaccccgcggcccgggccgccggcccccaacccctgcccggaacaggagaacgcgcccttctccacgaggcgtttcaaccgctccgcgcgaggggcgcgcgcctgggccaggcgtgtcccctaccccaggggcagctcggccagggtgaagagtgaagcccgtgagggaatggagcatgcgcattcgcgagggcgaggccaagtgctggcagggagcgtgcgcagtgtgaaggtacaatcggctacgtgggaacccgggacatgctcggtgagcgcccaggtcccgcgcacgcgcagaagcgctcggagcccgcaacccgctggtggagaaaaaagaggagagaaatcacctcagagttacgtcaggaaaggccgcgttttgcggggaggctgtagcctcccaaggagccccgcagttctcctagagctaggggcgtgacagttactcaccggtcttcagtctcgaggcagacgccgggcccctttccgctcacactcggctcgcgcgcgccgcagccgccgctgccgctgtgattccatccatcttgaatttgacgtcatcccacaccagggatgaggtcatcgcaggcatcgctcgtcacgtgcgcggcactctgattgggcgccgggcgccggagggcggggcggggggggggcctcgcggcgcagggggacgggggagggcgggcctgcccggagccgcgcgccgaacggacgctgccgcgctgcaagcccgcgctctcggtccatgaggggagcctgcggcggccgttaggggaggcggccgggctgggggccacggcgaggaggctgagcgccccggccgggtggagtccgtcgcggcgaggagcgcgccgattctcaggggactttgccgcctgccggaggcgcccttgctgcggggtcgccccgggtcattcggccgcggtcctgcccagctgggccgccagtagtccccgcttccggcgcggcgggatgcgtggcgcgagcgcttagtccctcggaggggaggacgcgctcccgttcaccggtggacggcgggcgactccccgagccgacgaccccgacagcgacgggagcgacgcgcggctttctgacgggcgcgggcggcgagcggggccctgcggtcctcgggtcggcggcagacgctcccggcccgcgaggaaagcccgcgggaggcggctcctgccgctcgctagtcgctcagagcgcttccatttcctcctcccgacgcaacctggccacctggcccctgggcggggacccggcggccgcggccagggcgtccgggctcgttcgccgcgcagatgggggtcggtcctgacccccgccggggcgtccacagcggcccgcaggcagccggagacttcgcatagtgcccggctcatcggagggctgtgatcttttttttttttgcagaaatattacaactccactgatgagaaaactcacttcgctttcagtcaaaaccagaaattagataacagaaatgccacactgtcaacaccgaccgggaggaaagcctcgctggcggagaccgctcaagggagccctccgcgcgttctcccagcccgggtcgcaggtggagggggagtgcctcctgcagggacggttctcccgcagacactcaaactccgggatgtaaaacccctgttaataattgtcaggggtctgttaattgccaaatacagtttttgaaagttgtatgcactaggtaaaataatttatgtaatgtttggaagtatgtgaaagacagacattagattgatacaaattaaaaatttgttgccaaattaacagctctgttgtagattattagtttgactaattttaagaggactcttagtcttacataaagaatcttgcacctaaaaattttctcctacaactttaaaacactttaaatttttttttttttttcctgagatggagtctctgtcagtcccaggctggagtgcagtggcatgatctcagctcactgcagcctccactccctggctcaagccatcctcccgtctcagcctcggcagtagctgggactataggtgcatccgtcacacctagctgatttttgtatttttggtagagatggagtttcaccatgttgctcaggctggtttcaaactcctggtctgaagcaatccacccgcctcagcctcccaatgtgcttggataacaggtgtgagccaccatgcccagcctaaagagtgtctgtattttgaactgtatggtggaaaagcacaaagtgactgttctgaaggtagaaggcaacagtgattataagtcttaaaagaaccttgagttttaggttcccctgtgattaggctgggggagtgtgtgctgttatcctagttttataggtgagaaaactagtactggctttaccgcatgctggaagcagcctcccttgagcgatccctttctagccacctgcttagctgtttttttgttttgttttgttttttgttttttcaaccttcctcaggacgatacacattggtgtctctgctttgagctatatgatcaggcttttggcctcaccatttcactggaattgacctgactgccaaatctggcagaaaccgtt

SEQ ID NO: 1562563 - DNA, 4001 bp, Homo sapiens
gagaggaggtgcacttcagaactcagatggctggcttggtggtggaggccgtccacctgccaccaccttccgggacctgcatccccagctgaactgcatccttggaggtctgaacccagtggccccgtggccaggtgggcttgggagttgctagctggggctgatgtggtagttcacaacctcctggtgttccacacaaaccacctggagattctgccaatcctgctccacactggggtcccagggcccatcacacgaactggaaattaatggacccattaacctagcagctagagggcttcaattagtacaaggaaacaaaacatattttgtagatggctgtccattttggagtttatcctctaatactgagctgtcctagcagacaagaaacgacaggcacccaaggcattagaaaaatgtttgagagaaaaactaatgacaacattgggtgtagtggtgtgtgcctgcagtctcagccactagggaagctggggtgggaggatcgcttgagcctagcagtttgagactacagtgagctgccacagcattccagcctgggtgacagagggagaccctaaaaaacaaacaaacagaaaactaatgacagagaggattccatctctcctcttcctttcttttcctttctattttgttttcctttgtattcctttgatttggggaccctcttttggggggttgcagctatggaaacacagtgtagcagggtttcgggtcctggagaaggtttgaggctggaagagggctgtgggaaatcttgagggaggcctggctccatccgcactctgctatgggaccctgggcagggtggctccctcattctttgggaggaggtgacaaaggggaagtctttgggcagctggtggcgggaacgggaaggccagacctggcctgagacccaccaggtgctcggggttatttgctgagtgcagggtacgtgaccccaaggggccttcgcggaacaatcactcgacgttggcggaggggaggaagccgcagagagggtgtcgtgagggaaaggtgggtgcaggggaaatggcgctttaacccactcagggccagaggctcagccgagactatccaggtgggaacttgtccctccggatgacaggtgatgaaactgagggaaggggactcgccctggcagtgaaacgggatgggcgctgggaccaggtgccccggcagatcctctcccaagcccagttccgctcccgctcagtcctcaaccttccccagctggagaggagggaggggcgcctgcggatccgaggcgagcgcggaggccgggcgactccaaccggctcgccccgtgcccagctcgtacccaggccgtttcccgcacggggagggcccttcccgcttctgggcaggtccaaatcctcaccctccctaaggccggcgccgacgctgccagcccggcagagccccctcctgccggccgctctccatccccgtccccggtcgcatccgctccggggcgagcaccgcccgacgcccaggcttcccccggacggaggagcgcgactcacccacggtggccgggcagagcctgcctcgaacccggcttctccccgacgccctctctccagccccgggacccaaccgggtggggctgccctcgagggctccggagccaggcgcgtcctgcccgcgagggccggggctccgggtcccgccgccgcgctccacttcggggcgcagttggggtggaggcggtggccgggaccgccgcgcggggttcgtgcgcgcacaaatgtcgcctccagaacaggtggcccgggctagggcggcggcccagcccctccgcccctgcccctgccttcccgaggcgcctcctccccactgcgagccgcaggatccccctggagcccccgtcccccgcaacatcggcgcggcccctcgtacctctagctccagcggcggcgggcggcggacagcggggccccggcgggcgggcggcgcggcggccggagggcagtgcctggggcccggcgggaggcagcaccgcccctccggcccggggcggggtcaggccgccccgccccgcccgtcccgacctaccctgcgggtcccggtccccagagcccttgcggggtccccgcgaccccgcccgcgcgccctcgctgctccccggggcgggtgcggacagtccccagtccgccggccaacaggtagggagcgctccccggcctccgcgccgccagtattacgggttaccatcccgttttccccattgaactgatgagaaaactgaggttcagagggttgagtacctcgatattctgcagtggagaagggacgctgtcacccctgggacccgggtcggcctgatcccaccgcctcctgccgggaccgtgctaagggcattgcctgcatcaccccagtgtttgcggaattccagttatttgctgtatccttaacgccgccccgtcctttctctactcctcctcctcactctcacctcgccccatcttcacacatattgctattggtaatttgttcaatgtgagaaattggaatgtatcacacacaattcgtgtatcataaaactgtattttattctctttggaacatgccatgtttccagcatgtcacagtcctggtgcttttagttcttactcctctgggacaacaaagactgcaaaaaatgaaaccattgggtgacttcttgagtgctgacgcccatcctctcactcagctgatgacccagtgcccaagccactgagaaaatggaacctctatcctagccctgagaaagagcctggcactcaatgggtgcccaataaatacacttcgaatgaaggaatcagtagaaaattcccaccagctcccccacccacccgctgaggtagcacccagtcccttccctcttgggaccgggctgaacccgtccagctcctggccacgaccaccccctccagaagatcccgacccttcacgccaacactgatcccgaaaccctgccctctctccattctccctgggtcattcccatcacaggctgttacttctcccatcttaaaacggaaacaagaggccaggcaagcactcacgcctgtaatcccagcactttgggaggccaaagcaagcaggtcacctgagatcagaagttcaagaccagcctggccaacatggtgaaactccatctctacaaaatacaaaaattagctggacatgctcacttgaacccaggaggtggaggttgcagtgagcctagatcatgccactgcactccagcctgggtgacaagagccagactctgtctcaaaaaaaaaaaaaaaaaaaaaaaaaaaaagaatgaatgcggaccctttctccactggtaatactcatttttttttttttttttttttttttttgagaagagactcactctgttacctaggctggagtgcagtgacaccatctcggctcactgaaacctctgtctcctggtttcaagtgattctcctgcctcagcctcctgagtagctgggactacaggcatgcacaaccatggctaatttttgtatttttagtagagacagggtttcaccatgttggccaggctggtcttgaactcctgacctcaagtgattcacccgcctcagcctcccacagtgtggtgattacagatgtgagccacggcacctggcccacttgtaatacttttaatgcttttgctttatgttggcttttccatgatcacaaatgtatttttcagagaaactttgtattgctaccctaaatggaacaccagtatctcagagactagaaggcaacagtaaaaataaaactaaaacaatgttataaagcccgggtaggtcctgttgcccctccaagagctgagttcctcctgccctctccttgttaaaaggaagattcatcccagcactttgggagaccgaggcgggcagatcacaagggcaggagatcgagaccatcctggctaacaaggtgaaaccccgtctctactaaaaatacaaaaaaatcagccaggc

SEQ ID NO: 1562564 - DNA, 4001 bp, Homo sapiens
aatgaagatcatctccaatggacaatggattcaggaagtaacttactcaaggtcacaggatcaggaaagagagcccagatctccttctacaccagtctaatactcatactttccaagatccttttcggttcaaaatggtgtgatactattcttctcttccaagttcaagaactctataatcatttatcttatcaaataatcttgcctgactcccttaaatcatgagacaggaagaaacaactatttccacatcattaacctagagaatcaaaagacgtgaagaggccaggtgtggtggctcacacctgtaatcccaggactttgggaggccaaggcaggccgattacttgaggtcaggagtttgtgaccagcctggtcaacagggtgaaaccccgtctctactaaaaatacaaaaattagccaagcatggtggtgcacacctgtaatcccagctactcgggaagctgagggcaggagagtcacttgaacccaggaggcagagttgcagtcagccaagattgcgccattgcactccagcctgggtgacagagcaagactgtctcaaaaaaaaaaaaaaaaaaaaaaaaaaaaaaaaaagatgtaaagagataattaggtgcaaatcctttcccttagcccggaattgagatcagaaatattttctttcagataaatgatgattttactttaaaccatatggtttcaatttaagcaatgtgatgaaaaataagttcaagtttaaatttaagcaatgtgatgaaaaataagttcaagtaccacaagcttcctgagagtacaacgcataacaactcgtaaaattctattatcaaagttgcgccacttgatccaaaaggaattcacaaagttaaatgtgaaaggttgacagagaatgtctacagatgcttgcttgatttttattaacaaagtacacatttgacattgaacctctgagtataacaccttcccagggctgtcaagttagaagtgaaaaaatcatctggcagtcagtcagctttctagatagctcctaacaggggagtcaaggtcaaactggagtctccttatcctcccatatttgacaagcaacttattgtgaggctcaaaatattcgtactgcattctgacaaacagaaataattgcaccgtggttcataaagttctgtgagggcaggctgacataaacaagaactgagtggtggtagggcccatgcttctgccacagcacttcggtgacactcttgagaatcagaactttcacctactttctaccagctttatcatctatcaaatgagaaaaaccacctcattcctacgattacaggaatcaaataatattatgaagaattaaaacaggcctcaaatcttgtgcaaaggtgagagactattattatattatttactacgtatgggcccagaagaccgcccccctccccgacattccacgttccgcagggtcctcaaaaggtggtacagggtcctagtttcttctccagactccaggcctggcaaccgtagatgctgtcatgcctctgttgctaagagatgggaagtgaggcctcaggaactgggcctagaagactcaacaacgaccgcgccccctagtcaccttgtcctcaccttgaggaatggaaacacaccccacgggagcaggcaatgctgtcctcaaaaagaagaaagaggtgcctccgctcttcacccggccgccgctgcttgggcccacgcttcttgcgaggcagggacagggccaggaaagctgactgtgccggggacgccttgacctagggcaccagagaagcgggcacgggtgccgggcccacaaccgggacaggtacacgagaagttggccccaggttgggcccgcctcgccctgcctcgcccacagccgccggcacagtaggaggcaccccgcccccgtgaacccagaggtccctgagctcgctcacctgcagccgagtcaccagtaggctgtagggcgccattttgtgcactgacaaagatgaggtcgcattaaagtgacgtcccacacggcgcctttaaagcctttgggcaggggcgtgcccggaagagtggggcgtcacggtgaaggcgaggcctccctagaggcgccagaaccctgtgaacgcaatgggcggagctcacgtgcaacgaacagacacgcaagaggaaatcggactgcccaaagacacttgcagaaatagataccaagcacaaagatgttttacccaagaacaaattttagttatctccgccatccaaatctgggagagtttttaagagtttcatgcacctgccaggacctggccgcccagcagcgacaaaaactcgcgcgagagcaagacgggcctggtgcaaggattgtaaactgacggaagcttagagaaccaatcacagcgacgtggaggcaggaacaatgggggttaaaggtcggacggaagttcccgaagcttccggtggccggcttagttaggagctatggctaaacatcatcctgatttgatcttttgccgcaagcaggctggtgttggtgagactgcgccctacccctggctgtctgggcaggggtggtattaggagctggggggtcgggggttcccgtctcttccttaggggcttgcctcgcaggcgccacgtttcccgcctctcaggcgcggggtgttgtaggagcgcgcaggtttgtggcctctgatgagaagagggcgggggtgcgcgtgctgggagccccaggcaggtatcggggggtggggtctgaaccaggtccagagaaactctgagcttgcccagggcgttggaggagattcaggagggtgcttggatgtaggtttggttcatatggaaatttgtaatgataaaatggctatccgcaggtctcactcactgcagtccttactcatgtccctacccccagctcgaggatgtacttctcctctttctcaaaacctttattctaattgtactttttaccatctttcatcttgcagccatcggaagactgtgtgaaaaatgtgagtggaacacaccgtcccaacaacccacccttcccactcccagttttctgtggaaccagcaaaagtgccacaaagagggctttgagtagatgtgcctggaagtatgtgaacactgaatgctgcactttagccaaaggcccctctaactccccactgccgcttgcacatttaacgctgtatctctctagttttcaacgggaagaatcgccagagtagcatgacccctccccaacacacagcactttgccagcaattatacaggcttatcatctccgaggtgcttttctaagctcttcacatatgttaattggtaaacttttgtatgtgttgaggggcttgagatggacactggggaaaccaagttttgtgatgccaagaggagggccctaaagtcactgtcaaaaggagactagtgtatttcccaggagactagtatatttccccatggcaggagatagcagaggactgaagaacttgtgagcatgactccattctcttccttacaggtgatggcaagtgtgtgatttgtgactcctatgtgcgtccctgcactctggtgcgcatatgtgatgagtgtaactatggatcttaccaggggcgctgtgtgatctgtggaggacctggggtctctgatgcctattattgtaaggagtgcaccatccaggagaaggacgtaagtgtacagctttccatctgacctttcctccttttgtttagtaacactttgccatccactgcaatctcctatggtctatggagattactgtgttcatctagtcatctaggttataatttcttcaagttctgtgagtcaaactgggtgtagtccaataaaaggcagttattttgcatcaaggggaagaatgcaagggaagcaaatctttgtcaagaccagcaatttggagagccctctcattcatgtctctgtggttattcttattcagaaatgacatccggctgggcgtggtggcccacacctgtaatctcagcactttg

SEQ ID NO: 1562565 - DNA, 4001 bp, Homo sapiens
ccccattctaagcaacgctgcgctctgcctgcacctgctgtcagcccccccgtagacagccagacgagtcacccatcacgtgacctggcacaggggactgtggaaggccacagtgatggctctacgtgtagcgccgtgaggaggatgaaagcagcctggctgggtgtcaacaagtgaccgctgcacctcaaagaccaccaggagaatggccagcagcgtccccccttggaggcgctcccatactcacctttctcttctatatatccccagccggccacccagcagctctgggagcctctggggaggcctgccttaaagtggggcaggcagcccggcccaatgaagcgcccacacgaaatgggaggggtgatctccacgagggcaatgtcatttccctctgtcgcagagttgtatttttcatgaatgatgattttctccacatatctctcttgcagaggcgcctttactggtttattgttcccatatgtaatttcctttgctccgaaaaccagtctccagtcatgcacattactgtgggcacaaaggtaagccaggtcacaaccggctggacaaaagcctggtgacagcgaccctcagggccttcccctagcaaaggtctggaccagcccccggagtcttgcagccacttggcccagagccccagggagacgctgcacagcatccccggggaacgcccctctctgagaagagccgttctgaagacctccctcagtgcatccctacacgtactttttgccgacgaagcagtgagcagcagtgagcacccatcgtgaattcagcaagctgcctccacatgtgtggtacctgtggctgttgtacgtgaagatctggaggctgaccatccagggccaggccccatgctgtgcagccttcccgccgacgatgcggacaccaccctgtgggttttgcctgaaccgtaacccacaggggccactggggagagaccagagcacagttcaaacctggcatgagcacagcctgtccttgtaactccacaactgaggggaggcagggacatggggttgggaaaagtggggaagagcttccgggttctgggaaagcaggggcagcctgcgctatgtaggaagccgcaggctctaggaaatggttctggggccacgacttctcaggtcttgtgggtgcagtcacagatggagaaagaggaggccataggaagccaggacaggctgcatgggccctgagggatggcccgtccctgggcagaacaggagggtagaggtggggatgcggggcctggggacagaggggtgtaatggcctgaggtccttataaccaatcttgggtgggagactcagggaagtcaggtgatgaagggggtcgttgacagtgatgggaggagggatagcagccaggggcagatactgtggcccacaggtgtagggggcacactgagagcagtggaggtctagaggtggaggctctgggaactgtgtcacgggtgggaggccacatatagcttgggaggtgttggtatttcggggtaccttggagtgagagagcctactggggggtaggggtgcaagcggtgtgaagcgatgatatcctggggctgttgggggcaaccacgggttgggacagctgtctgtggggggataagggctcccaaaatcaggacttcatgtcttcaagacagtggggtcagtccctgggggagtgggagaggcacaaggagcctgaggtgctgaggggtccatctctggaggaaaccacgaaagctgagggtctgggggctccaggctgctgattctgggagcagggggggtccaggttagggatgcagcctccttttccctagccctggacagagggagtcggggtggtacctgctcctcagaagatccttcccccaccaaggtgccccgacacttactcacacgtggcgttatctttagcaaccacggacactgccaagaccagcagaatggcagttggtagcatctcaaccatactcctggcactgcctggcctgcaagcctagtgacctcacaaagctccgtggctgcctggccaatcagcaggggtgacccccaccccacccccagcagtcaggccaggtaagagcccctcgccttaactggtttgtgctgaagagacttcttgacttcctgcataggctcccccaccaccaggatgatgggggactcctgtgcagccccactccctctgtcccaaggccaggatctccattcccagtaactcttgcgaggtccccacatcacccaaggctctggctttgtgcaggttcagagtctgcctctcatgcgtgctgtgaccactgcagactcacagactgaggagcggctcagcccttcagtgatgagacggtgcaacatgtttgtggatcagaggagtcagggtcagcagattaattgatccttaattgttgttggggaagttttcttttcctcttccaagtgaatgctatcaacacacttttccaagagtcattttgaattttcctaatttacaactgcaaagcccaccttcctgtccgttgctgaatatcacaaggtctcctattatcctgaatgtctccagatcggctttctgtgactgaggtggagcaaggtgttttctcctatacttgaatgtcaagagttttcatacagctacctgaatatcatgaagcatcatttttcccatctgatcatcaggaactagcatctcacctaccagagtgtgacaaatgcttattgcaaacacctgaatgttaaaacatttcccatcgcctgcaagtgtcaggaggtcacactcttacctgcatgagggcagccttacctcttctacctgaatgtaagatctcaaccagcccgagggtcaataggttgcacatcatctaagtgggtgtcagaaggtcccatgcctccaacctgagtgtcaggacatctcatctcctattcctgagtgttgagttttcagattatcagatgatcttgatttatctattttctctaactgaatgtcgtacttatgacatcctcaaatgaatgttcaataggtctcgtatatcttacccagtatcagggagtgatcacctccttctttgaaagaaataacaactctgtttttccacttcagtgccagaggccctcatcgcctccacctacaggttaagaattctcacctccaccacccaagtgtcaccctgtcgcactttctctacctgaaaatcaagaggtcttacatcttccagctgaatgtcaagaggttgtattttacctatatgaatgttctgaagtctccaccggtataccagagtgttgggagatctcattgcccccatctgggtgccagggcatgtcctaccctctacttgaatatagtctcatatccctgtctaaatggcatggagctttcatctcctctgctagagtatcatgagatctcctctattctgggtgtccaaagttctcatctcaaccccctgaggtctggaggtattctcacctcttcctggttgtctggaggtctcatctcccttacctgagagtcatgaaacctcctatctcctatatgccctatctaagtcatgacactttatctcctccgagtgtcaggggatttttctacctttatgtcaggtagccccacttcctctagctgaagggcatacaagttctatttcgtgacttgaatgtgaataggtttcagctgcactactgagtgttagcggacctcacttattttaactgagcatcaagttgtgtctcataaataaccagaaaaagactttggaaatatggttcaagaaatggcaagaagaattgaagaagtgggcccaagtgcagaggctcatgcctgtaatcccagcactttgagagggtgaggcaggcagatcacttgagctcaggagccccagaccagcctgggcaacacggcaaaaccccgtctgtacaaaaaatacaaaaattagccaggtgcagtggcacctgcatcccagctactcagaaagctgaggc

SEQ ID NO: 1562566 - DNA, 4001 bp, Homo sapiens
tgctgcctgtggagccccacccttgtctggctgccaacaagggtctcacccccttcaggtgaggtgggtctagtcgggctgggggatcttgccccacccagccctgccctgccctggggtagaaaggggtgtccctgtcccagaatggtttggggtggctcctgaactgctgagttcccctccctggcctcctacaggggatccaggtggagtctccatggccacctcggtctgggctccagggttggcagctggagccacagaggtcccttcatgacctctggagggccaccatccttcccttgcccaaccccgggggctacagcatcccacgctccccctcctgtcccacaggcaggcacgtggaagggctggttgtgcatgagagcaggaacagcccaggcacaaggccgggcttcagtctgactggaccagcagcggaggggccacttctggccagttcagcctctctcccctgctcgtccagacatggccccgtgtgttcagggcccagcttctgctccacatctctgggcagacacctcctctctgaagcgcttagcatctggtgctgccgccagctgtgtctggcagctgtcccccagggggtcacaatttcagggtgtttaggctccttgacgtaccagcactgcgtgtagaccagcctaggtttacgtgtgcaaagccgtgcaggtattgttgctgcaggacctgctgtctgcagctccgagggactgggcttcagatggggctcagctgcagctctggacgggggcacagcaccctggctgggatgggcaggggtgtggcccggccccacctcagccatagctgtgggggctgctggggtccacaggagctgagtcctgccggccggccggtcccatgagttgccacaggcggtggctgagattctgcacctggcaggtgcccagcacacagcccactcgcaggagctgggcttgggtcctgcgggggcccgagtgtcttcgggggcccgagtgttggcggccaccatcccggagaggctgacccataacaggggccaggccggcacccctctgtgcctggagggcccggtgaagcttccagaccacaggtcggggtgcggggtgcctgggctgcaggctgctggaagggctccgggctgggggctccctgcagaggcagatggagaatgtcaaccagatggctcagccttttggagaactcacacctgcccacttttgcctctacacaggcctgggtcactgccaggggaagcccacagcccccatccacacacagcctggagcacggccaggggaagcccgcgtcccctctgggcttgggcctgggaccatctcagtggcccgggtcacgtgtcccgggaaccggcacctccttggccaaagggcaccccggcggcccagcctctgcgggtcaccactctcagggctcagggtgactcggcttctgccctccctttagggtggtcacaggccggccagggataccgccagcctcccctcccccagcagacacccccagaagaggggctgctgtgcccatgtgtgtggggaggagcaactgccctgtgtagggaggcagagaaagaggggcctctggccctgctcaggcgctcctgagcctggggtaggggcctttgtttgggaggggagtcctagcagcaggtggaggcgtggagggagggcggccccgcggcccccggcactctgcttccctgcgggggccagaggggttggctggcccaagacctggactcacctgggtttgacgggtcgcgggtccccgcccaggctgcgggacagcgagccagggagctgcaggcagaggaggctgatgcaacccagggcggccgtcgggatccgggccatggcgggcggggctgcaggggagggggcggtgagccgggcacgtcgggggcagcctgagccgcgagccaccccctccgccggcacctcggggagtcctccgcggtcggggcgccgggcgtgggcgtggcaagctgggcacgggcgtccgtcggggcgcaggcctcgggcgcgaagcgggcagcgggtctggggtcggccgcgggtccggggcgcaaggcggagcgggctgggcgggttgggggtcctgcctggagcggagtcgcggcccgggatggcacctccagggctgaatacgtagcctttccagcaaggggcggagccggatgcacggacggggcggggcgcccctcctccgggcccagccaccctcggggcggggagggggctgcggcgaagggagcggtggaggggcctgtccccgctgggagcgctcggcgaccggcccgggaccgcgggaccgccagcctcactccaagcgccttctggtggggacgcagccccgagcctgcgggggccggacttccccacgctgcagcggggttctggggggcgaaccgtcgtccgagctgatcccacggctggggcggactcggacccgacggggcccaccccgtcaaccacctcccgagtccgggcggtcccaccctccagggtctgacccggtggaccccggccccccagcctgaccagcaagtccgcgggattccgcagcgggctggccattccgctctcctctgacgcggtgccgccgaccccggggctgcgctcctaaaaggctgtaccgaccctcggccgctccaaccccggaccaaagtattgcacggtttttgtaacagatttaaagtgtccgggcgcggtggctcacgcctgtaatcccagcagtttgggaagccgaggcgggcggatcacgaggtcaggagatcgagaccatcctggctaacaaggtgaaaggccgtctctactaaaaatacaaaaaattagccgggcgtggtggcgggtgcctgtaatctcagctactcgggaggctgaggcaggaaaggctgaggcttgaatccaggcggcggaggttgcagtgagccgacatcgcggcattgcactccagcttgggcgacagagcgagactccgtctcaaaaaaagaaaaaaaaaaaagaaaaagaaaaatttaaaacgagtgaaacgtgagactcccctcaccattgccacccacttgggacccctaccctggtctgggggggagccctctcctgacttgccctgggcacacctaggtgtggctatgtgaggcacacacatccatgtgtgcagatttgcagtaggactgagaccccgttctttcctgagagcttgtttggaggtcctggcagaggagcgcagctactcgaagcccggtcctccatcctcttcgatggagcgtgcagcttcggagggacgcacagggaacagtggggaaggagggggacacctgcctctgagccagccacatcagccgaatcaacactggtgaccagtggggtgacaggcgtcacagcccgaccgtcctcacatcagagaccccactctttcctatggttggatctactccaacatataggtgttgtatgattcatctcatctgctattaatatgaaattaggtgactgccagtcttttcatgagttgctgccttgagctcacagatgtgtctataggacaccttcctggaagtagaaattctggttgaaggtgagcatgtgtttatgttgatagatggttcactgttctccacagagctttcgcctacccactgtccacgagtcctggacttggtgtcacgggttccaagctgctgagactggcctctctgttgggtgagctgaggatctctgcgtccgttcgtgcttccccttctgtctccccaacccctgcgctcaccccgtaaccctcctgctgacacaccatgggagcacagtcaacatttgctgggtgaataagtcgaggagtgccgagcacacaccccacaggccgatctgggagggcagggatgccttgcaggtattatttacttattttgaccagttgagggggcagggagtgtcacatttatatgttttttttttttttgagatggagtcccactgtgtcac

SEQ ID NO: 1562567 - DNA, 4001 bp, Homo sapiens
gctgagttcccctccctggcctcctacaggggatccaggtggagtctccatggccacctcggtctgggctccagggttggcagctggagccacagaggtcccttcatgacctctggagggccaccatccttcccttgcccaaccccgggggctacagcatcccacgctccccctcctgtcccacaggcaggcacgtggaagggctggttgtgcatgagagcaggaacagcccaggcacaaggccgggcttcagtctgactggaccagcagcggaggggccacttctggccagttcagcctctctcccctgctcgtccagacatggccccgtgtgttcagggcccagcttctgctccacatctctgggcagacacctcctctctgaagcgcttagcatctggtgctgccgccagctgtgtctggcagctgtcccccagggggtcacaatttcagggtgtttaggctccttgacgtaccagcactgcgtgtagaccagcctaggtttacgtgtgcaaagccgtgcaggtattgttgctgcaggacctgctgtctgcagctccgagggactgggcttcagatggggctcagctgcagctctggacgggggcacagcaccctggctgggatgggcaggggtgtggcccggccccacctcagccatagctgtgggggctgctggggtccacaggagctgagtcctgccggccggccggtcccatgagttgccacaggcggtggctgagattctgcacctggcaggtgcccagcacacagcccactcgcaggagctgggcttgggtcctgcgggggcccgagtgtcttcgggggcccgagtgttggcggccaccatcccggagaggctgacccataacaggggccaggccggcacccctctgtgcctggagggcccggtgaagcttccagaccacaggtcggggtgcggggtgcctgggctgcaggctgctggaagggctccgggctgggggctccctgcagaggcagatggagaatgtcaaccagatggctcagccttttggagaactcacacctgcccacttttgcctctacacaggcctgggtcactgccaggggaagcccacagcccccatccacacacagcctggagcacggccaggggaagcccgcgtcccctctgggcttgggcctgggaccatctcagtggcccgggtcacgtgtcccgggaaccggcacctccttggccaaagggcaccccggcggcccagcctctgcgggtcaccactctcagggctcagggtgactcggcttctgccctccctttagggtggtcacaggccggccagggataccgccagcctcccctcccccagcagacacccccagaagaggggctgctgtgcccatgtgtgtggggaggagcaactgccctgtgtagggaggcagagaaagaggggcctctggccctgctcaggcgctcctgagcctggggtaggggcctttgtttgggaggggagtcctagcagcaggtggaggcgtggagggagggcggccccgcggcccccggcactctgcttccctgcgggggccagaggggttggctggcccaagacctggactcacctgggtttgacgggtcgcgggtccccgcccaggctgcgggacagcgagccagggagctgcaggcagaggaggctgatgcaacccagggcggccgtcgggatccgggccatggcgggcggggctgcaggggagggggcggtgagccgggcacgtcgggggcagcctgagccgcgagccaccccctccgccggcacctcggggagtcctccgcggtcggggcgccgggcgtgggcgtggcaagctgggcacgggcgtccgtcggggcgcaggcctcgggcgcgaagcgggcagcgggtctggggtcggccgcgggtccggggcgcaaggcggagcgggctgggcgggttgggggtcctgcctggagcggagtcgcggcccgggatggcacctccagggctgaatacgtagcctttccagcaaggggcggagccggatgcacggacggggcggggcgcccctcctccgggcccagccaccctcggggcggggagggggctgcggcgaagggagcggtggaggggcctgtccccgctgggagcgctcggcgaccggcccgggaccgcgggaccgccagcctcactccaagcgccttctggtggggacgcagccccgagcctgcgggggccggacttccccacgctgcagcggggttctggggggcgaaccgtcgtccgagctgatcccacggctggggcggactcggacccgacggggcccaccccgtcaaccacctcccgagtccgggcggtcccaccctccagggtctgacccggtggaccccggccccccagcctgaccagcaagtccgcgggattccgcagcgggctggccattccgctctcctctgacgcggtgccgccgaccccggggctgcgctcctaaaaggctgtaccgaccctcggccgctccaaccccggaccaaagtattgcacggtttttgtaacagatttaaagtgtccgggcgcggtggctcacgcctgtaatcccagcagtttgggaagccgaggcgggcggatcacgaggtcaggagatcgagaccatcctggctaacaaggtgaaaggccgtctctactaaaaatacaaaaaattagccgggcgtggtggcgggtgcctgtaatctcagctactcgggaggctgaggcaggaaaggctgaggcttgaatccaggcggcggaggttgcagtgagccgacatcgcggcattgcactccagcttgggcgacagagcgagactccgtctcaaaaaaagaaaaaaaaaaaagaaaaagaaaaatttaaaacgagtgaaacgtgagactcccctcaccattgccacccacttgggacccctaccctggtctgggggggagccctctcctgacttgccctgggcacacctaggtgtggctatgtgaggcacacacatccatgtgtgcagatttgcagtaggactgagaccccgttctttcctgagagcttgtttggaggtcctggcagaggagcgcagctactcgaagcccggtcctccatcctcttcgatggagcgtgcagcttcggagggacgcacagggaacagtggggaaggagggggacacctgcctctgagccagccacatcagccgaatcaacactggtgaccagtggggtgacaggcgtcacagcccgaccgtcctcacatcagagaccccactctttcctatggttggatctactccaacatataggtgttgtatgattcatctcatctgctattaatatgaaattaggtgactgccagtcttttcatgagttgctgccttgagctcacagatgtgtctataggacaccttcctggaagtagaaattctggttgaaggtgagcatgtgtttatgttgatagatggttcactgttctccacagagctttcgcctacccactgtccacgagtcctggacttggtgtcacgggttccaagctgctgagactggcctctctgttgggtgagctgaggatctctgcgtccgttcgtgcttccccttctgtctccccaacccctgcgctcaccccgtaaccctcctgctgacacaccatgggagcacagtcaacatttgctgggtgaataagtcgaggagtgccgagcacacaccccacaggccgatctgggagggcagggatgccttgcaggtattatttacttattttgaccagttgagggggcagggagtgtcacatttatatgttttttttttttttgagatggagtcccactgtgtcacccaggctggagtgccgtggcgaaatctcagctcactgcaaactccgcctcccaggtttaagcgattctcctgcctcagcctcctgagtagctggaattataagtgcccaccaccacgcccagataatttttgtatttgagagagggtttcaccatgttggccaggatg

SEQ ID NO: 1562568 - DNA, 4001 bp, Homo sapiens
caggaaggtcagaggccccggggagggggcggggccaggatctggcaatttcctatccctctctgttggctctgtgcatctaattactccttgagtcatctgttgctaaccaggaggggaaattaaatattaataatgtaatacttctctgtgattaccccttgttggggacagatcagagggcagatgctgccccatacagacaggggacacatgctgcggaatgtgcataatgcctcttgaaagaaccaccttataggattccacgcggtcagactcaaaactgctgctgcttcctgccttcctcctcacctcccccaacctggccactttaattaaaactccatttaatcaaaacccacacatcttctggttcctcatatgtcgcactagcaaggccctctgtacacatgcccagatggtggctataccccccagagcctgctgcacggaggtgcccaccagcttctaggcagtgacctgcacatctgctcctgagtgcggctaagagcaacatacaggacacagtgcacggactcggacccgctccagccatgcctggcctgttcctgggctccagaatcccagccttagaaccctcctgctgcttttccataacaaatgtttaccaagtacctccaccaggcctggcagcaccccaactgctgggccaaagggaggtgtgcccccgttgctgtgcctggccccatctgagcatatggcaggggacctcaaaggaggaaaggacccaggacattcctgggaggcggctgctgccctgcagtttcaggcactgcaggccactccctgtctccacaacattggctcagctaagaggagtcgcaaatcaatttcaaagcgcaagaggtatatgaaggctaagaaaggtaagcaacagaataaaaaacatggaggtgaattcattccagtaggaaggaaggtaatacagtaatctaataatgatttcagagacctttagaatctccaaagaggcaaagaaaggaatggcatccgtagacaagaatgagaacttctgaaccgactggcggaaatgaaacaaggacaggtggatatgaacaagaaataatacaaaatccagggactgaaaaatagaaggactgaagtaagggatgtggtgagcttcaggcacacgtacagtggaagagacgactggggatctgaagctagtactgaggaattctcccagaaacgccatgaagagacctagtctaggaggaaacggttgagaggcatggggtggactgagaagcatcaacaagtggcttgcgggagctcggcagggcacggcaggttgtgggccccactatgactggcttttgggatggcccaggggggcctgggcatgaacctcccagaacccagggccccaggatccccataccccttccaaactcatcagcgcaggtgccttcctcactgcccagtggtaagcagccacccagcacgggctccacttccctcctgacctccggggctgcccggtggcccttacttcaggcgctgggtgcaggctgggcccgggacccagagatacacctggcatccctcccccacagcccgggtgcagctgcagctctctgctcctggtggcaggatgtgggcaagatggggccaagacccagctccctgcagctggaggctaaggctctgagcctgcctcacagagcagcccccacatcgcagccccggggccagtgctgggggccccagctcctgctccccacacccccatgtgtccaggctaggggccaggaaggccacagcaccccctcctccccgcctgggggccactcaccccctcacacgaggcttcacctgacagccctcctccgaggggccgcaccccgcaccaaggtgctgggggcccacgctgtgctgaaagcagcttggctgggggcggctcctgctccatgtcacagtccctgaggcccaggcagagcttcccctctgcacgcggctgctcacatgtacacaggctgtggtgagccacgtcacgtcacgtgaaggattggcacctgcacctccctcagatggcgggcaacaggtactatgccgctgaaggggggacaagggagtgtttctagatggccccgcggacacagagcccaggagtcctgggcgggaccctgtgggaggcttgaaggggcagtgctgggtgcagggcctcacaatgccccagggtggctgcaatgaggatgggaggggtgaggaccggctgttgggtccctgggcaggtgcgacgaggcagccccggaggctgacaggagggcagggtgaccaagcagagcctggccactgcttcttccccactgagcagcctcccccaggctggctcagggtttgcagaggccactgagggaccagaggcgagtcctcctgtgacacgggcagaccagcccggggcctctggggagaagtctcctgcccagatgccagaggagacaccaagtggcaccatcggcctccctctgcttggccagctccggcagcctctccaccaggtgacggccgatgccagagaccagggctgcagcggcacatccgaggagtgggcacagaagagcagcagcagcccctgcccagtgactcctggaacaagcttcccctgcggggtgttggcggggggtggtgagagaatccccatggcaactcacagaaacatcatctgggtgagacttggaggagaaggtgaagggagagaggtatcgagagattctagcagagaaaatgcccgaagccagggtcctgccttccctgggctcccatcatcccctgtgctgggacgaggggcagctgctctgctgctcctctctccacctgatcctccccagtccctggccagatccatggagtccaggctgcaggggcccaggcctcctccgccatgaaactgcctcttcccaccacccagagccccaggttctgcacaggatgtgggcagttgtgtgggggctcctctctgcaccccagctccattcccttccccatctgggctcctctgctccttgcaacctctggaccacccacctcctaggaccaagcccctcctgtcaatggcccagacccttctgggagctagaaccctcccattcaccagctcagctcctgcctgtgcagtctcctctccacagcacccccaccacacatgccctaaatcccctcagcctgtgcttcccgccttcatccatccatccatcttctgtctgtccttcctctgctctcctgcgtgctcagggctctgtttgcgctgcaatagacaagacagaccccgcaaacacggttgggaaggcagttctagctcatttggggttaggtggctcgggtattaggtctgtgagagggtactaagaccttctttggagtgtcaggacacagctgagagccaccaggggctgtggtcccacacagcaggcactgcccaggcctcacctggactttgcaggacgtgatgctctcaagtcacatgctggctcccaggccaactaccattcatatgtccctctgccaacagcaatccctgtggtgtcccctgaccctcaagcctaacaccctccctcccgggttccccgctccagcacacacccctcaccggccctctggtctgccctaaaccttcccccacttgctcccaagccaaggcctttccacattaggcattgctaagatcatcatccttgttctacagatgagatatcagattccccgggacagcaacctgctcagcgagtgggtcgaggaggcaagaccagaacccagacgagagcactgaaatctccagcacatcgcgttgcccatgaggcagtcattgccattgattgccctcctccatcgcgacgcagggcatatttggggatctgtaattcacagactgatatgggaagaagcccagcacagctctcagaccagccaggtcagccttggcctaaggcccgcctctggccagaggtgactgggctgcccctggcttcctgaggcaagga

SEQ ID NO: 1562569 - DNA, 4001 bp, Homo sapiens
ttgtgtgtgaggaatggcccagacacacccgctggcagcacgtgggtcactgggaccacagctccctgctaagcccaatgccagaccctggccacactcatctgccaaaaagcagagcacagttggcctcaggcagcctaggggaacccaggccgcctgggagggccaggctgccctgcgcccataggggtcagtcagttcggcatgactgctggccacgtgctggccctggggagcccctgctgagcctggggccccgtcgccagctcaccatgctgacactgcagaccaggccctgatcccaggctcaccctggctccgggcacagaccaaagcctgggcaccaacagcctttgcacagatgtaaccccggccctgctcaccggagcgggatgcggatggcaatgtagcggtcaatggcgatggccaggagactgaagatggagctctgcgtgaggaccaggacgaagcaggcaatgaagaggcagccgtggcaggcagcgcagaacccggtgctgatggtgatggcaaaggggatggcgagcacacccactgcgatgtcggccgccgccagtgacaccacaaagtagttggtgacgttctgcaggttgctgttgagccacacggcccagcacaccagcacattgcccaggatggccagcacagcaatggccagctccaccgtgatgtacaccgaggagcccatgatgggcatggccacagacgacaggcaggctcagcacggacgcgggctgggccagctcacggtccattgctgcagcccagccgcccgcctggctcccagcccggcccaggcggaggggcccagacccctgagccccttcctcacaggagccaagtgcagccctgctggggcgctctccaagggctttttcacagaggactctgagtctcctgaaaccaggccctctgcaggggttctggcagcagcatcatggctcagcccagcttcagggttcctgaggcacctgcaaagggacagccgatgagaagctgaaccatctgcagagggcgagccctgcggaaagtgccaccccttaccccacacttggccccctgaagaccctatagtttcagatcccaccctacccacaggccaggtgtcagcctgaggatggcccctgaccccgcctagccccatgccctgcctggtctgctgtggtcatagccaggaggcgagagaggtgggaatttgaccctcactttagaggaggacacccagagaagtcactgagcaaggctggttcccctggtccaatagaattcccgctgagactcccacacaaacccctcccaaggaggcagccccttctcccaggctctgcagaatgagtactgccctagctgggcccctgccaggactccagctcaccccagcactatccatggctccctgcattccctgctctgcgcattgttgtcacggtgcctcccactctggactcagggccaaggatcagatgtggtctgtttttttcctgggggagccagaaacttgttaaagtctgtcagtgttggcccccccatgctcagcctctcaggcctcctgtggcagcttggccagtctcctgggtcctggatctcggccagccccatgacactccctcccagaaaggcccctccctgcccaggctctcccagtcccacccaccttctctcgccaggccaacttctcagcccccctggcctgctccatcccgtcaactctcccaggaactaccagcacccacctaagggacaccagccgccctgtgaaaggacaagccagagacccctggagctcggatgtggaaggatgtggggagctgcctggtcctgtctcccactgccgcagagggtaagccctctcatactgcgcccgaacccgctgcctccaggtgcccctgccagtcagctgcagtcagggcaggggcggcgctgcagctgactgtgagcttccactcggagggagctgcctcacctccctcctcccacgccctctcccccacctgctcctctgcctggctgacaccaggaatgactaacgggagtttggtccctggcagaaagcaggtacggaaccaggactcactgagggactctgggcaaaaatgcttttcttttctgggcctcagtttcctcattgatacggtgaggcagctggaccccaaatgacctctaggggccatgccagctctcacccatgattctatgagaaggaaataaacagatttaaaatggctcccccagagtcaaaatggaattactgacacccctcagaagcagaagttttggttccccagcaggcctgagcccagccccaactcccagtgtccccttcgagcctgtgaatggtctggatccaaatggacctctgcccgttaaattgcccctctttgagagctaagaggcccccaaatctaccccctccaatcctgaaccctcatggggccctatgagtgtgttgccagccgccaccacctgcctggggacaagaggtcagaggctgcctttcacgtggactcgggcagccacctcgtctctctctctcttccaggacatgagggatggagcaggactggcaacctggagaggaagtcactcctggtcctgagccctgttcaaagggccaggctcccctctaccccattgtccatgtgacagagctcaaacacacagaccccaactttccctccaactccaatgctgtcggcacctcaagtggctggaacaggattggcacgggctgcagccatacctgggactggaggttctcctgcacccagcaggcccttttgcccctactaggagcctgggaatggagcattgacacagaagcaggaggaggaaggagagagcagagccagaaaccctgcagcaacggagggcctgcagcagctggagagggccgagtcctcccaagcccctgctttccatggagcacttgccaggcagccattcacaaagtgtgtcgttggcagggatgcaccagaccagctctcctggcaccatccctggccacactcaaggaacacagttatccctgatgctcttggcctctctccctgagcagtactcaccagggcccacctgactcacgatagcccctgcccaacaggtacaagtggagctggtgctggccccgggctgcctcccacccaggtgcctggcctgtggctccaaggtggactcccaggcccagcaccaccagcagcagcaacaggcgactgtccagtgaggcccagtgggccactgaggagccgcctctacccagggatcctgcctcccaccacggccctctctagggcatctgcattgaaggatgccacagccttctgccaatctgaccatcccaggctagaaggctgatgcagccccagaccacgctccagattcaagggccttgctgggggcaaacaaggtggaacataacacgtctgccaaagtgaaggaggactccccagtcccatcacccagagccctgctggtggggtcaaatcatcggcgcctgcctcacgggctggactggtgccatgccagctgggatgcccagtttgggagaagcctgaccagggcctctgtttggcaaggcttccctggcagccctgggtacctgcctgtgtacccccgttctcagggtctccccaccttctgtgctgtgggtccccatgctaaacagcactagataccgataaccttcttgactatactgaagccaccttcctgctgcccaccagcctcagtgacagcaacagacccctctgcccaggccggcctcacacggggctaaagacacccacggctcctgccagcagggtccacacaggccacctcgctgcccgtcctctccctcagcccctccttaagcactcctgcaggctctcccagctgctgccagcacatcccgggtgaggcttgcccggacccacaggcaacctgggcccctgccaagccagaatccactctcagctgtgcctttctcggccctgagcaaagcagat

SEQ ID NO: 1562570 - DNA, 4001 bp, Homo sapiens
ggtgactgggctgcccctggcttcctgaggcaaggagcaggaaagctcacagctcagccagctcagcactggggaaacaggggacacggatggaggggtagtggctgggatttgcctgagaaactctaggactagggagaggctgggagaccccaaaaagcaagcgcagaacaaggagggactgacaccgtggccgtggaccagcctgtgaggcgcccctgccatggatctgccgggatgttgggcggggggggggggggtgctgcccacagggcccggccttcccagccccacccaaggcctccaggaacggccaaagcagggccagtgaggaagccccgaccccgcaacagcttcccaggcccgcggtgctccacagaaccctccaccatggtccccagggctggggcaccctggggcagccctggcgcgtcatggagtatcggcagggtgccccgccggggaacccagggggagccggcagcagaggcagggtggaggcggcctgagcacctggcaataggggagaaggccctgtgtgtggcagagcccaagagaggaggtgcttcaggatggcgacggagggctggcttgacctgcggctcaccctccaacaagggccacaaacacctgcgcgtctttgcagggccccgactcccccagcctaggacccagccctgggtctccctcttcctcccatggtacagtcggggcaactaaagtctgagtgcgggacacagggacctcagctctgccggcccgcggcctcctcctcaagcccttgggccgccttgcgccaaatccctcgagagccgccaccattcccgccattcctacctccgctccgggcagccagacagacggccggggccagtccgaggcgcgcacccacccccatccgtcccccgtcgtctcctgggtcccccaaacccagttcccgccaccactgtccacggaagacgccagcgctcggcccagcgttcctgattccccctttctcggcgcgtcccgggcgctcgggtatctctgcccgcgcctcaccttcccggggaaccggtctccgcccggctcctccacctggggaatctccctcgccccggggcccggcccgccacccctcaggaagcgcctctgcgcccccggtccatccctgctggaggagctcgcgaaggttcatgcgagcgcgcggggccggtctgcggcgcatggacggacggacggactgacggacggacgctccccgcccgctacctgcggctccgcaccccgcgccgcgccggccgccgcacttgccttccctccccgcctacccctgcgcgccttccggtgcagtttgggacagctcggagggtcccgcacgcggcgccgcaactgcgcctgggacgtgactgtgcctgggcccttcacaggcagtgccggcagccgccgcggggcaggactcggaccccgcgccggggaactggtctcggggcggcgggaaaggaaccctgaggggagcagaaccccagcctcccagtcctcccggccccgcacccccgacggccccacgccgcccggccaccagccccggacccccggcaccccgcaccccggacccggcacccaggaccccgcacgccagacctagcaccccggctgacctgccgctcgcacgccggctcccgctgtctcggcggccgctgggtctccggctccggccgcgccgctcacgggcgccccctgcaggcagctttgagacccgcgctgcccccgccccgccccgctgcgcggagaaaccgaggccggagggggacccgaggcatcggcccgcgaggcccgcaggcgatcctggaaggacgatcccgcaggtgtccctgtcaggacgaggccgcgacgggcctggaccgcgccacatcccccgcctgcggccccccagcgcgctcctcccgggctcgcatccgtcccgccgcttcctcagcgccacactcacctcccttccaggagtcctcgggcctgggagtccccttccccgccccttggagcgctccgggccccacccccacactccctcttttctttttttgagacggactcttggtctttcgcccaggctggagtgcagtggcgcgatctcggctcactgcaacctccacctcccgggttcaagcgattctcctgcctcagcctcccgagtagctgggattacaggcgcccgccaccacgcccggctaacttttgtattttttagtagagacggtgtttcaccatgttggtcaggctggtctcgaactcctgacctcgtgatccgcccgcctcggcctcccaaagtgctgggattacaggcgtgaaccaccgggcccagcctccctcttttttaagaagcccccattgccggccgggcgcggtggctcacgcctgtaatcccagcactttgggaggcggaggtgggcggaccacgaggtcaggagattgagaccatcctggctaacaaggtaaaaccctgtctctactaaaaaagtacaaaatttagccgggcgtggtggcatgcgcctgtagtcccagctactcgggaggctgaggcaggagaatcgcttgaacccgggaggcggaggttgcagtgagctgagatcacgccactgcactgcagcctgggggacagagctagactctgtctcaaacaaacaaataaataaaaaagaagtcctcactgctgcctctgccactatggtcctgtggaactctgctgttccttatcagagttgggctggatccatgcccctgtgtcacccgttccccagtgtccagctgtgcccaatgcctgctcctcagatctttccatggctccccaggtcctgagggataaaggccagcctcctgaacacggcgttcaaggccctgcctgacccttagctcccccacctttagccctgcccttccttagcctggcccaggtgctggtcttggcaacagctgttatctcagttcaaagatgtgtccccaatttccaatgccccctctgcctctccccatcccagactctgggccagagaccctcttgttcttccagctcctggtgcccagtgtggccttgatcctcccctacttccctgaacaaggaggcagggagtcctgtctgcaccacagactaactgggaattttagagcctgaggctgggaattccccccccatccccccgccccactcgcctattttctggagacttccaactgggaacaacttcatgtccagccctccaagctgtccaaggggacccgccttctacccttgcatctggagggatgtggactaatcccaactgttcacgacaggacaggctatgtcagacagccggggcattggtggccaaaggcttttgggaatccttgcattctagaacctctggggaccagtggggtcctggctagaggcccagggtggaggggcttgcccagggccaggctggaccctaaggctgaaggcagaatgggggcatgacctctatcacagcagctaccactcactgcagggaggagagggtgggtgggaaatgggcacacaggcacctggccagtgtgttaggagaagcatggggcccatggcagtgaccattgcttacccagatgcagccttgagcatctggcagcctccctggcttattcctgggatcgaagcctgggcccccgttcccattcaactagcccggctctcctggtccttgtgttccctaatgtccaaggtggaggaggaaaccctgggatgtgtggggacctagacagcttgagttaaactccgaagggcgagacccacatgagactcttggggcgctgtccccaggtctttccaaggagacctggccctggtgcccccctctctgtcatcctggcctttgctgaccctctattcaaaggagctcgccttctcccatggccctggctttcctcagtggaggagctccccctccaggtggggacaccgccctgggaccagcggcaggggcttccctgcagaccttccaggaccc

SEQ ID NO: 1562571 - DNA, 4001 bp, Homo sapiens
cccatgagttgagatttatcaattttgtatatagaaatactacatatttaggactccctgcctttgggtggtggagggacactaggaaaggcaagacaaaagaggaattaagcctttttctaccacattagaaatgtacagtttttttggtgaaatttaggtttgatgtaggcgttcttgttctctaagtaagtttcccatttgccggaaattttaagcagcattgatttttttcaattagcttcagatatgctacactctggaataggggtgttaaactcacgacattgcagaaaggtttgcacttttccctcattttcactacttggcattgtctatcaaagagtagcacatcctgcaaaaccaacaagaggcatgggctaaggaggaaaagcaagctcaaaatacctagcaagcatgtcttcatttgcacaatttagcttttcacaacaaataacaaggggactggtattttctgtatcatagggctcatggatgacttgtaaaaaaaatcagatgatgatcacttagcattaggtaacatttaagcaatcttgggcgcctaacgcttgaaggactgatgatttcaaatggacaataactttggtttagattccaatattttacagaattgcatggtttcaaattcaccataaacaagatgcctcttttgagcatcaattccaagagctatttagcatcaaggaatcacattagctgtacaactcatgatggtgttaattaggaaaggagctagagaaaaaaaaatccatcactgaagccttgatacgttatttaaaactcactattaaccagacaaactattttttctggggaagtgctaatgatatgaactagaaaaaattttactagtaccttaataataaatcatttgagagaaaattgcaacttggtatgcacctcaccgagcccctcgccaattcaatcgggccctcctttgataatttaacaacaaattcctgtctggaatcacccattcaagtgtctttttaagtgactcctgtttcaattttttaataaagtgccaccagtagatctacaagttgaggaaagcagctcaggtgacacacttggcaccaaaaagaatactgagtgggtcaaaatcctgcccggggacaaaatagaagagaagccgaagaaggtgactagacttaatagacttcaagaagagcaagtactgaaaacagcagtttaactacctcggacaataagcaacaagcctgcagtccccaggtaagcggcccagagggaggtgagaggatggagttggaaagggggaccaatgagcccgggaagaaggagcgaccaggatggagcgcaaagcagtgacaggcaaggagccaacggggactacaccaatgcaacaggaagaaccacggggatgggacagggcaggacaggacagggctggggggagggggcgacagggatggagctggtccagccaagtcataaccagaccctggctggggcgctcgctgcgcgcagggcgccgcgccgggcactttggagcgctctctcccggggtgccccccaccggccctccgatgccccatttcagagactggaacgacgaggccggccccgcatcgcccgctccgctgtgtcacccgccccggggcagcggaggctcagcgcccgaccctccaggaagcagggggtagctggcggccgcagggggcggcggcttggggccggcgccggccggggcagctggtacctgggctccggcaggacgatcctcttgctggcgcgggcggccggggtcgccttgctcttctccatggccatcaggtaactgacatcggccagcacagcctccaggtccgccatgttggcgagctttggcggcggcggcggcggttactccggacctggacgggacgcgcgcccgccgccgccgcccgccgcgccccgacctgggggggccgccccggggcagcccccccctccgcgcgcccccgccccgcgcgcgcgccgcgcgccccactagcgctctgcgcgcgccgcaggctgtagccggccggggtcgcagcacgcctccccgctccgccccctcgcgcgccgcccggcgccccgcgcacgcgcgccgccccctgctccttcagcgagggtctgcggggagcgcgcgtccaacggtcagcgcccctcagtgcacagtcccagcggcctcgctgggccggcgcctcccgaccaagtctctacggtcgccctcccctcggggtggccacgagggactcctcctcctcttcctcctcccctccctccccctcggtctccgcctcctccttctcctcctccttcactgccccgacctcccgccccaggttccacgcgctctgatgcccgccccgctcacccagagaagccctgggccagacgtccacaacccaaggggttatggggaggcctctgctccctggacacagtagttctcaaactggacagtgtcaatcagcatcctccgggaggtctggggtggccccggaaatacatgtgtcccacctatcccagcaggtaatgatgaaactcctgctctggtccgggctaccggtgaacagcgcccagcgggccgggcccccaacctcgctcctgagcctgaacatccccccaaccccaccgtgagaattcagcgaagagtaaaagctggaaaaagttgcgtgtcttaggctaagcagaacaaagtggggtgacggctccccggctaggaacagagatgcccttagggagccctctgatggaagagctctccgcttaagaaggtcaccactcccttacactcaggtgagaggttttagtttgggtgttgaaatggtgttgagaaatagaaggagagagagtattcctgtcgttagggttttacggtcaatacaagagacaattagggagcatctgctgcgagcacactcgcaccacgagggtgatttagggaagtggaaaagcgagatacagcccaaacaccgaagctggggggaatttccagcttcctgatcttcggtctcggtgtctttcatcatcactccaccccgatgcctggggttttcagttgcttatttttctacagtgtgcacacaagtccgcattcaggatccatgtgacactcaggctggagtggtggtaagggacacgcaggcagtcttaggaagacctaagctggaaattaatgttttaaaatccctttcattcacctgaattggtcacgtatttccatgagcctagacgttgctagaatttgagtgaacgttctgtccataacttacagggttaacgggacccaccagatacagttaaggtcaaatttcagatatttcatgtaatgtcattgcagaagcagcctgattctgtcatcaaatagcctgtttccctcttttgttttctctcccacgccacagcccccctcaatctgattccctgctatgcctgccatcaccactggccagttttaccacatgcttctcaagacccaaggcacaataggcataaagttgtcctgaaaaggacaagaggagtgtcagaagtaggaatggcagttgaaggagcttcgtctgccagcagaaagctgaaatgacaggcaagcacaaaatatattaaggagacaaagctatgcatgagcgaaatatcaaactttcatcttctacccactttttttttttttttttgcttaaaaacaggaagacagaatgtcttgtcaagggtcaccccaggaggaggagtaaattccccaaaaagcggaacatatttttatgatttaattaatacaatttctctcaatgtgtctgtttatcatttgagcatccacatgatcagacctgacatctgcctacattttcttggtcgtctttgacttcagttaagaaccttttgctctttgttttcccccagcagcacagtatattaagtttggaacaagacacacctgaaatcaaatccctgctctgtgctgggtgatcttagaggcagtcttttacctctttctactt

SEQ ID NO: 1562572 - DNA, 4001 bp, Homo sapiens
gaggtgagaggacagcttgagcccaggatgcagaggttgtaacgagccaagattgtgccactgcactccagcctaggcgacagagccagacccagtctcaaaacctaaatatataaataaaagtaaaaagtcagtttctcagtcacactagctgcatttcaagtactcggcagccacatgtggcagaactgcctggaacctttacagtcacagaagacatgacacctctgggctccttccaaagcaaagcagcagagggcagcacggccatactgcttcctcccctcaagcaatttatcttttcaaaattcatactttccttactacaaattttctgcattcctcctaatctcttattctccaagttttttcttagctactaagttattatgcaatttatggtaattttgacaccctaacagataatccaaagccaaaattgtatgcattttaggccaacacaaagaacacatactcagactctacattccaattccagcttgaagccatttactagctttggcgaccctggcaaagtcttgagtaccactaccctcatctacagaatagaatatcagatgaaatagaaagagtacacactagtacatcacaaaccacaacacatgattaaggtctactactatcgctatctacgccaagagtttattaagttgatgcttcattcttccatctgtaaaacaggtacagtcatagtatttcatacctactcttcagggttgtttggaggattaataagcaaccatgtgtaaagggttaagacctgggtctcagaaggcactatctgaatgtctgctattattgtagtgtatcgcccaatattttggagggcagtgataaggggagggagggaatctagaatgaaagtttcctgtttggagagttccatggtacaggtcctaggcccgaagtcaaattgtttccatgtttactgtgccgtttgagagggcattgccaacttgctcgttgtggcactttcctctgaaacttgaggagaaacattatcgctctctggatcaccttcagtttgcttcaactcttctggagctatttctgaaaccgctgggctaagaagttctctatgcagcccttagaaaagaaattataaaccccgtttaataaacccctacccggagtcttctcctaagaggcaaagcggaggccagtgaggcagaaacggtggcctagaaaacaagcattccagtcctgtcactaactacacaggcactgtggaaaaccaaggggctacgtgctcagctcaggctctggagtgcacccaggttcaaatcccagttccgttcttaatagctggatgggctagggcaaacaacaagctgtccgggctttgttctcccctgcaatgtgggaaaaacaccatcaagcctgcaagatcttcatggattacacaagaaaagattagtgaaataatgagcacaacagtacgaaacaagcgctcggtgtctgtggttagcagcgtactcctgcggggatggccaaaatgaattccctgaaactacaggctgaatttctcccagcctcctccgcgtctcgaaccctctcggactgagaacacgtgaggcaacaggtggcggctcccggatctcctgcccttgctttcctggggccgcagctcctcaggacagggaacacccagctgaaaatagccgggccgcagctccggggtggctaagcccagcccggaacagagcccggcacgtgctggggcgggcccgtccctcccggcccagcccctcagcccgggatccgttacctgctcggcctccgccagccacagccacagctgccgccatgtccggaatttatacctgtcgctaaacacgaagcacatctccgggctggcatagcgggaggcaagaggtgagcggtagctgtcgggcgaaccatgatcgcctccagccgccatcccaaccctgcgaccccgccagggtggactggaccagggaagagcggaagcggaaacctggaggccagggcaggacggggcggggcgggacttccttcacgcggtctcgctctctgggttccgggcgccctgggcgctgccggctgcggagaatctccgctgcttctgcctgagaattgacttggttcgcttctttgaccagaaacatgattgatgcttcctacgttacttagccgcgctacactttagttttcctgtctgaaaagaggtacattaagacttccttggccgggcgcggtggctcacgcttgtaatcccagcactgtgggggccccagaccggaggatcgcttgaggccgacagatcgagaccagcctgggcaacacagggagaccctcccgtctctaaaaaacaaaaagcaaaaaaaaaaaaaaaaaaaaaggcctgcctttcgggttgtgcggattcagtgttagagcggtgtctggcacacttggaaggccgtgtgtacgcttgctgttactcttattactgtcgccccacccactcctgcccgcggcgcaccgagctcggctctaaggagaaatgaagatacccaagggaaatcggcatttactgcgcccccagtgagccggctgcggtggcctacgcctgtaatcccagcacttcgggaggtcgaggcaggcagatttcctgagcttaggagtttgagaccagcctgggcaacacgtgaaaccctgtctctactaaaatacaaaaaattagtcgggcatggcggcctgtacctgtagtctcagctacttgtgaggctgagacaggagaatttcttgaacccggaaggcggaggttgcagtgagccaagatcgcgccactgcactccagcctgggcgacagagcgagactccgtctccaaaaaataaaagaattaaataaataaatagaaatagaaacactcaagtggcccccccccttttttttttttttgacagggtcttgctatgttgttcagtctggagtgccagtggggtgatcacacaggaaagggttcatctggagctgtaagagccaggtgtctcagctgggcacggtgactcacgcctataatctcagcactttggaggctgagctgggcagatcgcttgagtccaggagttggagaccagcctgagcaacatgatgaaacactgtctctacaaaaaatacaaaaattaactgggtatggtggtgtgcacctgtagtcccagctacttgggaggctgaggtgggagaatcacttgagcccaggatgttgaggctgcagtaagccatgattttgccactacagcttaggcaacagtgagaccctgtctcaaaaacaaaacaaacgaaaagagccgggtgcctgcaccctctccacctgcacttaactcctagctctctgccttttacgtgaggaatctaaagacactcaagccaggtgtggtggctcacgcctgtaatcccaacactttgagaggccgaggcgggaagatcgcttgagcccagtactatgctgctttgaaattacttgtttctgagtgccttactaaaatgagacctgtggaggaattccaattttaactcccagtttatttgctgagagttaacttcacttttccaataaccataatatttctagactattacaagtacatgattaagggccaggcacggtggctcacacctgtaatcccagcattttgggacgctgaggcaggtggatcacctgaggtcaggagttggagaccagcctggccaacatggtgaaaccccatctctactcaaaatacaaaaattagccaggtcgtggtggcaggtgtctgtaatctcagctacttaggaggctgaggcaggagaatcacttgaacccaggaggtggaggttgcagtgagccgagatcgtgccactgcactccagcctgggcaacaaagtgtgactccaactcaagaaaaaaaaaaaaaaagtacatgattagatctcaaggcttcaagatcttttctttgacaataacttcttttccagtcaccttcccattcctgct

SEQ ID NO: 1562573 - DNA, 4001 bp, Homo sapiens
agtccactggtccccagggaaaccctgctctgtggtgaacagaagtgggcggccagcccgggcctgatggggttaggggaaagggaagccaggcacacagccctgccacgcctgtgcccagcagccataagctccccctacccccgactccagcccttcacaaacgcccaccaggcctgtgggcagtcatgcccaacagcatatggggaaagcaaggggtcaaggtcccatcaaggtcaagcagcaggggcatccctgtggcctcccaccccaccctcccaccttgatcagttttaaggtgggcaggggcccagaaagcccccatatcaccctaaggccctgcaaggtgccctgggggaggggacacctgcacagcagagagatcactgtagccaggtgccttccaggctacagggtgggccttccggaagatgcagcctacaggtggactttggaaggcccagggcacaggcataagctgccttgtttgcaaatgacctccccacagtccatcccactgccatcctccagtttcctctggaagttcttcctgaagtctcacttgaggtggggctgagacccacctggtctggtccagataccaggaagggccgtgggtgggtgcctgagagcaaggggtggaaacaaaaggccaggttggagagggacccttggtgcctggcccctgcgcctgtcggtcctcgaggtgcccattacaggggaggaggcggtggctcccacagccactggggcgtgccttggctctttcccccacttgtcatcaaagaaggtctgtaaaactcaactgccacctgccccacctgccccttccctgggcactaggctgtcccttcctgggtcctggtttcagccctggttcagccctgcccgcttccttcctggctgacctcaggcctcacctgatgggccacagatcccagaaaaggtcagacctggtcttgccactggggacctgcccaggctgtgctgtcccttcccgagtacccagggacctgaatcccccagggcctgggccaggaaggagactgggtggggcccctgtgccttcggcctactgtgtgctagatcggcttggagcccagtcaccccactcaaaggcaaaggtccttgccaggggcagggcaggagggacccccagagtgcagagcgcccgagtgctattccttgcccatgagctgcccactgcagaaaagttctagcagagcccagtgctaaccacccagcaggagtctgtgtctgtcccagggaccccaggacctgtgaggcgggactggattactcccatctcacagagcggcccctgctccacctgaccctcccagggctcctggcgcccccagggtgcaggctgggcagggtcctctccccactcctccacctctcgccacctgcccccactgcctcatcccaagggctcctgcccagatcggactcccagtggcttccaggcgtcctaggggtggcatctgatcccagtcctgccttcgagtgtgggggctccgcgctctcccctcccccacggagctcagggcaagcctctgtccactctccccgcctctgcacgtgcagttccctctctctgggaagccgatgccagcagcctcgccggctccgtcccgttgcccccgccagaccttgcagcccgagaagggggactggcacacagtggggccccgcggcgagccgggaaggggccgttgtgggacgagagaaggacgaggtgagcttcggaccccggccagtgcctctggccccgcttgccaacccccagcccctaacgtgccgggccggggtccgagacttgggagcgcaagcgctggcccccggcgccggggcgaagaggcggggcggcgggcggggaccggggttccggggaccagggtccccggggcgggcgctcacctgggctcggcgcgggcctgggctcgggaaccgcttggggccgcgggcgcgggggggcggggaggcgcgggcggggcgtgtctggcgctgcgtttgcactgcggccggggagcccgcgggcccagcaccgccccgccgggccggagcaggtggggggcggccgggggacaggggcaggccgaggccctcggcgtccggaccggagtcgcggggcgtagggaggcagccaggggccgctctggccgggggcgccccgggcccgagtctgggtctccggggatcctcgcgacctcccagggatgcccagctggggcgcgggcagggtcttttttccttttctttctttccaaagtctcagaaccatctgtgggcggggtgggggaacttgaatcactctgagaaacctccacaagaaagaaaaccccaatcaaaccttgctgcccacagctcccttcactggttgggggagttcaggttccccggtgtcctaggttcctcccggccctctctccacacataccagggtctgttttcaattatattttattacattttctttttctcacctgtcatttaccagaactccttgggtctccagaaatcacagtgcaccctgatgttgtgcctcctcctccaggaggccctccctgatcagcctcccctctattagggctgattattctggttcctaacacttgggtgtttcattgtccttaatgtgtgcatctctgcgttgtaggtagaccttgtctttcaagcaggctggagcacagaggctgtgtgggttcctccccggtctgggccttgctctcctctcctgtaaggaggacaataatgacagcagtaaagtcccctgtgccaggcccagccagccttcccaggccatcctctgggactatttatgccccaccccacccagggggcaagttcgagcccccaccaccaccaccctcctacaattttacagataggaaatgcagcccagggagtcctggtctcgttcagggtcaggaacaggccctgcatgggtcacactgggggcaggtggtggggtgaccaggcccagagggcacatgtggctcagttcaggcaagtcctctcagctcatgtgttgcttccacagtgggaccgttgccactgccacaggagagtcccatcacagggcagatggcagtgcttggggctggtgccctcagtctccaaccagcctgcccccatttcatacacgtggtgatcttgctgccccacccaccttcagaatctcctctagccaggaagacagtgtgcctcatagtaactacagctgtgattttgcatgcatttatttccttacccatcacaacagcctgagaaggaaagttctctttgtattatctccatttcacaaacggagaaactgaggttcagtgaggttagggactctccagggccacacagctgctaagtggcagagcagccctgggcaggctggcctcccagatggagggctggaagcaggaggggagaggcctaccaggctcatgcaagaccacagggcctccagtgcacaatgcaagtcctgttctgtgaccttggcaatcagtgagtggacccctctgctccagccttcccaggacaccgcaggtaactgaaatactctcccagactgctgccaggacaccatgacaggcacagagccaggcacagggggtgcttgggaagtggggtcggggctgctgagtttggggtgccagagataaagctggggaaacaggtcagtgtagggactgaggccagcaacttggggagataccctgacacaaggcaagtgcaggcctgacctggggcaagtccattgtggctccctttgccgcaggcactgtgcttgaggttcctgctgccccatggtggggcagaaatcacaagatcttcgtagagcaaaagctaaaaccaagggcaggctaaaagtgctgcctctcccgaagggccctcaggcttagtggagatgcatgtggaccaggggccccaggaagacccaggagggctctgagccccgggcagcctgaggtcctgatattgccccagggatagttctggaa

SEQ ID NO: 1562574 - DNA, 4001 bp, Homo sapiens
cagcccagcggtgccacagacgcctggtatgaggccagctggcatcatcccacccactgctagggggagacaatggacgtcatctgcccaaggcacattttgaggcagagagggatccagcccaggcctaggtgtccacagcacaggagcgggggaggaagagtggcttcttggagcagaggcaagtgggtccctctgcctggtgggtcatcacagccctcctccctcgcccaagttctcccttagacccaggaaagggagaaaagcctcacaagttccaaggtaacggagctgatgggtatcaggtaaggggagctggggtgagctggctggggtgagctggctggggtgagctggctggggcagcgtggcctggcaggttgagtggagcactggctgcgctcttgaggtctctctaagcctcagtttctccacctgtgacaaagctgcacactcctgcctccccaggtgttgtgaggagagaagagggaaagtggggggccagagggagagctccgcagacatgagtctttagtggagaaaagacccaggcctcccctagcaccccaggacactcccacttctggctggagtagctcaggctaggttggatggtgatttcctgtataaatggggaagtgtgcccagaaaggccaagaaggcagcccgagaccacacaggggatcagaggaggcaaagagagccaggatctgcccactacaccctcacagcaactctaagaggtcagggtggccaggccctctcttttgcagagagaaaaacagaggctcagaggggtaacttgcatgccctaggtcacagagtggctgagcgtgtccccagctccccccttccctggccctgggggcatagccccttccccaaccctgcaacaggaggaaccctgactttccttttccaagaagggtcctgctgttattcccaccaccaacactcaaagccccaaagaaaaaggggcacccactggagcaggggccagctgggggaactgctccaggccccctaccccctcctggcggcagcgtattaacattccgagcgggttcttggatagcctgacctacttcggaggcctaccgagtgcagagggggaggggggggagacgggggaggaggaggcggggagggaggagaaaggatggagacaagaagacaggaggtacctggtttgggtttggagaagcagccgcccatggcgagtggcctgaggatggccggcaggcaggagcacagatggggagctgtcggaggcctagggcgccccccatggggctggaccccctgcaggccttagagacgctggagccgccatcctgctggagctgctctaggacctgcaggggagactggagccatcaggaccggggcgtgtgggcaggtagagacacagagggacggagagagacagtgggagcttcggaaagagtcttacatttgagctgggaaccatggcgtgagcctgatcccagagcgtggggccctggaggtcacctcccctttgaagccctccaagctcagctccctcactcctccagtggagttcctctgcccgaacctcggccgcccatcgtccagccccgcggctgccttgcccaggaaatcctccctgatttctactgcctcctcgtgccccccttcccctctccaaatcccacagcctgagagctctgggaccctccattctcccgggagaccactatgcctaggctcaaagagggggtcaccttggggaagccaaagcccttctcatccttggtcttctccctcctacaatgggggtgacatcaggctccccctagcccagccccaccctggctagcactccggacacccacctcctcgcagggcagccactgctccgtgttccaggcccagcagtggactgaggctgccgggccttggaaggccgggcagggagggcaggggtccaggaggcggcccagcctccaccctcctcccagctcaagctgtggccaggaggggctggggggcggtgtggggctgggccagtccactggtccccagggaaaccctgctctgtggtgaacagaagtgggcggccagcccgggcctgatggggttaggggaaagggaagccaggcacacagccctgccacgcctgtgcccagcagccataagctccccctacccccgactccagcccttcacaaacgcccaccaggcctgtgggcagtcatgcccaacagcatatggggaaagcaaggggtcaaggtcccatcaaggtcaagcagcaggggcatccctgtggcctcccaccccaccctcccaccttgatcagttttaaggtgggcaggggcccagaaagcccccatatcaccctaaggccctgcaaggtgccctgggggaggggacacctgcacagcagagagatcactgtagccaggtgccttccaggctacagggtgggccttccggaagatgcagcctacaggtggactttggaaggcccagggcacaggcataagctgccttgtttgcaaatgacctccccacagtccatcccactgccatcctccagtttcctctggaagttcttcctgaagtctcacttgaggtggggctgagacccacctggtctggtccagataccaggaagggccgtgggtgggtgcctgagagcaaggggtggaaacaaaaggccaggttggagagggacccttggtgcctggcccctgcgcctgtcggtcctcgaggtgcccattacaggggaggaggcggtggctcccacagccactggggcgtgccttggctctttcccccacttgtcatcaaagaaggtctgtaaaactcaactgccacctgccccacctgccccttccctgggcactaggctgtcccttcctgggtcctggtttcagccctggttcagccctgcccgcttccttcctggctgacctcaggcctcacctgatgggccacagatcccagaaaaggtcagacctggtcttgccactggggacctgcccaggctgtgctgtcccttcccgagtacccagggacctgaatcccccagggcctgggccaggaaggagactgggtggggcccctgtgccttcggcctactgtgtgctagatcggcttggagcccagtcaccccactcaaaggcaaaggtccttgccaggggcagggcaggagggacccccagagtgcagagcgcccgagtgctattccttgcccatgagctgcccactgcagaaaagttctagcagagcccagtgctaaccacccagcaggagtctgtgtctgtcccagggaccccaggacctgtgaggcgggactggattactcccatctcacagagcggcccctgctccacctgaccctcccagggctcctggcgcccccagggtgcaggctgggcagggtcctctccccactcctccacctctcgccacctgcccccactgcctcatcccaagggctcctgcccagatcggactcccagtggcttccaggcgtcctaggggtggcatctgatcccagtcctgccttcgagtgtgggggctccgcgctctcccctcccccacggagctcagggcaagcctctgtccactctccccgcctctgcacgtgcagttccctctctctgggaagccgatgccagcagcctcgccggctccgtcccgttgcccccgccagaccttgcagcccgagaagggggactggcacacagtggggccccgcggcgagccgggaaggggccgttgtgggacgagagaaggacgaggtgagcttcggaccccggccagtgcctctggccccgcttgccaacccccagcccctaacgtgccgggccggggtccgagacttgggagcgcaagcgctggcccccggcgccggggcgaagaggcggggcggcgggcggggaccggggttccggggaccagggtccccggggcgggcgctcacctgggctcggcgcgggcctgggctcgggaaccgcttggggccgcgggcg

SEQ ID NO: 1562575 - DNA, 4001 bp, Homo sapiens
taatcccaactacttggaaggcagaggaggagaattgcttgaactcgggaggcagaggttgcagcaagccaagatcgcaccactgtactccagcctggacaacagagccagactccgtctcaaaaaaaaagaaataggaagcaagccggatgtgttggctcacgcctgtaattccagctactcaggagttcaagaccaacctgggctacagagccagaccccatctccacaaaaataatcccagctactcaggaagctgacatggggggtactgcttgaggcccggagttcaagaccaacttgggctacatcatgagaccccatttctacaaaaataaaaaataaaacggaacggggagcatctacgtgccaagatgtgggaggtgcacacagcaagtgctgcttggcagtcccccacaaccccactccacacctctccacccaggggagttccccagcaaggaagagttcagctgtggggtgaaaacattacgtgctgactctgacactcctggcgggcccccagcacctcctcggacccaacaaggtgtgccttctgctgatgaccagcacagctcactttcgagggcatgagaagaccaagggtgagtctggattctctgccaggagcacgggaagaccaagtcaacaccagcaagcacgaaaaccacgacgaaccccccaccaggcgagggtgaacggacactgtcctgcactagcccactctgctgggcagctgggcagcagctgtggctaatctaagtgacgggtgcttcgagagcacccacaggttaaaacgggcccaggccatgacactttaaaatggtggtttacagaacaatggcatctcagattagggaatgacctgcaaagaccctcttgtccccatcaatccagattttaaggcctctaccgaaattgatcaaatcaggctaagcatggtggctcacgcctgtaaccctagcactttgggaggctgaggcaggcagatcgcttgaggtcaggacttcgagaccagcctggccaacatggtgaaaccccgtctctactaaaaatacaaaaattagccggacctggtggtgggtgcctgtaatcccaacttaggaggctgaggcagcagaatcacaggaacctggaaggcggagcttgcagtgagctgagatcgcgccactgcactccagcctgggcgacaaagtgagactccgtctcaaaaaaacagaaaagaaactggtcaaatcagatgttactttttttttttttaaatgtgcagtgttatctgcactccttccttccacaggcaggagttctctgaaatccagacgctgcacgttttatttcccctaatttaaaccaggggttcctgaacatgagcgagtgttcatcacctcaagcgcctgtagaaatgcagatccccagcccccagagaccctaagtggaccccagatccccagcccccaggtgaaaaacccatcccccaggtgggaggtccggccccaggtgaggagcccggccccaggtgagaggtccagccccaggtgagaggtcgggcccccggatgagaggtccggcccccgggtgagaggtctggcccccaggtgacaggtccagccccaggtgaggagcccggccccaagtgaggggtgcagccccaggtaaggagcacggggctgtgacgcgtggacatgcgcggtgaggcctcaggaatccagcgccagcgccagctcgggtcgcgccctcgcccgcctcctccctggtctcgccgcgcgcccgcctgaaggccccggtcgcggcagcgcgcactgacctccgcagctcccggcggcgtccttcgaagcgcggctgcctgggccagcctcggcaggaagcaggacggcggaaacagaacagagcccgaatctaaagtccttgcccaaatctaaagtggctaccgcagccccggccgctacggccgcagagaccctctgtgccctgagtaaagatggccgccgcgggctgcgcgcgaggggcggggagcgggaggcggggtcggacctgcacgccccgcccccggactcctggcggccgctgatccggggccttcccattggtcacctctcgtggcgaactcggattgggccatatcaggccggggcgggtcccatcaaccaatagcggcgcggggctggcgggtggggcggggcctcgccggcgccgtcaagtagcctgggggacaggccggcgcggctgggagcgggtgggcggccgggaggccggagcagcacggccgcaggacctggagctccggctgcgtcttcccgcagcgctacccgccatgcgcctgccgcgccgggccgcgctggggctcctgccgcttctgctgctgctgccgcccgcgccggaggccgccaagaagccgacgccctgccaccggtgccgggggctggtggacaagtttaaccaggtgggaaggggccgggcggggtcgtcaaccttgggcccggggtccccctcaccctgcatccggggtcgccccaccttgggcccagggtcgccctcaccctggatccggggtccccctcaccctggattcgggatccccctcaccgtcgatccagagtccctccaccgtggtcctggagtccccctcacccttgacccggatccacccccaccgtggaaccagggtcgacgccaccgtgggcctggagtcccctcaccctcgacctgggctcgcccccaccctggacccgggtcaggtggtaccaagcactatgggcactgtctcctcgcaggggatggtggacaccgcaaagaagaactttggcggcgggaacacggcttgggaggaaaagacgctgtccaagtacgagtccaggtgggtgccctggagcacccctgtgggtcttggcctggcgctgtcctgggaagtcgtgtcctgcctttggtgcctgtgttaatgacagggagacagaacagcccccgaggcaccagtcacccgtccgagtcacctcggcttctccctgaggactaatggctggcccctctctggccttccagcttctgctctggtccctaccccctcaacagacagtggcttttcaaaatgtaaactggaacaccagccccacttgtgggaaccgctcctggcttcccctgacagtggggtccccttattctctgtgcccggagtcctggctccccggcccctgcacccaggttggcgtattggttcggatttttcttcactgccttggaggcgctgacggtgggccggtgtgggcctgtgtttcagcgagattcgcctgctggagatcctggaggggctgtgcgagagcagcgacttcgaatgcaatcagatgctagaggcgcaggaggagcacctggaggcctggtggctgcagctgtgagtgccttaaaacctcttagaagatactttttattttccaacttagaatttgaaataacctcagacttagaaaggtacaggaacagtagggagctcccacctgcctcgcacccaccttacccctgcattaccgttttttatcaccagagtcagcgatcaaaaccaggaaattaaggagaagattctgtccacacctagactcttgtttcctggaccttacaatactccagagcatatgttacgttcagctgcatgtttgttttaaagaaccgtgtctgctgggattcagtgaatgttttcctccatcctcaggaagagcgaatatcctgacttattcgagtggttttgtgtgaagacactgaaagtgtgctgctctccaggaacctacggtcccgactgtctcggtgcgtttctcctcagggaaatcccatctcctacgtcacttcccctcttcttctcatgattcttgggaggtaaaagcacagaggggacctggggtgcatcagctttctgtagggtctgggaccctgccggatggctgcctcccccatccccaacacagcttggagcacttcgcaccgtctggctgcagcctcaccactaacctcatgcttta

SEQ ID NO: 1562576 - DNA, 4001 bp, Homo sapiens
ccaagacttttggagccagatttcctctctatcacttgtagtcacagggtgaccttgagcaagctagttaacccagctgggcctcaggtctatcatctgcaaaacaaggctgagttgttctgccagccccgagttattgcaaatgatttacacagaagctctttgtgagctggttacacagataatcttatattctccttcaaagcaggtcgttcccaaatgatttgcctaaatttggtatttcctaagcagattttccccctccaatggctaatggaaagcaatgtctttgtcatcggagatatggtcaaaaattgcaattcagatacatgacaattccttgctttcatacagcactttatggtcaatacaacgcttccaaattcttatttcatcttcgtgacatcactaaaatatggctagagtcatagccagtcctggaagaaatccccaaagtccccattcttaatctctcagtgcctgggtttccatgtcacccatgcattgtagaagacaatatggtagatataccagaggagaagtttgagtcgggctgacccggattctaataccagcaacagccacttgctatgtgacctggaataagacaatttctctgagcctcagtttcctcttcagtaaagtgggaacaatttctatgtctcaaagagttcttgtgaggacagatgatcatgtatcagcagtgtttggggcacagcaaaggcagcataacagctaaacatccattaccttacttaactcatcccattttacagatgagaaaactagggctgaggccgggccagtggctcatgcctgttatgccagtactttgggaggccgaggtgggtggatcacctgagatcagaagttcgagaccagcctggcaaacatggtgaaaccccatctttactaaaattacaataattagccgggcttggtagtgggcgcctgtaaccccagctactcgggaggctgaggcaggagaatcgcttgaacccggggggcggaggttgcagtgaaccaagatggcgccactgcactccagcctgggcaacagagcgagactccgtctccaaaaagataataataataaataaataaaaataaaaaaatttaaaaagaaaactaaggttgaaagggtctatcatttgccctaaggtctaactgtggtaaaggagtccaagtccgtgcatttaaacaagctggtacgacttggctgcaggctctggcctcccctctccatgataataaaagtgttccccagtacctcattttattattcaccaataagcgttccgagtcatgggaagtttccattcagaaattacccagtgagagaagactggggtgactggctcagagcaggaagactttctaaaaaaaccatcatcaccatcgttactgaaaggagactcaagggtcagtgtggccctcagcgcagacgtcgggggaccccggctgagggtcgggggcgaccaaagcgcggccactggtcctctgaggccccgcccctcgcccgggctgccccgccccgggcccccgcgccgctcgcgccgctcaccgtgcacctccttgcccgtgggcccgagccgccggtggggcctggcagcgcgcctcagccggccagcgggtatcttgcagcgcagctcgtcgcgcggctccgcatcctgctgccacaggacgtgcaagtagcgcagcggcgactgggccccgccggacgcccggcccgagaggcccgcgccgccgccgcccagcgcagacccgaagtcagcgaaggagaagaggccctcagcgtcagtcagcggctccggcgccaccgcgcactcgccctccgagctcgagtggcctgagcgcggctcgtcgtccgcgtccccggcggcggctgccatggcaacggctccgcgcgggcctggccgcctgagcctcgttcccgaccgaccaacggacctacttccctccgccctgagtcgtgctgtcagcgagctggcgggcgggcagggcccgcaaccacggcaaccgagcgggggcgggctcaggccgagacagagcggcgaaccaatgactacccttccagcttaaaccggtcccaaaaccaatcggaaagggagggcacagtacaagcaggataattggacagggtttccggcaacgtgactgacagacattgtaaccaattacaaacttgaagtgaccttggctttcgctgtacgtcgctaccggagccagtaaaacagcatttcagacgctttttttttgcgacggagtctcgctctgccgccaggctcgcgatctcggctcactgcaacctccgcctccttgaagcaattctcctgcctcagcctcccgagtagctgggactacaggcgcgcgccaccacgcccagctaatttttgtatttttagtagagacggggtttcaccatgttggccaggatggtctcgatctcttgatctcgagatgtgccggcctcggcctcccaaagtgctgggattacaggcgtgagccaccgcgcccggcctttttttttctttttcctctccatttcccagtctaatgagaaaacaagcagataccttagcaaatcagattaagatgatttgcaggcactcacaaaggaaaatgaagaagccacgccatccatgtagatatagatgttgtaaatcaatgaacgcaaaaaaaaaaaaaaaaaagaacttcccacaaatgcataatgtacgtgggaaagggaaaatgtgttgaaatttggagataccactacaaactgtgagtaatagtgtctaaatgcaatggatttcctttagtcagagttctctaggtaaccccgacgtagatgactgatctacaaagatttgtaatacaaagtgattacattagagcaatagtttagttcgacagccagtcactgagccaggtaactgctaggtcctggacacaggatcagacttggtgcccctgagatgctcacaatccaatgggagaagaccaggaaacaaataagtgttcctcaagcaacatttcatgggtgcacgttttcataaaacttctcacaatcccgtaccccacaagcacttctataaagtagacaagaaggaccatccctattttataggtgaggagttgaaaagcagagggaagagactcattcacagttgcccagctctcaccggaccaggtcttgtgtcctggcaaaagttctttccatatataaaccctcccactcaacccagttaaaatgtaatctttccgcacggtgggtcacgcctgtaatcccagcactttgggaggccaaaatgggcagatgacaaggtcgggagttcaagacaagcctggccaacatgatgaaacctcgtttctactaaaaatacaaaaattagctgggtgtggtggcgcacgcctgtaatcccagctattcaggacactgaggcaggagagtagcttgaacctgggaggcagaggttgcggtgagctgagatcgcaccatggcactccagcctgggtgacagagcgagactccatctcagaaagaaacaaaaacaaaaaaaaggcctggcgctgtggctcacgcctgtaatcccagcattttgggaggctgaggcaggcagatcacgaggtcaggagattgagaccattctggctaacatggtgaaaccccgtctctactaaaaatacaaaaaaattagcctggtgtggtggtgggcacctttagtcccagctactcaggaggctgaggcaggagaatggcgtgaacccaggaggcagagcttgcggtgagccgagatcgcaccactgcactccagtctgggcgacagagaaagactccatctcaaaaagaaaaaaaaaagtaatctttctcttacaattggaaaagcacttccagaattttcagtgtttgcagtcgccattgtgaggtttatcattgtactatatggaaaaaaatgctatgtttatttgtactctcctcgtctgccccataatggatacagtgctgagacaggatc

SEQ ID NO: 1562577 - DNA, 4001 bp, Homo sapiens
tgggaatataaggtgacaatattaagtttctgtgaattcaatggaactaggagaatagatcacacagcttaaaaaaaaaaggtattacagtaatatttatatacagctttcttcagaagccatgtggaagccctcacgggttcattcacaggttcatacccctaggagcagacaggaaggcggcaggtctttctcatgttgatgtcagggaaactgaggcagaattgaagcaagtgaatatccgcaatggaatgaggcttagattcatacagcctagtcctccagccaccaaaccgtctcaccacctcccaagtaagacgtgctctgctctggcaagaagccatggggcctgcatatttctcagaaaggcaaagattcttcctctgggtaccttcttccagaacctaggaccaaaagatcccctagaggtcatgtggttcctctctttttagaccaaaacgaatgcagctcaaccactctgaagagaagttctcgacaatcttcaaatagttttcacggatagcctgttttgtgtctcactgttccctaaagtcaggaaaatcttagactcttgccctgaaaggtatcactaatagcaacagcctgtaggattgttttatcctaaagaaagtaagtcgaatgccccttatgaagatcagacaaaaagcaataaggctacatcgtgacataaatccaaataaatacaacggcagctaaaaatcttttttttttttttttttttgagacggagtctcactccgtggcccaggctggagtgcagtcgcacgatctcggctcactgcaacctccacctcctgggttcaagcgattctcctgcctcagcctcccaagtagctgggattacaggcgtacgccaccatgtctggctaatttttgtatttttattggagacagggtttcaccatgttggtcaggctggtcttgaactcctgacctcacgatccacccgcctcagcttcccaaagtgctgggattacaggcgtgagccaccatgtctggctaaaagtcttaaatatcccctacaccccaaccttaactccagtctttcctttgtctctgtactttgcaggtctctgacagcctggcagaaaacctggccttgcctctactacccgaatgaccttacatgtgggatttaacctctctgtgcctcagggtcctcatcgataaaatagggatatttaatccccacaaaggttgctgtgaagtttaaatgtgtcattgtaaggaaagtgcttagcacagtgcccggtacacagaagggactcgatagccactagcaagcatctccctcgttattttgcagcattatcaccggtgtctccattcagttaacttgtcttagaggctccaacaaacaagaccaagccagtgcctagccggaggcgggcggcacgggaccgttttctagtttttttttctttcttctttttcaaccttggcaaagagataacgccctgaacaacgaggaggcctcaggatggccatggaggtgagtccgaaagaggaaatcagagcccgaagagttttccctcaggccagtggggaattcctcggggcctaagtcctgtctctccgggcggaagccccaggaggtgctgcgggtatggggcggccgaggaacaggccggcggccaagtgggcgcgaatgaatgaacgaaccctcagcccttcctcctcctctggctggggacgtcgctcgcgcccctgcagcgccgcgtcctcttcatgacctctgaccccgcaaacccctcacctaggacccctgacccctcgccccacttcttctcctggctcgcccgggtccccgcttcctcacccgcaggtcccaatagctcccggcgccccggctcggttcggcttggcaccaaaatgtccgcggcctccacctctcgctctcccggtgcgtccgggctgccggcggctcggagccccgcggctgtcacctgccgggcggaagtgagctgcccgcgcgcgggtacttccggtggacgcaaggcctgaaggcggggtcaagggtacaaccctggcgggggtggtgcccgtggggcggggcaagaaaaggggaagagcccaacggtattaacccctcggcagccgcggcgctgctatgctgcagtctcccgcagagcccttgggaaaccatcccgctagccaattcagcgtgagggggccgggcaaggtcgtagggagtttgaagtccatcttctgtgtaaagacggcaaatctgaggttctaagaggggcagggttttgctcaaggtcactcattttttgtttgtttgtttgaaatagggtcttgctctgttgctcaagctagagtgcagtggctcgaagatctgggctcactgcaccctccgcctcccaggctcaggtgatcctctcacctcagcctcccaagcagctgggaccacaggtgcgcagcactacgcccggctaattacttattatttacttatttattttttgtagagagagtctcactttattgctcaggctggtctcgaaatcatggacccgagagatcctcccgcctcggcttcccaaagtgctgggattacagaggggtctctctctgtccaaactaggtttacagctctagtttggacccctccattcttaagatgagtgaccttgagccagacacagtggctcatacctgtagtcccagctactcgggagcctgaggcaggagaatagcttgagcccaggaggttgaggttacagtgagctataattgcagcactgcactccagcctgggcgacagatccagaccctgtctcaaaaaaagaaaaaaaatggccgggcatggtggctcacacctgtaatcccagcactttgggaggccgaggcgggcggatcacaaggccaggagatcgagaccatcctggttaacatggtgaaaccccgtctctactaaaaacacaaaatattagccgggtgtggtggcaggcgcctgtagtcccagctactcaggaggctgaggcaggagaatggcgtgaacccgggaggcagagcttgcagtgagccgacatcacaccactgcactccagcctgggcgacagagcaagactccgtctcaaaaaaaaaaaaaaagaaaaaagaaaaaaaccatctgcaatcccactgacctaagacaatcacttttaatattttggtgaatattcttccaaacttgatagatcatttgtttttttttgtttgtttgttttgagacagggtctcgctctgttgcccggactggagtgcagtgtcgtgattttggctcactgcaacctctgcctcccaggttcaagcgattctcctgcctgggcctcccaagtaattgggattacaagcatgcaccaccgtgcccagctaatttttgtatttttagtagaggcgggggtttcaccatgttgaccaggctggtcttgaactcctgacctcaagtgatctgcccacctcagcttcccaaagtgatgggattataggcgtgagccactgttggtattttttaactcaccaaaatattggtaaaagtttcccaaaatagtaaatacatttctacttggcactttccagtatctgcatagtattccattacgtggatggtactgctaatctcaaaaacaatcccctgaggttgttatccatcttttttaatattatcaaaaagttgttaataaataagcttgcacttactgctaagtgcacttattgctaagtctctacgtcctatctaatatagatattactggtttttatatttaatataattttagatgtttaagcagcctcaaagcctttaaaagttatttttaaataattatagacttacaggaaattgcaaaattagtaccaaaattgagtcccatatacccttcacccagcttcccacaatggtgacattttatatatctgcagtataatagcaaaagcaggaaattggtggtgttggtaaaataccgttatctaaattacaaaccttattccatttt

SEQ ID NO: 1562578 - DNA, 4001 bp, Homo sapiens
agaccagaggaggaagagccctcctggactgccctgcctcctcctccctccccacacttcctcccttgcaccccaccctccttccccctgctccgcacatcccttagcacacttccaaacctccccctctgaccccttctatggctcactgggagatcactgcagccctggggcctgtctaagccttgtcagggtctccccagggtcagctcagtgtgctcaggccctccgaggaggaccctgctcctctccctggggtagagctgggtcttattctgtggcctcaccatgcacccctgtcctggctctgctcacccacagcccctgctggagatggaccctctggggcttcctcctgcctgcagggttaactcctaccacaccgagcatcgggacagggacactcctgagggggatgactggggagaggaacctgccagggacttcttttcgggtaattcataggattttccacatcccttagggtgccctgaggtctcccaaatgtgcttctcaggcaattgagatggggcagctcaggactcctgggctggaaacaccagccccaccttgaagacctctcccagcccctctctatgcatcctgacataatcagaattagaaaaatctctgttgggaggcagcacaaaagaaagaaagaaagaaggaaagagaaagaaggaaggaaagaaagaaagaaagaaggaaagagaaagaaggaaggaaagaaagaaagaaagaaagaaagaaagagaaagagagatggaggaaggaaggaagggagggagggaggaaggaaggaaaagaaaaagaaggaaagaaagaaagaaaaaagaaaggaaggaaaagaaagaaagaaggaaagaagaaagaaagaaaagaaagaaaaaagaaaggaagggagggagaaagggagaaagagaggaaggaaggaagaaaggaaggaaaggaaagaagaaagagaggaaggaaggagggaggaaggaagtaaaagaaagaaagaaggaaagaatgaaagaaaaagaaagaaagaaggaaagaaagaaagagaaaggaaggaagggaggaagagagaaagggaaatattggaagaaaggaaggaagcacagaagggaaggaaggagggagggaagagagagaaagaagaaaaagaaataaagaaggaaagagagagagagaaagaaagaagaaagaaagagagagagaattgaaggaaggaaggaaggaaggaggaaggaaggaaggaaagaaggaaggaaggttcaaaatgttccccaccatttcgagtagacctgggcatgaatctgggctctaccactcacttgctctgtgttctcaaaaaaaggaaacaaggcttcctcatagccaagcagtcctacaagcaacccccttttcttaatattagggagaacgagatgacactgaacataaaaagggcttaggccaagtccagatacatggaacatttgcaagaaatagtagatgctcatttaaagacaagtgaggagaatcccctctctgaccgtcttcactggctggggcacagcaccattatctattgggattttcaggctccctgtgcacctgccccgggaggtggaaggagacctggaattggtaccatcggaggagagaccagcgctgggaccaaaactgggaacctagagcaagaggccaggtccagagagagggtcaggaggaaaagagaggccccaggggtttgagggtgagaggtgagtgctcatcagaaaagctcaaagaggaggctgaggcgcagaggtgctcggaggggcttcccatacctgggcccggatgctgggctggcttccatgtgcttgtcccttctcggttcctggtctgtgtcctcccgctcttgcgacttgctcaaggcgtggtgttaagatcttcaccaacattctcttaggattcaggagccttaatatatcatcagagcaacctggaagctgctgagtcagcgataccctgccccaccccttctccagctcaggccgagtgtgccaccctcattagcgtcagaacaaggaagttctctgccatgcctctgggcaagctttggttttgatgtgcccactctgaccactgaaccaccagacactgtggagtgacaatggggatgtagagctggccacactttgctccctgtgggccacaggaatctggaaggcaggagaccagggggcaggtgagaagacaggtgtccacaccctggagaaagaccctgaataacactcagcggtccagagagcaggctccaggacagccacccctgtgtcctcccctgtggccagtgcaggatgtgcctggtccaggctccctggcacctgctgcatcctgtgctctctgttagggtcctgcatcttcttccctggctgtgaagatgggagaccagcaggtcctgcatcctcctatgcatcagtgtatctaataattgtaaactagagggaggagtgttttcatccccattacccagaggagatgctaaaggctctgaaaggtacctagagatccaggccctcccaggaaacagagtccccagcagggacacacccccacccccctgtcagaagggccaccctgtgccctttctcccacctctgggccctgcagaaatgtgagggacactgtgctcctgccccaagtgagcccctgagtcctggcggcaggtctggcgccgtcctttcccaggtccacctgctacacccagcacagctgcccctggaaggtgctggccctgtgggcccaggggctgtcccctgtcctgcctgctcccctgttctggctcttactagacccccctgtctttggccagcaatcctcccacctcagcacagtgtccctgccattttggtgggcgccacagactagaagaggccctgttctctgccgtgaggacccctcccattctgtctccagatgttggactcttctagtcaagaagatgtcccctgggggcagtcaactgccatttgagtctcaggtggttctggtgtgagctcatcttggtgtgttgtgtgagtctgaccagaggccacccttcccagttcacaccagaggcatgcacagctggacgccccgcagtacccacagcccacctgggccagagaccacacttgtaccaactttgggaggatccaacccttccccaacccttcccggtggctcctgctgcccagagtgtgatggcctttcccctggctcaataatgcatcaaatgcccctggagcaaatacacccctggacccatggtcaggacagcccccacatgagctttctatggggagacccaggagagctgcaacaggggacagcgctttgttcagcatccctggggcgtctcctgcatctcctggctctgggtcctcagccttgggttccagggtctccccagctcacccaccctgggcacgtcctcctccctgctgccccagctggcccaagccccactggattcatgactggcccatgcctgcctcccctctctgatccagacaggtccagatcttccagaatgtctccaaatctgtaagatccactttatggcccatcacagaaacaggcacattgtctgtttctctttctagttttacaaaccagtcaggttagactatcagcacatctgcacatctgtgaaccttctcatctgatgacaaagaaggcctcagactaaaatgtttaaagcaaagtggggcccagctactgtccagagttcaattctcagtaactcactgtacaagccatgcacccaggcagagctccagagaggagagaagacagggtgttggggggtccccactagcagagagggaggccaggaccctcccttgccaagggtggacagggggagccactggttgggcgtctgcagcccagacatgagcggggaacagtctcactctagcccctggacccaggaacttccataagggccacaacctggaacctctgagtgagctccccagggacttatgtgccctaccccc

SEQ ID NO: 1562579 - DNA, 4001 bp, Homo sapiens; identical to SEQ ID NO: 1562578

SEQ ID NO: 1562580 - DNA, 4001 bp, Homo sapiens
ttgcttataaatacctcagtctgtctttgttaagggctcagcctttttggatgtgagtctgctgaaccagtgcacctaaataaatcctcctgtctcacccatatcagtctctccagtcctctaattcctgcaacactgcctgtgattcgattgaagtttgggtggtacctggcctcgaaagacccctgtgtcccaaaggagatttgagcggcccctctttattttcacttcatagcacagccaagtgtagctccgaccatagaggatgggttcgttttcaaagttgtcgtagaatgtgtctcgatacatccgctccatcggatttctgaaggcacaagagagaaaccggcccatgcagggagccctcccgggagtcctcggggctcatgtccactgaacacagctcccaggatggccctgggcctccccgacccctccacagccctgagaatttctgctgccttcccaggcaggaagactgaggggagaggaagaggaggggatgctggcaggcgggctggggtgatctctcccagctcgggtccaactctggcctttccaggggtacattccccaccctcctagtatttctgccaacccactccccaacccattaggagaatgcaaaagagaataaaacccttcacccctaaaaaatagcttttaacctttcagctcaattccttcctgatgtttcactctgcgtgttaacattattttaaaatcatggtagaactgaattctgaggcccaggccactcttctaagtgctgagcgggtgtgagctcacgtgaggctaccctaggcctgcaggggccattcccatcttacagaggagatgccagaggcacagagaggcggggtaacctgccgaggccacagagctggggacggatggagcaggggcccctttccaggccagccctgtccagcctctgcatcacggatcctgtaggagaaagctgttggggactgggctctcttttcactaaattttaaaatcagagcatttctcctcatcattgcacttttttcccacattctcacattccatgttactgatcatgttctttctttttttttttgatgaagtctcactctgtcgcccaggctggagtgcagtggcatgatctcagctcactgcaacctccacctcccaggttcaagcaattctcctgcctaaacctcctgagtatctgggactagagatgcgccaccatgcctggctaatttttgtatgttttttagtagagacggggtttcaccatatgggccaggttggtctcaaactcccgacctcatgatccgcccgccttggcctcccaaagtgttgggattacaagtgtgagccaccacgctcaaccactggtcatgttctaaaagatgaagagtgaccttggagtggaacctgtctggggacatctgctcaccatggagtcatccttggatgacacgatttatcatgtgcttcagagaccattcctacccccgcaccctctcctaagactttgtatttaagcaaagtaattcttacagaaatttcatcaaaacactgagaacaaaaatgcctgattgctccaattaccctttggttcaattctcccagtttctgagctcaggagtggcaggaagcacacagagggagcaccctcccagggcggggagcaccagtccgggcatgactttaagggagagtctcagcacggggcctgggctggtgcaggtaggggaggcagcccattcagaagcagcagtggggtgaccacacagcaggacaaagagcctgactgggattcgtgtggcaggggagccagaggggagggagcccagggctggggcaggggcggggggaggccagggttgaggcccagcaggaccaccaggcaggaaggggcaggaggggcccagcaggcagagtgggcagcggtacctgatctgtggattcatgttcagcctcttagatacgcttgtccctgtcccgctctttttttgaagctctgtggtttcacttcctgcttacagcgtccttgcagttggacagccctccttaaagtgacctcccagggccttatgagtcatggcccctccccattcctgctcaggcattggtgtgggaggccccggggtgcttcatgtttctctggctctggctctggctctggttttccccggacccttcccgctggcagaggaacctccaataaagacaggctgctctgtctttatctgtcctgggcaggacccaacggaattgcaaagagaaagagaaaggcattgcagcctgagcctgggaggcgggtccagacccagctgagagaggggcaggtgccccgttgcctggtggttgggcaggctggagccccctctccaccaccccctccccagccctaatgtgtgcccagagctttgagcagcaccaccctgttgagtgaggggaggttttgagactccagtggggaaggaagtgtggactccgcacagcacaagggaaggcttaggtgtgcctcgagttcccagctgtgtgctgggtccatggcatgcgtcccctcttccaacctcccagcttccagaaggtggggggcaggtcagcccctcagagggactgcgatgtctgcgacaccaaggaagggagaagggtgtctataaacaggctcactgcccagggacctctcaaggggttctttgtgggccaagaaaacgggaaacacatacacacacagctttctgattatttaagtccatctaagcatattttggaggaatgaatgtacattgaaataatcttcctaaatagattcctttaaggggagtttgttccagctggagaagttgtgctctctgtagaggctctgaactcctctggctacgacgacgggaatgcagacagggaggaggatgcgtgggtggtagggggagcagcagcgcccctacctgcacagaagcttgtccaacctctgcacaaagcggactcccagtggttgtttttggaaggtgagttttcttttctttctttttttttttttaaatcttccccagtataaatcttttaatttaaaagtaaattttattgtcgaaaatgcaaacttggggagggcagaaagatcacacacagggctgtcacttcacacctggggggttgctgggagccgtccagaagcgctcctcacttcccagacggtgcgggggccgtccagaggcgctcctcacttcccagacggtgcgggggctgggcagaggcgctccttacttcccagacggtgggacagccaggcagaggcgctcctctggaaggtgaagttttctgttgccgtcagaaagagatggacaaaggataagaccatcggtggaaaataaacagttccgtttatcagaaacatactttgtaaaagaaaatgtaataatgaccctagaccagggaggcatcctccaacccagctgtaaggcggcagttaaggcacagtggggaagggacaccagctttgcagccaggcgactctgagatctgccccttccttactgtgtgaccttgggtggtttacttaatgtctccaggcctctaattgcaggcgtgagccacttgcccagcccattttattattttgaaaacgttttcgggcaaggtgtggtagctcataccagtaatcccagcactgtgggaggccgaggtggacggatgacttgaggtcaggagttcgaaaccagcctgggcaacttgctgaaaccccgtgtctacaaaaacaaaaacaaaaaaattagtcagatgtggtggtgtgcacctgtaattccagctactagggaggttgaggcggggaggatcacttaagccatgattacatcatcaccgcacactagcctgggcgacagagtgagaccctgtctcaaaaaaaaaaaaagaaagaaaaaaattttccacctgtgtaattttatttgaagaaggttatatatggctgagtgcagtggcttatacctgtaataccagcactttgggaggctgaggcgggt

SEQ ID NO: 1562581 - DNA, 4001 bp, Homo sapiens
gccactgcactccagcctgggcgatagagcaagactccgtctcaaaataaataaataaataaataaataatgtggggaggaggccaggggcatggtgtctcacgcatgtaatcctagcactttgggaggccaaggctggtggatcacttgaggtcaggagttcgaaaccagcctggccaacatggcaaaatcctgtttctactaaaaatacaaaagaattggctgggcatggtggcaggtgcctgtaatcccagctactcgggagactgaggcaggagaatcgcgtgaacctggaaagcagaggttgccgtgagctgaaatcagaccactgcattccagcctgggtgacagagcgagactccatctcaaaaaaaaaaaaaaaaaaatagaaatgtggcaggaaagtgcacacaggagagcccacgccgggcacatcacttattgttgcgttttctgcattcccagctgcttagctcctatttagggtgtaactaggactttggtgctacctggtttcggaagacgcccgtcttccaggagacaactgagcggcgctttataccttccacggtgaagcacagccaagtttcgttccgatcgttggcttcccataggtttttaaattggaagtagaatgtgcctggatacattgccttcatcgggtttctgaaggcacaagagagaaaccccaatgcagagacccccgcaccggagtcctcagggctgatgcccactgaacacagctgcctggacgtccctgggctctgggcctcccccatccctccacagccctgagaatgtctgctgctttcccaggcaggaagacggggagagagaaagaggaggggacgctggcaggggcagcagggccggggtgacctctcctagctggaaccccagctctggggctaccaatggaacaccctcaacctcccagtttttctgctacttttttttttttttttttaaagacggcatctcgctctgtcccccaggctggagtttgcaatctcagctcactgcaacctccacccctcgggttcaagggattctcctgcctcagcctcccaagtagctgggattacagacgcccgccagcacccctggctaattttctgtattttcagtagagacgaggtttcaccatgttagtcaggctggtctcaaactcctgaccacaagtgacccgcccgcctcagcctcccaaagtgctaggattacaggcataagccaccgtgcctggcctaaaataagagcatttctcctgatcatcatattttttcctacactccatgttgcaggtgtcattctgaaaggtgaacggtgctcacagaggaggagcctgtgtctggggtcgtgtgcatcctactctgctcacagtggaggcatctttggaagaagtgacttattttctggtacagagaccattccctcccccacaccctctcctaagactttgtattgaaacaaagtaaatcttacagaaattgcaccaaagcgctgagaacaaaatgcctgattgctcaaatcatcctttggttcaattctcccagttccagagctcccaggaatagtgggaagcacacagaggaagcaccctcccagggcgggaagcaccagcccgggcatgattttcgggggagagtctcagcaggcggactgggctggggcaagtggggaaggtggcccattcagaagcagcagtcgtgggaccacacagcagggcaaggagcttggctgggagtgggggcagcgggggaaccaggggggagggagcccagaggtggggctggggcagggggaggccagggctgaggcccagcaggaccgcctggcaggaagtggcaggaggggcctggcggacaaagcgtgcagaggtacctgatctgtggattcatgttcagcctcttagatatgcttgtccctgtcccactcttttctgaagcgctgtggcttctcttcctgcttacagcgtccttgcagttgagcagccctctttaaagtgacctcccagggccttgtgaatcatggcccctccccattcctgctcaggcactggtgtgggaggccccggggtgcttcatgtttctctggctctggccctctttctggttttctccgggcccctcctactggcagaggaacctccgataaagacaggctgctctgtctttatctgtcctgggcaggacccaacggaactgcaaaaagaagagaaagagaaagagaaaggcattgcagcctgagcctgggacgcgggtccagacccagctgagagaggggcaggtgccccgttgcctggtggttgggcaggctggagccccctctccaccaccccctccccagccctaatgtgtgcccagagctttgagcagcaccaccctgttgagtgaggggaggttttgagaccccagtggggaaggaagtgtggactccgcacagcacaagcgaaggcttaggtgtgcctcgagttcccagctgtgtgctgagtccatcgcacgcatcccctcttccaacctcccagcttccagaaggtggggggcagttcagcccctcagagatgtgggcggaggattacctaggtgctgaggcaagagactgaaggcacaaactgtttcagtataataaagaatatacttacaataagaatagttataatacaaattagatacagagatgatcatggacattatcaatcattagtgtagatattattaatcattagcttttaatattactctttattgtattactaatataaccaagaaataaccggtgggtatagggtcaggtgctgaagggctgttgtgagaagtgaccgagaatgcaagaggtgagccctctgtcacacccgcataagggctactggagggctccttggtcaggcggtaacgccagtgcctaggaaggcatcgttacttagcggaccacgaaagggagtctcccttttcttggaggagtcagggaacgctcagctccaccagcttcttgtgggaggctggatagtatccaggcctgcctgcagccatccggaggcctaaacccctccctgtgatgctgtgcttcaatggtcacgctccttgtccactttcctcctgtactcctggtccctctttgaagttctcagaagatagcggtagaagaaatagtgaaagtcttaaagtctttgatctttctgataggtgcatagaagaaaacgctgacgtatactgccttccctctctgcttcggctacctataagggaagggccccctgtcctatgatcacgtgacttgctcgaccttatcaatcacttggacgactcaccctccttaccctgccccccttgtcttgtatgcaataaataacagtgcacgcaaccatttggggccactacccatctccgtgtcttgatggtagtggtcccccgggcccagctgttttcgctttatctctttgtcttgtgtctttactttttacgatttctcatctccacacacggggagaacacccactaagccccatagggccagaccctacatcagggactgcgatgtctgcgacatcaagcggtggaagcaagtgtctacaaacaggctcacggcccacagggacctctcaaggggttccgtgtggaccaagaaaatgtgaaacacatacacacacaactttctgattatttaagttcatctaagcatattttggaggaatgaatgtacattgtatccttgaaataatcttcctaaatagattcctttaaggggagtttgttcttgtgggggaaagaaagagagatgagactgttattgtgtctatgtagaaagaggaagacataagaaactccattgtgatctgtactaagaaaaactcttctgccttgagatgctgtgaatctgtaaccctagccccaaccctgtgctcgcagaaacatgtgctatattgactcaaggtttaatggatttagggctgtgcaggatgtgccttggtaaaaatgtgtttgcaggcaataagcttggtaaaa

SEQ ID NO: 1562582 - DNA, 4001 bp, Homo sapiens
taaatagaaaaaataaataaatgtggggaaaaaatacacagttgagagcccgccgccagacattttacttatgtgttttctgcattcccagctgcttacctcctgcctgtgattcgactgacgtttgggtagtaccgggcctcgaaagacccctgtgtcccaaaggagatttgagcggcccctctttattttcacttcatagcacagccaagtgtagctccgaccatagaggatgggttcgttttcaaagttgtcgtagaatgtgtctcgatacatccgctccatcggatttctgaaggcacaagagagaaaccggcccatgcagggagccctcctggagtcctcggggctcatgtccactgaacacagctcccgggacggccctgggcctcccccacccctccacagccctgagaatttctgctgccttcccaggcaggaagactgaggggagaggaagaggaggggatgctggcaggggggctggggtgatctctcccagctcgggcccaactctggcctttccaggggtatattccccaccctctcagtatttctgcccacccactccccaacccattaggaaaatgcaaaagagaataaaactcttcacccttaaaagatagcttttaacctttcagctcaattccttcctgatgtttcactctgcgtgttaacattattttaaaatcatggtagaaccgaattctgaggcccaggcctctcttctaagtgctgcgtgggggtgggctcatgtgaggctgccctaggcctgcagggaccattcccatcttacagaggaggggtcagaggcacagagaggtggggtaacctgcccaggccacagagctggggacagttggagcaggggcccctttccaggccagccctgtgcagcctctgcatcacgggccctgcaggagaaagctgttggggactgggctctcttttcactaaatttaaaataagagcatttctcctgatcatcgcgttctttctcacattccatgttactggtcatgttctaaaagatgaagagtgaccttggagtggaacctgtctggggacatctgctgactgtggagtcatccttggacgatgtgatttatcttgtgcttcagagaccattccctccccacaccctctcctaagactttgtatttaaacaaagtaaatcttacagaaagttcatcaaagcactgagaacaaaatgcctgattgccccagtcatcctttggttcaattctcccagttcctgagctcaggaatggtgggaagcacacagagggagcaccctctcagggcagggagcaccggcctggccatgactttcagggaagagtctcaggagggggcctggactgtggcaggtggggaaggtggcccattcagaagcagcagtggggcgaccacacagcagggcaaggagtctggctgggagtgggggcggcagggaagccagagggaaggaagtccagggctggggctggggcagggggaggccagggctgaggcccagcaggaccaccagaaggaaggggccggaggggccctgcggacatagtgggcagcggtacctgatctgtggattcatgttcagcctcttagatacgcttgtcccagtctccctctttttttgaagtgctgtggtttcacttcctgcttgcggctccttgcagttggacagccctccttaaagtgacctcccggccgggcacggtggctcacgcctgtaatcccagcactttgggaggccgaggcgggcggatcacgaggtcaggagttcgagaccagcctgaccaacatggagaaaccccgtctctactaaaaatacaaaaattagccaggtgtggtgacgtgcgcctgtaatcccagctactctggaggctgaggcaggagaatcacttgaacctgggaagcggaggttgcagtgagccaagttcctgccactgcactccagcctgggtgagagagcgaggcttcctctcaaaaaaaaaaaaaaaaaaagtgacctcccagggcctcgtagtcatggcccctcccccttcctgctcaggcgctggtgtaggaggccctgggacgctttatcttcctcagtctctcaccctctttctggttttctctggggccctccccctggcagagggacctctgataaagacaggccgctctgtgcggcaggacccaaggcaattgcaaagggaaagagaaagtcattgcagccagcgcccgggaggtgggtccacaccaggctgagccagcagagcacaagcccctcccctggtggtcccgcccagctggagccgccactccaccatcaagacagacaggctgatgcctctgcagggactcccggatcctgccctcggggatcatcccagagacggcccccacccagcggccatggggacagggagggagagtaaagggccaggcgtctgcctccccccaggccttcaccctcggtggccaccgtgggagggagggacagcaggtgggtgtgggcctcagatgtcccaccgggatgccatgcgcgcccccacactgagctctttccttcctgcttctccttcttccccatctcctgcccgaagatcctccgtgttgggctgaacttttgccctctcttgtccccatgttatggaagggcagcggctggtgtcccaggccagcctgtctggagcctccctgcgcgtctcacagctcccttcccatggtagcgtgttcccatggcgcggtgacctacaaattacacaagggatgcatttgcaaaggacactttatttcttgttaagggtgacagcctgcaaggtagccatccagcagcctgggaagagcagcctctggttaacaccagagacagacatttaggagcaggaggggtttgggcaggagctttatgctgaagaggttggctaaacatacatattcaacaggctacaggaggagctatgaatattcatgtaggtggttgcagtccatgcttattgaacaaacatgtgtggaacatatgatcccagccgggcatagtggctgatgcctgtaatcccagcacttggagaggctgagacaggcggatcacctgaggtcaggagttcgagaccagtctggccaacatggtgagaccccatctctactaaaactacaaaattaaccaggtgtggtgatgcatgccttttactcgggaggctgaagcagaagaatcgcttaaactcgggaggcggaggttgcagtgagtccagattgtgccattgcattccagcctggacaagaggagcaacactctgtctcaaaaaaaaaaaaaaaaaaaaaaaagatgatatttggaggcagagagatcccagaggtgcgtgtgcatagaggaaaggccacagaggacacggctggaagagactccctgccagccagaaggagcggcctcagaggaaacaaccccacccacccctcgaagttggacctgcagcttccagatctgtgagaaaataaatgcctgccatgtgggcacctggcctgggacatcttctatggaggccacagcatgaaagggtcatttttatggagaatctcattctctaaaacttacatctgctttgaaaatgtcaaatcaaatttaaagtgtttagaagagcctctaaatttcatatttcatttgcaaagaaagaattgtaatttgagacatacacggagtccggatggtgttcaccatgttgagagagcaaagagatggcaattatagaaggagaaatgttctcttgccctatgtaaagcccatgggcactaggaagggctgggagctgggaggttctattgctgagtcgctgcgtttggagcaaggagtccaagacttacagccatttatcgcagaagctatggataaagctggtttcagggtacaatgcacagtctcaggagtcaggcttgcagagaagtccatttcggaaacaatgttgtgtggcctgactgcttttcctccctggctcctggcctctgttttagctggg

SEQ ID NO: 1562583 - DNA, 4001 bp, Homo sapiens
atttctcccacccattctccaacgcattagtaaaatgcaaaagagaacaaagttcttggctggacattatggctcatgcctgtaatcccagcactttgggaggccgaggtaggcccatcacttgaggtcaggagtttgagaccagtctcaccaacatggtgaaacccagtctctactaaaaatataaaaattagccaagcgtggtagtgggtgcctgtaatcccagccactgtggaggctgaggcaggagaatcgcttgaacctgggaggcggaggttgtagtgagccgagatcgtgccactgcactccagcctgggctacaagagcgaaactccatctcaaaaaaaaaaaaaaaaaagagagagagaataaaactattcaccccaaaataatagattttaacctttcagccagttccttctgacatttcacctctgtatattactattgttaaatcatggtagaaccgaattctgaggcccaggccactcttctaagtgctgcgcggatgtgagctcatgtgaggctgccctaggcccgcacgggccattcccatcttacagaggaggtgccagaggcgcagagagatggggtaacctgcccaggccacagagctggggacggatggggctggggcctcttaccagaccagccctgtccagtctctgtgtcaccagccttgcaggagggagccattggggaccagactctcttcttactaaattttaaaataatagcatttctcctgatcattgagtttttttcccatatattccatgttttttgtttttgtttttttttcttttgagacgaaatttggctcttgttgcccaggctggagtgcgatggggcgatctcggctcactgcaacctccgcctcctgggttcaagcgattctcctgtctcagcctgtggagtagctggattataggcgcccgccaccacacccggctaattttgtatttttagtagagacagggtttatccatgttgatcaggatggtctcgaactcccgacctcaggcaatccacccacctcagcctaccaaagtgctgggatgacaggtgtgagccaccgcacccggccactatattccatgttactcgtgtcatttataaacagtgaatgctgatagtggaggaggagcgtgtgtttggggtcatctgcatcctcctctgcccacagtggagacatccttggaagatacgatttatcttgtgcttcagagaccattccctccccacaccctctcctaagacttgctatttaagcaaagtaaatgttacagaaaatccatcaaagcactgtgaacaaaattccacattgctctaatcatcctttggttcaattctcccagttccagagttcaggaatggcggaaagaacacagagggagcaccctcccagggccgggagcaccagccctgccatgactttcggtggcgggggagagtctcagcagggcacctgggctggggcaggtggggaagcggcctattcagaagcagcagtggggcaaccacagagcaggaaaaagagcctggctgggagtggcgggggcaggggagccagaggggagggagcccagggctggggctggggcagggggaggccagggctgacgcccagcagagccaccaggcaggaaggggcagcagaggggcccagcgggtagagcgggcagcggtacctgaagtgaggcttcatccttggccggctagtcccgactaagatctttgtctggagcaccagggtttcactttctgctccaggctccaggtttcaggacagccctccctaaagtgacctcccagggcctcgtagtcatggcccctcccccttcctgctcaggcgctggtgtaggaggccctgggacgctttatcttcctcagtctctcaccctctttctggttttctctggggccctccccctggcagagggacctctgataaagacaggccgctctgtgcggcaggacccaaggcaattgcaaagggaaagagaaagtcattgcagccagcgcccgcgaggtgggtccacaccaggctgagccagcagagcacaagcccctcccctggtggtcccgcccagctggagcctcctctccaccatcaagacagacaggctgatgcctccgcagggactcccggatcctgccctcggggatcatcccagagacggcccccacccagcggccatggggacagggagggagagtaaagggccaggtgtctgcctctccccaggccttcaccctcggaggccaccgtgggagggagggacagcaggtgggtgtgggcctcagatgtcccaccgggatgccatgcgcgcccccacactgagctctttccttcctgcttctccttcttccccatctcctgcccggagttcctccctggtgggctgagctctcgcctcctcttgtccccatgtcatggaagagcagtggctggtgtcccaggccagcctgtctggagcctccctgcgcgtctcacagctcccttcccctggtagcgtgttcccatggcgcggtgacctaaaaattacacaagggatgcatttggtttttttgtttgcttttgtttttttgtgtttttttgtttgtttgtttgttttgagacggagacttgctctgttacccaggctggagtacagtggcgtaatctcagctcaccgcaacctttgcctcccaggttcaaaagattctcctgcctcagcctcccatgtaactgcgattacaggcacccacccctacgcctaggctaatttttgtattcttagtagagacagtgtttctccatgttggtcaggcttacagccgcccaccactatgcctggctaatttttgtatttttagtagagacagggtttctccatgttggtcagctgatctcgaactcccgatctgaggagatccgcccgccttggcgtaccaaagtgccgggattacaggtgtgagccaccgcgcctggccacaatgtataaatttggaaaggagattttatttcttgttaagggtgacaggcagcaaggtagccatcccgcagcctgggaagagcagcctctgggaaacaccagagacagacatttagaagcaggaggggttggggcaggagctttatgctgaaggggttggctaaacatacatattcaacaggctataggaggagctatgaatattcatgtgggtggctgcactccatgcttattgaacaaacatgcgtgtaacatatgatcccaggcaggcacagtggctcacgcctgtaatcccagcattttgggaggccgaggcaggtggatcatctgaggtcagtgtcaggcctctgagccggagctaagccattgtgacccctgtgaactgcacatatacatccagatggcctgcagcagccaagaagtctggagcagccaaaaaaacacaaaagaagtgaaacagccagtttctcccttaactgattaaccaaccttaagacattccaccattaggacttgttcctgccctaccctaactgatcaatcgaccttatgacattcttcttctggacaatgggtctcatggtctcccaccatgcacctggtgaccccctcccctgctgacaacagatgaccaccttcgactgtaactttccaccacctacccaagtcctataaagctgcccctctcttatctcccttcgctgactctcttttcagactcagcccacttgcacccaagtgaataaatggcgttattgcttacacaaagcctgtttaggtggttttctatacagacacgcatgacagtgaggagttcgagaccaacctggccaacatggtgagacctggtctctactaaaactacaaaaattagccgggtgtggtggcacgtgcctgaaatcccagctactcgggaggctgaggcaggagaatcagttgaacccagaaggcagaggttgcagtgggccgagatcgcgccactgccctccagcctgggagacagagtgagactccatctcaaaa

SEQ ID NO: 1562584 - DNA, 4001 bp, Homo sapiens
tccgacgagaaaggatgggtctattataaaagttgtaggagaatgtgtctcgatacattcgctccactgtgtttctgaagacacaagagagaaaccagccaatgtagagagcactcctgggggccctccgggctgatgtccactaaacacagccccctggacggctctaggcctcccccatccctcccctcccctgagaatttcggcggagactgtagtgagccaagatcgcgccactacactccagcctgggcgacaagagcgaaattccgtctcaaaaaaaaagagagagagagacagaataaaactcttcaccccaaaataacagcttttaacctttcagctcagttccttcctgacatttcacctctgtatattattattgttaaatcatggtagaaccgaattctgaggcccaggccagtcttctaagtgctgcgcgggggtgagctcatgtgaggctgccctaggctggcaggggccattcccgtcttacagaggaggggccagacgcgcagagaggcggggtaacctgcccaggccacagagctggggacaaatggagtgggggcccctttccaggccagccctgtccagtctctgtatcactggccctgcaggaggcagccattggggaccgggctctcttcttactaaattttaaaataacaacattcctcctgatcattgagtttttttcccatatattccatgttttttcttttgtttttgtttttttttctttcaagacgaagttttgctcttgttgcccaggctggagtgcaatggggcgacctcagctcactgcaaactccgcctcctgggttcaatggattctcctgtctcagactcccaagtagctgcgattacaggcgcccgccaccacacccagctaattttgcatttttagtagagacagggtttatccatgctggtcaggctggtcttgaactcctgaccgcaggcgatccgcccacctcagcctcccaaagtgctgggatgacaggtgtgagccaccgcacccggccactatattccatgttactggtgtcatttataaacagtgaatgctgatagtggaggaggagcgtgtgtttggggtcatctgcatcctcctctgcccacagtggagacatccttggaagacatgatttatcctgtgcttcagagaccattccctccccacaccctctcctaagacttggtatttaagcaaagtaaatcttacagaaaatccatcaaagccctgtgaacaaaattccaccttgctctactcatcctttggttcaattctcccagttccagagttcaggaatggcgggaagcacacagagggagcaccctcccagggccgggagcaccaccccagccatgactttcaggggagagtctcagcaggggacctgggctgggacagatgggggaggcggcccattcagaagcagcagtggggcgacaacacagcagggcaaggagcctggctgggagtagggggtgcaggggagtcagaggggagggagcccagggctggggctggggcaggggaaggccagggctgacgcccagcagagccaccaggcaagaaggggcagcagaggggcccagtgggtagagcgggcagcggtacctgaagtgaggcttcatccttggccggctagtcccgactaagatctttgtctggagcaccagggtttcactttctgctccaagcttctggttttaggacagccctccctaaagtgacctcccagggcctcgtagtcatggcccctcccgcttcctgctcaggcgctggtgtaggaggccctgggacgctttatcttcctcagtctctcaccctctttctggttttctctggggccctccccctggcagagggacctctgataaagacaggccgctctgtgcggcaggacccaaggcaattgcaaagggaaagagaaagtcattgcagccagcgcccgggaggtgggtccacaccaggctgagccagcagagcacaagcccctcccctggtggtcccgcccagctggagcctcctctccaccatcaagacagacaggctgatgcctccgcagggactcccggatcctgccctcggggatcatcccagagacggcccccacccagcggccatggggacagggagggagagtaaatggccaggcgtctgcctccccccaggccgtcaccctcggaggccaccgtgggagggagggacagcaggtgggtgtgggcctcagatgtcccaccgggatgccatgcgcgcccccacactgagctctttccttcctgcttctccttcttccccatctcctgcccggagatcctccgtggtgggctgaacttttgccctctcttgtccccatgttatggaagggcagcggctggtgtcccaggccagcctgtctggagcctccctgcgcgtctcacagctcccttcccctggtagcgtgttcccatggcgtggtgacctacaaattacacaagggatgcatttgcaaatgacactttatttcttgttaagggtgacagcctgcaaggtagccatccagcagcctgggaagagcagcctctggttaacaccagagacagacatttagaagcaggaggggttggggcaggagctttatgctgaaggggttagctaaacatacatattgaacaggctacaggaggagctatgaatattcatgtgggtggctgcactccatgcttattgaacaaacatgcgtgtaacatatgatcccaggcgggcacagtggctcacacctgtaatcccagcattttgggaggccgaggcaggtggatcatctgaggtcagtgtcaggccgctgagccagagctaagccattgtgacccctgtgaactgcacatatacatccagatggcctgcagcagccaagaagtctggaacagccaaaaaaacacaaaagaagtgaaacagccagtttctcccttaactgattaaccaaccttaagacattccaccattaggacttgttcctgccctaccctaactgatcaatcgaccttatgacattcttcttctggacaatgggtctcatggtctcccaccatgcaccttgtgaccccctcccctgctgacaacagatgaccgcctttgactgtaactttccaccgcctacccaagtcctataaagctgcccctctcctatctcccttcgctgactctcttttcagactcagcccagttgcacccaagtgaataaatggcattattgcttacacaaagcctgtttaggtggtcttctatatggacatgtatgacagtcaggagttcgagaccaacctggccaacatggtgagacctcgtctctactaaaactaccaaagttggccggacgtggtgccatgtgcctgaaatcccagctacttgggaggctgaggcaggagaatcagttgaacccgggaggcagaggttgcactgggccgagatcgcaccactgccctccagcctgggagacagagtgagactccatctcaaaacaaaaaacaaacaaacaacaatctattaaaaaaaaaaaaaaaaaaaagcagctgtattatccgtcctcacattgcggtggagacaacatttaaatgtaccacaattaagcctgtatgtcaaaaggtcctttcaggacatgaaggcaccaaaatttgccaggtctgtaaaccattcagaactagtccatggtctgtggtcttctgatctggagaaagttacagaaatcagtctcttgctcagggaaagtaggaattagggctgtggagcaggggctctgttactccgtgtccgggcgctgggtgaggtgggattgttttcatctttatctggaggcagtgcttgtttagctgctagagcaaaagaaaaatcttgtggcaggcagaacagagttgactgtttaagtgtggggtgtgtgatctcacccttgcctggcacggcctgaggtcctggttgtgatttggtatctgattgccatgaagagtctgttctg

SEQ ID NO: 1562585 - DNA, 4001 bp, Homo sapiens
tttttgtttttgagagagagtcttgctctgttgcccaggctggagtgcagtggtccaatctcagctcactgcaagctccacctaccaggttcaagtgattctcccgggttcaagcaattctcctgcctcagcctcccaagtagctggaattacaagcgccctccttcatgcccggctaatttttgtatttttgtagagatggagttttaccatgttggccaggctggtcttgaactcctttgacctcaggtgatccacccacctcggcctcccaaagtgctgggattataggcgtgagccaccgcgccccgccaggattgtgacccatgcgctcacctcctgtctccccgagggcctgagctccttttctttggcctgtctgattgatggttgcccatctactttctattctgctttctggaaaacccctgagcatttcaagcctccaagtcctgagaatttctgcagctttcccaagcaggaagaccagggagaggagaagagaaggagatgctggcaggggcagcagggccggggtgacctctcccagctcagggccctagctctggtctttccagggatggatctcccatcctcccagtatttctgccacccatcctctaacccattaaaaataagaaaagtgaataaaattctccccttcaaaataagagctcttaatatttcagttcaattaattcctggcattttacctattcatgttattttattttatttttttagttttagtagataagggggtctccctgtgttgcccaggctggtttggaactcctggcctttagtgatgatcctcccctctcagcttcccaaagtgttgggattacaggcatgagccattttgcctggccaggcaggaaaatggcgtgaacccaggaggtggagcttgtagtgagccgagattgcgctccagcctgggcaacagactgagacaccccttctcaaaaaaacaaaacgaaacaaaaaatcagggtagcacttccatccccaggcccaggccactcttctaagtgctgagaggatctgagctcacgtgaggctgccctaggcctgcaggggccattctcatcttacagaggaggggccagaggtgcagagaggtggggtaacctgcccaggccatggagctgggccactttcctggccagccctgccagcctctgcatcacgggccctgcaggagggagcctttgggaaccaggctctcttcttcctaaattttaaaataaaagcatttctcctgatcattgagtttttccgtatattccgtgttactggtgtcattataaacggtgaatgtgaatactgatcatggaggaggagtgtgtgttcagggtcatctgcatcctcctctgcccacagtggagacatccttggaagagatgatttgccttgtgcttcagagatcattgcctccccacaccctctcctaagactttgtattgaaacaaagtaatcttacacaaagttcatcaaagcactgtgaacaaaattccagattgctcccatcatcctttagttcagttctcccagttccagagcccaggaatggcaggaagcacacagagagagcaccctcccaaggtggggagcactagcccagccatgactcttaggggagagtctcagcaggggtcttgggctggtgcaggccggggaggcggcccgttcagaagcagcagtggggtgaccacacagcagggcaaagagcctgggtgggagtggggatggcaggggagccagaggagaaggagcccagggctggggctggggcagcgggaggccagggctgaggcacagaagggctgccaggcaggaagtggcagcagagggcccagtggacagagtgggcggcagtacctgatctgtgcttctggccacagcttccttagcagacttgcccctgcttgtctgaggcactaagtttcacttttggcagctctcccaaaagtcacaaaaggtcagctctcccaaaagtcacaaaaagtcactgcttgatgagggtggctccaccctcttccttttgtgggactggagtgggagggccctggggtgcttcagatccctcaggctcctttctttctctatttcctcgggcttggcaggggaagtctgatggaggtggctcacctcccatcctcccacccccaattccctctccaggtacagccagactcaactccctccccaggtatagtttacaaaagaacaaaggccagatgcggtggctcacacctgtaatccgaacactttgggaggctgaggtgggcaaattacaaggtaaggagatgaagaccatcctggccaacatggtgaaaccccgtctctgctaaaatacaaaaaattagccaggtttggtggcctgcgcctgtagttccagctgcttgggaggctgaggcagggaaattgcttgaaccttggaggcagaggttgcagtgagccgacgtcgcaccactgcactccaccctggcaacagaacgagaccctgtctcaaaaaataaataaataaataaaaataaaaaagaaagaaaaaagaaaggaattgatggctggtcacggtgcctgttatcccagcactttgggaggctgaggcaggtggattgcctgaagtcaggagttcaaaatcaacctggccaaccgcactccagcctgggcaataagaacaaaactccgtctcaaaaactaaactaaactaaaataaatgaaaggaatagaagccacagaaaggagcagggatccagaccagggctgacaccatagaccagatgccactcccctggtggacagggcaggctgcagccccctccccaccaccccactgacctttggcattcagcctcctggcaggaccctgagcctgatgtgaaatgagcactggggtcaggctcaggactgcatctccagcggatccagtgcccattatctagcccagtccccagatagcactgggaggggagggcagtgatcctgacagtcagaggaggtcccaagcacagagaggctaagatactgtccccacgtcacacagcaaatcaacagcagagctggagtgctggccaggacttcctgtgtcccttctcccccacagctagctactttgaggttcttcattgctccatggaaaggagcaggagaggagacacgagggaggggacttactgctcctaaagggcctcccaggtcagagatgaaggacctggacttcacatttgcattctggaacccatgtcctcgtcttcatgcatatcaaccaacacccttcagatcataaacaccaaagagccaggccaggtgctgtggctcacgcctgtaatcccagcacttcgggaggctcaggcaggctgatgacctgaggtcaggagttcgagaccagcctgggcaacacggtgaaacctcgtctctactaaaaatacaaaaattagccaggcgtggtggcgggcatctgtaatcccagctactcaggagtctgaagcaggggaatcattcgaacctgggaggcagaggttgcagcgagccgagattgtgccactgcactctagcctggtcgacaagaacgggactctgtctaaaagaaaagaaaaagaaaaaccaaagaacccctaggaaagttgaatcccaagggcgaggactaggggcagtcactgcggagtctaggttccacaccaaggagtcccattgaaccttgcccagcttgtccctccatatcctcccgccctgcacaccctgacagccctctagaccctgcatggcccctggggtcacaggagcttgggtgagaatttagaaggttcctgggaatggcatcccctccaccctatctgtcctaaatgttggggctacagtccatggaagattccagaatgagcggggtcctgccaggagagacatcagatctgcacactgtagtgctggttaatcacagagctgagtctcccaggctgagaagcagggaggatggaaaggaaggcggaaccctttcc

SEQ ID NO: 1562586 - DNA, 4001 bp, Homo sapiens
caagcccagtccaattgtgcagcccagacagggagccctccctcccgcctcagggctctgagccaagctcaccagatgcagaggacagagactctcagcaaagcagctccctccatgtcgctgcagggcctcctccttgagcaggaaaagaggggttgagacagtgtgctcctcctgagaaatcaccattttcatttcattttttttttgaaatggagtctcgctctatcacccaggctggagtgcagtggggcgatctaggctcgctacaagctctgcctcccgggttcacgccattctcctgcctcagcctcccgagtagctgggactacaggtgcccgccacgacacccggctaatttttttgtatttttagtagagacagggtttcaccatgttagccaggatggtctcgatatcctgacctcgtgaccacctgtcttggcctcccaaagtgctgggattacaggcgtgagccaccgcgcccggcctttcgtttagtttttaataaacagttttgctctgtcacccaggctgcagggctttgacaccatcctagctcattgcagcctagatctgttgggctcaagtgatccgcctccttcaaccttctgagtagctgggactacaggtacacactaccatgctgggctaatttgttaatttttgatttcatagagacagcatctcctgtgtttcccaggctgtcttgaactcctggcctcaagtcatcctcccgcctctgcctcccacagcactggggttacaggcttcatcatctctttttggtgaagaacaaataagaccatgactcagatttcacagaaattacccccctgatttcatggacttttggcagctctatcaggttttttacaggggaaaatactcaggctgggaggggaggtgaatttcccagagtcacacagctcttggagggcagaggggaggccaacatctgcccttgtgactctaatattgaagcaaaaatgtttgattttaataatccaaaagtttccaggtttgattctccttctatgaacacagagatctaagctctcactcctgtagttatactcacaattccacagtgtggcttttgaatctcatgattgcaaagctggcatcatgccacaggcaccattctgcaacgcacccttctcactcccctgtctcagccacgtttcccattagggacacagcacagcctgtttcttctccatcaccccagaagtctgaacagagggacagaggtgagggccagagacgtggagtcctatgatctacctgctcagcctcctgacacgggaccctgggcaagtcattccgctcccagggcctcagtttccccacagggcctggcacaagttggtgctcagactcagggtgggtgagatgacctctgaactccttgtacctgaaaaaaaattctgttgcccccattgggcctcagcagcagcaccctggggccagccttggtgtggcctggccataagaacaggctgggatctgggtcacctcctctcctccaccttctttggttccttcaaatttcccaaagagatgggcacccccaacacaaaccttccttctgggttcactcagtcgtgtctcagcagtcaaaaccagggctgagcccagggagctttgtgaacccatctgagctgtttccccaaccctctatagtttaagagcccagcaggagaggggaagcaatcagactcaagcctgggtgcaaatccaggctttgccgctactttcctgtctatctgaaccagtcacctaacctctcccagcttatctacaaaagctgtgagaataagatggaggcaggtcaactgtccccaacttaccaaggaatcttcccctggcagagactgagcaagatccagctgttctgagctgtgtggatcccacctccagttatgcgtctgtataataaccagacaggtcctccagtccccaagatataccgaggaattcgaaagggaaagtgaaagtcacaacttcccagcagctcatgaccaagcacagcaaacacgctcccctccaccttcagtccagccccaccctccttgctgctgcccttagaggagcagcctgagaccagacatccagatccctctcatccaacccacctgcctcgcatcctcagggctgggggtctgctgtggtctcaaggagaaagacctgccactgacatactatgggaccctgcagattactccccatcctcccgtgcatccacattcccctgatgcctgccttactcctgcccgtgccatcggcataagcacagtctcccacacatgccttgtggatgcttattgtatatttattgtaatgccgttggggttattttggttatgtttttgagacagggtctcagtctgtcaccaagactgaattgcagtgccacagtcatcgcgcacagcagcttcaaacccctgggcttaagccatccccccacctcagcctcctgagtagctggttctacaggtatcagccaaccacccagctaatttttaaaaaaattatattagagatggtgcctcactatattgactgggctactcttgaactccaggcctcaagtgatcctcccaccttggcatgagccaccgcaccaggcctgctcttgttgaaggccatgccttgtggcttctagatatttgcttatatggggtcttctgccgggagcacctgcttccaccgcctggaaaaatcatgctcatcgttcagtgacaaaatcaggcattgcctcctttcagagatcccccagcatcctccccagcagaggccactgccccgtgttccactcccgaggcacacagggtggagggactagagaccactgctcagccacacttccatgactaggaagtcatgcaaccagattgctattggacttttgtgctttgccccaggcagaagggcctcaaaggcagctaaaccacagaagccaacctgacccttccatgggggcctatttcatcctgagcaaacatctctgggggcatcgtgtccacctcaccccacccatacacacacacacaccagcttatgaggcaggaagagaatggtgattacacagggactgcacaatacactttgcaatacattccatttgcaaatgcttctccatttgattgagttttataatcatcccctcaatgggccaggattatgatctgattttgcagatgaggaaactgaggcaagaagagaggacgttgctttcatccagcaactcagggaggaggcaagacttgtaaaccaaagagggtctgggacacgtctcagtcagtttagatgtttactctgccaaggttgaggatgcacccaggaaaaagtcacacaagtcacaggaggttctggggtccactcgtttttcacagagggttttgaggcctccagtatttaaatgtgtaaaatcaggcaggagtggaaggaggaaaggaaaaaagacaggataggtaatgaggtgagtggtcacattcttgtgaagctttgattagccctccttgaatccacaggttgtctatgaaaggagggggtagaggaacagtcaattattcattcgtctcatgcacagttcgtctacattttatataagataaaaatgaacatagagtagaggaagcaggcatatgtgcatttttctgagggtgggcagaagtcttgttatttatcatgtaccagtaaagataagttgctaatttgcattgtcacaatgaaattacacaaagtctgcctcagggtaaaaactgctgggacccacaaggagtttccttgtgagcaatttgtgaaggaggctacctggggaacatgttgccttttgtcttcgcaaatatctgcttagaagcaaaaacaaaggcaggttttggagtgactccgtttctaagcttaactgtttccagtgagttttggggtcccaagatttgattttcctttcacgttttctccttgttcttcaacaacttttttttttttttttttttt

SEQ ID NO: 1562587 - DNA, 4001 bp, Homo sapiens
tcatgtgattctcccgcctctgcctcccacagcactgaattacaggcctcagccgtggcactgcacccttctgaggaatcttcagtgaaaagccacggtcaagttcaaaccccatagcagggcacacaggccctctgatgctctggaccccaccttcctcaccgctccctgccaccacagtcaccttaggtccaggcacccactgacgccctgcttcggtgcctcctggagcccatctactcctcccactcccatccccagcctcaggccttcactcagctgctccctcgccctggaatgtcccccccactgtccccaccatgtgcaagtcacctgtcctcagagacccacccaaagctgcctggtccatgcggcggcccccaaccctccccaggctccctgagcactctgctttccagagggagctctacctgtatgtggctctttgggcctctgtctcccctttagactctgaacattcaatggggacactgttgtgttcccagctgcaccccctacgactgacctggatgccctccgccctccctggcacagcctggctgaaatcccaggtgcaggaggcattacttgaactaaaagcaaccagcctctggatgacatggcccagcttcagtttcactttcagttgagaaattgaatttaatttttctttctatcttgatgggcatctctttttggtgaagaacaaataagaccatgactcatatttcacagaaattacccccctgatttcatggacttttggcagctctatcaagttttttagaggggaaaaatcttaggctgggaggggaggtgacttgcccagagtcacacagctcttggagggcagaggggaggccaacatctgcccttgtgactctgatattgaagcaaaaatgggtgattttaataatccaacagtgtccaggtttgattctgcttctacaaacacagagacctaagctctcactcctgtagttatactcacaattccacagtgtggcttttgaatctcatgattgcaaagctggcatcatgccacaggtaccattctgcaatgcgaccttctcactcccctgtctcagccatgtttcccattagggacacagcacagcctgtttcttctctatcagctcagaggtctgaacagagggacagaggtgagggccagagacgtgaagtcctatgatctgcctgctcagcctcctgacacgggaccctggcaagtcattcccctcccagggcctcagtttccccacagggcctggcacaagtaggtgctcagactcagggtgagtgagacaacctctgagttccttgtgtctcaaaagaaatctgttgttcccattgggcttcagcagcagcaccctggggccagcctgggtgtggcccggccacaaggacatgccgggctccaggtcacctcccctcctccaccttctttgattccttcaaatttcccaaagagatgggcacccccaacacctacctttcttctggggtcagctggccgtgtctgagggtgtcagaaccagagctgagcccggggagctttgtgaacccatctaagctgttttccccacctctctctacagtttacccgcccagcaggagggagggagcaatcagactcaagcctgggtgcaaatcccggctctgccactgctttcctgtctgatctgaaccagctacctaacctctctgagcttatctacaaaagctgaatgatccttcccttatagagctattgcaagaataaggacatgggggtagatcacactatccccaacttaccaagggatcttcctctgacagagactgagcaagatccaactgttctgagctgtgtggatcccacgtccagctgtgcatctgtgtaataaccagacacgtcctccggcctcccagatataccctggaattcgaaagggaaagtgaaagtcacaacttcccagcagctcatgaccaagcacagtaaacacgctgctccccagcaccacctgcagtccaggcccagcctccttgctgctgcacttagaggagcagccgcagaccagacatccgggtccctctcatccaacccacctgcctcacatcctcaggattcaaggtctgctgtgtcagctgcccatgtctcaggcagtcagaaccagagttgagcctggggagttttttgaacccatctgagccgcttgccccccaacccccgccccgatctctgcagtttaagggcacagcaggtgggggagagaagtcagactcaagcctcagtgcaattccaggctctgcccctgttttactgtctgatctgaactagttacctaacctttctgagctcaagaaagacctgccactgactgaccgtggggctctccagattactccccgtccttccgttcccccacattcctcagatgcctgccttactcccacacatgccatcagcatcagcacagtcccccacacatgctgggtggatgcttattgcatatttattgtaatgcttctgaggttatgttttctgttatgtttttgatatagagtcttgctctgtagcccaggctggagagcagtggcacaatcatagctacttcaagtggcacaatcaagccatcctcccatctcagcttccgagtagctgggattacaggtgcctgccactacacccagctaattttttgtaattttagtagagatggggtttcaccatcttggccaggctggtcttgaactcctgacctcaagtgatccacctgccttggcctcccaaagtgctgggattacaggtgtgagccacggcgcccagcccattgtatccttcttgtgactttgtgtcttcatagcttagctcctactaataaatgagaacatacaatatttggttttccattcctgagttacttcactcagaataatggtgtccaacttcatccagattgttacggatgccattattcccttcctttttacagctgagtaatattccatggcatatacatatataggggtgtgtgtgtgtgtgtgtgtgtgtgtatatacacacacattttcttcatccacttgttggctgatgagcatttaggttggttccatattttttcggttgcaaattatgcagctataaacatgcatgtgcgagtatcttttttatataataacttttctcctctgggtagatacccggtagtgggattactggatcaaatggtattctacttttagttttttaaggagttgccatactgttttccatagtggttgtactagtttacattcccaccaccagtgtaaaagttttcccttgtcaccatattcacaccattttagctaggctggtcttgaactcctgacctcaagtgatccacctgctttggcctcccaaagtgctgggattacaggtgtgagccactgcacccttctattcttctttgatttttaaattatggccattcttgcaggagtaaggtggcaacttattgcagttttaatttgcatttctctgataattagtgacgttgagcacattttcatatttttttggccatttcattttgtatatcttcttttgagaattgtctattcatgtcctttgcccactttttgatgggattattttttttttcttgctgatttgtttgagttccttgtagaaactggatattagtcctttgtcaaatgcacagtttgcaaatattttctcccactttgagggttgtctgttttctctgctgattatttattttgctgtgcagaagctttttactttaattaggtcccatctctttatttttgttttcgttgcatttatttttgggttcttggtcctgaattctttgcctaagccaatgtctggaggagtttttccgatgttatcttctagaatttttatggtttcaggttttagatttaagtctttgatccatcttgagttgatttttgtatgaggatactgtttcattcttctacatgtggcttgccaattatcctggcaccatttg

SEQ ID NO: 1562588 - DNA, 4001 bp, Homo sapiens
gtccccaccatgtgcaagtcacctgtcctcagagacccacccaaagctgcctggtccatgcggcggcccccaaccctccccaggctccctgagcactctgctttccagagggagctctacctgtatgtggctctttgggcctctgtctcccctttagactctgaacattcaatggggacactgttgtgttcccagctgcaccccctacgactgacctggatgccctccgccctccctggcacagcctggctgaaatcccaggtgcaggaggcattacttgaactaaaagcaaccagcctctggatgacatggcccagcttcagtttcactttcagttgagaaattgaatttaatttttctttctatcttgatgggcatctctttttggtgaagaacaaataagaccatgactcatatttcacagaaattacccccctgatttcatggacttttggcagctctatcaagttttttagaggggaaaaatcttaggctgggaggggaggtgacttgcccagagtcacacagctcttggagggcagaggggaggccaacatctgcccttgtgactctgatattgaagcaaaaatgggtgattttaataatccaacagtgtccaggtttgattctgcttctacaaacacagagacctaagctctcactcctgtagttatactcacaattccacagtgtggcttttgaatctcatgattgcaaagctggcatcatgccacaggtaccattctgcaatgcgaccttctcactcccctgtctcagccatgtttcccattagggacacagcacagcctgtttcttctctatcagctcagaggtctgaacagagggacagaggtgagggccagagacgtgaagtcctatgatctgcctgctcagcctcctgacacgggaccctggcaagtcattcccctcccagggcctcagtttccccacagggcctggcacaagtaggtgctcagactcagggtgagtgagacaacctctgagttccttgtgtctcaaaagaaatctgttgttcccattgggcttcagcagcagcaccctggggccagcctgggtgtggcccggccacaaggacatgccgggctccaggtcacctcccctcctccaccttctttgattccttcaaatttcccaaagagatgggcacccccaacacctacctttcttctggggtcagctggccgtgtctgagggtgtcagaaccagagctgagcccggggagctttgtgaacccatctaagctgttttccccacctctctctacagtttacccgcccagcaggagggagggagcaatcagactcaagcctgggtgcaaatcccggctctgccactgctttcctgtctgatctgaaccagctacctaacctctctgagcttatctacaaaagctgaatgatccttcccttatagagctattgcaagaataaggacatgggggtagatcacactatccccaacttaccaagggatcttcctctgacagagactgagcaagatccaactgttctgagctgtgtggatcccacgtccagctgtgcatctgtgtaataaccagacacgtcctccggcctcccagatataccctggaattcgaaagggaaagtgaaagtcacaacttcccagcagctcatgaccaagcacagtaaacacgctgctccccagcaccacctgcagtccaggcccagcctccttgctgctgcacttagaggagcagccgcagaccagacatccgggtccctctcatccaacccacctgcctcacatcctcaggattcaaggtctgctgtgtcagctgcccatgtctcaggcagtcagaaccagagttgagcctggggagttttttgaacccatctgagccgcttgccccccaacccccgccccgatctctgcagtttaagggcacagcaggtgggggagagaagtcagactcaagcctcagtgcaattccaggctctgcccctgttttactgtctgatctgaactagttacctaacctttctgagctcaagaaagacctgccactgactgaccgtggggctctccagattactccccgtccttccgttcccccacattcctcagatgcctgccttactcccacacatgccatcagcatcagcacagtcccccacacatgctgggtggatgcttattgcatatttattgtaatgcttctgaggttatgttttctgttatgtttttgatatagagtcttgctctgtagcccaggctggagagcagtggcacaatcatagctacttcaagtggcacaatcaagccatcctcccatctcagcttccgagtagctgggattacaggtgcctgccactacacccagctaattttttgtaattttagtagagatggggtttcaccatcttggccaggctggtcttgaactcctgacctcaagtgatccacctgccttggcctcccaaagtgctgggattacaggtgtgagccacggcgcccagcccattgtatccttcttgtgactttgtgtcttcatagcttagctcctactaataaatgagaacatacaatatttggttttccattcctgagttacttcactcagaataatggtgtccaacttcatccagattgttacggatgccattattcccttcctttttacagctgagtaatattccatggcatatacatatataggggtgtgtgtgtgtgtgtgtgtgtgtgtatatacacacacattttcttcatccacttgttggctgatgagcatttaggttggttccatattttttcggttgcaaattatgcagctataaacatgcatgtgcgagtatcttttttatataataacttttctcctctgggtagatacccggtagtgggattactggatcaaatggtattctacttttagttttttaaggagttgccatactgttttccatagtggttgtactagtttacattcccaccaccagtgtaaaagttttcccttgtcaccatattcacaccattttagctaggctggtcttgaactcctgacctcaagtgatccacctgctttggcctcccaaagtgctgggattacaggtgtgagccactgcacccttctattcttctttgatttttaaattatggccattcttgcaggagtaaggtggcaacttattgcagttttaatttgcatttctctgataattagtgacgttgagcacattttcatatttttttggccatttcattttgtatatcttcttttgagaattgtctattcatgtcctttgcccactttttgatgggattattttttttttcttgctgatttgtttgagttccttgtagaaactggatattagtcctttgtcaaatgcacagtttgcaaatattttctcccactttgagggttgtctgttttctctgctgattatttattttgctgtgcagaagctttttactttaattaggtcccatctctttatttttgttttcgttgcatttatttttgggttcttggtcctgaattctttgcctaagccaatgtctggaggagtttttccgatgttatcttctagaatttttatggtttcaggttttagatttaagtctttgatccatcttgagttgatttttgtatgaggatactgtttcattcttctacatgtggcttgccaattatcctggcaccatttgttgaatagggtgtcctttccgcactatacgtttttctttgctttgtcaaagactagttagctgaaagtatttggctttatttctgggttctctattctgttcccttgatctatgtgcctatttttataccggtaccattctgccattatgtaccttttttttttttttttttttttttttttgagatggagtctctctctgtcacccaagctggagtgcagtggtgcgatcttggctcgctgcaagctccacctcctgggttcatgctattctcctgcctcagcctcccgagtagctgggactacaggcgc

SEQ ID NO: 1562589 - DNA, 4001 bp, Homo sapiens
ccatgaagtgaaatctgaatagcaggtgtgagtgtgcgtgtgtgtgtgtgtgtgtgtgtgtgaatttgtgagtgtgtgtgtggcatatgcaaggtttgccttttatttggttgccagcatgtcaaatgtaattgcacctgagtttatagcaaatgttccgtcatctgagctctgaggagccaggcccaccctctcacctgctgggcatcacctggatctgagaagcccatgcaggcctccagctctccccactttcctgcagcccctgcaggcatctgggctgcaatgtcaactttcccctgactcgcactgccccgcctcccacctcaccccagatggggtcagcagcctgctgggggtcagcagggtagggcatcctaaccccctaaggcaggtgaaaaaccctgaggctcagagaggggaagtgacttccccagtgtcacacacctcttggagggcagggggaaggtcaacacctgacctcctgactctgacattgaagcaagaaagtataatgttaataatccaaaatcttccaggtttgtttctgcttctacaaacacagagggctaagctcacgctcccacagttatgctcacgcttccacagtttgacttttaatctcatgattgtcaagctgggatcatgtggcagacaccattctgcaacatgccgttctcactgcccctgtctgggccatctttcccactagggaacagcacagcttctttcttctctatcacccagaggcctgaaaaggaaccaggtgagtgtcagggacatggagtcctgtgatctacctgctcaacttcctgacatgggaccctcagcgagtcactcatctcccatggcctcagtttacccacagggcctggctcaagtaggtgctcagagtcagggtgggtgaaacaacctctgggttccttgttatctcttttcgctctctctctcttttttttttttgagacagagtctcactctgtcaggagtgcactcaggctggagtgactggtgcgatctcgactcactgcaaccttcatcacctgggttcaagtgattctcatgcctcagcctcccaagtagctgggattactggcttgtgccaccacgcccagctaattttttgtatttttagtagaggcagggtttctccatattggccaggcaggtctcgaactcctaacctcaagtgatctacccgtctcggcctctcaaagtgctgggattacaggcatgagccaccgcgcccagccaggttccttgtatctcaaaggaaatcctctgtccccatcgggcctcagcagcagcaccctggggccagcctcagggtggccaggccacaagaaggacaggccaggctctggatcacctcctgtcctccaccttctctggttcctccaaatattctaaaggaatggacagtcccaacatctgccttccttctggggtcaccgggccatgtctcacgcaggctggaactagagctgagccctaggaagctttgtgaacccagctgagctgattctgcctctgtctctactgtttgggggcccagagagagggagggagaagtccagctaaaacctgggtgcaaattcaggctctgccatggaccgagatgtgacctcagtcagttacctaacctctctgagctcatctacaaaaggtgaatgacccttctcttatagagctgctgtgaggatggggagatggggaaggtcagaccacccctaacttaccaaggaagcttctcttgaaagagtgtgagcaagatccagctgttctgagctgtgtggatcccacctccagccgtgcatctgcataataaccagacacgttctccaggctctgagatataccctggaacccaaaagggaaagtgaaagtcacaacttggcagcagctcctgatcaaacatgcaaaacaggatgcttcccagccccacccttggcccagtcccatccttggtccagcagcacccttggtcccaccctcctgctgatccaagagcagccccagacgtccttcttggccaacccacctgcctcccatacttagggttgggggtttgctgtgtcttcaggaagaaagacctaccactgaaagactatgagaccctccagattactccccacccccaataacaccacactccccagatgcccacctcactccctccatgccatcagcattaccacagtccatcacacatgccgggtggacgcttattgcatattgattgtattgctgttggggttattttgttgttttgttttgttttgtttttgagatggggtctggctctgtcacccaggctggagtgcggtggcacaataatagctcactgtagcctcaaattccagggttcaaatgaacctcctgagtagctgggactacaagcatgagccactcggcctggctacttttaaaaaatgattttgaaggggtgaaatcttactatttttaccaggttggtttcaaactctggcctcaaatgatcctcctgcctcagcatgagccaccgttccagacctgctcttgtcgaacgccatacctgtgtggcttctggacacttccttatgtgggttcttctgccaggagcacctgctaccttcacctggaaaagtcacgctcctctatcagaatgcaaatctagcatttcctcccctgagaagccccctagcatcctcttcagcagagcccactgccccatgttccactcctgtggcacttttgttaggctgttgtaattggccacagtcccaggttgactgaacaaagtggggggcggatgtgggagtaaaagacaaagacaaaagagtatattaggaagaaggggtcagggggttccttgcttctagtgaacaagggctctgagcttttcaagctctctgagtttattaggtaaaagagatgacgagaaaaaggtgggggggtgattgtcaggtaattgtcagtcagccgtttggttcacagcaggcttgcaagactgcatccttcaaataataggtgctagatatcccaacagataacttcaaggagcccagcaccagggagtgatggccctcaggaaaccttctggcggcgggtgcagtgtgagtttacccacatcccgcattcatgataaacagtttgctgtttgatcatatagcctccagtgaaatgctgagttggtcacaatccctttggccttttcagctcccaacaggcagttaagtagacattagcagctgggaggagaaaagagagcagaaagcctgtcactgcaacagctcctggcccacctaagttcagccccagagccattctaagacccccctaactgatgaagttggtggtatagtttgtggccagcacatcctgaagaaagagaaactagggcacaggtggaaattccctaaaggggcacatgcccagtaacatgaaactgtgccctcaggtcaccccaagttcattataccatcattataataaaatgtggttttattatacaaaagccccagagtgggcttttctgtgaaaattatgggtaaaaacatgcattgcctaattttagttatataaccataaactgccaatcagatgacatcgtcctttactcagacacagccccaacctcaacttctctccacaaaccgcacagaagcaccttaaactctatatagaggggctgacttcacttcacagaaattagcccactgtccctctgagagtgtctaactgtgcttcaatacactttgctttgagcttgcattttggagttagcctgcaattgtttgctcactctcagaagaactgagattactggtccagaactccagctctgttaatctcctcagttaaaggatccatcccagcgcagaattcctggtaatatcttagtgctgtgacctggatgatttacgttcagcatggcttttaatatgtgcttgattttagcttggggaactgaaacatattttgctaaaatgcttcctttcgctttgggtcaagatgtttgt

SEQ ID NO: 1562590 - DNA, 4001 bp, Homo sapiens
atcaacggactgcacaacatcacagaaactgttgaatctgtgtttacaccttccctagcagaggtctatcagccatttccattcctgcttctgagtggaatcaatcagaaacatttccagcccccacttctgttaaccgaccagaataagctgtcaatcctagggtcgagcccacagtcaattgcatactccttaaaagtctataccaacaaacctgttacaacctccgaggacctgtcgtctatctgtaatactatctgactaagcactcctttgtcttctatcttcattgaggatgaggccattacttggattttttcctaatatttccaaggcttgcaatcacacttgtaccctattttccacccaattatgtgtcagcttagtcactgacaacaaaaaatgcaaacatacctgatattctaattcttctttgtgttttattcatttcccaagccccccaacagaaccactatgtggaaagaagccagctattctggatctacccttttccccagacccacaccagaatatcattttaaacataacaacttctggtttcagtctcacaacttcgggcaaaatcattgcaaaaaactgcagctccccataatttcacaatattggttgggatcccatcactccttcctctaattgggcttttgattcctctttcattctgtcaagtactgcctgtgttcccccattacatgaactagccttgacttccacttctgagggtattaaagcagacttacacagcatggaaaaaccctactttagtatcactgttgatatttgtcttaacatgacaaatcacatttttgtatagaaacaaggcatatctctgcttgtctgctaattaaacggggatttggccctagtttacatcatccccaaactcactcttatcgatagcattcccctccctatacacgctcaatctggtaaaactgaaagaggagttttaacagcactgactataattggcgttctggctggtattggcacgggaactggaggacctccttaactccatttttactgcccagaaactcttcttaaaaattactcaacaaattattaatctaactaaccaggtcaataccctttcagaacaaattgcttcattagcaagcatagtcttatgaaattgatgagcttttaatttgctcacagccaatcaagggggagcttgtgcaacacttgataaacattgctgttttcatcaaccaatcaggtaaagtgcaaaccaacttaaaaaaattacagacagggccaacaagttaatggaaaacagagtttcaggaggctttgactggtggaaatttaacaactggtcctggttttcctggttagccccctttcttggtcctaaaacagctttatacaacttatagctttcaaacgatgctcatttgatttacaaggttgttttgtttcttcccacctagaatccataaaactccaaatgattctacacaaggttaccgcgaggtctcaaccatgtctgatatctacgtgggccccttggatggccaccacttttctctgcccaacctaccagctacaagagagcaaaaaagagaacccaattattaccactgcctcttgtcagcaggaagtagccagattaattgtcaccgatctacccaaaaatttggctttttttctctaaagggggaaatattaggtagttaaatagacattagcagctaggagtgggtaagaaaagagagtagaaaggctgacagtgaaacagcccctggcccacctaagtttagccccagaaccgtcctaatgccatcctaatggatggagtttttggtaaagtctgtggccagcacatcccaaagaaagagaaagtaaggcacaggtggaagtctcctaaaggggcacatgcccagtaacacaaaaacatgccctcaggtcaccccaagttcattataccatcattataataaaatttacatgtggttgtaccctcctttccccagagtgggcttttctgtataaatgatgggtaaaaccatgccagtttaattttagttatataaccataaactgccaatcaaatgacatcatcctgttactcagacacaacccaaaccttgactcctccccacaaaccccataaaagcaccttaaaccctgtaaagaggggcttatttcacttcgcagaaatcattccgctctccctctgagagtatattactgtgcttcaatacactttgccttgagcttgcattttggtgttagtctgcaattcttcgctcactatcagaggaactgagattgctggtccagagctccagctctgttaatccccacctctgttaagaatccatcccagtgcaggattattggtaacacttagagggaaggggcctaagcccactgctcagccacagtcccgtggctaagaaggcgtgctgtcggattgctggcggacttttctgctttaccccaggcagaagggttttgagaggggctgaaccctgaccaacatgaccctttcactgggaactgtttcatcctgggcaaatgtccctgcagcctcgtggccaccaccccatacacctgccagattttcagggaggaacaggagggtgattacacaagaactgtacgatacactttgaaatatacccacttctctatttaattggaatttgataaccatctcttaaatgggccaggagtatgatctgagtttacaggtgaggaaactgaggcaaggcatgaggctgtggctttcaaccagcaactcggggaggagccaagatttgtaaaccaagatgcgtctgagacagatctcaatccgtttagtggtttattttgtcatggttgaggatgcccacaggaaaaaaaaaagagacacaagtcacagtcggatctgtggcccacaagttttcaaaagagggttttaagggcttcaatatttcaaaggtaaagagtgggaaggaggaggagggatgaaaaaaaaagacaggacaggtagtgagaagagttgtcacattcttgtgaggctttgattagcacttcctgaatctatgtgctgcatgtaaaaggcatggatagaagaacagtaattatgcattcatctcatgctcagtaaatgtgtattttacagaagataaaaataaacaggcagggcttggtggctcatgcctgtaatcccagcactttgggaggcctaggcacttggatcacctggagtcaggaggtcgtgaccaacctggccaacatggcaaaacctcgggtctactaaaaatacaaaaagtagctgggcatggtggtgcacgcctgtagtttcagctactcaggaggctgaggcaggagaatcgcttgaatccaggaggtggaggttgcagtgagccgggatcatgccactgcaatccagcctgggctagagagggagactccatctcaaaacaaaacaaaacaacaacaataaaatgaacatagattagaggaagcagtcacatatgcatttgtgttgaagtgagcagcagggtaatttctagtcttggttttgtcatgtacctgtcaaggtaagttactaatttgcattgtcatggtaaaattccacaggctctgttttaagggaaaagatgttggggctcacaaggaattttcttgtgggaaatccatgaggaagaccacctggggaatatgttgccttctgtcttggcagatacctgtttagggacaaaaagaagggcagttttttgactgattcaatttccctgcttaacggttttctttggcatagagagtttggggccctgatattttattttcctttgacattatctctcccttttacaaaatctttttgagaaagcattggagatgcaaatgagtctctggtcatgagtttcatctgattcctgtcagatgaagttgtctagtttcagtctgtagggtgttcagggaagcacggttttaatttctggtgattccgagtgagaaaaatgagagaaagaagacaagaatga

SEQ ID NO: 1562591 - DNA, 4001 bp, Homo sapiens
gagaggggaaaatcttaggctgggaggggaggtgacttgcccagagtcgcacagctcttggagagcagacgggaagccaacatctgcccttgtgactctgctattgaagaaaaacgggtgattttagtaatccaacagtgtccaggtttgattctgcttctacaaacacagagatctaagctctcactcctgtagttacactcacaattccacaggtggcttttgaatctcatgattacaaagctggcgtcatgccacaggcaccattctgcaatgcgaccttctcactcccctgtctcagccatgtttcctattgcgggatctggccagcagcccccagtgcaacggggctctctctttgctcctaggcggatcggcaggttgagaaataatagacacacacaagatagtgaaagctgggtccaggggggtcaccgccttctggtcaacaatgcactggatataccagcatttattattcagtttagtgagggcgggggtaggttagtgagggatttagggtcatttgattacgaggtgggatggtcacatggggatgaagtaattctttaacataacattcgtatgtagaagtacagtgcatttgtatgtagaagtacagtatacagagataagaatttacaatatagtgtgtgcgtcagtaatttctaacagagccttaaaacagaaacacaatctttccataacctatgattagcaagatattaatcagcagtaacaattgcaacaaaagctggttactgacaatccatggaaacaggacgtgaagctagataaccggttagactagaaattctcagaagggagtatacctgaaccctaaagatgcctagaagagccacggcaagatgatagcatttatagccctagcttgtccatatggacaggcgcccccctgcatccattcataggctctctgcagggggaagcacatcacgtgctgttggttcgttctggcagtccaacctggcattgtctttacacaatcctgcatgcaattttgtatttacaataatcaggagcatttcatcttttattccgtagcaatagtttcagggggtctccctacagtttcccattagggacacagcacagcctgtttcttctccatcaccccagaggtctgaacagagggacagaggtgagggccacagacatggagtcctatgatctacctgctcagcctcctgacactggaccctgggcaagtcactcccctcccagggcctcagtttccccacagggcctggcacaagtaggtgctcagactcagggtgggtgagatgacctctaggttccttgtatctcaaaagaaatctcttgcctcatcaggcctcagcagccgcaccccggggccagcctggttgtggccagaccataaggacagaccgggctccaggtcacctccccacctccaccttctttgattccttcaaatttcccaaagagatgggcacccccaacacaaaccttccttctggggtcacctggccatgtctcagcagtctaaaacagagctgagcccagagagctttgtgaacccatctgagctatttccccacctctctctacggtttaagggcccagcaggagggagggagcaatcagactcaagcctgggtgcaaatcccggctctaccactgctttcctgtctgatctgaacgagttacctaacctctccgagcttatctacaaaagctgaatgatccttccctcatagagctattgcgagaataaggagatggagggaggtcacaccatccccaacttaccaagggatcttcctctgacagagactgagcaagatccagctggtctgagctgtgtggatctcacctccagctgtgcacctatataataaccagacacgtcctccagcccccaagatatacccaggaattcgaaaggtaaaatgaaagtcacaacttcccagcagctcacaatcaagcacagcaaacacgctgctccccagcacctcctgcagtccagccccaccctccttgctgctgcgcttagaggagcagcctgagaccagacctccaggtctctttcatccaacccacctgcctggcatcctcggggttgggggtctgctatagtcttcaggaagaaagacctgccactgacatactgtgggacccttcagattactccccgtcctcccgtgcttccacattcccctgatgcctgccttactcctgcccataccatcagcatttgcacagtctcctacacatgccaagtggatccttattgtatatttattgtaaggccattggggttattttggttttgttctggagacagggtctcactctgtagccaaggctgaagtgcaccgccacagtcatagtgcactgcagtttcaaacccctgggctcaagccatcctcccacctgagcctcctgagtagctgtttctacaggcatcagccaaccacccagctaatttttaaaaaagttatattagagatggtgtctcactatattgactgggctactcttgaactccaggcctcaagtgatcctcccaccttggcatgagccaccgcaccaggcctgctcttgttgaaggccatggcttgtggcttctagatatttgcttatgtggggtcttctgccgggatcccctgcttccaccacctggaaaaatcatgctcatcgttcagtgacaaaatcaggcattgcctcctgtcagagatcccccagcatcctcccaagcagaggccactgccccgtgttccactcccgaggcacacagggtggagggactagagaccactgctcagccacacttctatggctaagaagtcatgcaaccagattgctattggacttttgtgctttgccccaggcagaagggcctcaaagacagctgaacctcagaagccaacctgacccttccatgggggcctatttcatcctgagcaaacatcgctgggggcatcgtggccacctccccccacccatacgcacacacaccagcttttgagacaggaacagaaaggtgattacacagggactgcacaatacactttgcaatacattccatttgcaaatgcttctccatttgattgaattttataatcatcccctcaatgggccaggattatgatctaagttttcaaatgaggaaactgaggcaaggggcgaggaagttgctttcatccagcaactcagggaggagccaagacttgtcaaccaaagagggtctgggacacgtctcagtcagtttagaggtttactctgccaaggttgaggatgcacccaggaaaaagacacgcaagtcacaggaagatctggggcccactcattattcccagagggttttgagggcttcaacatttaaatgtgtaaaatcaggcaggcgtggaaggagggaaggaaaaaagacaggataggtaatgagctgagtggtcacatttttgtgaggctttgatcggccctccctgaatccataggttccatgtgaaagggggttagaggaacagtccattattcattcttcttgtgcacagttaatctacattttctataagataaaaataaacagaaagtagaggaagtaggcatatgtgcatttgtctgagtgtgggcagaagggtcacttccactcttgtcattgttaggtaccagtcaagataagttgccagtttgcattgtcacagtgaaattatacaaagtctgtctcagggtgaaaatttggggacctacaaggattttctttgtgaggaatttgtgaggcaggccaactggggtatatgttgccttccatctttgcaaatatctgtttagaaacaaaaacaaaggcaggttctggagtgactctgtttccaggcttaactggttccactggtatagtgaatttggggccctgagatttgattttcctttcacattttctctttgtttttcaatatcttttggagaaaacagtgtagaagcaaaagaatctccagtcacggggttggtctgaattc

SEQ ID NO: 1562592 - DNA, 4001 bp, Homo sapiens
tgcactcactctccaagcccacgtgtgatccaatttttctggcatactagggttagaaccctggagtacagaaattagaccctctgctttgtccttccgataagctcactggggctcgggagctgcaaacactcaaccctagatggggctgctgtggggtcggagcccacgctccccaagacctgccggtccgcatgctccccctaggggtttgagccgcagggcaccgaagaagtgagccacaccccgttttatactgtgcaagggggataagggaacttttcccatttcgttaagtcacaaaagtcttctgagaatcatccaacaacacaatgataggcaccaagacaatcggggccatgttaattgataacatttttaacttgggagcaagtgaacgctcattctgtccagtgcctatcatctatagccctgagagaggcacagtccagtccctgctgaatgacacctgcctgatgacaaggctcgtgggcgggatggtggttggttttacccaggcaggcaacacagcagagtccaccttgttcagacactctctctcacattgcagcttcttttgttgctcaaaaatcactttaaatgtattttcaatataatttgacaaaaagatagtcaaatttgacaaaaaatataatttgacaaaaatcacccctagttctcctgcaacataactattgatttcattctctacttcccgttatttttcaaatccgtattatttttcgcatggcttttatacttataatggtgtgtcctgtttttatttattattattatttattattattattatttttgagacggtctcactgtcacccaggctggaatgcagtggtgcgatctcggctcactgcaacctgcgcctcctgggttcaagtgattctcctgtctcagcctcccgagttgttgcaattataggtgcgcaccaccatgcctggataagttttctatttgtagtagagatgggggtttcaccatgttggccaggctggtctcaaactcccaacctcaggtgatacatctgccttggcctcccaaagtgctgggattacaggcatgagccgctgtgcctggccacgtgccctgtttttaaaatgtaatgttatacaagtattttccatcttgctatacagttgttataactattatttttgatgactctatgctatttccttaagagaagatgtattgtcatgtttatagaaacactcccttatcatggcactttggcgtcttttttttttttttttttttttttgagacggggtctctgtctgttgtccaggctgcagtgcaatggcgcgatctcccagttcaagcaattctcctgcctcaccctcccgagtaacgggactacaggtgtgcactaccagcctggctaattttttgtatttttaatagagacagggtttcaccatgttggccaggctggtcttgaactcctggcctcaagtgatctgcccatgttggcctcccaaagtgttgggattacaggcatgagccactgcgcccaaccgtgctttggggtcataacagttttgatatccagatgagttctttgataatgtcgccaccttgtcctgcctgctgcctctactttaaccagaaatggaaccagtgattgaccccttccccgctgccacactgcttcaagcaggggcttaaagagctgcttatgtttttagttaaactttacatttttagttaaactttacaaaggaagttatttgatgtagtattttcaaacctgagcaattgagagggtctcatgatatctccctcattaaaaccaaggatctgctatatctccacccagcaatagcatatggtgggtataaaaaatagtgtaacgtattttttctatttctgggacaatttgtacaacgtgagaattgcttgttttctgaaagcttaaaagaacttaccaggtaacaccttggaaccgggaacttgcaaatttccttgtttgccacatggcatgctttagattttttaaaatttaagcttataatatgattaataaatatgactcccttctccatgcctgaaacctgtctctcccagtcctcacctatttttttttcttttcttttctttctttttttttttttttgcgatggagcttctctctgctgcccaggctggagtgcagtggtgcagtctcagtcactgcaacctccacttcccaggttcaactgactcttctgcctcagccttctgagtagctgggattacaggtgcctgccaccatgcctggctaatttttgtatttttagtagagacagggtttcaccatgatggccaggctggtctcaaactcctgacctcaggtgatccgcccgccttggcctctcaaaatgctgggattacaggcgtgagccactgcgctcagctgctatggcttttggaaggatgatttagggtatctttcttttttttttttctttcatttggagatggtctcattttggcacctgggctggagtgcagtgacacaatctcggctcactgcagtaacctcccgggctcaagtgatcctcctgtcttagccccccaagtggcggggactacaggtgtgcaccaccacacccagctaatatatatatatatatatattttttttttttttgtagagatggagattcaccatgttgcccaggctaatctctaactcctgagctcaaacaatccaccctccttggcctcccaaagtgctaggattacaggtgtgagccactgcacctggccttcttgggatgtctcttaacatgagaagtacatgtgcctgacactcagcatcccacctctagaaatacacccaccacggacacaacacaacggcacaacacaacacaacagacaaacgtgtatggatgttcatccagttatttgaagttgtataaagaaatggaaacaatttgaaaaatccatgccggggactgtttacatgaaaatagagcaatacaaaataaaggtttatggatgtgaaaaggaacgaggcaaatctatgtacaactgacctagaaagaggtccaggatatattaagtaaaagaaaagaggttgaagaatatgttctttatattcttttcttattttttttaagtactatatatgtgatgtaggagtaggggaatattctcgaaggagatacaccaaatgtgaacaggcttagctcagggagggagatttagggctagggtgacaaaatacttttgcacttttcactcatctatattattgagctttgttaccaaagtaacttgttagttttataataaaagccaatagaagccaggcacggtggctcacgcctgtaatcccagcactttgggaagctgaggcaggtggatcacctgagatcaggagttcgagaccagcctggccaacaagtctctactaaaaatacaaaaattagccaggcgtggtggtgggcacctgtaatcccagctactcaggaggctgaggcaggagaatctcttgaacccgggaggcggaggttgcagtgagctgagattgcaccactgcacttcagcctgggtgacagagcgagactctgtctcaacaacaacaaaaagccaatagaataaaaagattttagtaatgagatttattattcattattttatcataaaatctcccacttgtacagtaatgcatttggtgcagggaatgctgccaagtacatggtaagacaaaatctgacaaattaatactgttaaatgttaatattgttttctttttttgttggttctatgtaagtttttctaacttgttattttggccttttgtgtcctatttatttcaggttatctcttggatgtagaaaattactcagatctgattttgacccaatttgatacttttcttaatgttattcatattcatattaattattttttgttataattattcaactttgatttgtcccattattttaggcattctgctttttatttctttgctctcttcctatgctcta

SEQ ID NO: 1562593 - DNA, 4001 bp, Homo sapiens
ttgaacctttgggttgttttcagttattttaaaattttgtatttataatttttggttaaaatccttatatagacgtctgtctacatgtttggttatttctttggggtagtctatgaaaaagaatgaatgcttcaaagataaaaaccttctcccctctttggtatgtgaagctaggtttggtttagggggcttggcacctttaagagtttactttcaccagacatacatctacctgctttacacagtgacccagtgagatcggtgctaagatgatgcccattttacagaggtgcaaactgagacatagggaggccagtgtcacacagtaagcaggaaagcctgtgcaattccagccacgcagagtctggagtagttggtcccaaacagggcgtgtttgctcctcagggacactgctaatatctggaaacatttttgatggtctcagctggagagggtactgctgttggtatgtagagggcagaggccagggatgctgccaagcaccctacgatgcagaggacagcccccacaaccagggatcacctggttgaacatgacaaggttgctgggggtaagagactctggtctggaaccccattttttaccagcgtccgccaatacctctctcatttttttacattagtcctatgggatgcagggcaaaggtaacagcaggaaactcatctaagcaggtcccattccatcccctctgacctgctcttggtggttgcgagaggatttgcttgtgagaggtttattggaagaggatttgagaacttactttcatttgaaagcttacaggatatttatgacagtctttccttacctgccttcccccacaaaaccaacttctgcagatacacaatctaagtaagaaaaatctgcttactttgaaaacacagcttcaagataacctccctagatttttttttttttttttgagaccgggtctcactctgttgcccaggctggagtgcagtggtgcgatcactgctcactgcattcttgacttcctgggttcaagtgatccttccacctcagcaccctcccaagtagctgggactacaggtgtgcaccatcacgcccagctattttttgattttttgtagagacggggtctcactatgttgcccatgctggtctcaaactcttgggctcaagcaatccgcttgccttagcctcccaaaatgctgggattacaggcatgagccactgcgcctggcctagtcgccctaatatttatcacaaactccctcaccctcttccccaaacaacttcacataaatctacaatctagaaaactctgtaggttggctttgcagtttctagacaactcacccagcaccttttttcttgtgagatgacacccctaaaccactcctctactgaatttctagggaaacgcctgtggctgatgtaatcatctgctttctaagggccaggtcccctctgcctaagccctcggatccccagcagtggagggacaaatgcaacttggctagtcacatcgcatgctttagcatgtttcaatttaaccctgaaatggctgtaagggagggaaacctaccaggattaacacaggagaagttaatcctcagactctcctcaagctctggctggcatttgaaccccgctgctttcacagcagctcttttccctgagtcaggtgcctaaagccaaccccttgggggctctgtccttcagggaccagagcggcagccccctcctcccccgacttctgcccgccgtctcaccttctctccacggagctctcctttgtggccttgggtcccgagggagaggaagatcctgaacctctgtccttgcctctccgaggtcccctggtctggcagggggctgtgagtgtctgggctggagaaagacggataggaagagtagggtggcctttgaacaggaattgattgcaaaactggtttcggttaagtgctgcaggagagaaaaagcaaagctctagggctcttccaggaaatcatgggctccagctgtcactttcagtttcctttttgccagtttctctaattggatgaacaaggaggtgaaagagcagaatccaagtcaggaggcctgagtctctcgtctctgtcctggctgtgttataggatggacctatatggggtatgaaaatagctcctgtggcttagagctatggtgaggagcccatgagcaagcgatggggcgcctgttgaatagtggattcacagtagctgtcatcactgattgttctgaaactgctttcctccacagcatcttacgtgacgctgatgtgggtaacaaccctatgaggtgcacagcattaaagggctaataactctgaatgcagaatcctctgaaaatggaaactttattttattattattattattattgttttttgagatgaagtctcgctctgttgcccaggctggagtgcaatggcacgatctcggctcactgcaacctccgcctcctacgttcaagctattcccctgtctcagcctccctagtagctgagattacaggcacctgccaccacgcccggctgatttttgtatttttagtagagatggggttttgccatgttggccaggctggtctcaaactgctgacctcaaatgatccatccatctaggcctcccaaagtgctgggattacaggcgtgagccaccgcacctggcctcagaatgaaaacttaaaaaaaaatgataatttattcatttagtggcaaaacctgacctgatctggcatgaattcacctgtggtttttatgtctcctgcttaatttgaatatttacagtcactgcagaaatattaatatgtttgactgaggagggctgctgcgggtgcgtgggttacatagtacacgatacctgcaccccattacctttctaaaaatcccccaaatcaggaactctgacatgcatctggcctcaaggattggagatataggattgtgatactctgtctcccactttaaggaagaggaaacccaggcttctagaagttgtgggttgtttgtgattacacagctaagaaccagtcctaggctctgtgtctacaagaatgagcccacagtgaggttacgggctgagatctgtgtctctctagcatttgtgtcaaattgtgatcagaagccatgtggtttgtttgtatttatatgcccagaagtccccagtcaccacccctagctgagaccacattggaggctgttgctttgcagaaggtgcggcccacctagccagtcctggctttgctgtgatagaggccacctcctgtccctgggccctacgagcaggaatgaggggttaagggctgctgagttgggtcttgtaggggcctttccaaccgtggcatcccggattccacaacccacccctgctcctggcctcccacacttggggaacacgctaaacacagcctgaccttgaggaggacttggctgcctggctggggccgctgagccatcccaggcctgcctgttgttttccctggcaacggacccagatgttgtggtcactgctcggtcctgggagtctcaggggccagaccggccattggatgggggcagtgtttaccaccagggctcttgtgaaacaatcgccccaagagatgccatgtgagaaaaatgttctgtagccaaatgcaggaagtgctgcttatgtaaggggacagaaaacatccaccctatagctcagatgaacaaaagtagggagtcgcttaatttcctagagtccacttcccttccctcaagggacccaagacctgctgaaaagaaacaaacttgcctgaaggccccttagtctcttgtgatttaaaacacactctcggaccgggcgcggtggctcacgcctgtaatgccagcactttgggaggctgaggcaggtggatcgcttgaggtcaggagtttgaggccagcctgaccaacatggtgaaaccctgtctctactaaaaatacaaaaattagctatgtgtggtggcgggcacctgtaatcccagctactcgg

SEQ ID NO: 1562594 - DNA, 4001 bp, Homo sapiens
aggctgggcgcggtggctcacgcctgtaatcccagcacttcaggaggccgaggcgggtggatcacttgaggccaggagtttgagaccagagtgactgacatggtgaaacctcgtctctactaaaaatataaaaattacttgagtgtagtggtggatgcctgtaatcctggcgactcaggaggctgaggcagaattgctcaaacccaggaggcagaggttgcagtgagctgagatcgcaccactgcactccagcctgggcgacagagcaaggctctgtctcaaaaaaattaaaattaaaacgttaaaaaaaaaaaaaagaacattaaggccagcatggtggctcatgcctgtaatcctagcactctgggaggccaaggcaggaggaggcaggaggactgcttgagcccaggaatttgacaccagcacgggcaacatagcaagaccctgtctctacaaaaattaattaattaattaattaataataacaattagctgggcgtggtggtacagccctgtggtgtcagcctcatcaggaggctgggaaggaaggatggcttgggctgggtaggtcaaggctgcagtgagctaggatcaaggcactacacttcagcctgggtgacggggtgagaccctgtctctaaaaaaataaataaataaaaatgtgaaaatcaagagaacagtaaagaaacgggcactggagaattcctggagcctttctcttaactttcccacatccatcagacatcacctccaataaactgtttccttcctcacctaggctggaaaaaatatgggctcccctgtaccatcaagacttaaaaccaacagaaacacctattttgtaacactcgggaactttctatgccagcatatcgaggttcaataacagctgttcccttcgggaagtgacagtgggaaccagacaacactcgtgtcacaggaggggcggggagagcccacgctgacgcgacagccctttgcactctccaagtccctctccgacccgacgtgtcaccttagccccctgcgtcaccccaacgcctccagccagctgcgcaaagctgtaaaagttccagggagagaacagcctctggagacaaaaaaaaaaaggaaacctccatctccaaagagaaccgaggagagggaggaggctgtggtgagcctccctggccaaagcgacaaaagctggaagccaaagcgtagactactcggcaactttatcagaagagaaactgaggcaggcaccgcaaggcccgaggagccaagccggctccaacaggcggggtcgagctccagggtggcgctgggggagccgcgctttccccgcatccggcgccagcagccggggtttccgagccgggagctccctcctcgcagcgcccccgaggatgcccccgcccccgcctccgctcagagccgccggtgctcgccccccgccccaagagctcgccggggggtgtgcccgcgccgccgcccccgggaacgctccccggctcgcgtgaggacccccgcgctgcggcctcccgcccgggcctctcagctgcccggccccgcccgccccggcccggccaggctgccgcggccccacagtgcgacgtgtcacaggccgcgccggccccgcctcccaagccacgggcactggcgcccgcggggcctcccgccggttcccgcagggatgccaggcaggcccgcactcgcccgcggccgctaccttgttagtgggcaccgagcggaggcgcttgaagatggtcaagatgtcctgcttgctggggtcccccatcgtcagctgtgagccgcggcgcagctggcccagccaaccggtaagagtcgacgaaaagcggctaccgcctcagcaggagcgacgaggccgcgggggcggggctgcgcgtaacggtcaggctccgccccaatccccgcccacgaccgggcccgtccaccgccggggcgcaggcgccgctcgctttccctccccgccctcgcttcagccgcgccgctggcccgaccccaggcgctgcacgcgcgtgcgcaggaggctcgcgcgccatttgcggcgcggctccacgcccttagcgctgggcgaagccgggcccgggtgtggctgcctgccacgcgcgctgccataggatccaccaacgtttcgcctggtcgatcgccatttcgcctaacgggctgcttccatggaaaggtcagaggcaggggaaggggcgcacgcgccctccttcggcacgagacggacggagggcccgtgccttgacgccggaccttagctggtggccttccctttttttttttttttttttgagacggagcctcgctctgtcccccaggctggagtgtaatggcgcgattgcggctccttgcaacctccctggttcaagcgattctcctgcctcagcctcccgagtaggtgggattacaggcgtacatcaccacgcccggctaatttttgtatttttagtagagaccagggtttcaccatgttgcccaggctggtctcgaactcctgacttcaggtgatccacccacttcggccttccaaattgctgggattacagacgtgagccgccgcgcccgactctttttaattcttgccctcagctcacgccaggccctgggtggaaagctttctttgcccggaaactggctttctgaaaccaagggcttttgtgtcacgttcatggagagatggcagtgcgggttgaggcagaagtgctcagtcagaactgatgagtccagatgagaagcttgacttttaaccccggccctcggggctgcaccctaccctctgggaaacaattccagccagaagagtttacactcagcagaaggtgcctctgtcaccacaatgggtgtggagccactggaaagaggttgggtgatagtgaggaaggacagcaggttttggcatcaaaggcactaccttggcctcaatcccagttcagccagctgcttcctagctctgtggccttggtcaagacacttaccttctctaaagcatggtttatttgcagtctcaggggctcatgcctgtgatcccagcactttgggaggctgaggcgggaggatcacttgagctcaggagttcaagaccagactggataatatggtgaaaccccgtctctataaaaaaatgcaaaaattagccgggcatgctggcatgggcctgtagtcctagctacttgggaggctgaggtgggaggatcgctttagtccaggaggtcgaggctgcagtgagccaagatcgcaccactgcactccagcatgggcgacagaccaagaccctgtctcaaaaagtaaaataaaataaaccatggtttattcatctgtacaaagaaattaaagaatcagtgctgagtagcacaggtgagcagcttcctagggatatcctgaagagcctttggtggaggctttctactgttagaagtcaggaaatgtacactccacctatctgcttggagaccctcggtggcagttgggagcttgcagacaatgtaacttataaacccaaagctgcaacttttccaagaaagggaaattgattatcttccagaaaagtacattacttttgcaggtagctctgatggtttaaaagttcttcctgtattgagtcgaagtataacacctgtgctttgtgtccaccgggtactagtttggccttatgcagaataccgggcatgtttatgagcagttttatccttcctgatgggaatgggaatgatggtcccatttactacttggagctgaaatcttactaagttatattatcagagtagtgcagtctagcccattctccaccatagagattgaggagagggaaacaaaagcagtaaattatagacagtatctacacgaataggggaggaaggggtaggaggtaccatttatacactatggttgcttaagtgttcttcatagaacttagcatctaatactataacatataatattctatctatatgttatctggctctaattgaatacaaaaatatatatttctggcc

SEQ ID NO: 1562595 - DNA, 4001 bp, Homo sapiens
catggtgaaaccccacttctactaaaaatacaaaaattagctgggtgtggtggtgggcgcctgtaatcctagctactctggatgctgaggcacgagaagcacttgaaccaaggaggcagaggttgcagtgagctgagatcgtgccattgcactccagcctgggcgacaagagcgaaaactgcgtcacacacacacacacacacacacacacacacacacaaagtttcaatgacccaatgatgttatccaagtaaattggcccaccccgtcaggcactccatggacttttccacccgtacctcacaagcgaagtatccctagccagtaggtgccattctcttccccatccacctcccatccaccttccagctcaatggccacctcctccaggaagcccttcctaagctcccacaaacccttggattctctctacacagaagccagactctgggcccctgagggcagggaccaggcagctggctgtccacaagaatcagctgggctcaggcccacatcccatgtccctcttcgccctacccccaactctggcgttggtttggggaatggttagtcagtgaatcgaatgaggagtccacaaacatgatcctaaagctgccaacagagaggccaaccaaaggacatcgacttctgaaacggctgagtcttaagcattgagttctcagctggacaaatgccaacactgcatttcacaggcaagcgagggacggcacagagctctctggaatctacacagcctctgtcacaaaaccctgaagtcggtggccaaggtgctgtccccatcccgccaaacaatcccaccctccttcccgggtggactctgcggttccttctccggggccttcacactcctcccaaggcagcggagaaatttccaagtcagggtgtggcagagcccgagggattctcaggagcccccccaccccccacaggattgagggaaagtgaaaggcagggcctccctgccttcctgacgacctccgaggctgctagcggattggtttaaactttgggcttttaggccgggcgcggtgtctcacgactgtaatcccagcactttgggaggcccaggaagacggatcacctgaggtcaggtggtcgagaccagcctggacaacatggtgaaaccctgtctgtactaaaaatacaaaaaattagctggcatggtgtcagtccctgtaatcccagctactcgggaggctgaggcacaagaatcgcttgaacccaggaggcggaggttgcagtgagcagagatgcaacactgcaatccagcctggggacagagcaagactcggtgtcaaaaaaaaaaaaaaaagtttctgcttttaactcccggggggttccaccgctgtgtgttgaaccggccagccccccaccccctgagtttgaatcagcgcagcacctgccccggcctccgttttctcatctatgaaacgggaatgacctcacccaccttgtaggtttggggtgtgtgggggcgggggaggtgcctcccccaggcgctgacccgacctaacctgagaccccaggacggaagcaaaaaaggaacatttgagctgacaccgtccggccagaccagaccaaaacgcaggctgagagaggcgagggcggggaaggcggtgcggggtgagaaggaacaggacaggggaaaaagcagaggaggggagtgtgggggggcgggaaagaaaggaggtgaagggagagggagtctagaacccacaggggacccggaggctgcgcgccggccggagggtctccccccggccgcacgtggcgtcgcgcccgcctgggcgtccctacccggccagcggccccttgtccccgtacacgccctgggagcccccgcggcgcacccccccaccccgagcacggcctcctccctgcgcgctccctcccgccgccgcccgccttacctggccacggaccccgccggcccccacctgcgtgccgggtctgccgctcacctggcccctccccggacgtggctcccgggcaggccccgcccccccgcccctccgcccagccccgcccctccgcccctgctacccggcgggagccatttcccaggtgcacgagctgaccctgggtccacctgtgtgtcggggggacagggcggggtcgggcggagcacacgcgctcaggagcccctcgcacatcgcaccctgggcaccccgattcccggctgggccgcgtccccgtcccgcacggcacccatgcctggggcgggcactttcttgctgatccatttccccatttcttattttatttattcattattttactttatgtatgtatgtatttatttatttattttgagacggagtctcgcgctgtcgcccaggctggagtgcagtggcgcgatctcggcttactgcagcttcaacctcccgagttcaagcgatcctcccacctcagccttcatagtagatgggattacagacgtgcgccgccaagcccggctaagttttgtatttttagtggagaccgggtttcaccatgttggccaggctggtctcgaactcccaacctcaaacgatcctcccgcctccacctcccaaagtgttgaaattacaggcgtgagccactgcgccgggccccatttttaattttacttttttgagacaggggtctcgctctgttcaggctggagtgcagtgtcttgaacttggttcactgcagcctctacctcctggattcaggcgatcctccggcctcagcttcccgagtagctgggaccgcaggtgtgcaccaccatacccagctaatttttgtagtttttgtagagacaggagtcttgccatgttgtccaggctggtctggaactcctgggctcaagtgatccaccctcctcagcctctcaaagtgttgggattacgtgcctgagctactgcacctggcccctttcgttaggggtgtacaaagcgtggcagaactgggagaattggagggacttgagaggaaattttccctagggtttgttgaaggatttgtatctgaggaaagcagcttagatacaacaaaatatatcaggcccagagaaacagtagtataggacttcagtccaggtccccctgcagtgcttggggggccatagttttttgtttgtttgtttgttttttgtttttgtttttagagtcttgctttgttacccaggctgagagtgcaatggcgcgatctcagctcactgcaacctccacctcctgggttcaggcaattctcctgcctcagcctcccaagtagctgggattacaggggcctgccaccatgtccagctaattttttgtatttttggtagagacggggtttcaccatgtttgccaggctagtcttgaactcctgacctcaagtgatccactcacctcggcctcccaaagtgctgggattacaggcatgagctaccgcacccggccgtgggggccatggtttaaaggcattttgttcctgactcactgcctcacccattatctgcatgttcctgcaacttgtgatacagagaaaaatgtgtagccaatcaacaacttattatttttatttttattttagattcaaggggtacatgtgcaggtttgttaggggatatattgggtgacactgaggtttggttttctgttgatctccttacccaggtagtgagcacagtacccaataggaagtttttcagcccttgccctactccccccacccttctggagtccccaatgtcttttgttcccatctttatatctgtgggtacccaaggtttagctcccccttagaagtgagacatgtcatatttggttttctgtttctgcatgaattcacttaggataatggcttccagctgcatctatgttgctgcaaaggacaagatttcattctttttcatgactgcatagtattccatgttggaaatgtaccacattttctttatccaatccactattgatgggcacctcagttgaccccatatctaacctatagtgaatagtgctgctatgcacata

SEQ ID NO: 1562596 - DNA, 4001 bp, Homo sapiens
cagaaggccaaggcaggctctcggacaccgccctcgtaggtcgttccctttccacaccgcaagagaccggagcagccgcctcgggacatacgcatggtctcaggtctgggacacaggaggcgctcatgagccatggagccacagcctctgagccaccgagggtgaccagtggccccacacctctaagtcacaaagcttgcccggaggtgcccagcatgagcccggcacctcccaggcctaccaagaccagctctctgtgcactgtgtctcctgactacaccttgggcccctgcaacgtggccagcatctcctggcaccccctcacccactatgttcttggcaagcagctgaactgcaaggcctccagggccctggcccgtgacagggccggagcacccagctgccctgctggcatacccattgtctgcagtgaagatgaccagcgtctcttcaagcagccccaggtcccctatggctgtcatcagggtccccacagctgcatccagctccatcagggagtccccaaatggcccgcggcctgaacgctctgcaaagctctgcccactgaactgagggtagtgggtgtgctgggggcaaagactggagttagcactgggtaggggtcacgggcagccagggggttgggccaagatcacttacgtgagaggcatagtacaggaagaaggggcgatcctggcgctgggcgtcggccatgaggtcatgggcgaaagccatgtagcgggcctctagtccgggcagccaggggggctgcgcctccacggacaggttggccaacagtgggatggggaccaggccctggtcacagccaccgtcgcaaggagtggccggcgggaagcaggtcaggttctggcaggggccctgaggcgggcagctgccgtgagggctgggctggcaggtggggctgcgggagcatcaagggctgggggactttgggaggtgggagggtggctgagggcccgggtggttcctacctggtcgtgggagtacgggatgcctagaaatcgatggaagccctgatgggggggcaggaaggccccctcaggccccaccccaaggtgccacttgccggccattcctgtgaggtagcctcgggcagccaggacttcggccacggtcacctcctccaggggcaggcccccccgggagctgggcaccaggacgccagggtacatgcccatccgaaccgggagccggccggtcaggagggcggccctgcgggacaagtcacagagtccctgagacagacagaaatgtggccttccctagagagagagacagacgtttttcccgcccccctgcaatccattgggaggaaagggatggagggtcggggcggggaagaggcgcggccccctctttacctagagggtgtgcacagagacacaggcacgtagaagtctgtgaaccgcagccctcccgccgccagctggtccaggttgggagtggtagagctggggtgcccatagcagcccaggtccccatagccgaggtcgtcggcaaagatcagcacgatgttgggcggacgggcaacggccaggccagcagccagggccaggaggagggaccgcggtgcccccatggacatgggaccgaggggtctgtcccaagagagggagggctacttggctccagcaggctctttccgataccgcagacccaggcgccgcccttccctgagaccccggacccaaatactccccgaccctgacggccgcctcctgaagctccagagggccggggcccgacagtaccgggagaccgcgggctgggacggaactcctccaggaccagggcaccttcagattctcgagcggagatctgatcctcctcgcctagcggtccgggctcagggtcgggggcgtaagtcacttggcgctgaccagcggagtcgggccggggggaaggcgctagagggagcccaggaggagccggtaccgggctgcgggcgcttccgcctcggccccgccccgtgacctgtgacccttgcggggcggggccgggggcggggccgggggcggggccgggggcgggccggggcgaggggcgttgctgcgcgtgctcgctccgaggccgccgtgtgcgcctgaggctgttggctgcggtcttgaaacgggctctgggagcttcctctgcgcggtcggccctggctgaggcgtcccgggctgcgcgcggggctcggcgctgcgcagtgtccggtgtcctctcggtccggagcttctccagaggaggagcggctcgtgcgcccccagacctccggtactgggagactcgggccctcctgtaagagacctgagcgcggagcgttatgggcacccggtgaatgagcaaatggcagggaaaaccgtgcagccccatggactgcgggctcttccttcacgactagcaaaagctttgacaccctttctcctgcgtacgcgtgtctgtgtgcgtgtaagctgtggctgggtgcggggggctgtgtacgtgtctgtgtgtggtgtgtgtggagtgtttgaggcaggtgtgtggtgtttcaggtgtgtgtgcatgtgtggtgtttgaggtgtgtgtgtgtgtttttgtagtgtttgagggatatgtgtgtgtggtgtttgaggtgggtgtgtggtgtttgaggggtgtgtgtgtgtggttgaggggtgtgtttggtgtttgaggggtgtgtgtggttgaggtgtatggtggttgaggtgtgtgtagtgtttgaggcacgtatgtgtgtggtgttgggtgtgtgtggtgttagaggtgtggcgtatgtgtgtttgcggtggttgaggtgtgtgtgtgtgtctggtgtttagggtgtgtctgttgtgtgcgtgtggtggtggaggcgtggtgtggtgtggaatgtgtgtctggggtccagtctggcctgttgcagggttacgctgctggggaaaaactcatctgaggacaacgtgattgggtcctcgctccctcgttgggcagccttggacttaacctttttgatcttgaaggaaaacacaatatgtcacctccaaatatatttccttgacacggttcaagacagttactcagaaggactggaaatagaagaatagctgaaaagctgtcttttgtgggggagatttgcatctgtggagagaatctacactgatgcggccaggcctcctctgaggccctccttgcctgatctgggaagagtaacagtctgacgcctttaaaggcctgaagggaacattcaccatctgttctctctcagggctgctacctgtgaggtttcatctgtagaacaaggccacctttgctagccaggcctcctctgctctccctcctgtaaccggtcttgccactggtcacctgattttccaccataaactgtggccatactttgagcccatgttctttctgtaacctcaagatggtatataagcttccgaaccccattgggaggttggggtcatcactctggttctccctgtgtgcatgaataaatctgtatgccttttttcttactaacctggcttttgtcagttgattttctgtgaactcagaatgcagaaaagtttttctctaggctcctacagttttggtgcagtcggtaggataactaaagtcactctcctgggagcctccgtcaggggaacccaggagccgacaagctggcagaaagaagggtaagaaggtcttagcagccaggctcccggcctctctggaatcttgtcaagccgacggtaaaaatgtctgtttaccttgttttcctcttcaaagttttaatgagagaaatgtatttatgtgattagttttgtattcatattgtttgattgctttttttccccagaaatagtcgtctttcattcttgtctttctgtgtttttctgtcataaagagggtagaacacaggcctaaaacccctgtaaaccccgtcttggggccgtcctgcaggctagtcagttttgcagctctgatcggatgcgtctagttagacagactttgctgtgggtccctgaact

SEQ ID NO: 1562597 - DNA, 4001 bp, Homo sapiens
ggggatcctgctgctcctgcaccttctgtccttactcaggacagcctcatgctcccccaggccagactcctggggtgaaggagcacagggaactcaccctgaatccctgtgtagcacaaacagaaggaggggtgctaccctaccctcacagagccacagagatgcagagggccccgggactggggggagactacagggccacctctggagggagtgccagagcaaacatgggagccaagcagcccagatgtggtgggtggggagactcaaatttagcaggattgagggtcagaacttgttctcccaggaggaaccttggtcagaaggtccttgtgtttatgctgaaaagcctgacagggcagctcagccaagagctgggcaggggctggcttggctgtgctcaactaccctctcagctgggacttgagtcccttagcgaatgttctgtgcccagtcctctgctgggcgctggtggaccccagaatgggggtagggtggggacaggggacagctgggagcagacattgcggataggatggggcaagactgggggaaatgccttcccagacacgctgcggctcacactgtcgcctgatctaaggcctggatcacctgcttaggagctgaccggccactggcatggcacaccgggcaagagagcgctgactgcccccctgcattcagcaccatcccagctccaatagagtgagtacaagataggtaacacctgccttgtttggaccagacctctaaacaccgcccagatcccagagtaaaggcagataaggcagtagttaagaagtaggaagaagtaaaggcagctaccccagagaagctaaggtcgggagaggtggaggctcccactgcacccccctggcccataccataggggaggtttcccccacagcagcctgggtactcacctgaggttattagacagcagcattaagagcctactctaaaaaatacccacggggcacctttcttttccttatttctaaatatgcctggatgtagggaaagggagctgaagtcctttagttccattttaagtatgttacattacacatagctaagaaacggtgaaatattgtaagcagccaatatttaattatttaaaaattaaaataggctggagctctcaggccacctgcccagggcgactccccagcaaaccgagcagtctccctcagagtggagatgacatgtctccgcaccggcaccgagggggcgcagggcggcgtggggagggggacccaggccgggggtccgggtggcgcgccctctctcacccccgaggcggcaggagcagcgcggcgcgaggacacctccgggccgtcggtgcccctgagcttcccggcggcgcgctgccccaggaaagttcccggcctgccgcccctcgggctgttggaaagtttcggcggctgcagggccctggcagctaggcgccaagcgtcgcgcggggcgggcacggctgcggggtcgggccgcgctcggctggagtgctcagtgcaagacgcccggacgggtagggtagggccccaaggccacgcacaaagagacccgcccccgccggcccggggtctcggacgccgcagagcgcgcggacaagacgcgggtggggcggagattggctccgacgtccggcccagaccctcgcccggatctcgactccagggataggaccctgtccggaccgctgcccggaatgcgtcccatatctgcagccccgcccccagtcccggctccgacccgaggccccagccccgggtcccacaccccgcccactggctcaggcttacctggagcgcagcgtgggcggccccgcagcgcggcctcggaccccagaagggcttccccgggtccgttggcgcgcggggagcggcgttcccagggcgcggcgcggtgcggcgcggcgcgggtcgcagtccacgcggccgcaactcggaccggtgcgggggccgccccctccctccaggcccagcgcgcaacccgagaccccgggccagccctcccgccctcacgcggcccgtgcgcaaagcggaccgggccggcgacgcgaatctccgccccgccccatctgacagcaaattttcccattggtcgagagacccggcgcggcacggcaaccggcgccgattgggcggatgcgcggagatgacggcttgccattgggcctccgggatgtcagtcccggcggatgaccggccccctcgcggaggggccgcggccccgcacctgcccgaacctctgcggcggcggtggcagggtacgcgggaccgctccctcccagccgacttacgagaacatcccccgaccatccagccccgagcagggactggcagagccggcgccccttccccggactctggccgcgtagcctccgccaccactcccagttcacaggtatccttcttcagcgcctgctactcgctgcgcgctgcgcgccgctccctcctgtcgacatcgaattgtattcttcacgcaagccgcgagagagagttctgctgctatccccattttacagttgggaaacagcctcagagaggttctcacttgcttgaacacagtcgtctgaccctggggcctgggggctctctcatcctcacgcccctgggtccccgcagcggggagacgatggaggtaggagctgcagtatttccgagggcaggaagggaccccctcggtaaaccaggggctcacctcccccaccaggcctggatgtagagacctcttgggcttgtcccaccctgcaggccccccatggggccgccctttcttacctcctcctggcattctcacagccccacagctctgcgtctggggaggcagagttgtgcgtttatgcccgcaccccgtactactgtcccattttcttcaccctacctggagtcaggaagaaacggtgcttcactgcctgttgagattcacgtaggttacatttccttgccagattaagagcacctgacatgagtgggaccatgaccctccgccagctctgcgtaaccttgtggtgtaggggggaaccagcagggatgctgcccagtgggcttttctagggggaggtcctgagatgacttcttagccagtgaccctggctcacgcatgctgtcatcctttcctgccctggatgcacctggagatgaccagttcctcggctcattgcattctccaaggccgcctggggaaccaaactgcccacaaccatgcttatgagtggtggaggggtgtgaccagacactcttgtcttatccacccatattgggagtccagtgtgttcatccaatcattccttggccaggacaaagaaaatgaaatggcccaaggcaagaactcactgctgggaccaccgctgggtccatctgtgtgctggcagcatggtgaatcgatcccagctgcctttcagagccaggcagctactatcaatcgattggagctggcacttgacgtgccaattggcctcctggcatagggttgttgcttgctgctctgggagggcagaatgaagtagctgtccctagaataggggccctcacaaaccaggtagctgtcatcctgtggagcagcaccatggtgacattctggctcaggtgctgtgtagctgaggggtcgtttcctccatttaggagtagacgtaatgagtccagctgtccccagccatctcttcaaggccattggaccctggttctgctggagcccctcttctcacagttacctcatagtcctgcaccaccccctccccacacttgcaagagggactggacagacctctgttgaaagagtgcaaaagacagaaccatacaccaaaatctgtgcaagtgagactacctctcctctcatcaccacccctaccacccatagggttgcagagacctgtctgccctcggcaggcaggatcattagctgaggtcagaggatgtcggggcagcaccaattcaaacaggactcaggaccgctgtccagcagtcggcccattaggctgcagccaggggtcagaaaca

SEQ ID NO: 1562598 - DNA, 4001 bp, Homo sapiens
gggaggcgaaggttgcagtgagccgagatcacgccattgcactccagcctgggcgacagagcgagactccatctcaaaaaaaaaaaaaaaaaaaaaaagcctcaatgctacactaaagattttagtatttcacctgaaggcagtgaggagtcatttaagtatgagacagacatgaccagaaagagatgatgataacctggtggcagaaaagacctttaataaaccacgagagagcaaacagtacgttaatcatttcattcattcctttttttttgagatggagtctcactctgtcacccaggctagagtgcagaggaacgatctcggctcactgccacctctgtctcccgggttcaagagattctcctgcctcagcctcccgagtagctgggaatacaggcatacgcctggctaatttttgtatttttagtagagagagggttttgccatgctggccaggctggtctggaactcctgacctcaggtgatccgcccgccttggcttcccaaaatgctgggattacaggcatgagtcactgcccggccattcaaatatttttgaacacctattatgtggcaggcactgatgcccagagaatattaaggtgggcaaataacaaacctgctcctgcccttcacagagcttacagtcataatggggaaagacagatacttttccaattagccatacaaacaaataaaaaccaataccatgatgtagctatgtagataaggctcatgaagctgtggcagcatttaaaagagagacctggcttgaggaagaagtgatgtcaaggaagacctgagtttttgtctaaagcacgggtacaaattaagtaggcagggctgggcgcgatggctcacgcctgtaatcccagcgctttgggaggccaaggcgggcggatcacgaggccaggagatcgagaccatcctggctagcaaggtgaaaccccgtctctaccgaaaaaaaaaaaaaaaattagcagggcgtggtggtgcatgcctgtaatcctagctactcaggaggctgaggcaggagaatcgcttgaacccgggaggcggaggttgcagtgggacgagatcacgccactgcactccagcctgggcgacagagcaagaccccgtcttggggggaaaaaataaattaactggacaatctgaactttgagctccaaaaggacaaacaataatcatgactatgtctgtgcccaccactgtattcccctgccaggcaggacagcaaaagccaaaagctaagaaagggagggggagctccctacaagcacccaattgcaatatggcctgggagcatccccggggctactgctccctcagcctctttgtcatcattcctctagtctctcaattaaatactactctcctcagagaccttctgatggctctgcctatagtatccactctcccagttactgtcatagctttaatgaccttgtgcatttgcttgtcgttgaccatctcctcccactagactgtaagctccatgagggcagaagccttgtctgtcttgctttctttgtatccccaatgtctagatctgtgtctggcacataggaagcactccacaaatatttgctgaacgaatgaatgaaccctgaggaaactgaagccccgggtgtgaggacgtggggggatcgtggctggtccaacgccactctggggccgaacttcgaacccgtggctcctgaccctggcggccaagtctcgagaggcggctcacaacccctcaggtagcgtaagcgtgggccccgcaatggaggccagaggatgggagagccaaggctgcccaaggcatagccgcggctcctccggggtcccttgccctgcatctggcagggaccagccacgcactcacctcggcggctccaccaccggctctgtgccgccgccgccgccgccgccgccgaccacggtgacagctccctgagcgcccgcacttccggggtcaaactgcgattccgcaggagcagacaggaagtctcggcctggccccgcccccagagccgagcaaactaccgccgggaagccggacccgggttgcgcctctcttcttaagactccgccccacactcggcgtctgtagccacgcccccttcccctcctatctcccttcctgcttaagcagagaataggtcagctgagggcgggctgtgtgattacacctctcgggaaatccaagtatggcacctgagaggacgtctcggaatcccaggcttccaccttctgcccgacctccttagtcaccgttttacatatttaatccagaagagaaattttaacaagtcaaaagcacgaacataatgttaagcagatgtacaagtacagactgcgatttcatttacgggaaattctagaacagacagaactcatgagtagtgatggtgttaaaattggtggtttcctctggggctgtgggctgggaggggccacaagtgaggctggggtcaccccctgtcttcatctcggtggtagccatgtagatgtgttcactttggaaaattcatcaaattgtacgcttaagatttgtgcatttttctgtatgtatgcaatacagttttgttctgttttgtttaaggaagttacaagtatagctatcctaagagaaggatgcaattttttctacagaatgtctcaggtaatgtaggtttagtggttcctaagcctgactatggatcagaatcatcacagaaaacttgttaagaacacacattcctggcttcatctcagtgcctggtacacagtaagaattcaaaaccaaccaccatcattattggggtgttatagaagcccccgaatggagaacacaaccccaccctgggattgtgaaatatttcccaggacactcctgccaacccctgctatctgcactagggctacaaggaatgcttagttcagtgcctgtcttcaaggggcttacaggataggaagtgcaagaaaaccaatagcaatgagtcagtgtgatgaatgcagggtgctaaggaaataggagagatgggctgtaaaccagaaatgagatgagaggggctggatattatattagttttgtattgctgcataacatattaccacaaacttataacaacacactgcttgccacttataacaaacacatttatttatttatttattttgagacagagtctcactctgtcaccaggctggagtgcagtggtgtgatcttggctcactgtaacctctgcctcccggaggttacagtgggttcaagcgattctcctgcctcagcctcccaagtaggcaggactacaggcatgagccaccaggcccagctaatttttgtatttttagtagagacggagtttcaccatgttggccaggatggtctcgatctcttgacgtcgtgatccgcctgcctcagccttccaaagtgctggggttacaggcgtgagccaccacacctggccaacaaacatatttattatctcacattttctgtgggccaggaatctgaggatggcatagctggctcctctgcatcagggtcacccacaagactgcaatcaagatatcggccagggctggagtctcatttaaaggctcaactcaaaaaggatctgcttcccatgtctagtggctaaattcagttccttaatggttgttggactaagggtctcagttcctagctggattttggctaaaggcttgtcacgtaggcttctccagtgtagcagcctgcttcatcaaagcatgcaagcctaaaagttaatagggaagccaagagtggtggcacatgcttatggttccagcaggttgggaggctgaagcaggaggattgtttgcgcctaggagttcaaattgagcctgagcaacatagcaagacccagtctctaaaaattaaaaataaataaataaataaaagaaggcaataggggccgggcaccgtggctcatgcctataatcccaacacttcggggggctaaggtgggaagattgcttgagcccagaagtctgaggccatcttaggc

SEQ ID NO: 1562599 - DNA, 4001 bp, Homo sapiens
gttagaccataaactggcagctgttactctttaggaaaaggaaagaaaatccagatgaaagatgttttgtttgcaagccatctcccaaacagaacctcagagttcctgaaattcagtgtgaaacaatcatctatgtgacaccaagcacttttactaaaaggatttcccccatcactgagctaaacccctactggaacttttcaactgagtctgtcaggaggaaaggtttttttcttaaatgttctaagagtgagacggtgataatttaacaagcacctgtaaagtgttagttcccatcagccctgctgatcacttaagtcaagcaaaatgcagacacagaaaacagggtggatgatggagaaacctctccactggacaccccagccctgtactcttctcaggaaagcctccttctgtactaagccagccatgagccctccctaaggctgagctgtaagcaaaagaatgtaaaagattctgaaccccagcttcagaccctcctcccgagatcataaatagcactgagagctcaagttaggacttttcatacctgtcagtcacttttagccaaaatatgccaacaggcccctgcacccggaggtggatttacaagctcaaagctgaactatgacaataaaagaaacacatttgcagagtgactggcagtttattaagcactgcttcaaacatttgatcctcacagctacctagtgacaactccccatctacccagtggggagaggagagactctctcccccgacagctccttgcccagtgaccacagtagcttccagcttccttcgcacatctgttcattgtcatctgtgttatttctgtcctcatcagggatggggacatctcattgcagctctgcactttaataataagcaaccccagatcttccagctcagttggctctggggaattgagtccaaatccatggccagttggagagcaagtccaatccaagacaacttctcacaccatgaacacctgggagagccggtgtcaggcctgacctggtcagcctagttcagatgtccattcccagaggctgcctaatgccaaagagtgtctgctcaccctcaggatgaggccaagtcaccctggaagccccccagtgagcagcactgggcaaggtgtgtgatgcctgtcaccctctccactcaggagccagagagatgccgtggggccagcccttcccggtgcagacctggggaccttccctctcttggccagcttctcagcacccacctgccctggagagtgggaaagaggggagggctgaagatgggttagcacagatggtgaccaccaggaggtcaggggaggagggggatgggacgatggaaaggtgagtgttgcccggaaaagtggacgatcagctcaagattgtggaaggaggtttatggcgcctcataattcgtgggacaggggaggagggtcaccacgtgaaatatgggaagtgggtgatgctgagggctgggggaggggacaggaggtgaggaaagaggggtcacaggggagaagggagatggaggaagggaccacgatggggcagggaagaggagtaggaggaggtctagggagggtgatgcccggctccgaggcggcggcgcttagcacgtacgagcactggcctcggccgggccgggatgcgggcgcccgggtcccggagcatcctcggcgggggcggcggcggcggcggcgccggtaagggagggccgtgggcctgcagctgccgggctcccgcctccaacccctgtcctggggtcggcccagccgcgccgccctcccgccccggcagcccccggagacgaagcttacctgcgcccgggcgcgcggacggctgccgggacccaggagacgccgccgcccgagggcgcggacccgcggacggcccctgcccggcgccgcggagccgccgcctggctgctgcccagcccacgccgcgggagcccgagccggagcccgagcccgagcctaagccgcgccggtgcccctgccggtgccgacgccgcgctgcgctccgcggggccgcgaagaccacaactcccacaatgccgcgcgcgctgggccgccgggggagggggtacgggggggcggggcctgcggggcggggccggggacccccctgcacccggcacctgcgctcgcagtgcgggaggcgacccgaggccgcgcccgccgccgctccggagggtcctggcagtgcgccccgagacgcagcgcccgcccagcccgaggttgcgcgcaggcggcgacgggcgtgcagtcattcattaagaaaggctcgcgtcgcttccttcgctctttcgtttttcgctctgtgtctttctcagttctccctccctctgtctctctgttcctctctgagtcgccctcgtctccatttcctccttttcattctctttcacttcccccccacctcacttcctctcgccctaacgccttctttcctttattgatggactcaacacggacttctgaggccctcaggcacttggaatggaaccgcaaatcaaaccagattcttagtctcatggaaaactcattcgctcagtacagtaatgatgggccagcctgggtccccgtccctgccagctgcgctgagcgtgcgcggtgagcgctcaggcccgccctgccctcagtgagccaccgtctagcgggaggggaccctcacccccgggtagggtttaggaggggaagtacaggcaggacggttgtctgaccaggggactgatgagctgcgaatggaggccccaaggaggctgcttggaggaggtgacgtttgagctaagacctgggggagactaacagtggctacgggatgtgttaggggcgccagggaaactgcatgggtgggttctgggagcatagagtaggatggcccgcccacaatccatctgtctctgtcccagacccacctctcttgtgtcccagaatttatctctaacatggcccagaagccacctcatgtctgtcccagaatccatttctcatccctattccagaagccaccttcaccctgttccagaacgtacctccttcctgttccagaacccacctccctccctgtcccaggacccacctccaccctgtgccagaactcacctccttcctgttacagaacccacctcctccctcttccagaacccacctcctccctcttccagagcccacctcctccctcttccagaacctaccttctttctgtcccaggacccacttccaccctgtcccaggacccacctcctccctgtcccaggacccacctccaccctgtcccagagcccacctcctccctattccagaagccaccttcaccctgttccagaacatacctccttcctgttccagaacccacctactccctgtcccaggacccaccttcaccctgtgccagaacctacctccttcctgctacagaacccacctcctctctcttctagaacccacctcctccctcttccagaacccacctcctccctcttccagaacgcacctcctccctcttccagaacgcacttcctccctgtcccaggacccacctcctccctgtcccaggacccacctccaccctgtgccagaacccacctcctccctgttccaggacccaccccctctctgttccagaactcacctccaccctgttccagaactcacctcctccctgtcccaggacccacctcctccctgtcccaggacccacctccaccctgtgccagaacccacctcctccctgttccaggacccaccccctctctgttccagaactcacctccaccctgttccagaactcacctcctccctgtcccaggacccacctcctccctgtcccaggacccacctccaccctgtgccagaacccacctcctccctgttccaggacccaccccctctctgttccagaactcacttccaccctgttccagaactcacctcctccctgttccaagacccacctccaccctgtcccagtacccacctcctccctgtt

SEQ ID NO: 1562600 - DNA, 4001 bp, Homo sapiens
atcaaatctttcaggtactggatctccttggccagggaatccgccctctcttttagagcctcgttcttcttttccagctctttgcactcaccagtaagagcctcctgctccgccctcttcttctggcggtacctagtggctgctgtcttgttttgctccatttttttcagcttcttatccagtttctcaccctttacttttgctgctaccatcttctctccaggaggatcgtaaggtttgggacgggcagacccacagagaacacctggagatgggaggctcctatttggagagcccctggtagaggggctgtgctgaggagaccccagataggactctgggctcatacagatgccactatcattatctgaaggggtgtcttcctcctttatgcactgagggatcatggcaacgtaagcagtgtagtctggcttcctatctccttcagtgatatccacttcactgcccagctctaaactaaaggaatgatctggagtggaggacaggacccctggggaaaggggaagaggttgtaagaaggtgaagggggcaacctggtcgggttttgttaaactttctgggagatggccaattgggttcaccgtctgggggggctgcttattagtctcctggactaggggggcaaagagatcacaagtgtcatccaacgtggtcagaaggtcatctggcatggtttccaggtcatctatacccaacagggcatccaagtcgaactccttcaaatccattttctccaacatccaatctgtcccggagaaggcatcctctgcaaaacatttgagtgatggggccaagtgagtcagatacaaaggtaggaggcccctaaccctagatcccaccaggacgatgtggtggtggcccactcacccttgctgttgttggagggactgaccaacccatccacagccagccattcggaggagcccgccttagccttgtcgctggagaacccatgaggtttgaagtgcttggccacctccaggtaatcatctaagagacctaggctttcttcagcccccaaacccgactggtcgaagggggacatcaagtcccccaccaacacctcgctgctcaggaagctcatttcggtcatgttgcggtgctttgctggaatcgaggaatgtgcttaattcgaaggtgtctttgtcggttacagcaacgctgctgctgaatgccgtgagaagcctgaatgagaatcagaagccaactcccattagaggttagctgttctgagaatttcatccttccacttatgaggcgggacttctctagatcggccatctagagaatcgggaacagggcagttgtatttgcccctccctgcttgcaactcaggttccacaaaatggacgctcacggagaccaggggattcttccaccggccgccaagaggaaagcgctccgtccccacgtccaaatacggccagggcggccgcgccccgcccaccgcccgcccttgactcacgcccgcgccgccgccctgccgccgccatcttggttcctgccacgtttcgtggggcaacagccaagacccctgggacccttgcggggctcggggtccgagggctgtagggctcctggggaagcagtccgggcacccgactacgctttcccgatcccaggcacgcgagcgtctcggggacacccaagcaaagaccacgcgtcccgggcgctcgttaaatcgcttcccccttggcggcaccgccctggccccaggccgcaccccaccaatccaaaacccgcgccggccccaggagcacagctggacgacccgccccggtactcacgccatggcttaagccgctgggggttgccgctgcagagcctggtgctgctgccgccgctgcaaaggccaatgctgccgcaggcactgctgcccctaatacgccatggtggccgtggaccctgagggcggggaggagggaaaacgcacacgcgcagagaaaactacatctgtgggcgggcaaagtagaaatggctgccgtggccgcccgccggccctttatagacttcgtctctatggggacgcagcacagacgcatccttccgccgcgaccacgtgaccgtctcctcccgcccgctcccttccctccctccctttgacgccccaaccgtttatgcccagggcgtagctgtgacgagaaaaggagtttgttcttatggcctcacgaaaggagagaggtgtactactttactaggcttctatgatcagagtccgttctttccttcgccgccggagcgcggagtgatctcccagacacgcctcgcttccggtgtcagcgcagtgggcggggaaaggtcgttttccggcgaagagtttttattgtgaaggccgaggacgccaggttatcgcgcgaggtgctggcgaagagcgcgcgtcaaggtgattggcccaggcccggtgaatcatatatatctcgagctcttattggctcagggccctagatgggcggctgctgggagagggatcccggggtccgcgtgggaagggttggggtctcgggtcgctgctagtcctcagccagccccgcctgctggcccgccacgatcgcgctggctcctgcccccaggcggccttagcccagcgcaccccttagtggcctcagggaccagcccttgcggtcggatcccgccgccctcagtggaggtccgcactggtggccccgccgccgctcccagcctgcgcgtccttcggttgcgggtggtgatttgtggcctgcggaaaccggggggttacctgttccaagcctgagttttccagaggccccattcatagccgacacggcgctgctgcccccgggaggttgaaggggcctcgagagggcgcgccgggcctgtccacctacccccaaaggccggctgagtctgcatggctcctcctaaactctggaaaggagccgggaagacgcgccgtcctgtcgcccaacctgggtttttacaattttcatccggctcaagtgcaaggctgccacagaatagcatcatagaggaacttctggtgtccgaagattgcgttctcctaagaacaagattttcttcgctgccgtctccctggggtagttcggattcactccggattctgaactccccggcctaacccgcttttcagcagtcacgcccatggcccagggaggagaggcgcttgggaacccacggccacttactgggggttgtgcgttgggaaggggtagtctgttttaagaatacaagaaacctccccatcatccttcagccccttccagtcaggccctgtgaaggtggaaactttgagtttccgcctccatttcactgggccacacaagtatgagcgctgtgatatcaaacaaccagggaagcactgctctaaataaccacaggccatctgctgcgctcattcaacctcgcccacaaatcctttccaatggtaaaccgaggcccaatgggatgaagcttcttgctcaaagtcacaaggctcccagtggagggagtatggggtaggagttagaagacagattttggggagcgcatccaaaagaatcctggctgggacattttggctaaatgacttatactctctgagcctcagtttcctcatttgtaaaatgagactactgatgagtatccttgcctcatgaagtgagatcatacatgtaaagcacttagcacagtgcctgcctggtacatgtaagcgcccaataatggttgctgttgctgccactgttcatagaactcaggtctcctgaccctgacttctgccactctccatcacatcctcctgctgcctcagaggactcttcattattatttaatgagatgaaaccaacaactttaaaactggtatacacaaggcatactggatgctggaataaaagtatgttttttctttctccttggggaatcgtgagtgttgagatatacagaagttggcgccaggagcagtggctccagcctgtagccccacctactcaagccgaggtgggaggattgcttgagcccaggaa

SEQ ID NO: 1562601 - DNA, 4001 bp, Homo sapiens
cttctatcaaatctttcaggtactggatctccttggccagggaatccgccctctcttttagagcctcgttcttcttttccagctctttgcactcaccagtaagagcctcctgctccgccctcttcttctggcggtacctagtggctgctgtcttgttttgctccatttttttcagcttcttatccagtttctcaccctttacttttgctgctaccatcttctctccaggaggatcgtaaggtttgggacgggcagacccacagagaacacctggagatgggaggctcctatttggagagcccctggtagaggggctgtgctgaggagaccccagataggactctgggctcatacagatgccactatcattatctgaaggggtgtcttcctcctttatgcactgagggatcatggcaacgtaagcagtgtagtctggcttcctatctccttcagtgatatccacttcactgcccagctctaaactaaaggaatgatctggagtggaggacaggacccctggggaaaggggaagaggttgtaagaaggtgaagggggcaacctggtcgggttttgttaaactttctgggagatggccaattgggttcaccgtctgggggggctgcttattagtctcctggactaggggggcaaagagatcacaagtgtcatccaacgtggtcagaaggtcatctggcatggtttccaggtcatctatacccaacagggcatccaagtcgaactccttcaaatccattttctccaacatccaatctgtcccggagaaggcatcctctgcaaaacatttgagtgatggggccaagtgagtcagatacaaaggtaggaggcccctaaccctagatcccaccaggacgatgtggtggtggcccactcacccttgctgttgttggagggactgaccaacccatccacagccagccattcggaggagcccgccttagccttgtcgctggagaacccatgaggtttgaagtgcttggccacctccaggtaatcatctaagagacctaggctttcttcagcccccaaacccgactggtcgaagggggacatcaagtcccccaccaacacctcgctgctcaggaagctcatttcggtcatgttgcggtgctttgctggaatcgaggaatgtgcttaattcgaaggtgtctttgtcggttacagcaacgctgctgctgaatgccgtgagaagcctgaatgagaatcagaagccaactcccattagaggttagctgttctgagaatttcatccttccacttatgaggcgggacttctctagatcggccatctagagaatcgggaacagggcagttgtatttgcccctccctgcttgcaactcaggttccacaaaatggacgctcacggagaccaggggattcttccaccggccgccaagaggaaagcgctccgtccccacgtccaaatacggccagggcggccgcgccccgcccaccgcccgcccttgactcacgcccgcgccgccgccctgccgccgccatcttggttcctgccacgtttcgtggggcaacagccaagacccctgggacccttgcggggctcggggtccgagggctgtagggctcctggggaagcagtccgggcacccgactacgctttcccgatcccaggcacgcgagcgtctcggggacacccaagcaaagaccacgcgtcccgggcgctcgttaaatcgcttcccccttggcggcaccgccctggccccaggccgcaccccaccaatccaaaacccgcgccggccccaggagcacagctggacgacccgccccggtactcacgccatggcttaagccgctgggggttgccgctgcagagcctggtgctgctgccgccgctgcaaaggccaatgctgccgcaggcactgctgcccctaatacgccatggtggccgtggaccctgagggcggggaggagggaaaacgcacacgcgcagagaaaactacatctgtgggcgggcaaagtagaaatggctgccgtggccgcccgccggccctttatagacttcgtctctatggggacgcagcacagacgcatccttccgccgcgaccacgtgaccgtctcctcccgcccgctcccttccctccctccctttgacgccccaaccgtttatgcccagggcgtagctgtgacgagaaaaggagtttgttcttatggcctcacgaaaggagagaggtgtactactttactaggcttctatgatcagagtccgttctttccttcgccgccggagcgcggagtgatctcccagacacgcctcgcttccggtgtcagcgcagtgggcggggaaaggtcgttttccggcgaagagtttttattgtgaaggccgaggacgccaggttatcgcgcgaggtgctggcgaagagcgcgcgtcaaggtgattggcccaggcccggtgaatcatatatatctcgagctcttattggctcagggccctagatgggcggctgctgggagagggatcccggggtccgcgtgggaagggttggggtctcgggtcgctgctagtcctcagccagccccgcctgctggcccgccacgatcgcgctggctcctgcccccaggcggccttagcccagcgcaccccttagtggcctcagggaccagcccttgcggtcggatcccgccgccctcagtggaggtccgcactggtggccccgccgccgctcccagcctgcgcgtccttcggttgcgggtggtgatttgtggcctgcggaaaccggggggttacctgttccaagcctgagttttccagaggccccattcatagccgacacggcgctgctgcccccgggaggttgaaggggcctcgagagggcgcgccgggcctgtccacctacccccaaaggccggctgagtctgcatggctcctcctaaactctggaaaggagccgggaagacgcgccgtcctgtcgcccaacctgggtttttacaattttcatccggctcaagtgcaaggctgccacagaatagcatcatagaggaacttctggtgtccgaagattgcgttctcctaagaacaagattttcttcgctgccgtctccctggggtagttcggattcactccggattctgaactccccggcctaacccgcttttcagcagtcacgcccatggcccagggaggagaggcgcttgggaacccacggccacttactgggggttgtgcgttgggaaggggtagtctgttttaagaatacaagaaacctccccatcatccttcagccccttccagtcaggccctgtgaaggtggaaactttgagtttccgcctccatttcactgggccacacaagtatgagcgctgtgatatcaaacaaccagggaagcactgctctaaataaccacaggccatctgctgcgctcattcaacctcgcccacaaatcctttccaatggtaaaccgaggcccaatgggatgaagcttcttgctcaaagtcacaaggctcccagtggagggagtatggggtaggagttagaagacagattttggggagcgcatccaaaagaatcctggctgggacattttggctaaatgacttatactctctgagcctcagtttcctcatttgtaaaatgagactactgatgagtatccttgcctcatgaagtgagatcatacatgtaaagcacttagcacagtgcctgcctggtacatgtaagcgcccaataatggttgctgttgctgccactgttcatagaactcaggtctcctgaccctgacttctgccactctccatcacatcctcctgctgcctcagaggactcttcattattatttaatgagatgaaaccaacaactttaaaactggtatacacaaggcatactggatgctggaataaaagtatgttttttctttctccttggggaatcgtgagtgttgagatatacagaagttggcgccaggagcagtggctccagcctgtagccccacctactcaagccgaggtgggaggattgcttgagccc

SEQ ID NO: 1562602 - DNA, 4001 bp, Homo sapiens
acagtggcgcatgcctgtaatcccagctactcaggaggctgaggcagaaggttgcctgtggaggaggttgcagtgagccaagatcacaccaccacactccagcctgggagacagagcaagactccataaaaaaaaaaaaaaaaaaaaaaggccgggcgcggtggctcacgcctgtaatcccagcactttgggaggctgaggcggggggatcatctgaggtcaggagttcaagaccagcctggctaacatcgtgaaacccagtttctactaaaaatacaaaaaattagctggatgtggtggcgcatgcctggaatcccagctactcaggaaactgaggcaggagaaatgcttgaagctaggagatggaggttgcagtgagccgagatcgtgccattgcactccagcttgggcaacaagagtgaaactccatctcaaaaaaaaaaaaaggccaggcgctgtagctcacacttgtaatctgagcactttgggagcccaaggcaggcagattacttgaggtcagaagttcgagaccagcctggccaacatggtgaaaccccgtctctaccaaaaatacaaaaattagctgggtgtggtggcaggctaccccagctactcaggaagctggagcaggagaatcatctgaacctgggaggcggaggtagcagtgagctgagatcgtgccactgcactccagcctgggtgacagagcgagactctgtctcaaaaaaaaaaaaagtggggggggaccgggcacggtggctcacgcctgtaatcccagcactttgggaggccgaggcaggtgaatcacctgaggtcaggagttggagaccagcctggacaacatggaaaaaccgcgtctctaccaaaaatacaaaaattagccaggtatggtagcgggcgtctgcaatcccagctactcaggatgctgaggcatgagaatcacttgaacccaggaggcagaggttgcagtgagccgagatcatgccactggactccagcctgggtgacaagagccaagactccatctcaaaaaaaaaaaattgaataaggcttgtggattagataatagtgttgtaccaatgttactttcctgtaattattctgtggttacgcaaaggaatgtccttgttcttaggagatacacactgaaatatttaggggcaaaggggcaacttactcttaaatggttcaaaatatagacacagttgacccttgaacatgggttggaactgcttgattcacttttttttttttttggaatttctgacaaatcttattttattcagatagcagtctgatcacacctggtccaacaacactcaaataataaatcaaatataatcagatgttaagactggtcttcaaacattctagccaatgatgccacgcttgcctgtgatctctctgacataaaaccacgtcgacacctcagtggccaccaaaccgttcagcaaagcttccttaactgtgagctgtttgaagctaccagtctgagcactactgactatttttttcaggctctgaatagctctagggatctcagcaggggtgggaggaaccagctcaaccgtggtgtagtaccaaaatgcggccaatcgaggcttcaagtaagtcacagcagcattcaccagtgctggggtcttctccacaaggttacggacaaatggagccatggttctgggatggaaagtccatcatcccgaatggccagctgaaggtcaccccccggaaggaccctgcgtggttcacttatttatttatttatttatttatttatttatttatttatttatttgagatggagtctcactctatcacccaggctggagtacagtggtgtgatcttggctaactgtgacctccgcctcccgggttcaagtgattttcctgcctcagcctcccgagtagctgggattacaggtgagcaccaccacgtctggctaatttttgtacttttagtagagacaatgtttcgccatgttggccaggctggtcttgaactcctgacctcatgatccacccacctcggcctcccaaagtgctgggattacaggcgtgagccactgtgcccggccaggaccctgagtggttcacttatacaaggatcttcttcctcttctgtcacccgagacagcaagactaccccctgcctcctcctcagccttctcaacgtgagaacaaggatgaagacctttatgatgatccacttcctcttaatgaatagtaaatatgttttctcttccttatgatttttttttctctttatttattttttgagacggagtcttgctgtcacccaggctggagtgcagtggcacggtctcagctcactgcaacctccaactcccaggttgaagcaattcttctgtctcagcctcccgagtagctgggatcacaggcgcacgtcaccactcctggctcatttttgtatttttagtagagacagggtttcaccatgttggccaggctggtcttgaagtcctgacctggtgatcctcctgcctcggcctcccaaagtgctggggttacaggcgtgagccaccacgcccggccccttatgatttttaaaataacagttttctctagcttactttactgtaaaaatatagtatataatacatacaatatacaaatatgttattggtaaggcttctagtcaatagtatattagtaggaaagttttgggggaaccagaagttatacatggattttcttttttttttcttttatttaagacagatctggcccaggctggaatgcagtggcgcgatcttgtctcactccaacctccgccttctgggctccagcgattctcctgcctcaacctcccaagtagctgggattacaggcgcacgccaccacacttggctaatttttattttctgttttgttttgtttttttgagatggagtctggctctgtcacccaggctggagtgcagtggtgagatctcaactcacagcaacctccacctcccgggttcaatcgattctcctgcctcagcatcccaagtgggtgggattacaggcgcccaccaccacacccagttaatttttgtatcattagtagagacgagttttcatcatgttggccaggctggtctcgaacttctgacctcaggtgatctgcctgccttggcctcccaaagtgctgggattacagacatgagccacagcgcctggccaatttttgtatttttagtagagccggggttttttctcattggccaggctggtctcatcgaactcctgacctcaagtgatccacccgcctcagcctcccacagtactgggattacaggcatgagccactgcacccagcctatacgtggactgtcaactatacaggtcagcccctaacccccataccattcaagggtccactgtatggatatgcacacatgtagtatctaatatatttaacatacattagatatatactgtatagagagaaataaagcaaatgtagcaaataataacattaggtacatctgggtgaagagtacataagagctctttttttttttttgagacagggtttcactctatcacccaggctggaatgcagtggcgtgatctcagctcactatagccttgacctcttgtacccaagcaatcctcccagcccagtccccgaagtaactggggctacaggcacgtaccaccaggccttggtaatttttttgtattttttgtagagatgcggtttcaccatgttgcccaggctaatctcaaacttctgagctcaagccaacagccagcctcagccttccaagttctaggattgcaggtataagcccctgcgtccagcccataaatgttcttttacagtaactttgaaattattattttttttgagatggagtctcgctctgttgcccaggctggagtgcagtggcacgatctcagctcactgcaagctctgcctcctgggttcacaccattctcctgcctcagcctcccgagtagctgggactacaggcgttcgccaccaagcccagt

SEQ ID NO: 1562603 - DNA, 4001 bp, Homo sapiens
cccagacagcctggcttattttttaagaaaaaattttttagagataaggtctatgttgcccaggctggtcttgaactcctgggatcaagcgatcctcccacctcagcctcccaaagtgctgggggctacaggtgtgagccaccacacctggcgtgtatttgtgtttattaatattaaaattttttgagatggagtctcactctgtcacccaggctggagtgcagtggcacaatcttggctcactgcaacctccgcctgccgggttcaagcgattctcctgcctctgcctcctgagtagctgggactacaggcgcaccccactaggcccagacaatctttttttttttatttttttgagagggagtctcgctctgccgcccagggtcgctcggcctcccgggttcacgccattctcctgcctcagcctcccgagtagctgggactacaggcgcccgccaccatgcccggctaattttttgtatttttaatagagatggggtttcaccatgctggccaggctcgtctcgaactcctgacctcaggtgatccgccctcctcagcctcccaaagtgctggtattacagacgtgagccaccatgcccggccccagcctgtatctcacaaatgttaacacacacattagtgggagaccaatcattacaatccattatgatagaggggacttccccaaaatgaagattaacagtacatacaggcctggcgcgttggctcatgcctgtaatcccagcactttgggaggcccaggtgggaagatcacctgaggtcaggagttcaagaccagccaggccaatatggtgagaccctgcctctactaaaaaaaatacaaaaattagccgggcttggggcgcgagtctgtaatcccagcttctagggaggctgaggcaggagaatcacttgaacccggggcggaggttgcagtgagccgagatcgcgcccttgcactccagcctgggcgacagagtgagactccgtctcaaaaaaaaaaaaaagaaaaaaagaaaaaaacacagttcataaagtgaacgaccttgtcaaaacactggttggaagcaggtctcttccctccgcactgtttcctatcatatagccttaagcatttccctcagggttaaaaaaaaaaaaagtgacaaggctggtttgttttttttttttctttttccagagggagtctcgccctgtcgcccatgctggagtgcaaaggcgcgatctcggctaactgcaacctccgcctccgggttcagcttcccgagtagctgggattacaggcgcgcgccaccacgtccggctaattttctatttttagtagagaccggggtttcaccattttggccaggctagtctcggactcctgacctcaggtgatccggccgcctcggcctcccaaaatactgggattacaggcgtgagccactgcccctggccacaaggctgttttcaatccttgcacagatctctgtccgactaggcacagtgaatacccttggaaaacagggaatgctgaggtgggaggcaaagagccagggcgttcaagaaggcagcgcgcaggcaagcgggcagtgcccaagacccgagcaaaagtcacatgagctgcggggcaaatctccgtcctcaggccgacctcttggatctggtgacttggagcaagggaccttcctgcggcatctgggcggctcaaggcccgcggccttccctaggcgggctccagcccactccccgggactgccgccgcggcttcgtaagacccaaccaagcccctcacctgcttttgcacgtcagcatcgctgagagccatggcgagagcaatgctaggccggtgaacagtaggctcgagtttaggtttgaaaggtgaggtgagagaaatcggcaaagggaacccctgcgcagatctcgggttcctttactttataaccgcgggttccggttcctgccaggtgactgcacagttcatcctcatgacccttctcagccaatgggaagagagcgacgcccaggaagtcccgccctgtcccggcctgtgggcgcgtcctcgggtccttctacgtcgctgactcgtgacctgaccggtatttttttcctaaactgggatcttgggtaggaggaagaaaagataaggagttcctctatctgaaattagtcgggctgttttgaggagtactggttaggtatattggagaatgtgcctttattggaatttttcgcataattacacagggttatgggcttaggggtacatgattgttggccgggcgtggtggctcacgcctgcaatccggagactttgggagaccaaggcgggtgtatcgcttgacctcaagttcgagaccaggctggacaacatagaggaaccccgtctctaccaaaagaaaaaaaaaagggggatacatgatttctgactattcatgtcaaccttgattacctgaataaagtgtagggtttgtaggtttctccactctgaagttaccttttttaaccccctttccatactgtagtcttaggaaggaagccactatacaaagcccacacctagggagtgggaagctatgctcaacttccttattagggtggagcagctacataatttatttggaacttttctgagatagcctatatatttttcaaaagccttcccaggtcccatttagaggaatattaggacagaaatccccccaggctcatttgtttttatttggatttacctcaagcccgtttttttccccaaaatcccaaaggcaaaaacttttgaaaattcctttatctttaggatagactgactcctaatagtagaataagaggtcaaatggtacacccacttttttctttttactgtgctatggttacccaccatttttattagctttttatcttgaagaaatttgagatatagtaacttgtaagaatactgcattgacctcccttcacctagattcaacaattgttaacattttgctacatgtacattaacactttattttcatacacacacacacacacacacacacacacacttcctattttagtgtgtcataagaacgaggatgtagcaaattcaggaaatttagtttactaggctgaacattaatttcctttgtcccgggccaggcgcggtgtctcacgcctgtaatcccaccactttgggaggctgaggtgggcagatcacctgaggtcgggatttcgagaccagcctgaccaacatggagaaaccccagtctctactaaaaatacaaaattaacaggcgtggtggtgtgtgcctgtaatcccagccactggagaggctgaggcaggagaattgcttcaacccaggagcagaggttgcggtgagccaagatcgtgccactgcactccagcctgggcaataagagtgagactccgtctcaaaaaaacaaaaaaaaaaaaaacaaattcctttgtcccatcaatccatcaatgtactttataaccctttcttttttttttgagacagagtctcactctgtcgcccaggctgcagtgcaacggcatggtgtcagctcactacaacctctgcctcccgggatcaagtgattctcctccctcagcctcccaagcagctgggattacaggtgcctgccaccatgcatggctaatttttgtatttttagtagagatgaggtttcactgtgttggccaggctggtcttgaactgctgacctcgtgatccacctgcctcggcctccgagagtgctgggattacaggtgtgagccactgcacccggccttctttttcttttctttttttttttttttttgagatggagtctcgctctgttgcccaggctagagtgcagtggcagaatctcggctcaccacaacctccgcctcccgggttcaattgattctcctgcctcagcctccccagtagctgagattacaggcatctgccaccacgcccagctaatttttgcatttttagtagagatggggtttcaacacattggccagggtggtcttgaactcccgacct

SEQ ID NO: 1562604 - DNA, 4001 bp, Homo sapiens
tctcatctataaccgagcacctgaaataaccttaaaaagcctctcctggctcgccaatcttccaacatatccacatgctcccctgtgccaccacctcttgtatagatttccattacaatgtgtttatttagctatttcccaaatatgcctgataaaagggatcactcacatcattcctctctgtaccctcagaccccaacaaaaaaatctgtttcatagtaggtgctcaataaatggttgatgactgggttattaactaaaaggagggtccatcatgatacagaaatgcctaagcattaaatcaataaatacatctcccccaaaggcccatagagcagtaccagggacttttattaatagcattccttcagcagctccacatttcccaaagtgatgtgaggtaaaggaagtgctcagaccaggtgtctagtttaaagagaggaagtcctctagtgatcacctaggctgacccaagtctcagtatttctttcttcaatgttccctctgctttgtacatacatacccccacagctgtgttatcttgtacatactagtacaggagagagcaaggactttccattttcctaccccatcacctagcacaatagctgatacatgggtaactaccaatcaatgtgttaagtgataatatcagctacatttagtgctatgtacaggtatgtcctaaggatttaatatgcattatatctcatttactccttatgacactatcaccagggaggtactgttcaactttactcccattaaatagacaagaaaactgaggcccagaggacagaacaagatcaaacaagcattgactgagggcttcgcacattttatattttcacgtactttatttcatttattcctctgtacaatccagcaactaagctgtgtattatagtcccatttttagacaagaattctaaggcctggagaaactgcacagtaacacgcagcttgcaaggccaggaaccaaatccacaactgtcgactcctgggcaccttctctttttgcctggctatcttgcccctcagtggcatcaggactggactggtctctccaggcccgtgctcttccacactgcacagagcgctgcccccagggcagatggtgcagcctgggctctaacgccgaggagaaaggagtgccagtcccactccatgcctagagactgccatccccgcaactgcccaattcccgcgtccgtaacacgggtctctcccgctaaaacacacgctttatgactctgggggccgcgtgggtcttgcagccagggcctggcgcagccctcgcacatgacaggggaggcctaaccgtgtgttgggtcaacatcaccggcacgccgcggcaagggctcccgggatcgcggcttcgcacccggactggctgcggtgggggagcggggcgcccgccccaggccccgcggggacccacgagcacgaggcggtgcctgggagtcgggaggcctgggtggcgctcaggcagcccgcgcaggcctcgccctccgcgtctccagcgaggcgggggcggcgcctgggtccaggccggggccgccgcgggagtcccggccgccctcccctgcccggggcagccccccggccggacccgttaccggttccgctgctctttgaagagcgccgtgagcgcgcgcagggcctccaggtcttggatgggcgccggcaccatgacgcccgacagcctggcaggcggcggcctgggcgccgccatcttgccgctcacagctgggtcgagcctgacgaggaggaggaaggcgaggaggacgaagggggaggatgacgaggagggaggagtaggatggcgaggaggaagggggaggcctcgccctacacagccctaaccgccgccgccgctgcagcccgcgctgccctgaagctgcgccgccgccggagagctctaggctgagcccagactcgcctcaggcgggaggaggagacggcgccgcgggggagggggcgccggcggaagtcccgcctgaggggagggggcgcggcggaagttctgggtgagagcggggagggatgctgggggtgattgactgggaagcgtcgcagacggggctcctccgaggggaggggacgccggggggagggggacctgtgttgatgtggccgtaacagggtctcggtcttgggagcgggtatcgggaaccagaggttcaccctgagaaagaggggcgcgtcctataggagggtgcccgcggacagaggggtctcccccaggggaggggatccggggggtaaggggcctgtggagggtggggccgtaacaaggtctcggtcttgggagcgggtatcggggacagaggttcaccttgaggaagaggggccctcctgtgggagggggcccgcagacagagtggtctcccccaggggaggacattctgggtggaggggaccctcttgggaggagacgctgactgagggtctcgggaacgaagggggccgggcagaggctcccactgctaaggctgaagaccttgatcccactgctcaagtgggttgatcagtgcccccgcccgggtccactggaagctggagcggtctgtcactagcttgcaagtctcaggccctgaaaacgcacttcccagtacttactgatcattgctgatcaataccagaccacttaccaggcactttgcctctagtgagtatacattgctccagctcctcaaagccttaaaataccgttcgaagtcaagaagctaagttacacagcaatagggttagaattgttttttttcctaagggaaatgaatatatttcacaggaatcagacaaggcttctctagctggtgttgataactcacatattttctttccactgccctttattacagtgtatatactttcaacaaaaattgttgctaagccctgcgctaggtgctggagatgtaaagattaataaaagacagttccaaacctgaaggaacctcacagactattgagaaggagagaagcaaacataactgagtatagttgtgaactgctataactgtacaaattgctgtgggaccacttaaaatatataaatacataccctttacattctgcttggagggtaggagtgtgcttataacatggcgcttttaacattctttgctaaataaaatgtaaagataacaataaacaccaccagagtatgcagaaaaagtgaatcctggtggggcatggtggctcatgcctgtaatcccagcactttgggtggccaaggcaggaggattacttgagcccaggaggtcgaggctgcagtgagctgtgatcacaccactgcactccagcctgggtggcagaatgataccctgtatcaaaaaaaaaaaaaaaaaaaaaaaaaaaggagggagggaaatgaatgctgctgcacaagcaagttacttgatattgtcattcagtttacccatttaattgagtatgtatttattcattccacgaatattgcggtgtactatgtgccaggtattagatcacttattagtagcagtgctcaagacaatgcaaaatgtttaacactccttaagctaacagggcaaaaatctcttaattttcccttgaggagcacaggatagtaaaatgtacttgttatgcaccaaaatcctgatctttaggccagacacggtggctcatgcctgtaatcccagcactttgggaggccgaggcgggcagatcacttgaggtcaggagttcaagatcagtctggccaacatggcaaaaccccctttctactaaaaattagccaggcatggtggcgggtgcctgtagtcccagccatttgggaggctgagacaagggaattgcttgaacctggaaggcacacgttgcactgagctgagatcataccactgcattccagcctgggcaacagagggagactctgtctcaaacaaacaaacaaaaaaacctggcctttagttttcttattctcaaatgtaacattcccagaaaaacattccctataatattcatacttcttgcctgga

SEQ ID NO: 1562605 - DNA, 4001 bp, Homo sapiens
gaccgagtgaatgtcaaggccagctgcagggtgtgtgggtggtggccagttgaagtgaggaagccagctgctgtgtgagcctgggtgcagaggtgggactgagtataggggtgggttcagctggtggcatccaggtgacgcctagaaatgtatgcactgtcaggggctgccctggggctgtgtgggcctgcagggcctggtactgcatcatgggagtgtctggaggcacctgaaggagggggcaatgaggggtgctgggtgtggactggggtgcgtgggcacaggagagtgggggtgcataaggcctctctggctgcagaggtgtgagggtgagggtggtgggtaggagggtgtagggttgaggatgaacaggtgtgggatgcagagaatctgggaggggcctgggtgggtgggaacagcagaggcccagggctggggctcggtggcccgggcaggcactcaccgtggaaggcacgcaggtagttgttgcccaggtacaccaggttctccagggcggggttaaactgctccatgatgctctggaccccagggtcaggggaggaaaaaggtgtagagatgggggagcgagaaggaaccacggatggagtcaagtcaccaggcgtcagggacagggcacccccagcccagtgagaagccccagactttggggggcccatctacaaacctaggctcacccagaatcctggctcttggctgcagggacctcagagcccatcttttggggtcctgttctaagctgtggtcccctcacagccagctcccgcttacgtctgctctggcgggaccgaggtgcctcccgagatggtgcacctggaaggttctcctcctcccgctgggcagaagctggcccgcctgctgtggtccccactgggcacggctcagccctgccctgtgtccaggccttgccgggctacacgcctggggctgccaacagtcacccccggggcaagggcagctctcgccctcctccgagaacagccccccatgggcaaggctgtggctggattagtgtgggcctcctcgggctggggccgggcagagagctccccggatggtgaagacgggcctggacttgggcctggacttggacttgggtctcggttcaaatcccagcagcacctcttcctccctccgtgaccttgaatgagctgtttaacctctttggtctcagttttctcatctatcaagcagggtggtcattttccacctcacaggtgggtggtgtgaggcctccaggtgaaagggtcctgcacacaggaggcgctcaataaatgtctgtggcggctgcaacaaccccccgggggtgaagtaggaagtctgaggggctcagaaatgagagagacagagacagggagagacagagagagagagagagacagagagagagagagacagagagagagagagacagagagagggagagagagagggagagagagagagagagagagagagagagggagagacagagagagagagggagggtctttctttattcccaggccgggcagccaggcccttctcatccagactcaactctccccaccctgggccttgggctccctcctgccttgtccagcatctgggagttgggggttcccgctgtatggctgagtgctctcggggatccttacccccgtacccacccctggcccagcctggctccaggcttccctttccaggacatctgtagccccggctggccctccgtcctccagagcgggcctgatttctgtgccctgggaggaggggctcaggcctggcttggccacccatgtgctcaccttgtagatggccatggtggacctgtagaactggtccatctcgggggccatggaggggctgtcccgggtctgagcaggaggctgggagctggtggcgatggcacagccgggagcagtggtaggtagtccctcaggtgcccacgactcagctggcagcgaggaagcctcggagagggacctggagatggaggcctgcctcagaggagtggcagcttaattattcaccaactcgggatgtcagaatgtgatctggggcgtaaccagatccggcagggaaggcatcctgtgccgggcaggctcgtgtgacctgcccttcaattattcaccccttggagctgtgggctgatacaagtgcccatgtggatgagccccctcctgggtcaccccctcctcaaggaccccaaccctggggggccccgccctcccacctgcctataccaggcattgcccaccttactgggcgggcgctgcccgatgccctcccccaggactctctctgccagacccagcagcagcagcccctggaggggaacgccgctttacttctcactgtcctcaggcctgcggctcacagtggggccacgccctctgagcttggctcccacagccgctctggcccgcccagctcctccacttgccggagcaggagcagcacaaacgctggagttgcccagccctgggcagacctcggccctgcacacgcgctgcctgtccacgcggagtccccggcctctctgggtgacaaatggggctctccctggtcctccaagatgaagttgaagattgtggccctccttgggcctgccgggggtatgtgggcctggcagctgcctctgcataccctaagggccggtttaggggaggcctagaggaaagaggaggtgtccctgcccagggatcctggaaaacagagtgtccgggtacaaaggaaaagtccggtcaaggccaagggtcaaggccgaggggagccgggggtcaggggaacaggtggatctcacaccactgcacacacaacacaggtgaacttgaatccaaatgatttatttcagttttggctcttaagccacttccattgggaagaagaaactcccaggagtgacctttgagagctgagggttctcggggtggggcagtgtgaggggctgggccagtgtgaggggcaaagtccaacgggcatcccactcctgcggcctgggctttcccagctgatggggtgggggacacccatttctttagtcccagcccccagggaacggagcagagggcagagggagtgggctgcacccaccaggaagcctgggagtgcccttgctgggggctggggcagaggcagcccggcaggccctcagggaggctggggctgggggcaggggtacggttgtgcccgggtacccttaatgtttgagctgatgggggagtcagttgtccttgacagtcagggaaaggggccaaagggggctctagactttcccagcctggaatgacagaaagtgctggaaggcggggttagtgggagacaggccttcaggaccagcctcgggcaggcagcttggcattctcccaggcctggtctatggactcagaggtgcctgggcccagatctgcccgggagggcagtggctgggcttggcctggcaggggctgaatggacgaggtcagctggggccggtgagaggctggggaccctcagggtgagagcagcagctggatgagcttctggaactcctcgcggtgctcatagatgtagacctcggtctcccagagggcgttgaccagcactgtgtcactgacctcatccagcatgatgtccgtccccagctgggggttcaatctgttcgggccagggaggagggggtcaccctaggatgctcaggctgggcaggggacgccagctaggaccagggtgggcttggggaacagagcagacccttggggaagggaaagtccacactagggctgggaggggaaggtcggtgagtccgaccacgccagggcacggggccaagggctggggcggctgagccctcacctgaagtactggatgccgaccatctcgcaccaggcccgtgcccggtccacagcccgcccgtctggatccgtgcactggtgagaagcagccttggtgagtgccgggcccacaccccgcccggcccgcaccccgcccggccctgccctgcactctcggagccccagcct

SEQ ID NO: 1562606 - DNA, 4001 bp, Homo sapiens
aacagccaaatgaaatgttgttaatgattattactgttgcaaaccacttgtcctaaaagcttaatgtgtgtgatatttaatacatgttgattagattatgtgctagtaaacacaagtctgtttttttacaagactggttagatatagccttaggcatctttcaattgaattcaactactggtccttgctgtaggagacaactaaaaataaaataaaaagtgaatccaactactgaatatactcttccacataaaaaatgagccattggaaaaaaaatacagaacagtacctgaccattcctagtaaaaagattttcaatacccttaactgcctattaccaaatgaagaatacttcacttgggggagagagggtgttaaaaatgaaaataatacttcatgcggtggcgcgggggtggttgaaaaaaaggtatcaccgtgcgcggtggctcacgcctgtaatcccaacactttgggaggctgaggcggggggatgaccagagattgggagttcgagaccatcctgaccaacatgatgaaaccccgtctctactaaaaatacaaaattagccccgcgtggtggcgcatgcctgtaatcccagctactcgggaggctgaggcaggagaatggcttgaacccaggaggcggaggttgcggtaagctgagatcgcgccattgcactccagcctaggcaacaagagggaaactctgtctcaaaaaaaaaaaaaaagaaagaaggtatctgaagggtgtggcaactcatccaaggtcacactagtcagggcagagagcaacattctgctttatactaaacctccagaggaaatcttataatttcgccaaagaagtttttgttttgttttacgcaacaacaacaaaaaaataaaagtaaggagggagggctctcagcttagttcaaacttctaaacagagacagtgagatagctattttgaataaacaaacacttgtgcagggagtggctaagagctaaccaaagccagcagtcaacagcatgtgaacaactggccagatccgtccgattttcaacgctaggttagagcctccactcagaaagtcggttatgaaggcaagaaataggatctttacagaatgttgggaggataaatcaaagggggaaaatgactccgtgtgaactgtactgcctccaagggcaagaaggcagtttttttctgaaaaaataggtgtcagaacagcagtgaattaaggttaagaaacaagacttctaacaatctctgagaagaaacgactaagactggcaaagctaatcttccagtgttctaagtgaatcgcaggaaaacctttccctcaaccaaaaagaagtcgccgttccccagtttagccctaaaaatggacccgggttttccacgtgaagctgtctgtggggaaggacagcggcgtggagccagggccgagctcctccgcctccggcaccccacgccggaagaagcctgctcagcggcggggccgcgcggccaggtccggtcacggtgaagcggacccctaagctccgagcaccttcgggcgaaggagcgccggtgtagacacacacactcaaactcacgcgtcgtcggaaccactggggagtcggtggctcgatacggtctctgggcactttcctacccaggtgaaaaccacctcctcacccagctcagccttcccggaaccccactcccctcacctggccctggcccctgccccagaagagatgaaagaggcggcggcggcagttgcttccgacagggtcccccagcggcggtgagtgctccgacccgcggccctaatctaccgccgccgccatgttggagggtgaggtcaccccggcgtgccttcgtcacggccggcgtcggggcgggacctgaactacctgacatccggaacggtatccggagcggaaggaccgaccaacggaggccccggaggtctctccgtccagatgtgacctgaagacccaaaccctcctagcccgcccaaatctgattgcgacgttcggaagttccgtctctcagatcatttccggagtcgaggggttgggattctgaccggctggtcgctgtgttggaggaagggcaggcgattccagggaaagaagccttgctgcatgcacaggctatgttcagttccacaaacatgtattgcgtttcaagtgtttgccaagggagcaggtcaaataagtatctacacagtcacgacagcctcgatgttcgccactagttggggcagatggtccttgaaggttgggaaggaattccggggagggaatatagcggggtggtgtagagaggtcctcctaggcgaagggaactggctgagcagaggcgccagggcatgaaggaagtcttaactagtaacccgcttttgttaacagtacctggaacacacagcgcctggaacatacttaacttgtattaatggatgtttgtttacttgaatccgagagttctttggaggagtatcggaaggtatctaggagagaggatacagtgtgttttagggagatcaaattgcccgtggtgtgtgtactgaattggaacaaggagggcattgacaataaggagttagaagactgagccagatcagaagtgataaaatcctgatggggagtgactgccagtggatacagagtttctttttggggtgatggtggcacgactctttgaaatactgaaaactactgaattgtacactataggtgaattctatgttatgagatctatatctcaacaaggctattctaaaggaagtgataaaagagttgaactgctattgtggggctggtgccacaggatgctttttaagcccgagtgactgaggaaaggatggtgccattaatagggacataaagttttgcaaaggaaaggcttagtgaccttggaaaactaatagtacaggccgggtgtggtggatcactcctgtaatcccagcactttgagaagccaaggtgggcggatcacttgaggtcaggagtttcagacctgcctggccaacatggtgaaactccccatctgtactaaaaacacaaaaaattagccaggtatggtgtcacgcgcctgtaatcccagctacttgggaggccgatgcaggagaatcgcttgagcctgggaggcaaaggttgcagtgaaatgggtaaccaaaaatgaagactttttttttttttttttgaggcagagtctcactctgtcgcccaggctggagtgcaggggcgcgatctcagctcactgcaacctctgcctttcgggttcaagcgattctcctgcctcagcctcccaagtagctgggattacaggcacccaccaccatgcccagctaatttttgtatttttagtagaggcagagtttctccacgttggttaggctggtcttgaactcctgacttcaggtgatccactcgccttggcctcccaaagtgctgggattacagacgtgagccaccgtgcctggctttttaaaaatttttaatagagacggggtctcaccatgttggccaggctagtctcctactcctgacctcaagagatccgcctgcctcagcctcccaaagtgctgggattacaggggtgcgccaccgcgcccggccctaattttacttttaaggtctgtgcagttcactgtatgtacactttacctaaaaaaactttcaaaaatgtaacatgcaataatttattttgggaggtacttatgttaccaatttggtacatacttaagttcatttctttcacattgctctcagtcttttcctttatttatttatttattttttattattattttctcgagacagagtcttgctctgtcacccaggctgtagtgcaatggcgcgatctcagctcactgaacctcacctcctgggttcaagcgattctcctgcttcagcctcctgagtagctgggattacaggcacccaccaccacacctggctaatattttttttttgtattcttagtagagatagggtttcgccatgttggccaggctggtctccaa

SEQ ID NO: 1562607 - DNA, 4001 bp, Homo sapiens
aactgcgtcttttttgtttttgtttttaaataaatgaagccaaagggtttgagtaacttgcccaaggtcccttagcttgctatgacaaattggatagcaataataggtaacccttatataattcttatcatgtgcccttctaaagtcttcacttcatctattgaaacctcacaacaatgctatgagaggattattattacttccatttcacagacatggataccaaaacaagtaaagaagataagtagttttcccaaagtaataaagctgggattcaagcccaggcagtttgcctccagggtctgtatttttaccaactatgctgtcctacctcttagatgaagtccctgattgctttctggtgcttttctgtctgtaatatagtaccttttgagttaatggccagaagtattcatagatagaacatgttatacttggtgttttttttcaagcaaacacacagatacatgcattaaactcttcaattaaaaagggaagtagagaagaaacctaagtagataaaaggaatataacaaaataaatgtaaaataaaatacaaatataactttgctttggtggtaggaactaagtaaaaaactaagtaaaggaacgtatcaaaataaatgtaaaataaaatacaaacataactttactttggtggtagacctaagtaaaaatcaggttgacaattgctcagagacctattacaaaaattggctgcatcatgatgtctatattgattgtatttttttgtttcactttttttttggtgggggcagggggtcacatcagttacaaattattctgccccctcaagcaatattttaccttctgagacacagctgctgctgagctgagctcctatgaacttaacttttccatctgaagaagctttggcaaaattccaaagcccatctacgttggtaaattttctaaggactcatttcccttaagatttatgccaacaaacctctatcattacttctcagactttatatatatatctgtcaagaaaaagagctgttttggataatacgttagttacaacttacattagaataacatctacaagtagtcttagaacgattctgacaatctaaatcattcttcatataaaatatttgtattgttgggagtatccatctctttggctccactgacacaaaacacacaaaggctccactgacattttgtaactttgagggctcaaaaatataaaactagccgggatcaaccagctagttttatatttctgaggcctcgaagtcgcaaaatggaaacagatcactgctttggacccttataaccaaatgcgcctctcagatcattattaacctaaaataagaaaatggagagtgctgaagaaattacagagaagtaattttccacccaacttgatgaggaagatccacaaaaaacacatttcagagtacaacacagtaaacatccacacccacatatacagcaggcagattttcccaaaacagtacttactcttactaaattgattttagctgcaacccacttcattaatttcagatcatccctgtgtgtcacctcccacaatatgaaaactattctaacaaattattaacctaaaagcttccaagagatagtctttaaatatcctagattaaacaaacaaaaacctattctaaaatcagaagcttcatgtcaagagaaaatgacaaagattaattttattcaaaatacttaaatattacaatagacagatgacattccctccagtaatcttttatggaatctaaaagtaaatctttcacaagaagtatttatcatgtgacgacggagaaagtaaaatacaagccttaccacagtggacttgctctgccctttccaggagacagacagacttctaacgtagcaacacaagcccaggaaatgaaaagagaatgaggagggagggagcaaggatgactcagggagaatcacagcacatgaaccagtctgtgccctcaccgggctgcagggcaaataaaagtcaaaactgaaactaagaggaaatggtgatcagacttaaggagagggaaaaaaaccacactcttcagagacgcatgtgaaaacctggcatttgtaaaagtgtgacattttcacaaaacactttcacatcattatttttgtgagacagagaagctattcttccctttttgtagttgaaactgaggttcagagaagttaaatgaatccttccaaaacacagggctagtatttggcagagctggggcaagaaacaaatcttgtgatttctaatccttttctcagttcatcattcgccgggtaaaaaggcagagtgaaaaaaaaaaaaaaacaaggtagaaagagaaaacaggctgggcaaggtggcgcatgcctgtaatcccagcactttgggaggccaagcggggaggattgcttgaggccaggagtttgagaccagcttgggcaacatagtgaaacctctctctgcaaaaaataagccaagtgtggtagtgcatgcacacctgtggtcccagctactagggaggctgaggtgggaggatcacttgagcccaggaagttgaggctgcaaatgagccatgatcatgccactgtactccagccagggcaacaaagcaagaccctgtttctaagtcctagccatttctgttaataattcagaaaacaaaatattatttttctccttcaaatctatatgtccaaagcctgcctgttcctaactgactatgtgctatatcactccattcatccaacagattatggctgctggcaccacctcctctgctgcaggttttcaaaagtagctgcaccttgagaggtaggcagtttgtttcacttgatgttgtgttcaagtgactaatgacaaatacattccccgtggaaatcataccacaggctttatataacagacatgcgatatcatgtggtcaaatgattctcttctggaagggttttaagagctgtcaatgtaatgttcagcacacagtatcttaaggagattcatgttgacagcttatgtcacaggatacattttcaccaactggcattaaaaaaaaagcaatatcggccgggcgcggtggctcacgcctgcaatcccagcactttgggaggctgaggcgggtggatcacgaggtcaggagatcgagaccatcctggctaacacagtgaaaacccatctctactaaaaatacaaaaaattagccgggtgtggtggcagccatctgtagtcccagctacttgggaggctgaggcaggagaatggcgtgaacctgggaggcggagcttgcagtgagccaagatagtgccactgcattccagcctgggcgacacagggagactacatctgaaaaaaaaaaaaaaatgcagtatcttgggtttttgtttgtttgatacagagtttcgctcttgttgcccaggctggagtgcaatggcacgatctcagctcactgaaacttctgcctccctggtttaagcaattctcctgccttagcctcccaagtagctggtgttacaggtgcctgccaccacacccagataattttttttttaatcaatcaaaacctttaatgctcagttttcacaatcaagtctatcaaatttccagatttacagcaaaatgtgccccctaaaaaagtgtacattcttcagtttctcctatacttttttttttttttgcctatctttcaaaactgagcactgggtatttttaacataagccatgtcatatgtacagtttaactatgtttcaggaataaacaaaattcatgatattttagtaactcacagtgtatttatagaatgaaaagttctctatcaaaacacacttttcactgggaaaaataaataaaatagacaaatggatctacacaaagtaaacattaactttggtagatttcagtgcagttcataacaagcatatttgcccttattcccccagagctgctcaactaagaatttttaaaatactttaactgagattttattatgttgacatttgtttctca

SEQ ID NO: 1562608 - DNA, 4001 bp, Homo sapiens
caagtgcacctgatacactcaaaactatccactcctccctcccaacttctgttttgtatcccctactcgtctatggttttcctcccccgtgcaggtgtgcccacgcacgtggcgtgaggaactcacctgcgtctccatggaaggcgccctcgccatcgttgggccagatctgcccggtcttgcggacgcccacgatggtggcctcggacacgacaaccgggcagtgccggtgccgcttatggcactgcggcgtggggggactgctgctgtcgaaggactgttgcgagttctgcgagggagagcggcttttgtcccggaacatgcggtaggtggtggggcttggggacacgcggctggactggccagaggagaagtcctcctcgctggaggtgaggttctcattggagctgcagtccggggtatagccgcctccgcaatcctcaaaactccggggggagtaggacctgcggggccaggtaaggcgcttctcctgctcagaggtgctctggctgcgcaggagcgggcccttgccctccccttccatcatgcccccgacgtagatgctctggtagggctggtactccaggggcggccaagggggcctgctaccgccattggcgtcgatcaggttgtccttcaggaagcgggggttcaactcggcgtcctcgtagtcgccgtcgacgccgcagctgctctccgaggagcgtccccggtaagggggcctggatgcatcccccacgctcgagcccgcgccgtgctgggactttttgcgctccatctgcatggcctggctgcccagggagctgatgcggtccgacacctctttgtcgttgaccttcaccaggccgcgctcgtggtgaaactcgacgttcacgtagaagggcttctcggcgtccgccccgggctggccatggcccttgcggatccgctcgaagttggacctgagcgccgccacgctggcggggggtccccggtcgtcccgttcccccgacgcggctgccccgggcctgcgggcggtcccgggcctggccttacccggagaaccctcgccgtcgggccgggcctcgggctcctcggcgggcggcgggtcggctccgtcggcgggcgctggctgcgggcgcgacgcggacgctcggggctcggaggcgccgtcgggggcctgcgccgcgcgccggaagccccatcgctgccggtcatagctcttcttttccttggccagcaacgtctgcaggtagatcatgcggaagcgctcctggttcacctcctgctccaggcgccgaatggaggccttgcagcgctccagctcctgctcgatgtcgcccactgagcgcagctccatgcgcgggggctctgagtccgggaactgcgccttccacgcctccgcgaagcccaccgggtccaccatggcgcggccggccttacctgcgccgccgggctgcgcgcggggcccgtctcagcggcggcgcggcgcctcgccagcccggccccgggcgccgggcggcccccatggcccgcgcggcggcggcggcggcgaacaatgcccgcccactccctggtggcaggtgaggcggagcggggcgctcggcgcgcggggcggggcgcgccggggggaagggcgcgggctgcgcgcgccgctattgtgtgcggggctcctccgcacggcgaggcgcgggcgctgctctccgctccgccaggccgccgccagactctggccacggcccgcgcgctcctcgcctctcgcttccgcaccgccccacagccccgccgccgccgtgccgccgccgccgccgccgcctcctcggacgctaagctcagccagccggctctcgccgcactcccgcccggcccgcactctgcgccgcaggaaggggagggccggggggaggtggccgcggcgcggatgacggagccaggcgggcctcttaaaggggccgcgccgtgggcacagggcgggggggccccctggaggcggctcccccatcgagccgccaccctccccccgtccctgtgccttttgggaaactgaggccctaacaacagcgaattggactgtgcaactcgcagcccaggggtcccccgtaaaaaagacaccggactccctggtccataaagacctttccaatacagaggtctgggccagttctgcagtcctggaacaggaacacttggctcccctccggccaggaggacttctccggccagtccagccgcgtgtccccaagccccaccacctacctcatgttccgggacaagagctgctctctctggcagaactcgcagcagtcctccgacagaagcaacctcccccctctgcccctaccacgccgcagtgccataagcgtcaccggcactgcccagtcgtcgtgtcagaggccaccatcgtgggcatctgcaagaccaggcagatctggcccaacgatgcggagggcaccttccatggagacgcaggtaagttcctcacacctcacagcctggcctctcaccagcctcagggctgggcacactagggaccacccagcagggcccaactcacagagaggccaggaccaggcaggtcaccccgcaaggcagggagggccaggctgagtaaccaatgccagcacccttgtttcagcgggcctctcacgttgtggatctgctgtgggtggctgccacacgggtttgtcacagcaggaccacatgatggatgataaatagggatttctccctcaggtcactcaatacccacacctgccttcctgtgtgctgagccatgtgtttgtcccctggcctctcttgagctccagaggtcaatgtagtttttccaggacgacctgactcagaacttccctgattagcctccctctaagggggcggccaacctgcactgaggttcacagggctgggtggaagacagcccagagcagggagtgaaacaaaacctttgatggttctctggggacacagagatctgagacacagtggagagcactctgcagggactctgatgggcacaaactgaaaatacccaaaccagcccgctgggttgggggaaaaggaaacaggatttggcaaatgaattactgggcttgagtcctgaccacctctccctctctgcctcagtttccttgaagtgagaagcacatctgcctccaagtgctgttgtccctgtgtggatgttagggattatcatgccctcctcccaatgccagcgtcatctggagcagatactttgaagtccaatctaaaggactgagcccaggctagtagccaggccagccctgcttgggttcagggcttcctgccgactcctggctgtgtgacctcagcagtgtctctctcagcctctctgagcctcagttttgtcatctgttcttcatgtgcccaatcctgcttccttttcccctgacccggcaggctggtttgggtattttaattttgtgctcatcagactccctgctctttgccctgtctcagatttccaggcttccctagagaaccatcaaagattttgtttcactccctgctctgagctgtcctgtcttccacccagtcctgtgggccacggtacaaaatgttgagagcatcctgcataaaatgcccagatggggcaaacataaaacacaacctgataaatggtgtgtaggggtcgatttcgtgattgcctgttaatattagtgcccctggagaacattcctgccctggaaaacccatgggccccagtttctaggctgggtgggcggtgcgcagctcactgctgccctctgcaggccttgctaacctcctgccatcctggtcccttggacccagcggaccttctcatccccttcccatcaggctgcaaatagcccattttgcatgtgaggaaactgagatgcaaatgatgccctggccactaaaggggctggaatcccagtagtgccatactgagcagtgctctcatcctcagtggcctatttttttttttttttgagacggagtctcacactgttgcccaggctggagtgcagtggagtgatctc

SEQ ID NO: 1562609 - DNA, 4001 bp, Homo sapiens
gcgctccgggtcccctgaaaaaacgggcacagtcctcggtcacgtcgaggacctgctcagcccctccacttggcaccggagagaggatgactcacggcccttctgcctggaaggcaggctccagtgtcaaatgtccatccgcctccatcaccctcatccatccttgtcagtccaggggcctgggcactgctggggctcctgggcagacagttcccccttgcaaatgagtgggaccctcagctccttcgatcagcatcctcacgtcagccgagcctgtgagcacccctaagcaaggcctctgagctgggcatgcgacaccccttcccacccaggcaccctccccctagaatcccccataccaccctggggccatgccccgcttccctctctggcaagctcctgcacaaccttgagaccacctgacagccaccgtctatcctgcccaacctcctcagaagcactaacagcacctcgccccagccacggcaggtctctgcacccctcgtctcagtcaccactctcacatctcatgaacagagacacgagctgcttcctcatgctccctgtgcccgtcctgggagatccctgcctttaaaccccagccacgaactgctgaccccgcatttcctcttccctccctgggcaagaggggcagaaggggcagggacgcacaccctgggccgcaggcagaggcttggccagggtcgtcctcccggcagtgcctccctggagctctgtctacctcaactcctgatgccagaggatccctctgcgctccccacacccttaagaccccagctcagggaatctggtctcggtcatcactcccaggggactgcagggccccaggacggcacacattcaggcccaggagagctccccccatctcaaagcctcctgtgggtggagatggaatgtggaaaaaccgcatcctctgcagctcccccacagtgagagcgaggactgagggtgtggataaggctccaggaagggggtgcaagcctgagaaggtggaagagctctgggtgggtccatctgctcctcacctgccccaaccctgcctgcaggtgaaggccggtccagccgcagaaggcccagcccccagcccacttacagaatccgcactgtgctcctccagccggcccggcccctcgctgcccaccgagccatcatgaccccagcaccgctgcacattcgtatttgttgaatgaatgaatgaacccttgccagcccagccacttggtggctgagggcttcagagctctcccagggtcccctggggtcattcagccactcaacagtttcccagcagcagcagcgaggatccgcacatcattgccagtgctctaaggagcgggcgagccccagtaagcggccgctctgaccgcgctttgtcagccctgagctccgctcgggaggagccggcaggtgtctgcggtgctggaaagaccacggtgtgggcggggattccgatccgccggcaagggtggcctgcacccggccaggcccgcgggttttctcctctccggggctggcctcggcccctccccctccccgcgccccgcacccctcccctgaatccccaggccacgtggagaggacacaacaaagccttccccgcctccgaggcggacccgaccctcagcaccgacctgccggccgcgccgaggagggcgcccgggcggaggggaggcgggagagacccggccctcaggtcgctgctgaggcctggggctctgaccccccgcctcccctcctctggctcccaccgcggtcgggcccagggcgggcggcgggccctgagctccacgccggggcaggcggcaggcaggggtcacgggctggggctcggcgcgtaccccgggaggggcgcgggtgcactcaccaccctccagccgcgggggcgcgggcgcgtccgggccgaggcagcgtctcccaggcgcgcggacacggtcgactacccgcttcctccttatggcgccccgcgcgcttcctccttcggccccccacgcccgggcccgccccggcccgccccggcccgcccccggcggcttgcggggacccggggagcccgcgccggcgcggggctgtggagcggggcggggagccggcagcgcagtgagaaccaggctttccacccttaccccttacgcgactgtttcagacagtgtcgtccaactttaagttggccacttactccagcgccgctgggataattcctaatgattctctgggaaacattcagaatccccaggctgtttctggaacagtctggggtggtcattctaggtcctcacggaaccaggggtttggaaagtgggtgaagccatgtgggttgcagagaatctggcccagcccctcaccagtccctgtgcttgttgtttattctttaattatttggatatcaactctgatttaaaacatcagtttaacatatagataatgctgggactacaggcgcacaccacacccaactaatttctttttcagtttttagtggaggtggtggggggggggtctccacctctggaggtctcaggctggtctcgaactcctgggctccagcgatgcttcccacctcggcctcccaaggtgctggaatgacaggccagtccatgcatccccggatgcagctctcaccggcagtgctgctgcagagccctttgtgggcgtcttcacttctcttgagtgtgatacctaggagtggaaatgcgaatcatagggctggacgagcttcatggtattaaaaactgcctgctttccaaggtgatgcacaccgttcggcacttccaccagccctgttggagcgtccagttgctctgcgccctcgcgtgggctcactccctgagcccactgtggctcctccagacgccctcacttctacccgggctccctagactcttgcctcttttataaaaggtcagaggatgtcactcacgctttaacatcctctgaataaaagccaagttcctttcagtggcccgcagagtcccacgcgacctgccctgctctaagcaaatcctaccctgtccctgttcctcctcggcagccccatggcctctggctttcaccaggcctcacttcattttcctccacagccagcatcgcagcatgacataccacggagtcgtttgtgtgtgtgttgcctacctcccctctcggaatgtagcctccacgaggacaggggcttgtttcctgcatgctcttcactcgggctgggcactctggggggctaacaaatggaagatcctgtgagcagggaaaccgtcagatggcattaggggccggtgccctgcagaagacgaaagggaaacttcatggactgaggccaggtcatctgcagggtggtgttcaaattcatggtacaatgtcagcaggcgcccagatgggaaaagagagggacgtgcacctgggcacaagaagctgcaggggcccctcccagggcaggcgagagcttggacagtggggcacagtgggcaagaggccagtggggtggcctgaaggcaggaggctccagcagcctggatgagcagttggattttatcctcagcactgtgggggccactggccctgtcatgcagggcaggacctgtaccaattggcccccacagtctctgcctctcctgttggctttttgcaggtctctcaagtgcttcttacagtcagggtagagcctccccgcctcaatcctccctgtcctgatctgctgcctctatgatgctttgggcttcaaaatctgtctgcagtatttgtaaaatgagagagggtgatgtttcctgcaaaacaaccacttcaaaaagaaaggggggcggggtgccagaaaacaattcagggggtgacggactggggggctatggaagggtccagggaaattccggggatgatgggattcttctatacagggattgtggtggatgccacacaattgtacacttttgtgagaactctgcacgaagaatggtgagttttactgtatgtaaaattataccttaattaacaaa

SEQ ID NO: 1562610 - DNA, 4001 bp, Homo sapiens
tccaggggcctgggcactgctggggctcctgggcagacagttcccccttgcaaatgagtgggaccctcagctccttcgatcagcatcctcacgtcagccgagcctgtgagcacccctaagcaaggcctctgagctgggcatgcgacaccccttcccacccaggcaccctccccctagaatcccccataccaccctggggccatgccccgcttccctctctggcaagctcctgcacaaccttgagaccacctgacagccaccgtctatcctgcccaacctcctcagaagcactaacagcacctcgccccagccacggcaggtctctgcacccctcgtctcagtcaccactctcacatctcatgaacagagacacgagctgcttcctcatgctccctgtgcccgtcctgggagatccctgcctttaaaccccagccacgaactgctgaccccgcatttcctcttccctccctgggcaagaggggcagaaggggcagggacgcacaccctgggccgcaggcagaggcttggccagggtcgtcctcccggcagtgcctccctggagctctgtctacctcaactcctgatgccagaggatccctctgcgctccccacacccttaagaccccagctcagggaatctggtctcggtcatcactcccaggggactgcagggccccaggacggcacacattcaggcccaggagagctccccccatctcaaagcctcctgtgggtggagatggaatgtggaaaaaccgcatcctctgcagctcccccacagtgagagcgaggactgagggtgtggataaggctccaggaagggggtgcaagcctgagaaggtggaagagctctgggtgggtccatctgctcctcacctgccccaaccctgcctgcaggtgaaggccggtccagccgcagaaggcccagcccccagcccacttacagaatccgcactgtgctcctccagccggcccggcccctcgctgcccaccgagccatcatgaccccagcaccgctgcacattcgtatttgttgaatgaatgaatgaacccttgccagcccagccacttggtggctgagggcttcagagctctcccagggtcccctggggtcattcagccactcaacagtttcccagcagcagcagcgaggatccgcacatcattgccagtgctctaaggagcgggcgagccccagtaagcggccgctctgaccgcgctttgtcagccctgagctccgctcgggaggagccggcaggtgtctgcggtgctggaaagaccacggtgtgggcggggattccgatccgccggcaagggtggcctgcacccggccaggcccgcgggttttctcctctccggggctggcctcggcccctccccctccccgcgccccgcacccctcccctgaatccccaggccacgtggagaggacacaacaaagccttccccgcctccgaggcggacccgaccctcagcaccgacctgccggccgcgccgaggagggcgcccgggcggaggggaggcgggagagacccggccctcaggtcgctgctgaggcctggggctctgaccccccgcctcccctcctctggctcccaccgcggtcgggcccagggcgggcggcgggccctgagctccacgccggggcaggcggcaggcaggggtcacgggctggggctcggcgcgtaccccgggaggggcgcgggtgcactcaccaccctccagccgcgggggcgcgggcgcgtccgggccgaggcagcgtctcccaggcgcgcggacacggtcgactacccgcttcctccttatggcgccccgcgcgcttcctccttcggccccccacgcccgggcccgccccggcccgccccggcccgcccccggcggcttgcggggacccggggagcccgcgccggcgcggggctgtggagcggggcggggagccggcagcgcagtgagaaccaggctttccacccttaccccttacgcgactgtttcagacagtgtcgtccaactttaagttggccacttactccagcgccgctgggataattcctaatgattctctgggaaacattcagaatccccaggctgtttctggaacagtctggggtggtcattctaggtcctcacggaaccaggggtttggaaagtgggtgaagccatgtgggttgcagagaatctggcccagcccctcaccagtccctgtgcttgttgtttattctttaattatttggatatcaactctgatttaaaacatcagtttaacatatagataatgctgggactacaggcgcacaccacacccaactaatttctttttcagtttttagtggaggtggtggggggggggtctccacctctggaggtctcaggctggtctcgaactcctgggctccagcgatgcttcccacctcggcctcccaaggtgctggaatgacaggccagtccatgcatccccggatgcagctctcaccggcagtgctgctgcagagccctttgtgggcgtcttcacttctcttgagtgtgatacctaggagtggaaatgcgaatcatagggctggacgagcttcatggtattaaaaactgcctgctttccaaggtgatgcacaccgttcggcacttccaccagccctgttggagcgtccagttgctctgcgccctcgcgtgggctcactccctgagcccactgtggctcctccagacgccctcacttctacccgggctccctagactcttgcctcttttataaaaggtcagaggatgtcactcacgctttaacatcctctgaataaaagccaagttcctttcagtggcccgcagagtcccacgcgacctgccctgctctaagcaaatcctaccctgtccctgttcctcctcggcagccccatggcctctggctttcaccaggcctcacttcattttcctccacagccagcatcgcagcatgacataccacggagtcgtttgtgtgtgtgttgcctacctcccctctcggaatgtagcctccacgaggacaggggcttgtttcctgcatgctcttcactcgggctgggcactctggggggctaacaaatggaagatcctgtgagcagggaaaccgtcagatggcattaggggccggtgccctgcagaagacgaaagggaaacttcatggactgaggccaggtcatctgcagggtggtgttcaaattcatggtacaatgtcagcaggcgcccagatgggaaaagagagggacgtgcacctgggcacaagaagctgcaggggcccctcccagggcaggcgagagcttggacagtggggcacagtgggcaagaggccagtggggtggcctgaaggcaggaggctccagcagcctggatgagcagttggattttatcctcagcactgtgggggccactggccctgtcatgcagggcaggacctgtaccaattggcccccacagtctctgcctctcctgttggctttttgcaggtctctcaagtgcttcttacagtcagggtagagcctccccgcctcaatcctccctgtcctgatctgctgcctctatgatgctttgggcttcaaaatctgtctgcagtatttgtaaaatgagagagggtgatgtttcctgcaaaacaaccacttcaaaaagaaaggggggcggggtgccagaaaacaattcagggggtgacggactggggggctatggaagggtccagggaaattccggggatgatgggattcttctatacagggattgtggtggatgccacacaattgtacacttttgtgagaactctgcacgaagaatggtgagttttactgtatgtaaaattataccttaattaacaaatgaaacaatatacacatacatgagagaatgatgactttatttttttttttgaaacaggatctagctctgtcacccatgctggagtgcagtggtgtgatcacagctcactgcagccttgacctcccaggctcgagtgatcctcctgcctcagcctcccaagtatctgggac

SEQ ID NO: 1562611 - DNA, 4001 bp, Homo sapiens
gaccttggacaagttacttagcctctccttgcctcagttacaccatctggagaatggggatgctaccctcgtctgaccaccgtgatgtgagccagtcagcacacatcaagtgctccgtgagcgtccggcacacaggtgcttgtctctgtcctgtgcttcagctccatcagtgtcttcttcagacctgtcattggcttggggcaaggatatatgtggccgctgagggcggtccgccaggtatggcagccatggagctgctaattaggccctgtgagtgggaggccctgtggggtgggcaggggcagacgcccagctgctctcggggacactccaggcctgtgctgccctccacagccccagctggagaatggtgaccagatgtcaacgacaggaagcatttccagaggccacagctctgcagggaggtctctcatgggctgacagccagagccagcgctccgggtcccctgaaaaaacgggcacagtcctcggtcacgtcgaggacctgctcagcccctccacttggcaccggagagaggatgactcacggcccttctgcctggaaggcaggctccagtgtcaaatgtccatccgcctccatcaccctcatccatccttgtcagtccaggggcctgggcactgctggggctcctgggcagacagttcccccttgcaaatgagtgggaccctcagctccttcgatcagcatcctcacgtcagccgagcctgtgagcacccctaagcaaggcctctgagctgggcatgcgacaccccttcccacccaggcaccctccccctagaatcccccataccaccctggggccatgccccgcttccctctctggcaagctcctgcacaaccttgagaccacctgacagccaccgtctatcctgcccaacctcctcagaagcactaacagcacctcgccccagccacggcaggtctctgcacccctcgtctcagtcaccactctcacatctcatgaacagagacacgagctgcttcctcatgctccctgtgcccgtcctgggagatccctgcctttaaaccccagccacgaactgctgaccccgcatttcctcttccctccctgggcaagaggggcagaaggggcagggacgcacaccctgggccgcaggcagaggcttggccagggtcgtcctcccggcagtgcctccctggagctctgtctacctcaactcctgatgccagaggatccctctgcgctccccacacccttaagaccccagctcagggaatctggtctcggtcatcactcccaggggactgcagggccccaggacggcacacattcaggcccaggagagctccccccatctcaaagcctcctgtgggtggagatggaatgtggaaaaaccgcatcctctgcagctcccccacagtgagagcgaggactgagggtgtggataaggctccaggaagggggtgcaagcctgagaaggtggaagagctctgggtgggtccatctgctcctcacctgccccaaccctgcctgcaggtgaaggccggtccagccgcagaaggcccagcccccagcccacttacagaatccgcactgtgctcctccagccggcccggcccctcgctgcccaccgagccatcatgaccccagcaccgctgcacattcgtatttgttgaatgaatgaatgaacccttgccagcccagccacttggtggctgagggcttcagagctctcccagggtcccctggggtcattcagccactcaacagtttcccagcagcagcagcgaggatccgcacatcattgccagtgctctaaggagcgggcgagccccagtaagcggccgctctgaccgcgctttgtcagccctgagctccgctcgggaggagccggcaggtgtctgcggtgctggaaagaccacggtgtgggcggggattccgatccgccggcaagggtggcctgcacccggccaggcccgcgggttttctcctctccggggctggcctcggcccctccccctccccgcgccccgcacccctcccctgaatccccaggccacgtggagaggacacaacaaagccttccccgcctccgaggcggacccgaccctcagcaccgacctgccggccgcgccgaggagggcgcccgggcggaggggaggcgggagagacccggccctcaggtcgctgctgaggcctggggctctgaccccccgcctcccctcctctggctcccaccgcggtcgggcccagggcgggcggcgggccctgagctccacgccggggcaggcggcaggcaggggtcacgggctggggctcggcgcgtaccccgggaggggcgcgggtgcactcaccaccctccagccgcgggggcgcgggcgcgtccgggccgaggcagcgtctcccaggcgcgcggacacggtcgactacccgcttcctccttatggcgccccgcgcgcttcctccttcggccccccacgcccgggcccgccccggcccgccccggcccgcccccggcggcttgcggggacccggggagcccgcgccggcgcggggctgtggagcggggcggggagccggcagcgcagtgagaaccaggctttccacccttaccccttacgcgactgtttcagacagtgtcgtccaactttaagttggccacttactccagcgccgctgggataattcctaatgattctctgggaaacattcagaatccccaggctgtttctggaacagtctggggtggtcattctaggtcctcacggaaccaggggtttggaaagtgggtgaagccatgtgggttgcagagaatctggcccagcccctcaccagtccctgtgcttgttgtttattctttaattatttggatatcaactctgatttaaaacatcagtttaacatatagataatgctgggactacaggcgcacaccacacccaactaatttctttttcagtttttagtggaggtggtggggggggggtctccacctctggaggtctcaggctggtctcgaactcctgggctccagcgatgcttcccacctcggcctcccaaggtgctggaatgacaggccagtccatgcatccccggatgcagctctcaccggcagtgctgctgcagagccctttgtgggcgtcttcacttctcttgagtgtgatacctaggagtggaaatgcgaatcatagggctggacgagcttcatggtattaaaaactgcctgctttccaaggtgatgcacaccgttcggcacttccaccagccctgttggagcgtccagttgctctgcgccctcgcgtgggctcactccctgagcccactgtggctcctccagacgccctcacttctacccgggctccctagactcttgcctcttttataaaaggtcagaggatgtcactcacgctttaacatcctctgaataaaagccaagttcctttcagtggcccgcagagtcccacgcgacctgccctgctctaagcaaatcctaccctgtccctgttcctcctcggcagccccatggcctctggctttcaccaggcctcacttcattttcctccacagccagcatcgcagcatgacataccacggagtcgtttgtgtgtgtgttgcctacctcccctctcggaatgtagcctccacgaggacaggggcttgtttcctgcatgctcttcactcgggctgggcactctggggggctaacaaatggaagatcctgtgagcagggaaaccgtcagatggcattaggggccggtgccctgcagaagacgaaagggaaacttcatggactgaggccaggtcatctgcagggtggtgttcaaattcatggtacaatgtcagcaggcgcccagatgggaaaagagagggacgtgcacctgggcacaagaagctgcaggggcccctcccagggcaggcgagagcttggacagtggggcacagtgggcaagaggccagtggggtggcctgaaggcaggaggctccagcagcctggatgagcagttggattttatcctc

SEQ ID NO: 1562612 - DNA, 4001 bp, Homo sapiens
tatttttggtagagacagggttttaccatgttacccagtctggtctagcccagtctagtctcctgagctcaagcaatcctcctgcctcagcctcccaaagtgctaggattacaggcacgagtcaaatgtgtgagaatcttagtcttaacatccttaagacaattaaaaaaaaaaaaagggccaggcataggggctcacgtctgtaatcccagcaccttgggaggctgaggcaggagtatttaaacactcaagccgggcggggtgggtcacacctgtaatcccagcactttgggaggctgaggcgggtggatcgcctgaggtcaggagttcgagactagcttggccaacatggtgaaaccccatctctactaaaaatacaaaaaattagctgggcctcgtggtaggcgcctgtaatcccagctactaggaggctgaggcaggagaaccgtttgaacccaggaggccgaggttgcagttagccgagacggcgccattgcactccagcctgggcaacaagagcgaagctctgtttcaaaaaaaaacaaaaagaaacaaaaaacacccaaactgtgccattcctgagaacttattccaaaggcgtgcccaaattaagtagaaatcggggtgagtcttaactccagggaggctactaacttgagaggggctttcacctggccagaaacctcagggatacattttgcagagtgaacagaacaaactgaggttcagagagatggagtggcccttccgaggccacagggctggagagtggaaagaggttttggcttgggttccataaagggcccttggcttctagctagacaaccctggcatttctgtgcctcctgggactgaaatctctgtttctccacctggaagatgaggcctcctgctcccaggggcagacagatgttaagaacttcccggcgctagtgcccaccagactgcgctcctcctaatgcggggacatgaggctgacaccaatgctccctgggaagctcgggctcccagaccacagtaaacactgcgttaaaacagcaacaaaaatgttacaatagtaagagctacaacagtaacatcaacaaccacgtcctaccccacgagtggctcattctagcaaaattgacaatgaagggcttgaaagcgatcgcatttaggaggccagagcccagacgacgaccagctccgaaccccacaagccttgtcgtgaccgcgccccgcaggcggggggccccctcgcgggtcacccgcaggggcgcacctccaatttaccaaacaaggtcgcatgccccagccgggctctagtccccgcccagtctggggcgcacctgtgcagggcgcgtgggcaagcgagggcgggcggctgcgcgccgctccgtgtgcacgttcctgttccggactttctgggcgtcccgttacgaagcctttcctcggcccttcctcaggtgcgcagcgcctccgggagccggtcccggcggcaccgggcacgacgccatcttccctcttttaagggcaccggggctgtgcggccgcggccgtgggctggcgttgccgcgctacggtctggccgggtccgcacgaccccagagttcggagccgggtgcccggaagccgcactggaggactgtgcggcggcgatggggcgtccagccgtcgcggcgagacgcagagggaccaccccattgcacaggcgcggagactgaggcccgcaggggccgcgcctggcacgatcgcccgtcggggacctggagccccggacagagagggtacgtttcggagccggagtcccgagacgtcgccccgccagcgacttgctggagcggtaaaacctgggcacggctccccacacttccagccgctcggcacccgggccgcggcctgggcgctaaccgccgggctcgagctgggcggagcagcgggcggcagcagggtcgggggcactcacctggcggcggcgatgctggcagcgtctgtaagccacccgggaggcttcgtgtctgcggcccggctgccggcgcgggacctaataggcccgggcgccccgcccctcccgccccgcccgggtcccgcccctccccgggagcggcctctcgcaccccgagcgcggaatcccggactggggtctgaatggcattggcaacagaaccgctacaagtgcagcccgttggcttgtttacagcctctctgccccctgctgttctgcaagcttgttttgtcccgtgcgtcgctgtttcccctgcgcccagcacgggcgtgcactcaggggtttccatcaatatcggggggatcgatccattgacagaatctggccctttacacggatggcctccgttcgagctcaaagtactcctcggtgctttttttcacgatcattttacccacgtggaaaccgaggctccaagaggacgaaatgacttaaatgacagcgtgaagccagcgttcaaagacgtgtgctccttaggctggcagctttgggatttaggtgttttaaagcctatttcacaaatatgaaaaccgaggttcacatttggttagcagcagcatccagtgatccatacccgaagccagggggctgcccctccactgccgcccgtccgcagccttccagctgcatgacacacccactgccttccccctcccgtcggggctccgggtccgcgagaggcgggcgggactgggagggattgggggcagggggctcacgtgcagacctggtgagacggaccccacagcgcctggcggggcgaacagagaaatcagaaagcttccaggcggggtgggcgggtgggcagcctgctacgcggggatgggtaggacctaactccagccctggggtatattgggggtgggagaaggcagagcgctcctggaataacaaagtaacaattgtcctgggcacggcaaagcttgtttacttctgtcttgatcccctcagagattaggggaggggcagggacaggggttcccctcccccagctctgtcgtttgctacctgttgggtaccctcactctgttcttcccacctctagggtaattacttccccttcaatgttctcatctgtgaaatggacaacagcacctaccaagagctgggctgttgggaggaacagaggaggtaaagtgtgataaagtcttcagagcccctcccgccttccgggctctggaccttctttgcttttgtggggtttttttgtttgtttttgtttttgtttttttgagacagagtctagccctgttgcccaggctggagtgcagtggcacaatcttggctcactgcaacgtctgtctcccaggttgaagcaatcctcccgcctcagcccccctagtagctggattacaggcgtgtgccaccatgcccggctagtttttgtatttttagtagagacggggttttgccatattggccaggctggtcttgaactcctgacaccaggtgatccaccggcctcgggctcccaaagtgctgggattacaggcgtgagccaccactcccggccctgtagtcttttcttctagggcctccaaactacatcaacccctacaaagcagctcgccctgactgtggctaacagccacagagtgccttacagtcaggagcagggaacccttcataatgggggcttccctctgaatgcattttgcagatgaaaaaattgagactcagggaggtaaagcaatgacacggggtctcatgggtccgaaagacctgatatatgtgagatgcttgcagaggggtcttaaggctggaggcacagtgccaggtatgtaggagatgttcagtaaacattagcagaaaagatggagaaagaaggaccgtttggggacactggatgattcaagggcagagtgggtgcaaatacagtacttatttactttgcaaaatcccaagacaatatgctgatcaaaaggaggaagagatggctgggcatggtggctcacgcctataaccccagcactttgggaggccaaggcaggtggatcacctgaggtcaggtgtttga

SEQ ID NO: 1562613 - DNA, 4001 bp, Homo sapiens
cagacacatcagatctcttactagaaaatgtggaggcataaatcattgataaaattttaaaaatacctaatttgtattgagtgcctgtctatgctaggactccacatacgttctctcctctcttcttggatcctcacagcaacccagtgacgaggtgttattatccttgtttcacaaaggaggcagctgaggctcagggaggttcagtaacttgcccgagagcccacagctagtgagcagcattatccagagcttggaggaacagggagtagatgatagagtgcaggtttcaagctccggcagcacagacctgaattcatatttgcctgagtcccttactgctgtgagacttgggaaatgtcatattcctcctctataaaatgacaacagcttatttgtagggttgttggtggaattagatcaacacacagcccagaaagcacattcaaagaggccggccatggtagatgctcaagaaatgattctgaattcaaaggctgcccttctccactagcccatgctatatttcctgtgggtgggattatagcccatggatgatcccgtttgatcctcacctcacactaagtgtaggtaggtaggcaccatttttatcatcccattttccatatgagaaaatccactggcccaaggccatgtatcaaggaaagcaacagaactgacatttacagccatgtggatagacttcagatctgttcttttaatgactctgctccagaaggtgaagaaaagaactgcacaactttaatactgttacaagatatctgtttctgatatgtatttctttgcacatcagcacatcagtatagtaacaagatacacacacatgcatatacacatacatatattcctggtacgtatttctacacacaccattgtccacataacatttgtgcaagatggctcaattttagatctcctgcactagatgatgtactagcagaaaaacaaggagttgtctctaaatccttctttcttccctctctccctccctccctccttccctccctccctcaatccttctttctttctttcttccctccctccctccctcccttccctcatttatttattttattttttctggtatagtagaagaagcatttcttagttaggcttagttaggtatttcttggttagactagcagtgcttaggttgactgctttagttaaagaggactgagaaagctccatcatcaacctacccttagctaatctcaagtaaaatttcacaggagaaaacaggtccatatactttgatttttgcagtccattccctctccacaatctgctcccacctcatcttagcccaaggaaaatcacatcccaacgtttgtctctccctagtgtttataaatgttctctaaaggagtggcttttaacctttcagtgtttcagactccttcccacatccaataaatatgaaggagcctctcctcagaaaaatgcagtcacccatattacattttaacccaattttaggggattctaagtcccttttgaaaccaagccctttctgaagccccaaggtgttacttttactttcaaatttcctttcctgtatcctacaaatgtgtcttatttggaaccctcagatgttcattatgtgtatatatgggaaagagagagagacaatgagaatctgtgctgtgtttggacatgcctcccatcaagttgactattttttaggcaacgctttcttcgcagccatcttagcagtttctgcataaggtactggatcaccccacagtacggcgtttctcagtcaggagacagcccatgttatgagctgttcagtttgggtcacagaccccacctagtgggcctgaggtctggcttctgaaaacatccaactcaccatagtcaagtgccctctgagtaatccttgccttgattccagggtaaatggtctgagaggatgagacatagagattccacaggaggaaacatccccagaggactgggattgtctttgtacacatctgaaattaaccaacagttaaggttcctttattattcttgactttctctttggtcaattaaatccaacatttctagattttctcatttttactgtttacttccagaactcaatacatccatccaatccatccattcatccatccatccatccatccatccaaccatccatccgtccatccatccatccatccatccatccatccatccatccatgcgctctcccacccatccatccattcattcagcaatcatttattgaacacaccagcatgtgttctaggtgctaagggtgtagtgttgacctacacatggcccctgacctatgtttttcacagactagtagtgaatatgcatccttcagggccagctccatgtccctctctgtgaaaacttccctcaccaagtcattttaccctgggctcatcacattctactctgggatcccaccacactttacacagtgcatatgcgtccattagaacatctgatacacgatgttgtctgtttgcaggcaggacttctcctcttaccctggttcaagccagtaccatttcacatagatttttgtgatagcctccttactggtctctctgcttcggccattgctcctttctggccattctccacaccacagccagagtgagcctcttaaaatgaaagttagatcatgttactccccacccccattaaagcccttcagtggttccccttcttactcagtgtaaacgccgaagtcattttatcagctacaaggtgtagagggccttgtagctgatggaatgaccctatgcctccacttcctcattgacctctgtccttaacacacacacctggctctcatgatcccagcatcactggctaacttgatctttctttaatgatctaagtagcctgtacaccaggatctttgtatttgctgtttcctcttcctggcatagtcttcctcaaagaacccggtcttgcacttcttcagataactcaaatgtcgtctcagcaaagtctttcctagccactcaatgcagaacatggacaccttccctgtggccctgttattatgactccaccattgctttattttctccaaagcacttatcatcatctagtgtagtatccagttactgatgtgtgtattgtctatctcctctgctggaatttttaggcttcatggggaaggacttcatcacttcagcaccttgaatagtgactggcacacagcaggcattagggaactactgaatggcagatggaatgaatgaatgaatgaagtctctttcacaagctgtgaattgggccatgtgtgccttatgggttctccagcacctggggaagcccttaatcttagtatacaccatcccgtattgtgactgtctttttacttgtctatccctttgtcatggggattgtgtcttacttctataactctggagtccagtacaatacctggcacatagtaggcacacaacagatttttgatgaaataaacattctctgcaaagagtgggaccacatcttactcactgttatatcacccatacttggcatacatgaatgattaacgtatgcttgttgaattaatagaccaaacaaattaatggcatcccattttcttgatagatgaagcacaggtcccaaaagcagcagtaatttgggtttcttttaatgaaaatcaagtgagtaatatattcacaggccttctttctagtttggaagttacaatctgggtgagctatcactgctgcacttacacatgcaaaagactcacaggtggcaggtaccactgcgctaacacacaaacatgaaacaaatcaaggaaggcccaggaaggtgaccttgtggatgtggtcagagaggaagaagtaagccaggtgtggtggctcatacctataataccagcactttgggaggccaaggcaggaggactgcttgagcccaggagtttgagaccagcctgtggaacatggcaggaccccatctctacaaaaaataaaaaataaggctgg

SEQ ID NO: 1562614 - DNA, 4001 bp, Homo sapiens
agaaccacacttcaggggaatattaggaagctgcgccaactagaaacgcaatgaccacacagcacgggccctgcaggctgtgcccacgtcctcccagggtcccacactgcaggctccttgtggactcaatgcttggacacgcttacctctgcgggggaatataaggagcgcacacggtcggcaggaccgcgcagggctcagccagagctttcttagccttttttgccttcttcctgaccttggatgtggacctgaccgttttaaccgagctctcttttcgacagacgccatttttcatttcgacatccccgtaaatattcagaggcctccgggtgcagcctggaggcgtgtggacatcacagtaagcggtctttctgacggagaaggtggtgccaccgccagtcagttccttcacgggctccattttcatgtacaggccagccttctgggcacacgtcacatggaatgctgtgtagcagtttgctttgtggcactggatgcaggcacccacgcccttctgcttacagaggtagcatgtcagtttccaccgggctggagggatgttcctcaccccatcgatgggctcgatgaacaccgtgttggcaaagccgacctctgggatccacagggcacacaccacgtgaccccagcggtcgtcatctgtctttttgaaggcaccacccttgttggggcacagcacacagtcggcgggccgggcccgcgactgcaggcagtggcggcagagccactggccctcggggatgtagggcaccccgtagcactcctggtgcacggccaggttgcacatgtcgcagaagaggatcacgttgctgttctgacactccccgtccatgcagatgcagcacacggcgtcctcgtcgatcagagactgctgctcgccctgcttctggttctcgcagtgcgactccttctcgaagcggtccatcaggaactcaaacatgctctgcgacacggcggggacgcagtcgcccttgcgcttctcattgacgatctccagccaggcatagtcctcctcgtccatgtcatactccacctcgttgtccagttcctcggccgacttctcgatgaacttgtagtacacaggaggcctcctgggggcggacggagggctgtactccacgatgcgcaccttgggctccgggagggcactggccgaggccggcgtgccgtgggcgctggggagggcctcgtttttctttttgactctgttgtttttgtgacgcttagttcttaagcagacaggaggccgctcgctgttttccttgttgctgttgcactcactcatctcttgagcagtgaggtcatcttccaatatgatctccaggggatcaaaaatactgatcctgtgcaagcgcccttcaatttctatctctaccatcctttgagcttgagcgtaggtcagcgtttctcgcgtaggggagtgtttaacactgcatggggaagaaggatgcctcgctgcagagcctcgatgacatcgtcctttcctcctcatttggtaatgattacctaaaatgaaggcaaaagtaaaggtaattctacgcagggtgaccaaagactcgagaaaaccacaaaagcatgcttggacagatctagctcagcagctcaaagcccaatcaaagcaaaactcacagctaacctctttccaaggtgtccaaaaccacacatccaggcctgagcgagtccccaggaccagggagggagcagcagtaacaggcagagaggcagcctgaggagccctcctgagcacctgcgtccctaccaccacacaccagtcccctctcagaccacaccaacaggctgcggagaccacagcaacgctccccaaggaggaggggtccggcccagagcccacagttgcaggactttcccagcatgcaggcggtcccccaggaagtccacatacagggctggaccccaccaggcacagaggctatgcccaccagacaggcatgctcagtggctacctggtcctatcggatgctccccctaaaccactcttcccctccccactactcccaggagagcactcccatgagcccagagtcaccacagtccttgcagcattcctgctggggccaggggtaggagacagatcacagcctgtccatcctctatagacaggccctccacacgcacaacacggcacaggggaccaacaggggagccctgtactggtctgaggggacagtcttggcccctgggaggccccaaccccgcttctgcagagccttggcagtgaccaccatggaaaccaccacaggctgagccaacctgccccttcccctcaggggcactcctcaagccccactgagaccatggtgctggccacgtcctcctccttccacgtcctcctcctttctgagagaatccagacacatgcatgacgccaaagggaatctctgttctccccggcacacgtgaaggcagacgctccactcaggctccacagcgaggggtgacccccaggaacccctcgctgcttgcagagaccctcaccaggagggtcgccagcgctggctcaggtgcctgaagacttggccacagaggcttaggagaatctgcttttccagaggtaggcaaaaccagtgagctgcctcccatacctccagctcctcgtggcagaggcctctgctgtcccaacaccacggactgcgtctattcctagctgtccccagggtgcctggtgtgtggacacctcctgtgaagaccaccgcctgctgggcagtgcctccctccaaagcgccacacttcactgacaggaagcaaaatgatttttcagtgactgactcgcaaaacaaatattctcagctgaagcccaaggcatactctgcatctagccctgccacgtcagggacgcctggcctcggggcccagggggatcaggggcacccacagcagccttaccctgatctattgggcctgagaaaaagccctcagggagcaggcttccctctgtgagtcccgaaaggaaatcccagcagacttcaagagcacttcttaagacagaccctccagacactgggtatctttctctgtatcagacagaaatcctcattgtatgttgaaactagattgcaattacctacagaaaggaataggagagaaaatgtggtcggccaaacctcagaccccctgcatctccagggcctccaggtacccactcaaccctggattcctggggagctgtcagcacagccaccccccagccggccccgtgagccctgcagaggtgacaccacagcctgcagagagcgaccctagtgcacccgggacgccgacacgcgtcattactgaggtggggcagaagcaacagttggttactcaccagatcagaaacgaacctgtcattttcccctcgacagcaaagtcctgagtcgccctaacgacaagcagcccctggaaacccactctctcccagggagccgtgaagctcttcatcgcaacactttctacaaggggagaactgaaccgaaggcttcacggccacagcagctccataccctcaacatgcaactgggacccggggaaagtaggccctcagcagggcagggcgacccacgacctcctctgcttcaccgcttcccccctgggccggttctgtccctggcccttccactgggacaagcatttccactgggagggatccgcgggggcacacacgtagcttctcaaggaataattcccttaagtacatcgaagagccctgcgggccacaggcggggaaggctgcccacaagacggccgcttccatcttcccaccgcccgcccagggagaagccggccacgcgccgggcctctcggtcaaggccacaggggccgcggccgctgagctgtgcgaagttgtgtgcagcacacagcactcgggacggcgctgggccggccaaacaaaaacatccgccgattccactaactacacaaccacctggcgacagaccctcaaaaacagacacgggcggccgcgctttctggggagacggggc

SEQ ID NO: 1562615 - DNA, 4001 bp, Homo sapiens
gggtgtgcagcttggcaagggctggcgctagtccacctccctgctcagcacctttgtgcagtcaactatctatgcaacccaaccttatccagaagccctgcagggagggttctgtagagagagttagttcattggaagatggttgtgtcaatcatcgtagacctgccaatcagatgccaaggtggtaaattggaattaaggggtaggactaggaggtataaaaaattctaaaggatcagaaaagtgtaagtgttggtgaggatctgtctctggccttggccaagaaggggtctagggctccaggagagaggcaggaagtagcctggacaccaggcgctagagacagtcctgggttgggtgggcaggaagccgggcaaaaagacctttgaggtggtgcagcttctgggggctggtgccgagttatcacaggatcagaaactctgcttttgaaaccagactggtttttacacttctggcgtttctttgtttatttcctttttgttctcctttaacatttagtagaattcaaaaatattttttttgtggttaatacatgtagacaaggtacaattattactttttaaaatgccaccctgtctcagctgagcactgaggtgagggcagagttttaaaggggcaggatggccaggtgcagtgacttactcctgcaatcccagcactttgggaggccacggagagaggatcactcgagtcccggagttcgagaccagtctgggcaacatagtgagaccctgtctctatttttcaaaaattaaaactaaaaataaataaagcggcaggagccctgccccccacccccagagctggatggtagcagcaggagaagggggctggacaggaagtctccagagccacctccctcttcctggaggtgactcttcccaagcttctctctgcccaccctggttgggttcctggttctgctcaataaggaggtcaaatcctcagagatcaacatcctccctgtctgagactgtcatcctcaacttttacttataaatgacaaatcccagtggttttggaaatcccaaaattcccttctttttcccagccacagatatgacctcatgagaaaagctgaggtcttagagtcaaatctgagacccagaatagtttgcaagctgtgtgacctagggctagtggctgaacctctctgggcttcctgctccttgatacttacaaggaaatgacaccaccctttccctcccaggtaatttggaaggatttcaatgcaggaaaagtgcctgccttataaaagacttaaaaaaaaaaaaaaaagtgtgctttgacttcttccctgtgcctgcatgggatgggaaggagaacttctcccagaggactggcatggtttgggagcatttctgtttcctattggccccagcggatgggagtcaaaggctgtgagacacagaaccgtggcctgggagcaggaatcaggaagccgttaacgaggaatcataaccacagccaggatcacgaactagctctgggggtgggtgccaggcagggaccaagtgtgggaaccaagtcatagggaggacttttggggtccttgctgcttccactgggacctctttggggagggagcggcagggcaacttttctcggtccaggcaggccgtgcagagctgagtttgtgtgtgcccgggtaggggcgggcacaaaccgggagcagtggagcgcagccctcagccagaggcaggaggaaatgtggaggggagagcctggagaggctgtcccagtcagagggagagagcagggcccgagatgcttccaggaagcaaggagggaggagaggaattccaggctctgaccccagcccccaagcttgaggagcctctggtcactcaccctgtgtcctgtggcctccccaggcgactcacggaccctgagccactgcatggcctctggctccttggcccatgtctgcaatactaacttgttgctggcccagacccccaggcccagcagaggagggagagaggaggggatggagggagagagggcggagggagggcggagggagagggcagagccgcttcccacttcccctcctccctgctccctccctttcagcctctgggttctgcggagataaagggaggcagggatttcctttgcttaactctttggtgatccagtggggtcttgcttgattcaaaggcctagaaagtcagagcaggcaggagtctgaggccccctgatgattgggaaatggacacaggcatggggcacaggagcccctaggttgctcaggaagggggaggcagccctgagtccaccctgagctaaagtgcttaactgctctgagtcacagaggcagggtgggtagcagagaaggtgcaggtgttggccctccaggcacaggctagaatcctggccctgctaccacagtcgcgtcgcctctcagagcctaggtgttccagaactgcagtcctcagccccctttgtgccaggcacatgggagggcttaacccatgtttgttgggtgaatgaccaggctgacctcctcaggtatcatgcaagtgttaccagagaggggtactgatcagaccccaagagagaattcttggatcttgcaccagaaagaatttggggtaagtccacagagcaaagtgaaagcaagtttattagagaagcaaagaaacaaaagaatggctactccataggcagagcacccccaagcactgctagttggctatttttatagttatttcttgatcctatgctaaacaggggtggattattcatgagttttccaggaaaggggtgggaatttcctgaaactgaggcttcctcccccttttagacaatatagggtaatttccggacattgccatggtatttgtaggctgtcttggtgctggtagaagtgtgttttagcaagctaacacattttaattaacatacaatgagcaataaggatgaccagatgtcactttcattgcaatcttagatttggcaggttttggctggtttgtttaccgcatactgtttctcagcagggtcttgatgacctgtatcttgtgataccagtcctgccaacttcctatcccttcctgtgactacaaatgcctgacctcctgggaatgcagcctggcaggtcttagcctcattttacccagcccctattcaagatggagttgccctattttgaacacctctgacatatttccctactctcttttacgagggaacgtttaatcttaagggttgtagaggcatgaagatccatcttctgtaacttcttcaggctgaatagaggcgatgatattcctgcctaactattagagtctcttgggtttggtgcagagaggaactgagtaagaaaatgttggtgtgttcagagtcatttgtaactctgagtcctaacaaaaggtgatatctggaagattaatgtgttcaatttaaggaagcactgagtaagcttatcttgcattcttacacaaagagtatagcagcaatatattctacaacagcaaagtaaaataagtaaaattatcccaagtaatccaaataagaaggctttccatgaactgggcaagaatgcctgtgacttatcgggtaaaatgaggctgagacctactgggctgcattcccaggaggttaggcattcttagtcacaggaattgctagatgagctgatacggagttgctagacgattccaatacatgctcagaattagatactgatccagatttttatgttatccatccctcttgtttctgacgagaagcagtcaagagatgactgtttggttcacagaaagaagcaaggtcagtctaaattgcagacaaaaaactcaaaaacaatggatgagactagaatctatgacaggtgtaccatattttttgaaacaccgtttttctctctccagtctcccattttttattaaaaacaaatcatggtaggaccaatttatttgcaaaataagctttagtcttattatacttggcttcattatttgcataaagtgcag

SEQ ID NO: 1562616 - DNA, 4001 bp, Homo sapiens
tcatatgtgtctgtcctgcaggaagggatcccactctgggtgtctctgtggatgtccaaatctgctctgtacctggctccctgccccagctagcaactcctgggtggcagggagctcacctttctgggccttgaagtggggctttgctcatggcggcctcgccgagtgcccatacgcttcctccagttgtggcccacagaggagaggcctgacagcctgcgcagttcctctggaaggcccaggaagtcctgttggtaggggttagggagaaggtgtgccctccccctgggctgtaccctgacactcacctgccagctctgggtaatggtcatccaggttctccaatagggactcatagcgggtggaggccatgtcctctccctctgtgacatgtggagagacgatgaaggacacctgactggcctaatggtccctactctgcctctcactctggaactgtttgctagtccaggctgggagcagagcattgggtagggatggattggggctaggtccccagccgaggtgggaggccggacagggccttgggtggtctatggtctgctatgcccccctcttacattctaccatagctgcaggggagagaaccttgggccaccttactgatgatccgaacgaggacatatatggctcgctccttcagtagggagttgcccatggtctgggcccgggaagccccttccttcaggtcctcctccaggctcactaggttgccatcctcagccaggagagcaatggtcgctgggaggacatggagagagactgggcagggctggcacccctgcctgggacccctcagcccctccttctcctccctgtctcctcaccatctgggggcaaccctgctttctgcctcaggtgggcggtgaggttcaccagcctgcaagaggtgttcaccagcaccgagcagccagctgtggagaggggcaaaggtgagcctgtgagatctcttaccttcctccaaatcggggtcctctgtctctccctcccatctctccctttcccagagctgcgactgggcctatgggctaagactgtgccccgggcataacagctccaacatctgttgcttaaactgccttggagaaccctccatccatctcccatgtgtggtgacttttctcccatgtgtggtgactcccaagtgttggtctcttgagtcctgcaaagcacgaagtgggcgccagcccagcctcctcccgggacccgcccccacgggacccagccagtccccgccctccgcacccaccggctcctctcttcccttccgctaccgcacagggccgacccgcctccagccagaggcacggggaccctgcaactgtggctagagtttcaggtgtctgatgcacgctgaagcttgaggatcacggattgaatggcgaagagattgtgcggcttaaaaacctgctccagggtaatgcggcggtctctggccgagaggaacccttgtgaatgagcaggactcagctcgggttttccctttaagggactcgctccaggtgctggcttcgcctcctcacagagccgcttccccgacgacccccgccatgtgcaccacccccctttcccgccattgcctccccacccaccgcaagggcggaaggaagcacgcctctgagtgtgctcatccccctatccgcctaccaagacaggggaccccacttacccccaaacatcaccttgataaacatagctgcagcgggtgagggagatgtggggggctttgatcccccaactctcgattccccaactaaggaaaagcgtggagcagagacctgcttcagggccgggctctggagggagaagtggatgtgtgagtgtggatggctgggtcccagggccaggcccctgctcagccacctctgtggttctgctgcttcagcctagctcaaaccctgcagctagtccaagactcctggcctcctcttcctccccactgagccctgggccacagcagctcccctaagcttccaagctggtctccatggcagtgggggcggagacatctaggcaggaaatgccttcctccctgtatccgttaacggggcccatgggggagaggtgacagaagaagtgggggctggcattccctgaggcggggaatgccatcattgggattgattttttttagagacagtctccctatgttgcccaggctggtctcgaacttggctcaagcaattctccagccccagcctcccacaagtgctgggattgcagttgtgaaccacttgtacagtaaagttcaccctttctggtgttttaaagttatgccaactctcatataaccaccaccacagtcaagatacagaacatttccatcacccccaaattcctttgccccctttgtactcagccctagtcgcttccaggtccatagcaggtcacaagcacctccttgttagcactggccactagctagtccctcacaccggttctcaccgtcatttcctgtcttttatttatttatttattaagtttattaattattattattattggtgttttttaaatttttattttttgagatggagtctccctgtcacccaggctagaatgcagtggtacgatctcggctcactgcaacctccgcctcccgagttcaagcgattctcctgcctcagcctcccaagtaactgggactacaggtgtgcaccactacacctggctagttttttttttttttttttttttttttgagacggagtctcgctccctcgcccaggctggagtgcagtggtgtgacctcggctcactgcaagctccgcctcccgggttcacgcctttctcctgcctcagcctcctgagtagctgggactacagtcgctcgccaccacgcccagctaattttttttgtatttttagtacagacggggtttcaccatgttagccaggacggtctcaatctcctgacctcgtgatctgcccgcctcggcctcccaaagtgctgggattacaggattacaggcgtgagccactgcgcccggcctttttttgtatttttaatagagatggagtttcaccatattggtcagattggtctcgaactcctgacctcaaatgatccgcccatcttggcctcccaaagtgctgagccaccaagcctgacctatttatttttttttgagaatgagtctcgctctgtcagccatgctgcagtgcagtggcgcaatctcggctcactgcaacctccgcctctcgggttcaagcgattctcctgcctcagcctccggagtagctggtattacaggcgccagccaccacccctggctaattttttgtatttttagtagacataaggaaggccaggctggtctcgaactcctgacctcaggtgatccacctgcctgagcttctcaaagtgctgtgattataggaatgagccactgtgcccggccatttcggccatttcgtgtcttttgtatttgtctgcttctcccagtctctccccttcttgttcccctcctctccgtcttccttttctgtctaggcttcacattctctctcccctcccctcctctcccctcccctcccctccctcctttcccttttttcctttctcttcctccctccctctctccctccctcccttccttccttcctttctttttttgacagagttttgctcttgttgcccaggctggagtacaatggtgcaatctcagctcaccgcaacctccgcctcctgggttcaagcgattctcctgccccagcgtcccaagtagctgggattacaggcatgtgccaccacacctggctaattttgtatttttagtagagacagggtttctccatgttggccaggctggtctcgaactcctgacctcaggtgatctgccccccctcggcctcccaaagtgctgggattacaggcgtgagccactgcgcccggctggctggcttgctttctcgctcttttgctctttcgctcttttgcccttccttccttccttccctccttccttccttccttcctt

SEQ ID NO: 1562617 - DNA, 4001 bp, Homo sapiens
cacttacgaccacctaaaattctatatattttattttattgttatccttctatattagctgtatgataagaatttttgctggtttaataaaatttctgccctctgttaaatattttttcctctttctctttttttttttttttttttttttttttttttttttgagatggagcttccatcttgttgcccaggctggagtgcagtggcgcgacctcagctcactgcaatctccacctcctgggttcaaggaattctcctgcctcagcctcccaagtagctgggattacagacatgcgccaccacgcccggctaattttgtacttttagtagagactgggtttctccatgttggtcaggctggtcgtgaactcctaacctcaggtgatctgcccaccttggcctcccaaagtgctgggattaccggtttgagccacctcattttctttcactgctgtatccccagcacctaaaacagagtctaaggcacatggtagacttaaaaatgttgttgttggaaaaaaacaaaaaagttgttgagtaaaagaacacatgaatacttgttcatcatgtttcaggggctggagctacaattgtgggccgaaacaggcacggttcctgcctgatgaaattcatgatctggagggatagatgggacaccaaataactgactacagcttgtgctaagcccagtgaaggaaaatgtgtgagggcacataacagttgatcctactgtggtggtgaggagcagaagtcttcctcgggaaagttgaaagtgtgatctaaaggatgcataggagttaactactctaaaaattttagttctttgacttttggcaaggtgtagcaccttgaaccttcccctcccccccgccccgccccgcccccgaataaggcatatgcagtagaattttgaagctttctgaaccccaggctccttatctgtaaaggaaaatagtgctaagccacaggtcaggtacgggggaactgagttacagagggtaactaccaccattcttctctcatcctttaactcaggggtccccaaccctccgtccgtggactggtaccagtccctggcctgttaggaaccgggccgcacagcaggaggtgagcggcaggctagcgagcctcaccgcctcctttcaggtcagtgacggccttagattctcataggagcgcgaaccctattgtgaactgcgcacgcgagggatctaggttgcacgctccttatgagaatctaactaatacctgatgatctgaggtggaacagtttcatcccgaaaccattccccacacctccgtcagtggaaaaattgtcttccacgaaaccggtccctggtgccaaaaaggctgggatcgctgctttaacggactgacctctgagcagctcgcaggtccccggggtgtaagtgatggtcttggggcggcgccggaacccagttcctttggtcactacctccatctgcttctgtgaagccatgggaggactctgaggagggaaagacgcaatgacacaccccctgtctcctgtccctaatctctgttccccgacgcccaacacccccagaagtctggaagcggggatcgagccagagaatgatgccgccagttaatattgcgacagtgcccaaacctcccatccagacacacagatacacacacacagtcctcattctgacccagcgcctgtggcagggaagtctcctcgggagggagtgttaacacagccatggtcacaacagtacccactgagtgatatgccaaaattgaaatttcaccctaagaccctctctgggtgctcccctctccacatagaagtgggctcccggaggcggtgaccactgctttacagccgcatccgcaccggtgccacgcagaaatactgcgcgatctgggctgctggagctggcagctagcgcctctcgctactatagaaacgcgcacacaccagtcagcgcatgcgcactttccccgctctgtcctgcctcccggaagtgatttcctctgggttacggcgcaggcgcaagataagctaggagccgcgcgagtcgtagtgtcgctgtttgcgggtctccgcgcgggaccggggcgcagcggggtcgctgaggcgagggtgtcatgtcagacaacgaggacaagtgagtgcgggagcggagtggcctttgcggcaaccttggaaggggcggatgaggcaaggcttgggtcggctgaggagcctggcgtctaggggcaatgtctgaggggactggggtcctgagggggccggcggagccgaggaagggaagggcgggcgacccaggagcacagccccggctggaggcacaggagggcccaggctcgagggtccagaggggatccgtagaaaaggtgtccttcagcaaatgttccagcgagccgggctctgtatcatgcagtgggaatattgaggtgaatgaacaatcgtccctgcctctccacgtgctcactttctagaaaaggggtcacaggcccataagtaagcaagcaagcaggtaacggtggtcgcgtgagcttccccagttctagacgtatgtagtataggagtactccagaggagggtctggggcagctccaccgggtggcattaaataaaagtctgggacggtcctttgcagtaatttttttttttttttgaaacagagtcttgctctgtcgcccaggctggagtgcagtggcgcgatctcggctcactgcagcctccacctccggggttcaagggattctcctgcctcagcctcccgactagctgggattatgggcgtgcaccaccacgccttgctaattgcttgtagttttagtagagacgggtttcaccatgttggccagactggcctcgaactcctgagcttgtgatccacccgcctcggcctcccaaagtgctgggatcacaggcgtgagccaccgtgcccggcctgcttgtagtaatctagatgagagaagtcagtagcttatagtagggtggtaggagtagaggtggtgagaactggttttgaattctggatatattactattttaaagatagagcccaaaaattacctgtgggatatgtgggtgcaaagagagctagtctgaagataaaaataagaaacgtgtgggattgctaccccattcccagtgagtgtcagtagagaagaggagatgacccgtggctgagcattagggcatttggacattgagtgcttgggggaaaagagaagccggggaggtgggggaacaccaagagggtgaggtgtccttggagtcaagtgaggagagcaagtggcctaatgtgccagctgatagatcaggctaaatgagaaggagagttggccattggatttagcaacgtggagatcattaatgagcttggaaagtggttttgatggagctgttggggtgaaaggctttttggagtgagattatgacaaaatgggaagagaggaagatagtgagggtggacagctctttcacacatttttgcttcaaaggacaccatggaattagggctatagggggagagagaagagaaataagggtttttttttttttttttttagatgaggaaaagcacatgttgaaatgctgatggggccgggtgctgtggcttacacctctaatcccagcactttgggaggccgaggagggtggatcacctgaggccaggagttcgagaccagcctggtcaacatggtgaaaccccatctttactaaaaatacaaaaattagctgggcatggtggcgtgtgcctataatcccagctactcgggaggctgagacaggagaattgcttgaacccaggaggcagaggttgcagtgagccaagatcacgccattgcactccatcctggacaacagagcgagactttgtctcaaaaaaaaaaaaaatgctgatgggaatgatccagtagagagggaaacagtgatgatgaatgagtactagcaatatttgggggcagatggggaaaaattgaaggggtaaaatggaacaaaagtcggatttact

SEQ ID NO: 1562618 - DNA, 4001 bp, Homo sapiens
tcctgcttcgttttttctatagcacttacgaccacctaaaattctatatattttattttattgttatccttctatattagctgtatgataagaatttttgctggtttaataaaatttctgccctctgttaaatattttttcctctttctctttttttttttttttttttttttttttttttttttgagatggagcttccatcttgttgcccaggctggagtgcagtggcgcgacctcagctcactgcaatctccacctcctgggttcaaggaattctcctgcctcagcctcccaagtagctgggattacagacatgcgccaccacgcccggctaattttgtacttttagtagagactgggtttctccatgttggtcaggctggtcgtgaactcctaacctcaggtgatctgcccaccttggcctcccaaagtgctgggattaccggtttgagccacctcattttctttcactgctgtatccccagcacctaaaacagagtctaaggcacatggtagacttaaaaatgttgttgttggaaaaaaacaaaaaagttgttgagtaaaagaacacatgaatacttgttcatcatgtttcaggggctggagctacaattgtgggccgaaacaggcacggttcctgcctgatgaaattcatgatctggagggatagatgggacaccaaataactgactacagcttgtgctaagcccagtgaaggaaaatgtgtgagggcacataacagttgatcctactgtggtggtgaggagcagaagtcttcctcgggaaagttgaaagtgtgatctaaaggatgcataggagttaactactctaaaaattttagttctttgacttttggcaaggtgtagcaccttgaaccttcccctcccccccgccccgccccgcccccgaataaggcatatgcagtagaattttgaagctttctgaaccccaggctccttatctgtaaaggaaaatagtgctaagccacaggtcaggtacgggggaactgagttacagagggtaactaccaccattcttctctcatcctttaactcaggggtccccaaccctccgtccgtggactggtaccagtccctggcctgttaggaaccgggccgcacagcaggaggtgagcggcaggctagcgagcctcaccgcctcctttcaggtcagtgacggccttagattctcataggagcgcgaaccctattgtgaactgcgcacgcgagggatctaggttgcacgctccttatgagaatctaactaatacctgatgatctgaggtggaacagtttcatcccgaaaccattccccacacctccgtcagtggaaaaattgtcttccacgaaaccggtccctggtgccaaaaaggctgggatcgctgctttaacggactgacctctgagcagctcgcaggtccccggggtgtaagtgatggtcttggggcggcgccggaacccagttcctttggtcactacctccatctgcttctgtgaagccatgggaggactctgaggagggaaagacgcaatgacacaccccctgtctcctgtccctaatctctgttccccgacgcccaacacccccagaagtctggaagcggggatcgagccagagaatgatgccgccagttaatattgcgacagtgcccaaacctcccatccagacacacagatacacacacacagtcctcattctgacccagcgcctgtggcagggaagtctcctcgggagggagtgttaacacagccatggtcacaacagtacccactgagtgatatgccaaaattgaaatttcaccctaagaccctctctgggtgctcccctctccacatagaagtgggctcccggaggcggtgaccactgctttacagccgcatccgcaccggtgccacgcagaaatactgcgcgatctgggctgctggagctggcagctagcgcctctcgctactatagaaacgcgcacacaccagtcagcgcatgcgcactttccccgctctgtcctgcctcccggaagtgatttcctctgggttacggcgcaggcgcaagataagctaggagccgcgcgagtcgtagtgtcgctgtttgcgggtctccgcgcgggaccggggcgcagcggggtcgctgaggcgagggtgtcatgtcagacaacgaggacaagtgagtgcgggagcggagtggcctttgcggcaaccttggaaggggcggatgaggcaaggcttgggtcggctgaggagcctggcgtctaggggcaatgtctgaggggactggggtcctgagggggccggcggagccgaggaagggaagggcgggcgacccaggagcacagccccggctggaggcacaggagggcccaggctcgagggtccagaggggatccgtagaaaaggtgtccttcagcaaatgttccagcgagccgggctctgtatcatgcagtgggaatattgaggtgaatgaacaatcgtccctgcctctccacgtgctcactttctagaaaaggggtcacaggcccataagtaagcaagcaagcaggtaacggtggtcgcgtgagcttccccagttctagacgtatgtagtataggagtactccagaggagggtctggggcagctccaccgggtggcattaaataaaagtctgggacggtcctttgcagtaatttttttttttttttgaaacagagtcttgctctgtcgcccaggctggagtgcagtggcgcgatctcggctcactgcagcctccacctccggggttcaagggattctcctgcctcagcctcccgactagctgggattatgggcgtgcaccaccacgccttgctaattgcttgtagttttagtagagacgggtttcaccatgttggccagactggcctcgaactcctgagcttgtgatccacccgcctcggcctcccaaagtgctgggatcacaggcgtgagccaccgtgcccggcctgcttgtagtaatctagatgagagaagtcagtagcttatagtagggtggtaggagtagaggtggtgagaactggttttgaattctggatatattactattttaaagatagagcccaaaaattacctgtgggatatgtgggtgcaaagagagctagtctgaagataaaaataagaaacgtgtgggattgctaccccattcccagtgagtgtcagtagagaagaggagatgacccgtggctgagcattagggcatttggacattgagtgcttgggggaaaagagaagccggggaggtgggggaacaccaagagggtgaggtgtccttggagtcaagtgaggagagcaagtggcctaatgtgccagctgatagatcaggctaaatgagaaggagagttggccattggatttagcaacgtggagatcattaatgagcttggaaagtggttttgatggagctgttggggtgaaaggctttttggagtgagattatgacaaaatgggaagagaggaagatagtgagggtggacagctctttcacacatttttgcttcaaaggacaccatggaattagggctatagggggagagagaagagaaataagggtttttttttttttttttttagatgaggaaaagcacatgttgaaatgctgatggggccgggtgctgtggcttacacctctaatcccagcactttgggaggccgaggagggtggatcacctgaggccaggagttcgagaccagcctggtcaacatggtgaaaccccatctttactaaaaatacaaaaattagctgggcatggtggcgtgtgcctataatcccagctactcgggaggctgagacaggagaattgcttgaacccaggaggcagaggttgcagtgagccaagatcacgccattgcactccatcctggacaacagagcgagactttgtctcaaaaaaaaaaaaaatgctgatgggaatgatccagtagagagggaaacagtgatgatgaatgagtactagcaatatttgggggcagatggggaaaaattgaaggggtaaaa

SEQ ID NO: 1562619 - DNA, 4001 bp, Homo sapiens
ttgtactctaagtaactgcaagctggccagattcagcaggacagccctcctcctcctctgagctccctcccggcttctgcaatcctgcctgccttcccccttgctccctccctcttcttgcctttcactcagctgtcacttaatgttagctgtcagctgatttcaggtgttccccttcctggggtggaaggggagaggaccaaagatcttggccattcacaaagggggctctggtgatgggagttttgtaatacgcagaaggtgtaaccaaattcaattcagcattcatggagcagcgcctggatccaggacactcagccaggcatcccagggactcagatggtgaatgaaacacaggccccattctccagtgcttacagtctattacaaaggaaatggctgcttcctaaggaagtgggaagcagaaggtataagtaacaaagagtgtgaaccttatagtcagaaagacctgggttcaaatcctaattcttcatctaatagcagcatgactttgggtaagaggatgccttcctgagctttaatttttccatctgtttaatgggtgtaagaagaatagctcccatattaaatgagatcttatactgcattaaatgacataacaaagtgcttgatgcccagtagcaagccacagacattcctaccaatgtcactctaggcagacagtggataccagagtcacagtgggagtaggtggaaggcgagagtacttcttgttggagaaactgggaaggctctttaggggaggtaagatttcggctgggtattaaaggaatgtaagaagaagagaatggggtggagggatgggaaaggacattctggaaactcatgggcagaatctgggaacctggtgggcctaatgtgtccagggagtgggtgatgaccttgagaagatgggccacgggcaggttatgaagggccaggtagaggaagttatatctttaacgagggaatggatcctacccacgaccccaggggcagctcagtgctgtctctgcagaagccagccagcctcctacaggagttggccttctcatgtggctgtggtcctctcagatccctttatctcctgagtcagggccagcctgccaccattatctacaagaagacagaaggctataacaatctgcttgcctcctactaacatactggggaggaaaagatgttttttagcatagttgcctggcagagaaccatggtgaaaattcagtgaccctctcccttgcttctcagggtacagtttcagcagcagctgatgacagttatgctcatagctcaacagctacaagaatgttctcagactctctgaaggtcaggggcagtggtgggaagaatggtgaagatggagcagagcccctgctctctgtgctgtggctgggcaagacacttaacctccctgggactcagtttcctcatctgtaaaatcaaaacaataatactgaccttgccttaaccaagagacagcgtagtagcaaactgctggcccacagcctgctatgaagtaggagttcattaccttcttcgctccaggtcttgacatggtccaaagacttgtcttttgatgcagccctgttgtatcctcttgagttgtcatgacattgtctgctggtcttccagtggcaaaatatcctagactttcagagctgaaaaaaaaaggtactttgccattcatcattgcagcctcccatttcacagataagaaatccaaggctcggggtgaaggaacagccttctccagctttcccggaccatgcacgacagcccctcccaacccagcccacccagtgggaaccatgcaaaagcttgaggcagtttttcagatggttcaagccaaaacgtctagaaaattcttgctaagaaacacaaactcccagaccatctgcagaactgaaacaaaagcctttttcgccctcattttaactgcaactcaataggtgtcggctttgagctctcccccagagctgagctcctctgaacaagctggaggggggcgggtgctgggactggggctctgagctccaccagctcatagaaccagctcacagattgcagctaacaggacatttttgcacttcttaatgccaaaagctgccttggatgctggtttgcttccaaggcgcgctttgaaagagggatggaaggctctagatgatcctgaaatctctgcgctcaagatgctcttagttaagacacggggtgagatttggtgtcagcaaaaggatactggggtcaaagtagatggtgcaaagttggggtgagtggggaaggcttcagatgattgcaagaatctgactcttctaggcctcagtttcctcatacatatagtggggctaacagcctccttccgagtgaggatgtggggagataatatgagagtaaagtgttcatcctcaaatcaggcagagggtaagtgattaaaaaacaagagtcgagccgggcgcagtggctcacgcctgtaatcccagcactttgggaggctgaggcaggcggatcacctgaggtcaggagtttgagaccagcctcaacatggagaaaccctgtctctactaaaaatacaaaattagcggagcatggtggtgcatgcctgtaatctcagctactctggaggctgaggcaggagaattgcttgaacctgggaggcggaggttgtggggaaccgagatcgcgccattgcactccagcccgggcaacaagagcaaaactccgtcttaaaaaaaaacaaaaaacaaaaaaaaaaacaagagccgctgtcgatgttattgctggtggttttattatcattggctgggtcggcaaggtcaccttggctgcaggtggcctacagtgggagaaaaagttaaaatcctatctgggtgacattattaataatttgtggacaggcggctgctccagctcaagatggtaaccatgccaacattgcaaatgccatctctccagaacaacatcacgtctcctttgtaatatgtcccttggtgtccagacttctcagcagctcagagtaagtgtctcagagtatccatgagtggaaaaacaaaaaacaaaaaaacaaaaaaaccaggatgtgccttttctgggtcatctattcactgggctctggtggagggttctggcaatgctttagaaatgcagtcccacgtgaggagcagtcgtgaccactagctcagggtgggatgcaagtgaggaattttttttttttttttgagccttgttgtccaggttgcactgcaatggtgtgatctcggttcactacaacctctgcctccgggattcaagcgattctcctgcctcagcctcctgagtagctgggattacaggtgcctgccaccacgcccagctaattttttgtatttttagtacagatggggtttcaccatgttggtcaggctggtttcaaactcctgtcctcaggtgatccacccaccttggcctccctaagtgctgggattacaggcatgagccaacatgcctgaccttttttttttttttgagatggagactcactctgacgcccaggctggatggagtgcaatggtgcgatctcagctcactgcaacctctgcctcccgggtttaagcaattctcctgtctcagcctcctgagtagctgggattacaggcgcataccaacacaccccgctaatttttgtatttttagtagagacagggttttgccaagttggccaaggtggtctcgaactcctgacctcaggtgatccactcgccttggcctcccaaagggttgggattacaggcatgagccaccacggctggccagtttttcttttttaaaaatattttttgtagtctcaactactcgggaggccaaggcaggagaattgcttgatgaacctgggaggcagaggttgcagtgaactgagatcatgccactgcactccagcctcagtgacagagacagacttcattaaaaaaaaaaagaaaaaaaaaatataaaatgtgtgtgtgtgtgtgtgtgtgtgtgtgtgt

SEQ ID NO: 1562620 - DNA, 4001 bp, Homo sapiens
tgactctccttcaagatccagcttatccctgtgggctgagcatgcagtagatgctcaataaaattctcagcgagcccaaggccccctctcctgcactgcccttggcgtgttgaaatcaagtgggggccttgttttaatcatcattttcctagcttgtcgggcagcccagtccagggcctggcacaagggaccctcagcatccaataccagccaggattgggaggggctcagtgaccagccagttgggccaccccagctctttgccacaagagaaagttcagcctgggtttggactcagatcctggccccaccacttacaggctgcgtaaccctgagcaagtcactaacctcgcttttcctcaggttccacgttttaaatatggggagaccagctgtgcccactgtgggctgggtagtgaggattaaagaggaggatgcttgtacgggactagcactgggctggctcctaatgtgtcctgaatattacttgtcccgccctggccacccagtcccctcctctggtggaaggcacagcctgcccaaggctacgtctcaggttgggttcgattgtgtgtgtctgtgtagcggggctgtccccgagggtcggactcgatcctgcccggaccagtacaaggtgtggcccagcagaacgcatggacaggcagggctcggggcgggcgggacggctggggcggggctgggcggacccgcccctcggggcacgcggtctcccggcttctccgccagtatgtttgcttgcttttggggcccttctcaagccagatctctaacgtggatggagtggcgcgtttcagggtggggctatgacaatgcactgcctgtgcagccgccatcaccgcgccccctccaccggctccgcagtctcctgcccggctttcccttctccacctccatctctgcggcggtaaaatgcagcactcgcagagcgcctgcgcggctttcaggccgggcggcggcggcggcggtggctatttatagtaggtgacgtcaccttgaaatagaccgttagggccggcccgcccttcccccctcccactcccgccgctccccgccgcccggcctggccactctcactgcgcaggcgtcgtcccgtcctcccatcccccagcgcggccgcgtctcctccctcggcgttgtccgcggcgcgagccacagcgcgcggggcgagccagcgagagggcgcgagcggcggcgctgcctgcagcctgcagcctgcagcctccggccggccggcgagccagtgcgcgtgcgcggcggcggcctccgcagcgaccggggagcggactgaccggcgggagggctagcgagccagcggtgtgaggcgcgaggcgaggccgagccgcgagcgacatgggggaccgggagcagctgctgcagcgggcgcggctggccgagcaggcggagcgctacgacgacatggcctccgctatgaaggcggtgagcgcgccgggagcccgggcggctggccggggggggcctggcgttggggagggacggggatggccgcgggcgcgttcccctcccggccatgggcgacccggcgacccggctgggcgtggccgcccgcccgcccttagcccgcgcttcccgctcccgctgggcgccccgccacttcctgaggctgggcccagggtgggggatccgggagggtgcagttcgggatcgcgaaggcagccccggaaggggggcgggccggtcggggtcgccacatcttagttcggaacccggccgggggcagagggtgccctaggggacgcgaaggagccgcatttctcctagagcgtttcaccggacccgggggctccccctctcgtcttcctccgttccccaacttggaataaagaatcacctagtaagtggcgccctgtctcagctggttttctctgccacgacctgaagtctgcaattccgatctgttttgctctgctcgttcgaattgttctggttccatcttcccacgcctgggggtctggctttgtgtgcgaagacccctttcctgcagtctaggcgtggacgggggcgggagagtgggcggagggtgtggggccccactccacagccccaggtttgctgctgcgctgtctgcttggagattaaaatgaaacgtgacttctaggtgagacgaatctgtgtgtctttgcattcctgagaccctcataaatcgattctgcagcttctccggtggatgagtcgtgcccagccacaccctagcaaaataccgtgggtcacacaccacctgcatttctgagttccggttaccatctcactctctctccacgttattttacgttttctgtaaatgaatatttcctctccctgcgtcaaggtcacacagtggtagaacaactgcgaccaccaacctatgttcagtgtacaacctcctgagacctgggaggatccccttgaactccgccttagacctatacattcagaaattcgggcggtgagactcagacatctgcattgtaaccagctctcacaggcgatttttagctggcttaagtctgagaattactgcccatgattatagtaaatgtatcctttgctggccttttggagggagttccgaaaaaaaactgccaatacaaaggctccctaaaatcttaagtcatttggaaagctcatttgaaggcttttgatgttaatatcagatgaaatatgtagttggggccaatatttaggattgttcaggtaagaaaggtgcttgaagagttgcctttcctctggtgtccttgttacacacataactgggtgtgtttggaaaccagcaacaccgttgcccgtatgttgatttgttggtgatcttgacttgagcactattagcatgctgttgtggtgaggcaggttttcttccagaccgggggacggtctaggtctggaggctgaactttatgtaattcagggggtcctttaaaagaaaatctaaaatatagttttgcatattttacaaaaatgggactgacgaatgcatttccttggaagggaccctgaaccttaattttctgtgggataaagctgcctctgtccacagcaggtcacacttaagcccctcctccccagtaactgagtggtgctgggattatgcaggctgaggcctctccacacattttcatgaagtggttgctcaccctctaagtgagacgtaaagactgcagtgttcggagccctttgggaaataaatgtggtgaaaagaaaggagggacgaggtttaaaggaaggggaaatggaggttaaggaaaaatggctagaaggtgtgttctggaacaatcagaaacctgaggcaacttgaaatgggggaaaaaggcaagaatggagagatgttaccagaacgaaatctagtttgagcagagaaaaagactggctttctagtaggcttgtaaaatgctttcctgcagcaagctacttgtgtccatagatcttctctggagggttaaggtagccttttgtaaaccaaaggaatctataatatctatatttgaaataattaatgagttggaaaagccacccagcgtagaagagtcaatccaagctttaattctgccatctcagaatggtgataaaccatttctcccccatcatctaaatggaatatattgtgcttataggtattttctttaaaagaaaaaaaagaatatattggaagggactggcaggggtcactttccctgctaacttggtgtttgtagattaaattcttaatgttactgggatgactcagtctctatgttattaatctcatcagccttaactaaggcttttggaaagggtgtaagtttcagtaaccctctgggtttacctgggctttcttcagggctggggaagggcaggtaagtagcctgctgtagggaggatggagcaggacacatgtgttaaggatatattctgatgccaccagtctgtaaccttgaaacttacatcttggctttaggtcctctgaagtataaaactagtgatgttgctgttattaacaagtcagtttt

SEQ ID NO: 1562621 - DNA, 4001 bp, Homo sapiens
gtctgcagccacacactaacccataagtggtggaagcagcaaaaactggctggagagaccagaggcttaactactatacagcacgcgattataaactacatttgtctgctgagtaggctctagccgccccaaaaactctgaacaacgcacagaccgcgtcgtcattaggctcttttacatcccagcaccaggcacacagcaggtcctacctgcttccccgacagagcagtgagcctgctattctctgctccctcctgaccccacatgctttccaaattcacctctcacaactgagtgccacctgcaggcaatgccacccccacccacaaacaccacctttccacagtccccatcccagccacagcagagcatcccagcccccaccattgtaaaatcctggaaccccacttgctgtctgctcccgccactccagtcacttgtgcccagggtctggggagtcccagtctgatggctggacccgcccctccttctccacgcagcagtcacctaggaggctccagagccagtagccagttctattccagtgcaaggagccctcctgtagggctcttacactctgcagcctaactctatctagccccctccccagtctctctgcaaacggaggcccactcacgacctccaggaaactctctgcttcaccccacacacaaacgccaccggctcactgggagcacaaggcctgcacacaccttcatcccacatctcctatctgctggccatcccccctcagggtgagttcctccaggtacctcccagggtggcctgcagcactagaacctgccagggccactggccctacctccaccacccaaacactctggaatccctcaggtctgacccccctctggggggggggtcttcacctgaaagcccagcccatgaccctggcttcccaccttactgcaggattatactaaggcctggacgtgagtcgagtccagtccagtccctcactgagctctaaaaaagcagtgaccccgatccagggcccagctcccaccaccagccaaggttaggtatccaggttgcccacaatgaccacaccccatgcccgggagccacagtgtgctacccagatctctgccttcccttcttcccagtcccctaccctgcccactcacctgcgcacctgtgtcccctgcagtctgggagaaggcttccctgcaccagccagccaggcctgctttgggcctgagccttcctaaccctgggccgcactctcaccattttgagaaccttagccctcccacgcctatcagtctgttggtccccctacttttctccccacactgcctggcatagaagactttcggcccttctagactggacagcactatcctaaaggggcaggtaccacggcgcatgtgtgtttgcccccacaaggccaaaggcagcacctggaacgctggagccgttctctgctctggggagacccaggagccccaagaacaaaacctgcccaaagccttaaagcaagctgagtgcagacgactgcaccgcccgccccccagcaaccgccatgcaggaaatacgagctcacaaggcccacggcaacaagaagcccacccacctgaggctacgcgaatcgcccgcgaagagggtcctgggatccgtagccacagaccgtgggacgggcctccctctgagggcgagagtccaggcgccacctagaaagtggagaacgagatcggccgccgtgaggccaggcaaggagcgggcgcggcttcccgagactgcgagaacggcccaaatgtctccaggtgcccccacaaacccccggcgcggaccgagaaactgaggcccgcagaccgaaggcactgcgacccaggctggggctccgagtgcccctctgcggatcagaagtcgggaaaagacgcaggggcgcagctccaggcccgcgtgcacggagttcaagccggccgcccgggctcccgcctccacactgaccctcttgccggagtcgggaacgcctgctcctaggagcgccgcgcagcgtccagagaccgattacatcgcgcagccacgcccccagcgtgcgcgcggccgccgtgtacgacccggcgcatgctcccggcacgctccacgcgctcctcccatccaggccgcgcctgcgctgtatgccgtgtggccgctacctcgcaggctctcccggtccctgctggcgcggcagtgccgcgcggtgggtgatgggagagcgcgcccattcccacgccgcgccaagtgccacgggatcaggtggggccgcgtgtacaggcgcgagacggtcgggccaaagctgcccctcatgatccccagcggacggtgcccggcggtccctcagatccgggaaatctgcacccggctgtggcgtagaccgaggggccgatgctgcttcagcccgccgttactgccctggcgtcagccagacactggggtgctgctgggcgtcgagagggctgctgcggggccgggctaagcctggggggctgcaggtgtcggggtggatgtgggcatagcggggctgctgggcctcgtgagcgccctggaacggcgtgcccgcggagtgcctctcatcactcattgccagtgcggggaaccttgttagggcccggttcgacgtagctgcaggctgggcgccagaggcagggggcaggcagtccgagaggaccctctacctgcatacctgggggctgcaggcagggcctctgggcctccttgttgtggatataattgtgtgcttcccgactcaggccgaggctggacccggagacgacagcgagggcaggctaccaagccctccccacagggccgtgcccagcccaagcctgccgagtcagcacccagatcctgggacaagataggtgaggatgaagtggtggtgctcttctcacttgcacaagccgtcccacgccacctctcctcggcttcacggtgcctagagaagaggtgggagagggtgcaggcgccccagctcaggatctgatgcctgtgggccaaggacctggatgcaagccaggagtccttggggccacgggcaggcagccggattcaccggaaagtgacgcttctcaaggggaacacacacgtaacacaccagctccctttctgccctggtccagtgactcctttcatgaaagctctctgaaatgttatctgcatttacacccaaactcactcactttgatccctgaaacgcgaatcaaaggtcacattgtaccttccctgggtctgtggggctttcagcagcctgggccaaaaataataaaagtggcaccgagccaggaaacgcctccttgaagtgggaatgaaatttggatttttttcggttgtatctttcctaattgacctgataatttaaacttcctccctcaagggaaaggtgggggttcccacaaattcagcttacctcagcctcaaggcagctcagtctacagctcagcgcccatcagcagagtgggcagtgggcctgtggaagaaatgaatccaactgagccagaaaaggccttttttggtccaaattttttttttctttcaggccctctcctgtgtataactgtcatgcaccgcataacaacgttttggtcaactagggaccacatatgtaactggtcatccagtaagctatagttattttattattgaagaaagaaaatttttaggccaggcgctgtggaggctcatgcttgtaatcccagcattttgggagcccaaggcgggcagctcatttgaggtcaggagtttgagaccagcctggtcaacatggtgaaaccctgtctctaccaaaaatacaaaaaattagccgggcgtggtggtatgtgcctgtaatcccagctacttgggaggctgaggcaggagaatcgcttgaacccaggaggcggaggttgcagtgagctgagattgtgctactgcactccagcctgggcaatagagtgagactccatctcaaaaaaaaaggaaaatgtttaatataagtgtgttgcagcctaagtgtacagtgt

SEQ ID NO: 1562622 - DNA, 4001 bp, Homo sapiens
aatctggggcattcttccactctgtcatgctacacctcctccccacattctgtcttcaactttaggatttccttcacttggtatagatctttttttcttttcttttttttttttttttttttttattttttagacagggtcttgctctgttgcccaatcaggaatgcagtagtgcaatcatggctcactgcagcctcaacctcctgggttcaagtaatcctccctccttagcctcccaagtagctgggatcacaggcatgtgcatcatgcctggctttttttttttttttttagtagagatgaggtctccctatgttgcccaggctggtcttgaactctctgagctcaagtgatcctccctgcttggcctcccaaagtgctgagattataggcggtagccgcacgccatataatctcaaccgttaagtgttctctggctttaccttttccctcccctcgccagtcacattttccccaccactggtcctcgtctacctctctgatgcctcctgcaggcctcctatgccctgctggctgcttgctcttggaactgatgaagtttcttttcctggcctgctgggtggctttcatcactgaatcgtccttgtgctttaatctcttcgagagttttccttctccaaacttgcatggtggtgggcagcacttattcttcagttgccgcctgagtacaagcttaaccagggagaaggaactggcaattaatgggttccttacaacttcccaagaggaagtggtagctggtgctggggcattaatgttctgctttgcacatgttctggccatccagatgttggtgagagccggtgagtccacatagcagtcctgaagcctggtatttaataagatggactgtcggagtccatagatagggatgctggggtctcgtctcacattgattgggtgctagaattataaggagggagaaatgaattttaaaaggaccgttcttcagcagagaataaaaggtctactttgaaggcaaaatattaacatctttttataggccattccttccacccagttcttagaaatttactatatgtcctctcctgttcaccaaagccttttataccaagtagggaggagatagtcactccacaaggttacagtaatattcaggctctcaaagaacatagcatgccagggcaggaagtcgggggtcagggagggttcacaaggaattgaagacaattcctgcctgctggaaagatacggacggcagggtcactcaagacttccatatgagctgtagacactcaaccatgctgcaacacagacatgacagccggtaagttctgccaagccctgaatacgctttacactttctttttttgtgtgtgggggggacggagtttagctcttgttgcccaggctggagtgcaatggcgtgatcttggctcactgcaacctccgcctcccgggctcaagggattcttctgcctcagcctccgaagtagttgagattacaggcatgcaccaccgcacccagctgatgttgtatttttagtagagacagggtttctccatgttggtcaggctggcctcgaactccccacctcagatgatccgcccgcctcagcctcccaaagtgctgggattaccagcatgagccaccatgttcggctgaatacactttctaaccaactgccatgcaccaagaagagctcattcacagggaaatcaatatactctggggaccataaaagcaacacgaaaacattaatgctgccggcctccatttcctgggaccaactaagagcaacagaacaatttggatagattagaatcacatatttaaagagatctggctttctaagaaatgtcatctatagaaataaaatcaccttaccatatttcagttgccttaaattttattttcgctagcttagtaaggggaagaaatatgtattttctctttcctttttctctctctctctttttttttgtttttgttttaatatttctagtcacctgtctttctctgccttagtcacatatgggcaaattgctgtttgtttagatgtgggctcaatgcaggcagctttgagccattatctctagtatttgtgatgtcactttggtttgtgatgtgggtgtgggtgggtgttacatcatcagattttatagttaaattatgtgggaagaagttctatacggttttgcttctagcctcagaaacttctgaagtcctcatttcccccaaaatggcttggatgaattttgaagatcttcatgttcttaagaagtatgttttgcaggaaatgtagtcaaatatgcagaccagatttggggatatgggtagtgagatgcatccctacatgtgcaaaagtgccctccttcatgtacataaaggaggcactgttaagttctcagaacagctgccaaggttagggaccaggaatgaaagaacacgttcctgcagacctgggcacctttccctgcatgtctctcccgggaagactacatggtttctggaatgtgggtttcttttacatcccatggcaaatgcagtaattagagctgttagcagtgtcaagggcttgaaaggagaacaaagccgcctcttcctgggaactcttgggcaatgcctcactgcttatcaggtgctcgtcctgttggtgggtttgattcttttatttgtaaaatgcctcaggagcctccctcctgagggggaggccagtgaaatgatggaaaaacagagtatgaatctggcaggggctcctggaatcgcatgtgttgcctgcttgcgtttttaagtgttgtccctggagtgaatcagagcctgcaggcggaccgcaccacaggctgtggtggaaccacctccaggcctatggcagctggacccacagacagttgagaggacaattgctccctttcagtggcgagccctggcctcacctcctaagagctgggtcgattttagagcagggctttggaaagggtttgtctttgggaagagtttgcgaatgtctggagactgggcaggcaagagtcttttcaaagctggtcagtcttggaaaaatggcaccgggctcctgggctacctggaaattaccatctgtctttactctgcaaagcagggacaggagggaaatgtcaagcaaaaaaaggcataataggagtaggtcatctgtttctcttttctccttctccatcttgagtttggctttcctgcacctcatctttccacacactcatccgttagatttactctgctaggtcttttactcaatgactctgcttggtcttttactcactctgtcccccaggctggagtgcagtggtgcgatctcggctcactgcaacctccgcttcctggggttcaagcaattctcgtgcatcagccacccaagacgctgggattacaggcgcggaccaccaagcccagctaatttttgtatttttagtagagatgagttttcaccatgttggcccagctggtctcaaactcctggcctcaagtgatccacccaccttggcctcccaaagtgctgggattacaggcgtgagcctgtgctcagcctcaatctccttcttccagcagagagctgttcacatgggcagcacttgatacatactcttcaagttctatcaaattctgccttctctgccttcattgtaactcacttcaattgactatgccacaacaggtaaccctcagccttccttagaactaacccagggtactttgttctaagctatttctcctatgtcaataaaactaatatttattgaatgcttcctgaaggccaggcactgttctagccactttattagcatcatgtcatgaaatgctaccaaccatcctatgagtttgagcactgttccctgttttacagataaagaaactgaggcacaagttgctcaagtatcatgcctcaagtaaccaacaaaggctgaacccaaccaaagtctatactgcccttgtttttgtttttgtttttgagacggagtttcactcttgtcacccaggctggagt

SEQ ID NO: 1562623 - DNA, 4001 bp, Homo sapiens
tccagcctcgtctgcgactagaaacagagaaccctgcacatctgcaaggcacagaaattaacgctggtgccttcatattgtgcaataacaaactgcggttaacctgaatgaagccgacctatagaatcaaaaagatagttctggaaaacataaaagagcaagttgtagcacatgacgttttacaaagattaaaacagcattcacccaaaagatggccagtcacccacggccgcacaggtacagtgtggacgtgcagcagagccaaggacggggcacctggcagccagagggacaggcacgtcttaggaggaaaggtctgcggtgctcctttctttaaaaagaaatagaaacgatctgaggcaaatatggcatcgggtttccctccactcatttatactcctctgggatttaattttcaaattaataagcaaacaagacaggtgaaatgggattccctaggatttgatagccgtaaccacatgcttggtgtcagaagctccgtagagagcattgaggagatgaagcccaactttttagaagccaattttccgagatacctcaagacactttgtcttggtctcctcttcctagaagaacattctttaaaaaaaaaaaaaatagaaaccgcctgatgtgcaaagatgtttataagaagaaaaaactaaaagcaagtcaaatgtcccagtaacatggcaggtgtgagtcgcagcacggcgccgccgaggagaccaaacccacccacggcatgagcgtgagtcgctgcaaagggcaaaggtgtgcgccacaaagcaccagagacccccaggcccctgcggcctggcctggcacagccttgctttgcagccccggagaggcagggcctggacctcaccctggcctccacctgccaccacgctgttcccgccaccctgaatgcccccttccaggcatccctgaccagcacagcctcaccccaggggagcccgacaccctccgccatctgctgcctggcacacgacgtgagccacgggcactgaggttaccacagggtccacagctccagagcttcccagagccaaccccaggcccgccccgcgcttgcccggtgatcaggtgagtctgcgagcctgcggggagaatccttgggcgcccatgtcagggttcaaggggtgggcgtcatgagagcaggaccaggcacccaggggccccagccgcaccagctctcattcctgccccgccacaggcaggcagcccagctggcgtccaaacctccttcacgggctccagggaaagtggctgcctcggagcccaggcccaggggaccttgaaagataaaccgccattgtacagctccagggaaaatcagaatcgtccctaaggagtctcaagaaagcacccctcagcaagatggagccccaggtcctggaagagccacgagctgttctgcaagatggagccccaggtcctggaagagccacgagctgttctgcaagatggagccccaggtcctggaagagccacgagctgttctgcccgaaagggcagagggccggagaagccagtcctgggggaggaggtcggggccactcaccagggccttcctaacgttccgtccgagcgcattctggaggaagagcagctcctcaaccgagcccgagagggcatggccccggtcgcgggtagacagccgcacctctgccccatctctgcccgctgacacctgtcctggtccaggtccacctccccgggcatccaggccccagctcgtccctctccttaaagtcttctggctctcacaccctctacgtgtccgttctcacactgctagaaagacctaactgagactgggtaatttattttaaaaggaagtttggttgactcacagttctgcaggctgtacaggaagcgtggctgggaggtctcaggaaacacaatcatggcggaaggggaaggggaagcaggcgcttctcatcatggcggagcagaggaagagagaacgtgagggggagggaccgcacacgtttaaaccatcagatctcgtgggaactcactatcacgagaacagcaacgggaactccgcccccatgatccagtcacctcctaccaggcccctcctccaacactgggaattacaattcctcctgagatttgggtgtggacacacagccagaccacagcacaccccccagatcaggctcctgatctgggcacctgcccagtctcctgcaggagctccagccggagccccggggccctgcgattcccctccctgagagcccctctctcagcccatccacaggttatatccctcccacctccagatggagctcaggcccgcccttcctccagcccctgccatctcctggccagtgacccggtgacgacgtcacctccgcaaaggctcacacggttccacctatcccctgctcttctccacggagcaccagtgtgagcctgagaaacacgccctctggcacctgtcctcataaggcctctcctggctttctctggagtccagcctcaccctggcctctacctgccaccatgctgttcccgccaccctgaatgcccccttccaggcatccttggccagcacagcctcaccccaggggaaccctctgccatctcctccctggcacacaacgtgaaccatgggtgcccagttcccctcagtcccctacctgctccaagggtagggcccagactgatggcctctggggtgggccacgatgagacccctgcccctgagggcccagcctgcacctcctccacctcactggatgctgttaaccccctctgctcctcctccaggtacagggaagccacagggaggcagagggcaaacatcggggagctgtgttcccgccacagatccacactgtcggttgagtgcaccctcaccaggaaagctgggcccaccatgtgatttcctggagcctccgtgacaaaggaccacaaactgggggcttaaagcaacagaaattctctcacagttcggaggccggaagtccaaaatcaaggtgtccccggggccacgttccctctggaggctccaagggagggatcttcctgtctctgcattttccaggggccccacaatccctggaattccctggttcacagccgcatggcctgattggagcttctgtgtctgcatggcctcctgcctgagcctcaaacctctctcttttttatgaggaacaccggttaattacaggatttaaggcgtaccctctccgggatgggactatctcatccccagatctttaatttgattataactgcaaaaaccctattggcaagtaagttcacctttacaggtcctcggggggctaggatgtcaacacatctttttagcggggacacattcaacccacaacaccagcgctagcagaattccagctgccagagagtcgggcatatgggcaggcgcttatcaaggaagaaagcagagtgttgaggctgtttttttaagccacaggtaagaagaaattgctgagtcagcttcagcattcattaacagccaccgatttcccgggaaggcccgagggagatgaataagcagcagctgcgattccatcaagcttaatttaaaatcctggtggaggaaggcatggaaaccagtgctgctggtcccaggagaatgctggagttgaatatctctgcattcagatgcgggctttacctaggagtaagaaagcctgtgtaattagacctaatgacaaagaggctccacacctccctcagtcccggggcaccgggctgcagccgacagctccaaccagacacctcgcagttcccaaggccagcaccccagagaagggatgtagggatcttcttcagagcagaaggtcttcagggatctcagcacatgtgctccaagcagacatctccctagtcccgaggggcagggccgtggacaagcagctggaagcccacccggccagccttgatccagaagatgacccctgggtgacccctggtgaaggccggcatcagtggctgcagagacgagggggccc

SEQ ID NO: 1562624 - DNA, 4001 bp, Homo sapiens
catatatatacattaaagttatcaatctcttgctatataagctgtcagctttcttactttttttgactttcacatattatggaatagtcatcattttcttttatacagcagtctggtttccacatcagttcatctctttcagatcactgtatacacttaataatgttgaagtgttgatcagtcccattgattctcattccttggcactccccatgagcctcgcacctttcggctggcttctctccatctcctctcccacaaggggtccaccgtagcactgtattctacactacagtgtgggtgccaggagggcagagactcttcttatcactcgtgcatccccaagagcacccaatgtggtacatatttgctggacgaaaaaacaactagaaccacctccttaccggtctctctgctcctgtaatatattctctacaccctagcaaacagattgaacttcttttaccctctctcttttttttcccccctgagacaggtctccctctgttatccaggctggtgtgcagtggtgtgaccatagctcactgcagctttgaactcctgggcttaggcgatcctcccgcctcaccctcccaagtagctgggaccacaggtgcacgccaccacactttgctaacagactgatcttttaaagatataaatcgaattatgcctcccagcacactttagactaaactctaaactccgtatcaaaaggcccgccaggtccctggtataccgctctccaaccatccacctaccctctgcttcaggaacccaggccttatctgtttctcagcggtgtctaccggggctggatgaaggctggctcctggtcactcaggactcagcaacatcacctcctgcgtaggccagctgatgaccctaacaccggacggctgccctcttccctctctaaaccactctacaccccctcctcgctggtctcctcctttgtctttcacgccctctgaaagtcctgttgatatgctaatttacacaatctctcaaaagaaaggaagcgtgaggaggatagggaccccgtcagtccccggctaggtcgcggggcatggggcgtggaggggtggggaaagctgggccccgcaaggcgctccgaagcgccgccccgctccctcccggcgcacctgggcctcggcgttccggcgctcctcccagtcgcggcagctggccaggtcgcgctgccactgttcgcaggccggccgctcgccgtggacgtagtagtggtgtaggaagtgcctggcgctgcggcagagcttccactcggcgcggtaggcctcgcaggggcgcggcggctgcggcgagaggcggcgcctgagcggggcccggcggccgcgccctacgccccgagccagtcccgttccctccctccggaagaccccggtggttcccggctccgacccagcacactcacctgccagccgctgccgtccgccatgtctgggcgaccggcgcgccaagcccgcccctcagtccgccagccaatgaaaaatgaagaaaacggcacctcgtgatcgactgacagaagaactaatgagcaccgacacattcaatcacgtcttcgcccccttcttcgagaagcgccgacaaacaggacgagcaaccaatagcaaccgagggcggctgcggcgcgcgcggagggccggggtcgcagggtaaatccggggcgagacctggcgcgaagcctacgcgaccaccgcgacgacagcgccattcaccccgggccaggcgggcatcctgggccgcgcagctaccttacgtcagccgcctctcaaatcacacggctctggccagttcttttcagcagctttatgagattttctcaaatctcaacaatccggtatattttcaaaagtacatactgagcatcaaggtggtgcagcgaacctcccagatctgcagctccagcagtcttgcttgagcgtccactcaggatggaggtgaactcgcaaagtaactgagattggttgggcatgacatatggtggatctagggttgaatgacctccccagggaacgcaggcttgaagtggaggctgagaatgcaatccgagtacagccataggccggtcaaaggtatggaggcggtgtgtagcaggggtgagcggggtaggagtggcttggatgtctgtagttctattctaagggtgcgggagacatgtaacatttaccttattcatttttcgagacagggtcttgctgtgtcacccaggcttagtgcagtggcgtggcgtgttcatggcttactgcaacctcaaactcctggactccgaacagctgggaccaaaagcatgcacagcctcaccaggctaatttttaattttttttttttttttttgtaaagatggggtcttgctaagttacccaggctagtttggcctcaagcgaccctctcactttggcctcccaaagtgctaggattataggcggagcgccagtgcctggctgggacgtttataaaaaggagcaatgcacaagaggcaacaaaggcaagtaaagaggaggctggtgggcttgcagaaacgccctgcagtacctatgctgcggttctcccacttcactgataacaaatcctcagtatccactgatacaaatcctgggactgctgggccagtcccaggaatgacactgggacagactccctggaggtggatcagaaagctgcagttttaccaggggtcctgctgttgaggcagccggctcaaggaccaagcccaaataagacactgagaggaaggctgcaggccagggtgcaggagtaatgaccaggatcagtgctccaactggccccactgtgtcattaaaaggctctgcaatggaatccatcctggtccaggcaggggagtgtgcctccagcaaaggaccaggcgtttcactgcatacacagcaggtgttgcttagtgaagacaaaaacccagagccagaggtactgtaacattcttcattatgcataaagtgacagtctgttagctgatgtgatcctgcaaatgaaggctgtctacccaccaagggtttctccctctgctagtaaaactgagactttgtcagtggaggctcaggtaagtccccacagtgctcatgccttccaaaaccacgcccatttccagtgatgatggtttgtgccacaggccaagtactgaacatcatgacactcatagacactcttcactgaagacgtggatagaccctggggccaccattctctcctctctggagtgttggaggggccctgaccagggcaggacccccatgtctggaagcagggttagccctggctcatgggggaccctgctgggcttagccattgccacctagggatcaggcagccttgtttcttcctactttctccaggagaagccccagagggacacttttctaatggtgagatggaacacggagcacctgccaacaggccttcagttatggtcagaggcccaaccaccagtctgtgttagtacctaatcaaacatttagatttaggctttagttattgcctgtttttacttgaaattcttggcttagaattattcccaatggggccaggcacagtggctcatgggaacaaatttaaaataatcagattagcatgtcaaaagatctcacgttatagaaagtgaagatctaagaccaaataaatactgataaaaaatacaggccagcagaagcttggatgatttaataaattaaaattgggagttggggagtagggaagaaggagaggaacatctctttagcatttgttcattctaacattcacatgtttgcttctccatggagttgtttcactatgaacaggttcactaaggagccagttatgtccatatgaaatgagaataaaagtgcaaactcattcagatcaggttcttctgagtggtgtttttgaaaaaaatatgtaaaataaaaatagaaacattctttgtcaaatacttaaattgcagccacagtagtgggacagccactacttatagaacacatgtctattta

SEQ ID NO: 1562625 - DNA, 4001 bp, Homo sapiens
tgcttccacccttgcctgcattacaggacattctcacacagccgctggtcagtcttcttcttggaggattaacagtaatccccaggctgtaatcctccagtggtttcccatctcaactaaagtccatattctttgtcaatgctcactacgtgtacaaggccttagcccatcatattcatttcactctgctgcagccacctttgtgtctttctgtccttttcccaaaacaagtttgttcccatttcaggaattccaaagaagaaattcctctctggaagccctctcccatcatcctcacaaggctccgcctcacttttcaatttattttaaaaaacaaataagatgggatctctatgtctatgaaggtggggaccttccgtcttatttcaaaaagaaagggacataacaagaaccaagaggcaaaaaacagtcgtgagagtgtagtcagagctcctccttccactaccagctactgaaggctgctggccctgcccaatggctagtacccacaaagcctcctatgtcacctggttaccaggaaacaaccaagtcaggctagtggctcacaatggccgaccccacagacccacccaatggctcacacctccctgctgctgcccaccttgtggccaccctgtccctctgtggtgactgcactattcgtcctgggctgcctgagctttccagtcctgagaaaagtgcaggggggcgggggttgttattggaagtcaccctgggcaatgaaatcaatagaaaaccctggttactaaagtcagttccattagcatctctgtttttctgagtctggcagctttcgtttgctcaccaaatgtagttatacacaaatttcggactgctttgtaagtaaatgcttctctcctgtcttacaagtgttagtttttgtcttcaacttgaccacagcaactcctagagccctggtcccactctcgataaagcgtgatgactgcgacttgaatgaaaccctaggacacatcacactttcccttccttgtctacaatatagggactacactgtagtagggctgaagagacactcatgtcaaattgggaattttaaagtaatcagagctccatgactaaactctttgggtaaaaccaacacaaaagcaatttctttacagctctggcactaacatttcataccttttgcagtcatttgaagcatgtcccccaattttttttccttctttcttcaaattacaattggaagaagtaaagcagcttctgtcaatgtgacttaaaaccatctattaagaataccatataatctcttccatggcaaactctattttgaatttaagaagtctccacatatttgagtctaaattatcccaattattagctaccttaaggaatgggagaaaagaaacaattgggcccttaactggctccttcacttaggtaccagaccagctggatgggtaaggatagagaatgggatggggactccaaaactggagtatttgaaattttactgagaaaagggccgggactagaccaaaaagtcctcaacaaagaaggctcaacaacaaagacaagaggcagaaccagcctttgtcccccatgcctagccctgggaaagccggctatgggcaggagggagctggaagctgaggatgtctctgagggtgagggactgcaaaggggtgggggcggtggtggccagagagatgccagagagcaaatggcacccatggcttctttacctttggacatcttcagcatcttcggcgtcttcgggaggctgaggtactgcatgagttgggccttcttagctttcaaatccaatttggcaggctttgcagtggtggatgctggtgctgtggctgccacagtctcaggaatctcacactcatggcagggtcccacatctggcctgcagcagtcacagttgaggcccccgctggggcccaggcagcaagtcagtttgctccccattgggcacctaaacacacaaaaaagtccaagaggcacaaggacagaatgtagtcggagctcctcctccttctacggccagctaccgactgaaggctgctggccctggccgttgcctagtaaccacaaaacctcctatgtcacctggttgccaggaaacaaccaagtcaggctagtggctcacaatggccgaccccacagacccaccaaatgcctcacaatgcccatccctgctgctgcccaccttgtggccaccctgtccctctgtggtgactgcattattcatcctgggctgcctgagctttccagtcctgagaaaagtgcaggggttggaggttgttattggaagtcaccctgggcaatgaactcaatagaaaaccctggttactaaagtcagttccattagcatctctgtttttctgagtctggcagctttcgtttgctcaccaaatgtagttatacacaaatttcggactgctttgtaagtaaatgcttctctcctgtcttacaagtgttactttttgtcttcaacttgaccacagcaactcctagagccctggtcccactctcgataaagcgtgatgactgcgacttgaatgaaaccctaggacacatcacactttcccttcattgtctataaaatagggactgaactcatccttcccagttctgaaatgctaggacctaccaactctcttttctccctctgtttctttcttccatggcagggatattcagatatttcttttactaacaatgcataaagcacgtttttcttacacaaaattgaaaaccatatagtgggataccactgtcctcatttgatgaagatgaacagtaaatatctggcaagcctgacagtattccaacagtggtatactaatttaacccccagaaaccattccattttacggattttgcagaatcaatctagatggagaagttaagtagcttccccaagtttccatgacggctcaagatggggccagaatttaatcctgagtaatcttgatccccacaagccgatcatgattatcagaaagtaaaggtagacgtcatgcttggaggggaagtgaccttgtagattagtattttttttaaagaataacagttttttgatgtgaattttaaaatgcctccccttcattcaacattaagtctaagtgccaatactgcatgtgtgaaacagtcccaaccctcagtgagttcaggcagatgagcaaacaaaggcttagagggttcaattatctgaggctacactgctggacagtgaatcaacctggaatgaaaatgcagatctatctgacccaaaattagatgctggggtagagtttgaattttattctggaaacgagagtcactgaaccacacaggggtgaggagtctctatccgatgtgcttgcagtgacgtcactctgcgcagtggagagggctttatgaaagcagtggggctgattaagatactctatgttcatctggagaacagtaaggctaaaaaggcagcagcagtgactgaagtggaaggaaaagttttgtgatcatttgggagatagaacaggaagtgcttggtgattagacgtggaagaagaggggaaggaaaaacaggctgctaaggccctagtttgatggactgtgtaaatagcagtgattctcccctagacagagaatgtaggacgagaaagaggtgtggggaatgagacagttttgaactctttaaatgtcacattgaaatggaaccgtctggttgaaaattggatgtaaacctctgtaggctaagtccattctgtgacatcccaactcatgttttcaaaagtaacacacacacagtaactcaaaccattaaggaaatttcctaacatttacatactaagaatataatagttttttagtgattactttcttagggaaactttgaatttatggttgtagcgaatgaggtgtcacgtaaaataaaactgttatataagaacaacatttaaattctattgtcataacagcatatagaaaacaattgaagccatgggtaagaccgtgactgctttaaa

SEQ ID NO: 1562626 - DNA, 4001 bp, Homo sapiens
gctactcaggaggcttaggcaggagaatggcatgaacccgggaggtggagctttcagtgggccgagatcgcgccactgcactccagtctgggtgacagagcaagactccgtctcaaagaaagaaagaaagaaagaaagaaatccagagtcgaccaggcgtggtggctcacacctgtaatcccaacgctttgggaggccaaggtgggtggatcacttgaggtcaggagttcgagaccagccagaccaacatggtgaaaccctgtgtctactaaaaatacaaaaattagctgtgcgtggtggcacatgcctgtaatcccagctactagggaggcagagtcaagagaatcacttgaacctgggaggcagaggttgctgtgagccgagatcgcaccactggactttagcctgggccacacagcaagactccatctcaaaaaaaaaaaaaaaagaaaagaaaaaaaagaaaaacaagaaagaaatctgcagagttggctaggagtggtggctcattcctgtaatcccagcactttgggaggccaaggcaggcggatcacataaggacgggagttcgagaccagcatgactaacacggagaaacctcgcctctactaaaaatacaaaattaacgggtgtggtagtgcatgcccataatcccagctactcaggaggctgaggcaggagaattgcttgaacttgggaggcagaggttgaggtaagccgagatcacaccattgcactccagcctgggcaacaagagcaaaactgcatctcaaaaaaaaaaaaaggaaaagaaaaggaaatccgcagagttgtgactaaaacttctgggctgctggtaatcatttgtttcttaatctgcatgctacaaactgatgtattcaattatgaaaatttactgatctacacacttgtaattgtgtgtgtgtattatccttggaccaatttttttttttaaaagagagaaaaaagaggccaggcacagtggctcacacctgtaatcccagcactttgggaggccgaggcaggcagatcacaaggtcaggagctcgagaccagcctggccaacaaagtgaaaccccatctctactaaaagtacaaaaaaaaaaaaaaatttgccaggcgtggtggcgggcgcctgtaatcctagctactcgggaggctgaggcaggagaatcgcttgaaccagggaggcggaggttgcagcaaaccaagatcacaccactgcacaccagcccaggcaacagtgtgagactctgtctcagaaaaaaaaagagagagagagagagagagagagagagaaagaagaaggccattctggtgactgtatggaggataggctgtggttggataagagaagcagcaagaaccaggcagaaggctgttgctatggtccagttgagacatgatggtgtctctgcccaggagggtgtggtgtggttagaagtgatcagatttgagatacaatttgcaagtatagcccctgggacctgcagatggattgaatgtgtggagtgagggaaagagaggagctcagggtgactcctgggtttggggcttggccgatgctctccctgagcagcctgagtttccctctgattcatttctggtacaccaggcataaaacaaggtccttgtaacaagtgacagagacaatcatggtgctgagggaagaagggtgaaggtgtatggggcccactcaccttgatgacattccttgtgctgaagcgggtcctggtgacctggtgccaacagtgccggacctgccagaccagaaagaggcagaggacaagcaggttgccacagcactgagggtccctgcagctgtgattctgggagagcaggccctgcactggctcccactcagggccatggaatggccccaccacagcacaggcacccagcagtgacaacaacatggcaaagcttagatcaggcagatggtgttgggagctagagggcaggcctggcacatctgatgcagccagctgcagtaggatagccgccacctcatagcacccctgtcactgaggccacctcacaaagggggctgatgccccagcctcaactctgaccctggtgccaggcctggttagcatgctcttggtgcaggtaaggacagtattggggaattgttcaaaagtaattaggaggaagaacttgttttaaacaaacccatcctctggaatgaaaagattaagttccctgaatgtgtgatggggtgatataacctgcggtctgcttgatttctttcttcctatgaaatacttggatctgcctgtccttctattatcaaacatttaatgaacactgtattgaatacatgtattcttgtttaaccactcaacatgcctttctcgttgcttgcagtatcctgatttcctgtgggggaattacttttcccatcttaggatcagtgttggtgggaaaataaatgttaccctgaagactcttttacccaaaagttctattcaaaatattaaatatctgagcaggcagggacgtcagccaattataatgagccaggccttaactgtttagtggctggaatttttttttttttttttgagaccgagtttccactcttgttgcccaggctggagtgcaatggcgcgatctcggctcactgcaacttccacctcccaagttcaagcgattctcctgcctcaacctcccgagtagctgggattacaggcatgcgccaccacgcccggctaattttgtatttttagtagagacgggggtttctccatattggtcaggctggtatcgaactcccaacctcaggtgatccgcccgcctcagcttcccaaagtgctgggattacaggcgtgagccaccgcacccggccctcttttttttcttcttttttttgagacggagtctcactctgttgcccaggctggagtgcagtgtgcagtggtgcgatctcggctcactgcaagctccgcctccggggttcacggcattctcctgcctcggcctcccgagtagctgggactacaggcgcccgccaccatgcccggctaattttttgtatttttagtagagacggttcactgtgttagccaggatggtctcgatctcctgacctagtgatccgcctgcctcagcctcccaaagtgctgcgattacaggcgggagccaccgcacccggccggcctttttttttttttttttgagagtctcgctctgtcgcctcagctggagtgctagagtgcagtggcatgatctcaacttactgtagcctccacctccggggttcaagcgattctcctgcttcagcctcctaagtagctggggttacaggcgcccgccaccacgcctggctaatttttgtattttttagtagggacgaggtttcgccatgttggccaggctggtctcgaactcctgtcctcaggtgatgcgcccgcctcggcctcccaaagtgccgggattacagccataagccgctgcggccggccggtgggttactttttgaatgtttaattcattgtttctgccaataatttgtactaggcagctcataagaacgccaaagtacgttccttcttcgacacagggccagtttccgcgccagtgcccccgtagagggcggggcccactcgctcgcgtagcgtcaccttcgcttcctgccgcgcggggccatttccgctgctgcttctgtgagtttttccggtgcacgcgagtgcttctgaaacgtcagctgcgctcccctaggagtgctgagcccgcggaaccgcagccatggtgagtgcgtgcgccggccgagggaccgggaagcgggagactcagggttgcgttcactccctagcctgttagatggaggcttagagcctgcgccgtctcatccgccggcgttgggtcttaaccgccgggcccttagttagaaccccagcagcggcggggtcccagcagcctggcccgaggttagaactcaggaaaccttaggatccccgcagctgtgttgctttgccgcacggtctgtttgcttggcaaaa

SEQ ID NO: 1562627 - DNA, 4001 bp, Homo sapiens
caaaaaactagcagggtatggtgagaggcgcctgtagtcccagctactagggaggctgaggcaggagaatggcgtgaacccaggcggcggagcttgcagtgaggcgagatcgcaccactgcactccagcctgggccacaggcgagactccatctcaaaaaaaaaaaaaaaaaagcttaaaaagaaataaccattttgattatatatttatcatctgtaagcaatgtgaggatggtaaccatttatgtattgttcaccataaatccaagaaactcactaaaaggagcttttaaaaaaaaaaaagctattgaggccgggcgcggtgtctgacgcctgtaatcccaacactttcagaggccgaggcgggtggatcacctgaggtcaggagtttgagagcagcctgaccaatacggtgaaaccccgtctctactaaaaatacaaaaattagccaagcatggtggcgggtgtctgtagtcccagctactcgggaggccgagacaggagaactgcttgaacccgggaggcggagattgcagtgagccgagatcatgccactgcactccagcctgggcgacagaccaaggctccgtcacacacacacacacaaaagctattgaataatcatgaaaaagaaaaatatctattcatttctgactcccagcccagcagctgcatttcctcagatagcagcacattcaccaggcttattagtctaagctaataagtttccaaaccccttagaatatagtttccatggcctcagaacacgataaagagtagcacaccttcagacctcagcaccctgatccagagtgataactggggatgtttcctggcctggaaggtgggaagcctatgtcttaagctcagtggtggcagtgccctggctgtgtgactgacttgacatagatgtcagtctctcagtctgtttcccctcatgtatgaggctttgtactagatgagggttctgcaagctaaccagcccaccctttttgtacagcccacgagcaaagaatggtttttacattttttcatatttgggaaaaaaaatcatgacacgtgaaaattatattaacaatatataaaattaaaacttcggtccctataattaaaattttattgcgacgcagctagtctgttatgtattgtctttggctgtatccacactacatcgctacagttaagtagacagagtatggaccccccaagcctaaactactattatgaatactattatactcattatacttacaatataacaatgtaaacactgatatatttacaacaaaagtttgccgaccgctgaacgagactgttctaagcatattctatttctaaccacaataatcacatagaaagaatcttagccacatggaatccgacggtcccacacttataacctgtaataacccaggtcctgaagagttaagtgactcccaaagccacttgtgcagataccttgggaatgccaggtgagttccatctggccagggcccgcctcttgcggggaggcagtgaagcagaacggtcaaaattttcagtctggagtcgcgctcacccactgggtgacttggagcaaatcatttcacctacccgcggcctcagtttccacccctgtaaatggcaccaataacaacactcacctcgcagggctgctgtgaaggtgaagcgaaaggtcgcgagtaaagggttagcgcgctgggctttgcacccagcagacgccaaatcaatggtggctcctgcggttactgggaacctccccggaggccggaacccattctaggcacctcagggcggcggcgagagccatgaagaggctcgcgaggcagccaggaagcccggcctcggtttccctgactggggctctaaagctgcccgcgaaacccccagcttcctcacgtaacccagcctcgcgcctgcagcccctccggcctgtgccccgggctctgctgagcctcacccccaccccggcaccgccttcaaaccagccttccaggaactcaccaggcgtctccacagcaacggccagtctgtcccgaccaccgcgccgtccggctgcgcgcctgacaacaaggcgtgctcccattggctccggtgccggttgtgccagccaatcagcgggggcgcacgcgccgctcgctctccgcgggctgcttagctggggccctgcagacggctacccttgggcggcgcgcgcgcgcgtgcgcgcgtgtgtgcgcgtgtgtgcgcgcgtgcgcgtgtgcgtgtgcgtgtgtgtgtgtgtgtgtgtgtgtgtgtgtgtgtgtgtgtgtgtgttgcgggagtggagcttgttgtttccggatccccgtcgtcagtcctagcgtgctggaggcttagagcaccagctcgtagtcggactctcttctccacagcttgcaccctgagcagtcactaaatgatgggctgtgtgttattacctgggacatgtgctctgaaaacagtggaaacttggggaacacttagagcggggtgtccaatcttttggtttccctgggccacgttggaagaattgttttgggccacacataaaatacactaacactaaggatagctgataagttaataaataaataaataataaaaataaaaatcaccaaaaaatctcaaaatgttgtaagaaagtttatgaatttgtgttgagccgcattcaaagccaagcagaccagcgcgttggagaaacttgacttagagggaaccagggaggaggagcatcctcattcattatattacctgtgcctctctttccaaaaaggatgtgaagcccaaaaggaacagatacaataggatattgaaacaaaaggaaaaaaaggaacaaaacctagtaaatgaacaagaagaggggtcatgggtggtgtcagaattccagagatgaaaaaaggcgacagagttgaaggggttctgtcaagggtcttgggctgaaagatggtactctcttgggagctagaataacaataaagcattgtagggaagaactttacactgtggttgaattcatagctgcttgagtcttgcacagatgattcaaataggagtgaatgttgggggctttttaacctcaaagacagtaacagcatggtgaaaaactcagttcagtacaataaagctatactgataagctagaagttctgaaaattgttgagtcaccaaccttgactttgagtattggggtaaacagtatttggggggtaaacagaagcataaacagatggtttcaaagctgcatggataaccttcagcctcggatacagcttccactcaagccttatcatgaaagatgcgctggagagaaacagttgaaaataggtgggaagggtggtccaagcagcaagaaagttgtgtggggaaggtccggaggtgagaaacatgcagatcatgctggagtgtcatgcagcacagtgttaccgtgaggcaaagctcagggccacagtggggagagagcactctggagagttaggaagaggccagtccaaacaagcaagcagaaaacatattgttgcagtcttgcccgtgcaccacaatgtaccagtctctcattgtggggtatcacccagaattctttgtctcacgaccaagaaaattagggagtgtggacacaaagggtaaggttgaagcaaaagtttaataagcaaatgaagaaagctcattgcagctggcggggggcccaagcaggttgcccattatgaggctgggtcagggggttttatggactgggaaaggaaggaatgtactgactggtcttggagaaagcactactcagcttggcccctggaccttgagggaccaatcaggagctgaagtgatagcctggcccaggaccaatcagaggctcacattctaaagcacgtccaagaaaggaaagtgcccactggaacccactgtagcccaccgtgtacatgtccacaaaaggagaagagactatttcctggaagcccactggttatacaaaggacaaaggcatttctatgctgggtcttgttccct

SEQ ID NO: 1562628 - DNA, 4001 bp, Homo sapiens
ctgaggcaggagaatggcgtgaacccaggcggcggagcttgcagtgaggcgagatcgcaccactgcactccagcctgggccacaggcgagactccatctcaaaaaaaaaaaaaaaaaagcttaaaaagaaataaccattttgattatatatttatcatctgtaagcaatgtgaggatggtaaccatttatgtattgttcaccataaatccaagaaactcactaaaaggagcttttaaaaaaaaaaaagctattgaggccgggcgcggtgtctgacgcctgtaatcccaacactttcagaggccgaggcgggtggatcacctgaggtcaggagtttgagagcagcctgaccaatacggtgaaaccccgtctctactaaaaatacaaaaattagccaagcatggtggcgggtgtctgtagtcccagctactcgggaggccgagacaggagaactgcttgaacccgggaggcggagattgcagtgagccgagatcatgccactgcactccagcctgggcgacagaccaaggctccgtcacacacacacacacaaaagctattgaataatcatgaaaaagaaaaatatctattcatttctgactcccagcccagcagctgcatttcctcagatagcagcacattcaccaggcttattagtctaagctaataagtttccaaaccccttagaatatagtttccatggcctcagaacacgataaagagtagcacaccttcagacctcagcaccctgatccagagtgataactggggatgtttcctggcctggaaggtgggaagcctatgtcttaagctcagtggtggcagtgccctggctgtgtgactgacttgacatagatgtcagtctctcagtctgtttcccctcatgtatgaggctttgtactagatgagggttctgcaagctaaccagcccaccctttttgtacagcccacgagcaaagaatggtttttacattttttcatatttgggaaaaaaaatcatgacacgtgaaaattatattaacaatatataaaattaaaacttcggtccctataattaaaattttattgcgacgcagctagtctgttatgtattgtctttggctgtatccacactacatcgctacagttaagtagacagagtatggaccccccaagcctaaactactattatgaatactattatactcattatacttacaatataacaatgtaaacactgatatatttacaacaaaagtttgccgaccgctgaacgagactgttctaagcatattctatttctaaccacaataatcacatagaaagaatcttagccacatggaatccgacggtcccacacttataacctgtaataacccaggtcctgaagagttaagtgactcccaaagccacttgtgcagataccttgggaatgccaggtgagttccatctggccagggcccgcctcttgcggggaggcagtgaagcagaacggtcaaaattttcagtctggagtcgcgctcacccactgggtgacttggagcaaatcatttcacctacccgcggcctcagtttccacccctgtaaatggcaccaataacaacactcacctcgcagggctgctgtgaaggtgaagcgaaaggtcgcgagtaaagggttagcgcgctgggctttgcacccagcagacgccaaatcaatggtggctcctgcggttactgggaacctccccggaggccggaacccattctaggcacctcagggcggcggcgagagccatgaagaggctcgcgaggcagccaggaagcccggcctcggtttccctgactggggctctaaagctgcccgcgaaacccccagcttcctcacgtaacccagcctcgcgcctgcagcccctccggcctgtgccccgggctctgctgagcctcacccccaccccggcaccgccttcaaaccagccttccaggaactcaccaggcgtctccacagcaacggccagtctgtcccgaccaccgcgccgtccggctgcgcgcctgacaacaaggcgtgctcccattggctccggtgccggttgtgccagccaatcagcgggggcgcacgcgccgctcgctctccgcgggctgcttagctggggccctgcagacggctacccttgggcggcgcgcgcgcgcgtgcgcgcgtgtgtgcgcgtgtgtgcgcgcgtgcgcgtgtgcgtgtgcgtgtgtgtgtgtgtgtgtgtgtgtgtgtgtgtgtgtgtgtgtgtgttgcgggagtggagcttgttgtttccggatccccgtcgtcagtcctagcgtgctggaggcttagagcaccagctcgtagtcggactctcttctccacagcttgcaccctgagcagtcactaaatgatgggctgtgtgttattacctgggacatgtgctctgaaaacagtggaaacttggggaacacttagagcggggtgtccaatcttttggtttccctgggccacgttggaagaattgttttgggccacacataaaatacactaacactaaggatagctgataagttaataaataaataaataataaaaataaaaatcaccaaaaaatctcaaaatgttgtaagaaagtttatgaatttgtgttgagccgcattcaaagccaagcagaccagcgcgttggagaaacttgacttagagggaaccagggaggaggagcatcctcattcattatattacctgtgcctctctttccaaaaaggatgtgaagcccaaaaggaacagatacaataggatattgaaacaaaaggaaaaaaaggaacaaaacctagtaaatgaacaagaagaggggtcatgggtggtgtcagaattccagagatgaaaaaaggcgacagagttgaaggggttctgtcaagggtcttgggctgaaagatggtactctcttgggagctagaataacaataaagcattgtagggaagaactttacactgtggttgaattcatagctgcttgagtcttgcacagatgattcaaataggagtgaatgttgggggctttttaacctcaaagacagtaacagcatggtgaaaaactcagttcagtacaataaagctatactgataagctagaagttctgaaaattgttgagtcaccaaccttgactttgagtattggggtaaacagtatttggggggtaaacagaagcataaacagatggtttcaaagctgcatggataaccttcagcctcggatacagcttccactcaagccttatcatgaaagatgcgctggagagaaacagttgaaaataggtgggaagggtggtccaagcagcaagaaagttgtgtggggaaggtccggaggtgagaaacatgcagatcatgctggagtgtcatgcagcacagtgttaccgtgaggcaaagctcagggccacagtggggagagagcactctggagagttaggaagaggccagtccaaacaagcaagcagaaaacatattgttgcagtcttgcccgtgcaccacaatgtaccagtctctcattgtggggtatcacccagaattctttgtctcacgaccaagaaaattagggagtgtggacacaaagggtaaggttgaagcaaaagtttaataagcaaatgaagaaagctcattgcagctggcggggggcccaagcaggttgcccattatgaggctgggtcagggggttttatggactgggaaaggaaggaatgtactgactggtcttggagaaagcactactcagcttggcccctggaccttgagggaccaatcaggagctgaagtgatagcctggcccaggaccaatcagaggctcacattctaaagcacgtccaagaaaggaaagtgcccactggaacccactgtagcccaccgtgtacatgtccacaaaaggagaagagactatttcctggaagcccactggttatacaaaggacaaaggcatttctatgctgggtcttgttcccttatcaaagtagctgtgggcatgccttaggcacaaagatcaaaggtgtttctgtgt

SEQ ID NO: 1562629 - DNA, 4001 bp, Homo sapiens
ctgccagcacgccatgtcgttggttggggagcctgcggccttgcccctgcactgcccaccctgcggcccctcgcccctgcagccagcctctcagcctctccccttcctcagggagtgcactccaggactggggatcaggagaggagggacccagaaagggctggagttggggtggtggggtcctggtgggggtgctgggagcaaggggagggagtgaagcggaagctgcctggggtctgggagacatggtgactcctgcttggatggtcaggaggaggggatggatgagggcctctggagggaaaaatctgcaggaggtttgaggtggcccagggccggaggggacaaaggtggggaggagaaggcctatgctccatctcctgacctttcgccccccaccatcgtacccctcctttccccgggctctggaggaggctctggccctgggttttaggggtgaatggtgaggtcatgtcggggggccccaatcatccatctgtcctgtccgcatcagaccccagaccctgtctccacagctctccccgcttctgagggtttgcaggggcagttggtgaggagcctggtggctcatgcctatggtgcagtgagcgaggcagaggctgccttctctctctggatcttcccccgacccattctgactcctctaagatctgccctcaccctgggcctgggttgagggaggacctccctccatggcttcccctgggctcccaccatcctccctgactgtgctggtcttggctgcaccctcccaggccctaatgagcctccagatctcagagacccctggatccaaggtaccccgagaggcccatcctctgggtgagctcagccccttgcaacagcagacatgcagatcccaggaggccgtgacccccatcagcccagatcccccactccactccatatgggggctccaggaggtctggggggaggggaaacctcagcacctcccccagcccagcagggaaggagctgggcgggccccaggggtctcactgctcctcaggacacactgtcccggacccctgcccctgccctctgctctgacctcgcccagccagcggcctgccatccccctgcgagtctgagaggcagggggaacggggtgggggcgggtttgggtcctggcctctctgcctttcccttccaggcttggctatcgcgacttagccgcccagtccggccacttgttgtcgccaccgcctcccgggccgccttcccggcgcgccgggctgggggtccccgcagggctgcagggaaggggctacggccgcaggtggggacgggggcggccccgcagcgggcaagagcagggcagtcgccctctccccttctgctgctgcccgagcagattgaatttttaaagcgacacgagcggaatgtcaatgcgagcagagagccgcgggcgggcgccgcggaggggatcaggatgcgggtgctccggccgggccggcgctgggggctcagcgcggacccccgccccagtccgccgcgttgccgcaccgtcaccgccgactgcgcggccccgtgaccccgctgcggggcccggcaagtttccgcagcgctggggaccacgcgggcaggggctgggccgctctccgcctgagcgacccccaccgcggcgccccggggtgcggacaggtcttgccgcggggcacagctgctagctggggcgcccacctggcaaccggcacctgcggaccgccccccgccccccgcccccgcgcccctggcccgcgcttcacctgggcgcacaggtaggagggccgccggggcggggatcccggcggacactcaccctccagctcgtcctccgggatgtccaccgggcgctgctccgacagcaggttgggcacggtgtagatgccccggtacatcaacgccgccgtcaccgggtggaacggcatcttggaggctccgcgcccgcccgcccgccgcaaactttgaggccggggctcatgggccggtggcggccccgggggcggctggagcgggcggggcgcgcggctgcggagggcggcggcggcagcggcgaggctggggacgcccctccgggggcctagcgcccccgcgccccgggccgccgggccatgccgcccgctccctcgtcgggctcccagccggggccccgcaggggcagcgggggcggcgccgctctggcctttccgagagctccggctgcctcgcgcggtgcccgccgcgcccgctcctcggtgccccgcgcgctccgcgctgctcgccgcccgctagtccgctcgccggcgcggccgctaccggcccggcgctcaggctgtagccgcctctccgctcgctcgctcgctcgttctgtgccgcgctggctgcgctccccgcctcccccgccagccgcccgcccgccccctccgcgctccccacccccagcccgccccttcccgccgccggcccctgagcggccgccccaaacctgcccggggctccttctccccttcggccccgattcccctttcccactagggctcccctctgttcactggctctcctcaccctaagtctgcagccaccaggaccagggagggggtgggttgcgggggtcctccttcctgccccttggctcaccttcccccatccacgcaccaggagcggagagcccggaactaagaactgtagacccagagaggtgagactggccccaagcacctgggtcctcaagaagagtcaccgtttccgtgccaggaggatccaaggtggggaaactgaggctgagagagaaggacgttgaccaaggtcacagggcaggagcagcaggtaagagctgggtacacgtctggggtaggcttcctgccctgcctgtgactgacaccctgccgctgaccttgctccccacaatggggccccagtcccggacccttcccaagcccctacctttcagcttgcagaagaggagccaaagtgtctcatggcccccagggcagttcgggacagagacatggcccggtgcctgtggggtctggtgtgagggcctgccagttcacatggctgcagctcagacctaatgtatgtgcagggcttccccaggccccagggcacgtcggcaccccagagctggggtgggggcaggtgtttgagggagcagcctgcgtgtgcatatgtctgctatccatgagggtgtgtatgtgccactgggcacgtgcgcaggtgtctgtgactccatatgcagatggacaaatgtcgggagtgtgtggccacctgtgtgtgccaaggttgtacgctggcaggtcgggggaggtgtgcaggccctggggctgggagtggtgtgggcatatggtgcacagatgtgcatgggagggggtgaccttctggcctggctgtggccccatctctgggtgcttccctgaatccccctactgggaccacctccctgccccctttggcccaatcagctaaaggtcccagcaggaacgctgattgcacagccctgcccggtcctgccctgcccttcccaagctgattacacttttctgcttgtttctgtttttgttactgattaatcgcagccttgtctcagggtctggggagaaggggctcagtgagagatgctagccccagccaagcggggttgggtcagcctgggcccagcacttcctgggccctgctctggagggagctcctagaaacatctataacctgcggaggagccaggaaggacaccagctgtctgtctgtctccccagacctctccgggctagctggttgcccactgggacctgggcctggaggtgagagaggccccagaaaagctcccaccccactccaaagctctccttgcccacctgtcccatcttctgaccttccaccgctagagctgaatgccttgagcttccccagtgtttttgatggagcagagacttgaggaagtaagaacccagcaccaagagccaggcagactggggcttctgcatccaccatctcctcaccatggaactacagtcaggtccctt

SEQ ID NO: 1562630 - DNA, 4001 bp, Homo sapiens
ggtggtccctgcttccctcttccccgggcactccctgggacagacaccagctctgcctctttgtcctcagtgtcccagggcagatgtcagtgagtgctgggtgaactaattaccgagcagaccctctcaccaagcctgagacgctgtgagccgtcccccagaaggagcagggaggctcttagcccccacccagcaaggaacacccagttctgcatcccactccagcagagacccgctggtttccaaaagttagggggatccagggcccacgatcacctcagccccctacagaagggaagcctggcagtcctgcagccagtctcaacatcccagcctgcatctggcatccctggattccagggcaggactcaggcctgcacctgacccaccagctccccgcaccctgccctgtgtggccacaagcaccagaacctcgagccacatatgggcattttttggtgggaccctcaaaccacaaggccaccatggcttgggtccccaagcctcctcctcagtggtccccagcccccacttcaccctgcaagccagtgccacacagtccttccagagcacagatctctccagaccctgcttcaaatcctgcccttggagcacagtcccatccctcatgcagcctccaaggccctgcagggctcccgccacacctgcagcctcacctcactcctctctgcccctcagggctccaacactgcctgcaactcctcccttctccaggcttcgctcctgccatgccctcctcctgcctcccactaccctctctacccaaccaacgctcttccttattgaggagtcagctctggcattgcccatgtacacccagcaaacactgccagagcacccacgatgtgccaagcactgtgccaggtgctagggtccccatcccagtcatctgacagtaccccaggggaggcaaatgttagattcagaattccacagttagatgtgacagttagatatgaagcagaggaggaatcccagagggcttccctgaggaggtgatgcttaagctgggattttaaggatgtagcaaaggatttggccaggtccagggggaagggaaaagcttttcagacagggggaagagccagtgagaggaccctgaggctcagaagagcacaggggggaagccaagtggtgggaagtgaggctgggtggaacacacaggccctgatgggttggattaggactttgctctgcacctccaggaccatagcaaatcatgacagtcttaagcagggggaacatgagcccactggaggcagcaagtggaggcaggaggcctgggaagaggctgctcggaggcacagtaaggagaatgagtcctgccctgtgtgttgggatcggctgccccgctgcccacgcccacagttcctgatcacggctcccatcctctgtatggtcacggcccatcaggtggctccagagtctgactgatctgcattcccagcccagcacaggtctggggcccacactcaaggactttctgagccagccagccactggactgaccccacagccaccagcaacttccagaaccttcacatcagcagaacaccaggtcctcatccatttgaggtctccccagacccaccctctgagctcgctcaccaccaccaaggcccagtggcctcaccgcagacctcaggtctcccagccggagcaaggtgtgagcagcaggactcaatccagccccccacccttcagcccctgcagggccccgatcagccgaggctgcggaggatatgggttgcacaccatcttgatgcaccagttccgggggctggtggtctgtcgcaggcagaagaaggcaataggcgccaggtctgggtgtgggacatgaggatcagctccatccagaggctcctccaggcctggcggggaggatggggggctccggggtccgggctgctccgtggtgactcctggctcagcggctggggctgctgcagatgaggagggcggggaggcgctctcagccatgtccacactgagctgggagccctggggaagacagagagggtggcacgtggtggggacaggcctggtacatgctccccaacctgcctctccaccaataagtggacggatgcagctctgacagccccacctgagccccacaggcccctcaccctcactcttgcatgaggattacgaaacagctgagggcccagctgcacccaacttggaatctgcttccaagctgggtgatcatggggcaagtctgctcaccctggctgagcctcagttttggcaaacgaagatagtggggagaataaagccttcttagaatataattgtgatattaactcttttttttttgtctattggcaattttctgtatttgaaatctttcattatttaagagaaaaaatgtttaagtaattatagacagaaaagaaagacggaagggagggagagagggagagagggagggagggagggaagaaaggaaggaaggaaggaaggaaggaaggaaggaaggaagggatcttaacttttttacaagactagagctatgtatttattgcaccatcaaaggtaaagaaaacttgcaagaaaaaagaggtgattgtaaagacagacattattgccaggacaatgcaggttacaaaggcaatgttggggtgctgcagaatcagagactgggggaacgctggcaagccaggagggaatcacagttggcttccctgaggaagtaacccctgagctgagacctacagctgagcccttgacccagggacctcccagccactgccttacaaggctgagaacccaggaatcttagagtctaacctccttgccttacagatgaagaaaccgaggcccagagaagggacaggacagacatgtagcagagtaacagcagaaatagaattccagtcaaaggccaggcacgtgactcacacctgtaatcccagcactttgggaggccaaggtgggtggatcacctgaggtcaggagtttgaggccaacctggccaacatagtgagacctcatctgtactaaaaatacaaaaattagctgggtgtggtggcacacgctgtaatctcagctactcgggaagctgaggcatgagaatcacttgaacccgggaggtggaggttgcagtgagccaagatcacaccactgcattccagcctgggcaacagagcaagactctgtcaccaaaaaaaaaaaaaaaaaagaattccggtcagagcccgcttcctgggtctgtggctcaggcagctgcacagggccccgtgctcagaagggccctgaacttgctttagaattcttctgtcaccaacatgaaattcttaattgcttatcaagaggtcccacattttcattttgttctaggtgatgcaaatcatcttgctggctccgactccaactcaaagcacttctactccctggccttgtctgatgctcacaacaacctcaggaggactattatgcccatttggcaggtgaagaaactgaggccaagagaacaaagcgggttgtcaaggctatgcacccagccaagtgaagcactaggtggtgttgagaggccagaatcccagcaccagacccccaggcgggcttcatgacaactgatggtgccctcgctggccgagagcctccgcaaccagtcaatggcaagatgggacggacagccactcccagggcctgcccctcaccacctcaccccaaagggtactagtccctaaaactttgtccactggggtccctgggatcctagaacccctacagggccagtctgagccgtgggattgagagatggggtccacgtccctggtgcccacccagctgctgctgggctgtcgaccaagccacccggagctgatgcatttggacatttctctggctcccgggggcaacgggcaggggttggcacctcctgccacttcccctggctggtcagggaggcggagttttctcctgagctcagggctttgctcttgattccagaaaaacagccacgggccttacat

SEQ ID NO: 1562631 - DNA, 4001 bp, Homo sapiens
actgttaatgactagctgtatgaaaggcttttcatttttttaaggagggggcgtgtgtgtgcatgtgtttaaaacagtccctattaatttcttgatattgattttctggctggggaagagcatatagtattcagcatagagctcctctgcagaatatgttaaagacagcggtttggattgagaaagggcaccaaatgcagtatgcgtcaaatagaccatcgctcaatgaagtcacttagctattcaaaacatgttcagccatcactcaaccgtttgcaccaagaatgttgggaggggggcatgggatttgtgctctttcccagatgtaatcatttccgaaagtgtggcttttgctcagtttgggttagaccctggggccacatcagtttctctctcacccatccatttccctctcttctcccccatctcctagtctcaactccctgcatcaccatcccatgtcgagcttaacaaacaatcctgcagtccttgcttcccgacgctgcctcaaacggcccccagtattggttcataacagaagcaaaacacataagcctctttttttcccccacatggaagcatatgtatctctctgtgcacgtctatctatgggtggctgtagcttgcacacacagacatatatagccattcaaatgcagtccctcatactaaagtctgttgccaaatgcaggttggatgacccacaggagtttttttttctgtgcttattaatgtgtcccagaagtacatgccttcatccatagcgtgatcccccagcctttacaccgtggcggctcctgtgcccacagcacagacacacatgcctcaacactccgcaagatcaaggcaaagagctgacacccccactcccccctcaacctccccatgccctcccctccctccctccctgcctgcctgcacaatgtctgattctcaagccggctgcaatgctgactctactagcttctggctgacagacatgtcactctgtggaagcctaacccgcaagtgaattgctgtttattagaacttaggcttgtttcctgtgagagacgtatgtatttttagactttgtaaacgttaaaatacacaaatacacacacgcagccagccacctcgagtgatatgtgtggctcatagacattacgaaatgctcttgaactcagcttgagatcctggaataattaggatttaccaaataaggattcttagaaacaacatattcttttttaaataaggagatttgcagatggtggtgtgtctaggacttttggggagtaaggagaagaggagggaaaagggaagagcatttttgaattcttcattgcgaaaagagaaacagcatacacagaagcaattattttaccctctcatagatggcaatgctaaatcggatggtaaatcctaatgactccaaagcaggcagaacacctttgacttttagagacaatctcttgtcgttttcaccatgtcatagattattccaatgaggatgtttgaggggatgagggggtggcggaggcgagggagtagagtatgggttttgcttattgattttctttcctctgaaactaacccaaccaaccttgattggtggtggaaggagtgaactaagaaaatggtggaatgtaaaggggacttatttggaggagggtggggaggggggagtgaaaggggaggggtggggtggagaggggggaggagatgggaagtcaagtaccttctaggcagcaggttctccataatccggaatgggtcataacttcctcgttctttttgctggtttcattctcactgacacttttggtcttgcaaacccctctggagtagagccaatagtcggttcccacagctatggtcatcaggctgaaggcagcgaaagcaccaacggtggttaaaagcatttgaacacctcgatcaaacagccccataattcttcattatataaacacccaaccgacttctggttctcgggagagtgtgtgtgagggtgcaagtactaaagccaaaaaaaataaataaaaataaaaattattccactactaatataatggatatatgtatgaatagagaatatggagagttataaaaaaagggaggtaagaaagctcacggaaaagagtgtaaattataaagatcacacgggaagaggcttgccttttgagatcagaaactgttccagttgcagtgttttttttttaaaaagaaaaggaaaaaaaaaataaaaagacaccccccacccccccaagtgagatgccttaatctctttttctaaaattctggtctccagtttccatatgtgatagttaatttggagatggcttccacagtgaaccagggaacagccgaattctcaacaccatttctcatggtcgggacctagacagttagagactgtgagagccgagatgcaaccttcggtcttcgttctcggctctgcggcctgcgccatgaaaatcctttgcttcgccagttctcttccttggggggtctcggcgctttcgtttcagaccagacttcccagtattctgtaagcccttgagctcagctgcacaggtgcgggggtctcgctttccatggttttgcccgggcagcggcggcggcggcggcggcggcggcagggcgggcaggcgcggcggcggcggcggcagcaggacgagcagcggcggcggttattgttgttggtggcgggggtagtgttggcgaagtgggggagagagggggtttctcctggagaatcgaggcggatttccctccccctatctgcaaagctcctggaaacgagggagccggcgtcttgctgcagggtgggccgcgcgcctgccccccactcgctaccggctgggcgcccgcggaggcgctcccacctactgcattacgggtggtgctgaaccggacagctccctgcgccgcccgctccgcgcgctccccggctggctcccagggccgcccgccaggaggggggcgctggccagagtcctccctccccggggcagcaaggccagcgcagagcgggggccgcctttcctctttttacccctctcccaaatcctaaaatgagcgctctcctgggctcccggagcttagaggaaggcgtagctagagatagctcgcgctctctctctctctctctctctctctctctctctctctctttctctctctctctctctctctctctccccccttccctccccccttggtgtttcttccagctcagcctccttctcattccatctctacgtgcccagagcttcaaatacaaccctcccatcacagtcagacgggcacaaaacttcaaccagccgtttctctgcctggaagcggcgaacatgtaacctggacgggtaattacaaacacgtctttatgtgttttttaaatcattgttttcactttgctttgctggggatttgttttattttgttggtccgttagatgtatcttctttcggttttcctctctcttctctttgtctctctctggcttaccagggggtgtgcattgctctgtgtctctctgtagttttccgtgaaattccaaatcttgcttctacaagcagacattttgggaagattattcgtggaaaagggtgcaaaagggcgactcgtagctggggcttgggcaatgattttcattgcaaggataaacatgttctcaggggaagtgggtgaaatgtgaatccttctaagtatcctatgtcattcataaactggttgggaagagataaaaaatcttccttccatgaacactggaacaccgaaaccctcccctctttctcagaagaatcattgtttgtgggttaattacagtgtcacctttcatttctcttatgtgcaacttttccttaacgtgacctctggtagaaagaagcacattaattcctgctgctacggattacatttttttctctgatcacttttatggttaagtgagtaagagcacatgaggcatgagatgggttcatgtttttgatattttgtgtgtgtgtgtgttgcggggg

SEQ ID NO: 1562632 - DNA, 4001 bp, Homo sapiens
tcactaatgaacagtatgcagtcacttaaaacaagtgtatgtaacagaggtgaaagaatcactaaaatcagttgttctaagaaaaagcaaaatacacacgtaggcgtgtgtgcgtgtgtgtatgtgtttgtgttttttatataaaaaaattcagctaggcgcagtggctcacgcctgtaatcccagcactctgggaggccgaggcaggcggatcacaaggtcaggaaatcaagaccatcctggccaacatgatgaaaccccatctctattaaaaataaaaatacaaaaattagcagggcgtggtggcccatgcctgtaatcccagctactcgggaggctgaggcaggagaatcgcttgaacctgggaggcggaggttgcagtgagctgagatcgcgccactgcactccagcctggtgacagagcaagacactgtctcaaaaaaaaaaaaattcaaagtcacctggagcctctgtatttttttacataaaaaactatacatctgtgtatgtcagacatatgtctgaaaacagtatcacgaagaaagagccatcttaagcatgtggctctgaacttggaataacggcactagcacccagccccaccctcagcctaccgtggggccctgggcaagccccttcagcctctccatgcctcagtttcccttactgttcaacaggcatagtgggagcgcctccctaacagggatggggaaaggagcctgtgcactggagtccgaggtgccagcatccaccgcagatccactcaccgaggatcatggagcagcgctgggcgggttcctggcccgtgagcagcgtgaagtgttcggggtagtagaactccagggcttccaggaaggcctcatagcccctcttgccacggcagcgcaagatgtccatcaggcgccctacagagtagtggggggatgtacccagggtctaggggaaggcctccccaggtgcctggttgcttctgcccccaccatgctccaggcccacgttccccagatttttgagccagtgacacacacaggggcctgtcccaacacatcagggaagagaagagagccattctgccacagccaggggagcacattccctcatgactcctgggctcccagagctccccaacaccccccacagacacagatgccggcccgcaaatgcagcctgccttttcaatggcacagagaagccccctctatccccagaagcaaagaaaatacttctcccattggccatgcctgaaattccaccattaaagaccattccatcatgcctttttgagttctggttcaaaggcacaccctgtgggagtggggacccacgtaaagctgagacggatcttgacacttgaaaaaggactcccccaggagtgtatggtgcacagaggaggggacagacagaactcggagatcaaagagcgcaggaaaggtgccaagtccaccggctgtgaccgggaggtcccaggcccagccggccctggcagccacatccaaccttctgctctaatgtggacccaggaagtgggagagaaccccaagagacaaaactctgaccccggtgtgggcaacgcggaccgccaaggcgcagtggtgggtggggaggaggcaggctggtgggcatacccagccggcccactctactgatgcggagaccgagccccagggcagcagagccctagcttcgcgctacacggctgtgggcgctgcgccccagggcacggccggcccaggtcgtggcccactcgggacccgcggctcaccggtgcggttgacgcggcacgggaagcggtaggtgctcagcacctcctcctcgtcctgctcgtcgatgacccggcactggcgcagatacggcgtgagcttggccgggttcagggcgcgagccagccgatgccggacgccctcgattcgctcccacagcgcgtcctcctccgcctcagaccccgagccggccccggcctcctcctcggcctcccccgcctccgcccggcccggcatggccgtgtcctcagggtctgcgggcaagaggcgcacgggggtcgaccagggctccctagggctagatgtgcggccaagcacccccggggcgtcgtccgcagacccgccgtcgggggcgcgccccgagctccccgcgactcaccccgcacgctacagtcgcctcgggctcccgggtccgcactcgggcggcggctccgccggcgcaggggggcggtgcccgtggcgcccccggctccgcccccgtccccgcagcctcctgggctgcccgggcctccccacattgccgcccgccccgggtcgtgcgtccggcccccggccaccccgcgcgtccgtctgcacgccctccctcccggccgtccggctgcgcctccccctgcttcctgtttcccgccggctctccagcccggctcggcggggtcctggccgcccgcccacacctgcccggcctctgggcggggcgggggcgggcaggcgcgctcacaccccccgcgcgccgcgacacaccttccccgggccacgcgcatcgcctccccacgcccacagcgcgcccgcccgtgcggggctagccgctcacgcccggcgcagcccgcgggcactcaagctgggcttgcccttctcgggtccccacatgcactgcgggcgcgggagcttccctggagcgcaggacagccccgcgggggacagcaatgggcagaggtcatgggggctttctgcaagatgggggtctgaacctgcagggcagcactgccaactcccctcttacgcaaactcccgtggcacttgaggaccagggaccccacaattctcaaagggtattcctccaggtgttggtcccagagatgctgggggcgggctgtgactagccatccatactcccgctcctgcctgggaggccggtggtgtcttaccatgatactggccgagtctacacggtatctgctggtgcatgcgatacagtctcgctatgcattagaagctgccaggtacctgctgccagggaggaacagaggaggcacaaccggtacaggaaagaggtgtgagctccctaatcgccttccacaacttctgaattagatgccgtggacatatgtattacttatccaaagaattaaggtttcaatcaataaaggctctgaaaagccctgcttaaattaaggccgggggcggtggctcatgcctggaatcccgacactttgggagaccgaggcgagtggatcacctgaggtcaggagttcgagaccagcctgaccaatatggcgaaaccccatctctactaaaaatataaaaattagctagacgtggtagtgcgcgtctgtaatcccagctactcgggaggctgaggcacgagaatcgcttgaacccaggaggcggaggttgcagtgatatcgtgccactgcactccagcagcccgggcaacagaatgagactccccctcaaaaaaaaaaaaaaaaaaaaaaaaagccccagcagtaaagaaacagatttaactttatatatcctggtgtccttttccaaacttaattaaccacagcctttttttggtttgcatttgttgtacatttgtttttgttttgggtgtcacctgtttacatgcagaagaaatgctttgggagaactgaattctagtgcaaattcctcaattaacaaaggaggaagcagagctcagagagggcaaggaacttgcccaaattcacacagcgaggccacaatgggaataggccggagcccagcccctggcctctgtcctctccaagccccgagtccaggcacacaccagacctccctttcaatacgtccttcccctctctgtggccttggttgccctcccacgcagagcggcagctcctcccaccagcagccctactcctcgtgaatatttttaacttggccagcagagcgggatggacgccttggaaaatgaggctatggttaattattttttcatcgagaagctaagcagggcctaaagataaggcacagaagccaagaggtctctgcagataa

SEQ ID NO: 1562633 - DNA, 4001 bp, Homo sapiens
tcttggaactgttgaaagaattaaaggagataatccatgtgggggctcagccctgtattaggcccacagccagctcaggaaccaaaagaactatcaagaaaaaaaggcgttctgtgtatcaatgctcatggtcatactcgcttcgccgctagagggtgccccagctgcactgagaggctgtcacacagcccaccagccttccagctgctccgcccatccctccccaagagaagcatcagggttaaggttactccctggatcccctaggatgtgcgtcgcttgagggtgggggttataaaaatatgaaattctggaaaccaacatttctttcacttctgcttctcttctccgaaaaagagtcctcccacaaagtcaccggctgtcgggtgggagggggccctgaggcatccgtagcactacaggaagacagggggcccactgagtcccacctgcagccgtgcctgccacctagggccatcttgcccttcctttcccagactctgtttttccttgtcaaaataaaataaaaacccaaatcctccaagatggcttcctctggaagttcttccctccctagcagagactaatatgctatgctctcactcccacatccccatcccccagaaatggccgggagtggggggaaactgaggctcagagccctaaagttagtggcccagcctgggtgataaattcaaagtaaaatgatttgaggtcaaattcaagttggatccccaagaaaggaggggagccatgaagaacaaatcctgaaagactgaacgggggaagctgggggcagggaggcaggtggtcccccaaatcctctccttgtgccctgccaggaggtgggaccccactcactctccccctgggttccaactcccagcacagtcataacagctcaaacaaatgcccccttcccatgggcatcccccacctgcctcagccaccccctttcctggagccctaaaggcatccccagcccctggtttcaacagggaggattatccccagtcccaaaaccctcttgttgaagctgatgctggctgaggcctgccatcaggggcttctgggggggctcacaaccaccccctgcccagctggggcccctctgaaaaggccggcccgcttgggcggccgcgtatctgtccctcccttccaggccccgtgctgtgccggggctgggggcccgagagggggatgctgctggggctgggccaggttaccttcaggaggaaagttttgggtttgggtcccctcttcttgggcccatacagctcacgctccctctccctgcggccgaaaaacaccagaggttaaaaagagccccttcccgggccccactccgcgctgccctccccggctctcccgcttccccgcgcggcgccccagccgagcctcggcctcgcagcccctgccagcttccccaacaactcacttttgttcgaaggctgcaatgagccgcgagtccaggatgttctcctcgggctcccaagtgctgtacctgccgagtcacaaacgcacaaaatcaggatgaagaccagagagggacaggcacgcggcgagagcaagagcgcgcacccccaccccaggccccggtgcccgctgcctcccctcccgcgacgcccccggaccccgcgacactcacttgatcgcccaccccttccatttcaccaggtactcgatgcgtccctgaaaaacagaggggagaaaaacgggggtgggggtggggaggatgcggggacgcgaggaggcggcggcgcggggctgggcgagggagccgggctagcgggaccgcttcgccccgagggcccccggccccggccccggctgcggacagcggcggcccgccccgggcggcggctcacctttcggatccgccgtttgatgatggattcggccgcgaagacccgctcgcccactgcagacagctccatcttgctcagcggcacccacagcccataatactccctgcgcccgcggccggtgcggcaccgctcgcgcacgcgccgcagcgcccaggccccggcgggcgggagcgcggcggggcgcgcgctcgcgttccagctgcgggccgtcacgtgatcctcgcggctggcgcgcggttgccaggacctccccctcccccggggcggttgctagggaaagtcggcgctcgcggggcgggggcgcgcgctggctcttaaaggggccgcgcgggcggagggagcaattgccggccgacccgatgggtgcccggcttgtgggcacgctgcggccttacgcttatcaccccccctcacatcttgccggcgcccgatcgctgacaccctctccttgcctcttaatccccacgcgagtctcgccaggccccgggcggagaagggctgtggagcccgagtctcgccgccaccgcgcatctcccgcagcagcctgcaaacagttaaatatgatgcagcagaaatgcagttgctgttgccttgccaggccttgcgggaatttctttaaaacatcgccccccacccattatttatgtattcgtgggagggtggttttgtaaccagttcagaagagttaaaacaaaaacgccaccgcaggaagggggtgtgcggcgaatggggccgaggaaggccggagtgaccgtgggcatctgtctgcggccggggtctcgggcggcacctgtcctcgcccaggagaccggggaggattcggcggggccggtgtggcagtgggggagggagagggaccgcgggcaggaacgggctccccgcactccgccttgggcccacagcgggtcatcatctggtcattcggcagaaaccgccttcgcggtcatatctgtgttttccgattcccagcacccctcccggccccccgacctggccgcgtccctctccccgcccgcagctgcgcgaagcttccgccattgctctggggagcccagatcccagcttcccacttgaggaggggcgggggatcgagctggggctgtccaggaacggacacacaaaaaatagccctgccgcgcaaaacgctccactttttaaatgttgaaattacttgaactttatttcccattatgttagtagtcttgttctttgtaaaacaattttaaaaatacagataaaacaactgtccataacccccataaaaccattgttaacatcttcaccaatcttccagcctctgctctatgcgtacataaactcacgtacacctatgtatgtatgtatatacatacacatacacattgtctgtagatttaattttttaacaaaatgggatcacgctattcacactgttctggaatctgcttttctcccttaatgctataaagtggacatctttcagtgtcattaaatacagatttcaccatccttccagtgaccaccttggggctgagatggggtggggaggaatggggattgtgaagagtcagggttgtgtcttgcgaacatcaatggctcattaggaaagatttttgcgtttctgtgctacaatgccaattcttgggtttcaaatccaccatagcaaaatgttagtctttttctcccagcagatttgtccaattattaccttgagagaaatccctctcctcacttaaaatcagtatgttccagggaaacagctatttgctggccagcccaaggtgagctgctgtggtaaaaatagaaatgtcctcctgggagatgtgggtggtggtgggtgagcaggtgagaggagtgggtatgacagtgtgtgtgtgttcaggctgacggagacaggcgggggatgaagcaggtgagtccacttgttgattcattcagcagtgtttgtgagcccttgtgaagcaccaggctttgtgtgaaaccatcaggaaacaaaggtgccccaggctgaggagctgtcagtggagtgagaacggcacctgtcacacagtgtgactaatgctagaataaaggtgtaggagtttcgtgttgctgctctcacaaattaacacaagctcagtggcttaaaatgactcacatttgttatctgatgac

SEQ ID NO: 1562634 - DNA, 4001 bp, Homo sapiens
tgaggctggaagatcgcttgagcccaggaaggagtttgagacaagcctgggcaacacggtgagacccctgtctctgaaaaaaggaaattagttgggcatggtggcacttgtctgtggtcccagctacacaggaggctgaggcaggaggatcgtttgagccggggaggttgaggctgcagtgagccatgttcatgcccctgcactgcagcctgggtgacagagtgagatcttggtgccaagaaaaaaaaaagtttacagtccaaccccattgtgagtgaagcccctgcacgccagaactttaagaccaaaatatgatacctcctcacagaggctttccctggtgaccctctcccatgctgtctccactggcaccttgcagttctatttctgcagagcacacagctccatctgaaggcatctgtctgtatctcctcattcactgtgtgccgcctctgcagaatgccagctccctgagggaaggggtggatccctggggcttagactggtgcctggtacctgaccaaccctcaataaatattttgagtgactggccgaaggaatgatgatctcgccctcttgtgctaccctgcgggctccatcgtagagggagttagtgctgtgcctgcttcaggctacacagcacgaaaagcactgagctttgtggaataaatcaattctcttttaagtggagaaaaccctaggaaaaaggagaaggaggaggaacagctgcctcaatcagaagagtaaaaccccaagcacagctggaggaagaaaagatgctcctgaccaccttgaccttcacccttggcccgagatgccaggactgagttttctctatggagaaagaagatgggctgccaatcagcccagttgagctcctgctctacctccctatctaacttgctcggtgaccttgagcaggtcacttcctctgcctgggcctcagtttttgtctctgttaaatgggaggaggtgaccccctaaggcccctcccagtcggcctggagcctcccaaagggctgcagggaggaggagacaaaggaaggacagtagtgcgtaccaggaaaggaacttctccccaaggatttccccagccttaggcgagccccctcgccaaacaagtgcacgggaggtgtagacgccaggcccggacaaagtctagccccaaagtgtggggttctgaaaccagcagaacagacacctccttaaattgcagggtgtatgttttgaagaaggcagatggggtaggagactaggggatgccccagcgcagggggcgggcttcagagccctggcctgggctaggagttgaggtgggggtgggggcggggaatagggatgtgctcgggtggcgtagagggggcaggatcggaaaaggccaaagtccagcaggaaaaacttcagaggccggaggagacttttccaaagctccacttacaacttgaaaggatttggtgccaagcgtccagagtcccgagttcaaaacccagctctgaccataacgcgctaggcaagtcctttcaacttgggcctcagtctccccatatttacaataaaaggggagcgaggtgggatggcgctgaggatccctacgtccgatcctaatctccagctcaggcaggctcggccgccactagcatcctggagcgacaacttttgttctactcgccctacacggtggcagggaaactgaggcacgggctggggagacgggcccagcagcgcagggctgccggggcccccgcgccccgctttccccttcagccccagcgtggagggagcggtgctggggacgggagggaccccactggggtcctgggagccgcccccgggcagcctcaccttccgcacgcgcttcttccggatgctctccacggcgaacacctgctcgccgatggctgacagctccatgcggggcggcgggcgagcgggcccggggccgggccgggccgggggcggagctgcggggccgcggctgcggcgcgcgatgctggggctggcggggtccccgtcaccctcgtccgggcgcgcacgcgcacgcgcacgcgcgcacaccccctcgcgctccctcacgccgccgacgttccatttttgaacctgcgcaacgttttcctcggcgccagcgagcgagcgcgcgcaaggagggggcggggcgggagcgcgcggaacggccgcgggctcggctcgcgccctgagggtcagctccgcccccgagccccgcccccatcggaaccccgcccccggggcccgcccccgcgggttgcgattgggccgcgggccgcgagccgcgagcgctgccgtgggacttatttggctcggtcaccggctggggcggggcggaggctcgcgcgccccgtcttgctgtgacgccggggcgggacgtgatccttaatacccaggcgggcgcctcatagcctcccggtgactgccaggggccgaagtggcagggcccagtggagccgacgacaaagtcaaggctcagagcggggaggccatttgctcacctcccgcagcggaggagactgggcccgaggcgcagcccctcgagttgcaggagagccgggacccaaaaggcttcccaccgtgtccggacgtcgcagggccgaggtctccctaatccggccttctccgcggcgcagtttggccagtgtctccacgtccgtccacccacccctccatccgcccttccatttgtccatccacccgaccctcggtggtcggtgcccagacgcacgggtcagacgcgggcgctgcctcgagggctcccgggccgggccctcgttcgcggcaggagcggccgcggtggagctgaggtcccccggggacggattttgccgccgcgctgccccagccttccccaaacccgcgtgtactgggcgctaggtgcttagtgggggctcaaccatttgtggcacgagacgaactcttgattccccaccccccttcctttttcgctaacgcgcctccattcctcactgggagcccggcgtcgtccctgctccttcctgtactgaccccaacttctgtcgctccggcatcccctcggggactcgggtctgcctgccctcaccgcacccacctcccaggttcgccccgtcttttctctggaccacagcagagacctcgcggagctgccctccctccgatctcagccacacagtgccagagtgtgcttctaaaatgcagatctgacggggtcaccctgtgcttaaaaattttcctccctatttccctcacaataaaatccaacacctctttctggcacatagaaaaagagaataatagattcacacctgacttttcatcaagagcaacaaagccagagagaaaataaccatcatcttagaattatatattcagtgaaaatgtatttcaagaattatgtacccagtatgaggcacatgtatccagaacgtaggtgaaatcatagcacttacaaatacaaaaacttaagagtttgccactggtagaccctccggagggagattccaaagctggaacttcaggcaggaaaaagatgatcccagacggaggtctgatgcaactgggaataaagaaaaatgaagaacagcgatagtgtgaaacaataacaatgacttctggataaaaacagatttaaaatacacaacagtgatggcatttacttgggtgaatggagttaaagtgttctaagatccttatattcttcaggaggaaggtgaagatagataccaaatacactttgacgaatttaagaatccagattgtcattactgggataaacactgtaggactggaaatactgtgtatagttatccaaattattggaggaggaaaaagaatgattaaaccaacccaaacaactgtaaagcaggcaagaatggagagaaaaataaatacaagacggggcagggaggggacaaatagacgatagctataaattcgaatattttgtgattcaataaatgcaactaaatattgcagttaaaatacaaagattatcagaatgcataaatagctag

SEQ ID NO: 1562635 - DNA, 4001 bp, Homo sapiens
atacaaaaaattagcctggcatggtggcaggagcctgtagtcccatctattcgtagtcccagctactcagaaggctgaggcaggacaatggtgtgaacccaggaggcagagcttgcagtgagccgagatcgcaccactgcactccagcctgggcaacagagtcagactccatctcaaaaaaaaataaaataaaataaagtaatatatgtgtgtattaaaaaaaagaaagaggccaggtacggtggcttatgcctgtaatcccagcactttgggaggccgagttgggcagatcacgaggtcaagagatcgagactatcctggccaacatggtgaaaccctgtttctactaaaaatacaaaaattagtcgggtgtggtggtgtgcgccagttgtcccagatactcaggaggctgaggcaggataattgcttgaacccaggaggcagaggttgcagtgagctgaaattgcaccactgctttctagcctgggtgacagaacaagaccccatctcaaagaaaaaaaaaatagaaaagaaagaaagagatctggaaggatacaccaaactgttcatagtggttaaacctgaaaaagggaataggatgactgacttgaatgaacttgtcattttataggttaaaaaaaggtcaaattgtgacaatttcatatggtacaatataaaattatattaaatatactcgagatttaatgaattattacaatgagaatatattcatgtattacttatgaacaaaataaacaaaacacagttaagaagcagcccccagcatgcctaaaatctagagacatttgaagaaggagaaataagtcaagtccccactgatgctaactgcactgggcctgagcacatgggctggacacaacaagtttaggggcctggctctccccttcagttgcctgctagaccttggcccagctgctttacttctcgggctttaactgggcaccttactcatgaccgcactaattctcataacactacagctgggagctgtcatccatgtattacagatgaggaagggtctggattagctaccttttaagtcagatctaataatccacaaacagctcagctgagatcctgggattctggggcatccgcgtgcacttgagatacaagctgtcccactggcccatggcaaccttctttctagtgaaactcccagggcgagcgtgctccgcacacaggaagtgaagggggagcacctggcttccaatgatcactctgcggctcacccacagtgggaccccagcatttatcccccttggacttcggcttctttctttgcactgaggaataataatagtacctggctcacaagatgttatagtgttttagtgtttataggaagctgtgcacttgatcctcacaacgaccctgggaagaggatcgagtaagtagagccttcccagtccacagatactgatactaatcactaatcattgtgtaaaggttttccgtttgcaacaggccataaaatatattatcttactttaattctaagaaaacaagggcggaatctctggttttcatcggattctcaaagatatacgtgtcccccaaggagttcagaggtagccatgttacgcagatgcacggcccccagggctgtcggactcaagtaacagctgtcaacaaacgttcacacgcacgatctcatgcaatcatcttcacggcgacctacggggaggaattaccgccccaattcacaaccgcggagacacacagaggagggcggccaccgcccggggtcgcccggcctccgtccccttccccaggccctcctgaagcctctctccaggcgaggcccggacgtcctactcagctcgggcccccgagtgaacccaggcagcgctggccggcgacgccggactcggagacgtacctgacgcgtcccagaagccggggtccaagcgctccccgaacccccagcaaggactctgtagcccagagttaccttgacccacccgcctcctgccgcctgcccgccacgcgcatgcgctgccccgcccggcctctaccaccgaggaaaggggtaaccggcgcgggggttcccagcgccagcctgcgccaatccccagaaactccgtgaatcacctcgggatagcaaacggattatacaaaggcagtgtcttctggggtccttttcatgcctctaggaccaggacctgcattcaccctctccactgacacattggtctgggcccccggcccggctgtcaccatagaaacggcatctcgcggacaacgcggcggctcacgaaggttccattgttatgctaaacgggaaagtggagaccgcgccggcgttgcctagagaacgcctggactcagagtagcaaaatgggcctctccccaactcccctcctcatcccccagcacaaggcaaagggcaccccttgctgtgagtttgggggcaccggctgtcgggggccgacccagaactttgcggggtcccctgagggacccgtggcgggaccggccccgggttcgtcaaattccgccgatgctttcaggtaagacggacggacagacgcaccatgacccacctctggcagcctgccccctccccgtgccgttatggcggcttctacaagcaagggaagctgaggcccagggactacttaaaggttgcattgtgaggaagggacagagaactactggagaatcaactccagatctcctagagtcctaaaagcgtgtgttattggttccgtctgataagtgcagaaacttaggccgttcaaggagtttaccggctgcctagtgggtgtatcagggcatccagtgaggggcaggacccaggggtctttgactccaagcgcagttctcttccaactacaccaccctgcattaaaagaggggagacttccatgtcctagaactaaaatcttcacaatctggcttagcattgtgcaatagaaacataaagcaggccacatatgtgatttggaattttctagtagccacattttttaaaaagtaaaaaagaaagccaagtgaaattaatttgagtaatgttttaaactccatatgtccaaaacattactatttcaagatataatcagtatttctaaatttgcactgcttccatttaaaaatttaattttttttttttttaagacagagtctcactctgttgcccaggctgggattgcagtggcatgatctcggcctcccgggttcaagcgattctgctgtgttcacctcccaagtagctggaattacaggcacccaccaccatgcccggctaattttttgtatttttagtagagatggcgtttcaccatgttggccaggctggtctcgaactcctgacctcaggtgatctgcttgactcggcctcccaaagtgctggtattacaggtgcgggccactgcgcctggccaaaatttgaattaattaaaattaaaattttactcttggctgttctatctatggagtagccattcttttattgctttactttaaaaaaattttactttttttttttttcgagacagagtctcgctctgtcgcccaggctggagtgcagtggcatgatcttggctcactgcaacctccgactcctgggttcacgccattctcctgcctccgcctcccaagtagctgggactacaggcgcccgccaccatgccaggctaattttttttttggtatttatttatttatttatttatttattttagatggagtctcgcactgtcgcctaggctggagtgtgcagtggtacaatctcagctcactgcaagctccgcctcctgggttcatgccattgtcctgcctcagcctctcgaatagctgggattacaggcgcccgccaccaagcccagctaatttttttttttttttttttttttggtatttttagtagagatggggtttcaccatgttagccagggtggtctcgatctcctgacctcatgatccgcctgcctcggcctcccaaagtgctgggattacaggcgtgagccaccgcgccc

SEQ ID NO: 1562636 - DNA, 4001 bp, Homo sapiens
agccctgagaaccaggacaagggctgctcctgtgtccactgaaagctggtctggctacccagcgaatcccacagcagggagtccctctgggagcaggactgactgaggcctttctgcagaaagagggtgactctgtgaagtgttcaggagcagccaagccagggctgaccctagccctgggctctccatgggagtccaccccacccagccatggccctggctctcaccccttccctctccagctgtagcagccgcttgaggttcttctccagcaggagtttgtccctcacaggtggcaatgagccttgggcacctaggtcactgtcccggctgtgggagcccagacagccggccatgaggctgctatggcagttggacatggagctggagctggatgggtagttgttggggtgtccagtgcagagggtcggccgtacacggtgccggtgtacggtgctgaggctgggccgggcatgtgcccgccgtccaccacttggcacctccactgggtcctgcacctccacaagcggcaccccagcctccgtcttcatggcagccatgcgctcagtcgccttctccaccactgtctccaggctgtccaggacctggctctcagttaggaaatccagaaagtggccaaagggctgagggtgcctcttgtttcggcgttggccctggagtgctgagctgccacatgtggatggtgggtgtggcacacggcccggcttgcaggctggccgcatttctgggaccagtggcttcttgggcagctgcacctgagcagacaggtatgtcacagggggcaggggtgccctacaggtgaagggttccctggggtaacactaggacctgggtgggagtgagtagtggaaggagctgcattttggagtctggaagccctgggtttggaccctggctctgccacctacagcctgatgccagtgtgcaagatggcccctcttgaggtccaatgtcctcatctgcaaagtggaggtctattcagggtcaccccgaagctttcctaacacctacatttcacacacacaagtcctggctaaggagtctgcaagcctgcttctgccctgacacgtggcaggatgagcaatcatgaatctctcggagtctccctccagctcctcatctgtccatgcagcaggccatccctgtatccatggcagggctgcaaacaacatctgaggtcttgagtgcagacaacacctgaggtcttgagccctgtgctacccgggcctgtttctccaacttgagccataggcacctagtcaactccatgctcccactctagggtcccagtccacccaagcaccttctgggtcgctggaagtcaggaggaaacaaggaatgaaattgagtgtgacaggggcaagcagtgggggacataggagaagtcaaggcaataaggacttcactaagaggcccagagaagtcaatagacaatgagaaatgggggttgtggtcttgggtgccagggttggtggggaacatgttgtggcctcaagggtcggcgccctgctgggcacacttacccgtgcactgcacatggagtggctggcctcgtcatcggccaggtaacccgagtggtggcggcacctggccatgtggtcacctggcaggtgaccgggcctgctgcccacctctctcttcagctgcgcattcctctctgcgtggggtggggagacaacctgagggtctccaataggtccacgcatctgtggccctggagtctgcgggtccctcgctccccgcaccccgcctccttcatgcatccagcccttcctctgctccatggcccccatgcgtctgcaggcaggcagtttccagagtcatcggggtggaatcgctgaggacaatcctgtctccgatcatctttggatctgcgtgtgctcgacccgccctcctcccaaaccctgggcaacctggctttcaccccagcccagaatcaacagactcaccagaaacaccgccttgctccgcacaggccagtacagtctgcgccctcactggagcagctgcacagtgcgaggaagtcggctggcggcctccacttgcttatttgcataccacatcctcattggttcttaccgaggagctcgtccacttccctctccgacacaatggttgggggcggggcccacattggccccacctccaattctctgggctctgccctcccacactcgcctgggagccgcaggctgaggatgctggtgcccacgctccccgctgccgggaggaccccccacccaccaccgaagctggggctaggctctttgatctgctcctgccccgaggggagcctaaaagccaaagccacgtcttccaccggtggcacaagcaccttcctcgtgtcctccttggttgctgcgcagccctgggcctcctgctcctgttcgtttccaggggcctctgcccttcccgcggtgtgcacagccccaggttctgccttgagacctctcccctctgcagtggaaagagtgccggctctaagtcacagacctagcttcagttcctggctctgctctttcctgccaatgtgactcaacctctcagcattagtcccacactgtaaatgggcttgagtgttcttccaatatgggagtatgggattcaataaaatctccctacagcacacccagtaacccagtggagccttgtgtattctttaattaattaatttatttatttggagacgggagtctcgctcagtcgcccaggctggagtgcagtggcgcaatctcggctgactgcaagctccgcctcccgtgttcacgccattctcctgcctcagcctcccgagcagctgggattacaggggcccgccaccacgcccggctaatttttttgtagttttagtagagatggggtttcaccgtgttagctaggatggtctcgattccctgatcttgtgatccgcctgccttggcctcccaaagtgctgggattacagacctgagccaccgcgcccagcggagccttgtatattcttacctcctctccctccctccttttcccctttgctcagtaataccccaccatggtgtcacttcttccaaaaaccttttactgtgaattctgccacgccctacgcaattcacagtaaaccccattccagactctaccataccatgttgctacttatttttctatcagatggtgcttctttggggccagaacagaggcaagtcacccttaatctctaatactttcagtgtctggcaccaagtaggtgctcaataaatgtcagtctcctccttcccacctgcagaccctcgggacctctgacctttccaagatcagcttccagtggagaacggtggttggttgaggtctgacaattcaccagtcactataaacacatcagtccttatgccaagagcatggctgaaggactctatgaggctttcaatcctcacatgcctcacgaaatattgttcctctcaagctctgctctgtcctctcagctctggctacccactaggtcagggacagagaggacatagcaggcctgggtgctggccccgaggtgtgaggttcagtcttagctccactactcctggcaggaccacactttcgctctctgaaccccagtttcctcatctgtgaaacaggaatgacattaccaatttcatagcccggacacaaataccacactttccatgggaaaaatcaagactgtcacattgcaatggaaactgtggctgccaaccataatgactatttatacagtcatgggtaaggaaagcttttctggaccaaagagaaaacagtgaagttatgaatgtaaaagctgtagcctggcagagagctcaagatggaaactggagataatgttttctcaaatgaagccttagtgtatatgctttctttcattttcttagtgtctagagctcaagaaaaaaaaaaaatcaacaaatcaagaaaatgcctgctcttagaaaaatctgcaaaagatcaataggcaatttgaaaaagaataaaaatag

SEQ ID NO: 1562637 - DNA, 4001 bp, Homo sapiens
aagattttgtaatacagcctgggggacggttcacacctgtaatcccagagttgggaggactgcttgaggccagaagttcatgaccagactgggcaacatagtgagacaccatctctacaaaaaattttttaaaaaattagctgagcctggtggcacaagtctgtagtctcagctgttcaggaggctgaagctgagggatcatttgagcccaaggagtttgaggctgcagtgagctgtgatcacacaactgcactccagcttgggtgacagagcccctgactttaaaaaaaaaaaaaaaaaaaagacttttcaggccggggcggctcaggcctgtaatctcagcactttgggaggctgaggcgggaggatcatgaagtcagaagatcaagaccaccctggctaacacagtgaaaccccgtctctactaaaaaaaaaaaaaaattgccaggcgtggtggcgggcgcctgtagtcccagctactcgggaggctgaggcaggagaatggcatgaagccgggaggcggagattgcagtgagcccacatagcgccactgcactccagcctgggcgacagaggcagactccgtcccaaaaaaaaaaaaaaacaaaaacaaaacttttcaatatgtatcctttaaattattttactttgtgcatgtaatattaacatggctcaaaatccaaatattacaacttgttatagagcgaaaagtttccctctgacctgtctgcctgccactgttactttctctaaaagacaaccaatgtcactaatttctgtgtctctttccagagacactcatctaatgtttcaccttttcacttaagtaatttagactataacaggggttcaactaacggtgaccacagagtgaataaacaaccactgaaacttactcatcatcctcctcctcctctcgcttgtgtttctttttacagtgaacagaaacactgttgaaacaaacaaaaatcagtcaattaagaaatgtactcgagcttgtggtttcagtatcctctttcttgctccaataatcttgctcatccccacataccaaacgtccctttctgagcctagtgggatgggtacaaatcacaggtcagtcgggtaacggtggattgccccgacagaactggacagtgaaatctcaacttgtccttttatcaacgtaatggaagacagattagggaggaccaaaccagggaaacgtcctcggggcaggcgctgtgttaagcactttatttaaataatctcactaagaggacccatttctgtcccatgcttggcatactttgcagatgagacactgaaagttgtcactaacagcggccgcgccgagggggcacccagaccgagtcgcccaggttccaactgggaaagtctcacttctccgggccgcagtcgagctgaggttcggaccggactcctgggctatgtgacccccggcgacttacagttaacgtctccggggatcagtttcttcatctgtaaactgggctgcgaagctcccgcggagggccgtggggagggagtcaaaaagccccggcgcggagcccgcgcccctgcccgcgcccgccgcgaggggcgcccagcctgcccgcccgcccgcccgccctgcgccctgcgcccgacgggctcctcaccgtccgcgcgccgcactcccagcgggactgctagggactgcgcgaggtcccggccgcggggccaactcggcgccgtcagcccccggcgggaaggcccggccggggaaggccggctgcggcggctgcaggaagtccgagccgccgctcagagggaggccgctgaagggccggccgagcgcagccatagccggcgagacgaggaggctgcgacggcggcctcggccgcccgcgtccccaggcccggcagccgcagccacagctactgccaaaacccgccagcctcggatcccgctctcgaccccacgtcacgccttctagaaccctccacctcaggccgctcgggggcatgccgggatttgttgtgtgtagagggccgctgccgcgagggatgccgggatttgcagtccttccggactacaagcaaaatggctgcttctcgacctcttagctggggcttagggtgtctctggctggccaagagtatgacctaggttcaaatcctcactccgcaagtttcgtatctcagtttccacagtagtaaaatgagataataatagtacatataatcatagagttgatgtgcggagtacatgaatttaaacatctagagccagggcagggcggtggctcactcgtgtaatcccagcaatttggaaggtggaggcgggaggatctcttgagcccgggagaccctgtctcaaaacaaaaacaatctagagcccttaaagcagtgcctgacatacaatacacgctcattatcagttattcatatgtgactctattaataaaaatgtaacaattttaatacaaatgaagttggtggtgccttagaacagcatagaaaattaagtaaaaacctcagctgctggctgggggcggtggctcacgcctgtaatcttaccactttgggaggccgaggtgggcgaatcacttgaggtcaggagttcaagaccagcctggcctacgtggtgaaatcccgtctctaccaaaaatataaaaaattagccaggtgtggtggtgcgcgcctgtaatcccatgtactcgggaggctgaggcaggagaatcgcttgaacccgggaggcggaggttgcagtgagccgcgatcgtgccactgcactccagcctgggtggcagagcgagactacgtctcaagaaacaaaacaaaacaaaaaaacacctcagttgcgcggcaaggtggctcacgcctgtgatcccatcactttgggaggtcggaggtgggaggtgggagaatcgcttgaggccaggagtccatcctaggtctagcttgaccctatctcaacaacaaaaaaataacaattagcccaccgtggtagtgcatgtctgtagtcctagctactggggaggctgaggtgagaggattgcttgagcccatgagtttgaggttacagtgggctataattacaccactgcactccagtctgagtgacagagcaagaccgtgtctcaaaaaaaaaaaaaaaaaaaagtaaactcaggacttaaacaaaaacaaaagcctcagagcacttgtgacaggtactggcaagccttccagcctctttggggcattcagaggcagtatctcctgcctgggcttggcagatggtcaacccccaatcactgactatgccctgttttttccatctcacaacagcaccaccatccaatcgaaactgcttatgccaatgtcaatgcccttcagccaaagcacacacatgtacataattgaacaaagaaaggtttatctactcattccagtgaggaaatttctcccttaggaggtgttacaaaggctttttataggatttggggttgtgttagacgttttgagggaaggttttaaaaaacagcttttggctgggctccgtggctcacgcctgtaatcccagcactttgggaggccgaggcaggtggatcacgaggtcaggagagcgagatcatcctggctaacacggtgaaaccccgtctctactaaaaatacaaaaaattagccgggcgtggtggtgggcgcctgtagtcccagctactcgggatgctgaggcaggagaatggcgtgaacccgggaggcggagcttgcagtgagccgagatcatatcactgcactccagcctgggcaacagagtgagactctgtctcacaaaataaataaataaataaacaaataaataaataaatacaaaaaattagccgggggtggtggcgggtgcctgtagtcccagctacttgggaggctgaggcaggagaatggcgtgaacccggcaggcggagcttgcagtgagcggagatcacgccaccgcactccagcaagggagacacagcgagactccctctccaaaaaaaaaaaaaaagaacttttcggcc

SEQ ID NO: 1562638 - DNA, 4001 bp, Homo sapiens
agttacgcaccactacccatggctaatttttgtattttaatagagatggggtttcaccatgctggccaagctggtctcaaactcctgacctcctgatctgcccttctcagcctcccaaagtgctgggattacaggtgtgagccaccacgcctggcctccactcaactattgaaagagaaattacgtaaacctctctctatgtgctgatatgcaacaagctacagaagagtaaaatgaaaagatcaatgtgttgcacagtgtgaaccatatcttcctacaaatgtaaaaacacagccactgcactccagcctgacagaatgaggccttgtctcaaaaaagaaaaaaagaaagaaaaagaaaaacacttgtgaacttggtaaatttttagattatcttctaaaggagacaatgaaaacaggtaagggggttgtctctggtggggaaaactaggggtgtggagtaaaagattttgtaatacagcctgggggacggttcacacctgtaatcccagagttgggaggactgcttgaggccagaagttcatgaccagactgggcaacatagtgagacaccatctctacaaaaaattttttaaaaaattagctgagcctggtggcacaagtctgtagtctcagctgttcaggaggctgaagctgagggatcatttgagcccaaggagtttgaggctgcagtgagctgtgatcacacaactgcactccagcttgggtgacagagcccctgactttaaaaaaaaaaaaaaaaaaaagacttttcaggccggggcggctcaggcctgtaatctcagcactttgggaggctgaggcgggaggatcatgaagtcagaagatcaagaccaccctggctaacacagtgaaaccccgtctctactaaaaaaaaaaaaaaattgccaggcgtggtggcgggcgcctgtagtcccagctactcgggaggctgaggcaggagaatggcatgaagccgggaggcggagattgcagtgagcccacatagcgccactgcactccagcctgggcgacagaggcagactccgtcccaaaaaaaaaaaaaaacaaaaacaaaacttttcaatatgtatcctttaaattattttactttgtgcatgtaatattaacatggctcaaaatccaaatattacaacttgttatagagcgaaaagtttccctctgacctgtctgcctgccactgttactttctctaaaagacaaccaatgtcactaatttctgtgtctctttccagagacactcatctaatgtttcaccttttcacttaagtaatttagactataacaggggttcaactaacggtgaccacagagtgaataaacaaccactgaaacttactcatcatcctcctcctcctctcgcttgtgtttctttttacagtgaacagaaacactgttgaaacaaacaaaaatcagtcaattaagaaatgtactcgagcttgtggtttcagtatcctctttcttgctccaataatcttgctcatccccacataccaaacgtccctttctgagcctagtgggatgggtacaaatcacaggtcagtcgggtaacggtggattgccccgacagaactggacagtgaaatctcaacttgtccttttatcaacgtaatggaagacagattagggaggaccaaaccagggaaacgtcctcggggcaggcgctgtgttaagcactttatttaaataatctcactaagaggacccatttctgtcccatgcttggcatactttgcagatgagacactgaaagttgtcactaacagcggccgcgccgagggggcacccagaccgagtcgcccaggttccaactgggaaagtctcacttctccgggccgcagtcgagctgaggttcggaccggactcctgggctatgtgacccccggcgacttacagttaacgtctccggggatcagtttcttcatctgtaaactgggctgcgaagctcccgcggagggccgtggggagggagtcaaaaagccccggcgcggagcccgcgcccctgcccgcgcccgccgcgaggggcgcccagcctgcccgcccgcccgcccgccctgcgccctgcgcccgacgggctcctcaccgtccgcgcgccgcactcccagcgggactgctagggactgcgcgaggtcccggccgcggggccaactcggcgccgtcagcccccggcgggaaggcccggccggggaaggccggctgcggcggctgcaggaagtccgagccgccgctcagagggaggccgctgaagggccggccgagcgcagccatagccggcgagacgaggaggctgcgacggcggcctcggccgcccgcgtccccaggcccggcagccgcagccacagctactgccaaaacccgccagcctcggatcccgctctcgaccccacgtcacgccttctagaaccctccacctcaggccgctcgggggcatgccgggatttgttgtgtgtagagggccgctgccgcgagggatgccgggatttgcagtccttccggactacaagcaaaatggctgcttctcgacctcttagctggggcttagggtgtctctggctggccaagagtatgacctaggttcaaatcctcactccgcaagtttcgtatctcagtttccacagtagtaaaatgagataataatagtacatataatcatagagttgatgtgcggagtacatgaatttaaacatctagagccagggcagggcggtggctcactcgtgtaatcccagcaatttggaaggtggaggcgggaggatctcttgagcccgggagaccctgtctcaaaacaaaaacaatctagagcccttaaagcagtgcctgacatacaatacacgctcattatcagttattcatatgtgactctattaataaaaatgtaacaattttaatacaaatgaagttggtggtgccttagaacagcatagaaaattaagtaaaaacctcagctgctggctgggggcggtggctcacgcctgtaatcttaccactttgggaggccgaggtgggcgaatcacttgaggtcaggagttcaagaccagcctggcctacgtggtgaaatcccgtctctaccaaaaatataaaaaattagccaggtgtggtggtgcgcgcctgtaatcccatgtactcgggaggctgaggcaggagaatcgcttgaacccgggaggcggaggttgcagtgagccgcgatcgtgccactgcactccagcctgggtggcagagcgagactacgtctcaagaaacaaaacaaaacaaaaaaacacctcagttgcgcggcaaggtggctcacgcctgtgatcccatcactttgggaggtcggaggtgggaggtgggagaatcgcttgaggccaggagtccatcctaggtctagcttgaccctatctcaacaacaaaaaaataacaattagcccaccgtggtagtgcatgtctgtagtcctagctactggggaggctgaggtgagaggattgcttgagcccatgagtttgaggttacagtgggctataattacaccactgcactccagtctgagtgacagagcaagaccgtgtctcaaaaaaaaaaaaaaaaaaaagtaaactcaggacttaaacaaaaacaaaagcctcagagcacttgtgacaggtactggcaagccttccagcctctttggggcattcagaggcagtatctcctgcctgggcttggcagatggtcaacccccaatcactgactatgccctgttttttccatctcacaacagcaccaccatccaatcgaaactgcttatgccaatgtcaatgcccttcagccaaagcacacacatgtacataattgaacaaagaaaggtttatctactcattccagtgaggaaatttctcccttaggaggtgttacaaaggctttttataggatttggggttgtgttagacgttttgagggaaggttttaaaaaacagcttttggctgggctccgtggctcacgcctgtaatcccagcactttggg

SEQ ID NO: 1562639 - DNA, 4001 bp, Homo sapiens
ccaaagcgctgggattacaggtgtgagccaccgcgcccggatgttatttatatatatttttgtattttagtagagacgggtttcttcatgttggtcaggctggtctcgaactctcaacctcaggtgatccgcccgccttggcggttgcccaggctggtcttgaacttctggactcaagtgatactccctccttgacctcccaaagtactgggattacagacgtgagcccctgctcccaaccactacaagggttttgacactgactcctagtcaccagtctccaactggagactcctagtctccaacatggcaagagaccaacaacccaagataggtccgtcccagcactgagggacctaactacaggatgactgatcagtaaagtttttggagaaagatcttgaccaaaagggggaaatatgaaagttgttagaatcaaaacagagtcgtttgtgttaaaaactctgacaaatttaaagcatgattctccaatgggaaaaaacaagaacaacaactctgacaaataaaaccgaggaaggttgtgaaaagagggttcttatgcacaaatgactgataacaagatcacaaaaaatgcaaaaaccacaaccctgcacaaaggccactgcaaacttacacagaaaaatctttctgtgaggacatctgccctgcaactgcctgtccaacctcagactagcaccactcttgctattcatccttgtagccaaggataactatctcaaaataatcatgtaatcctcatttttccttttcaaaacctttgtcttcctttacctccccaaatacgtacacaggttactatggcacacatattgtcactacaatgtctattcccaagtaaacatcatttttttagagtctctcactctgctatttaggttgacagtacctaccacactctaggcactgttctagaggcgggaatacagcaataaataagcaaaaatctctgcactcatggtacttgtctctagtagggataagagttgatcaataaacttgtaaaataagcacagagggatgagagggtgtcggtcaggtacaagattacataaagtggtcaggagaggtctcacactcagattacaactccccaatgttaccaatgtgaaatcaaggcacagaaaaatgaggtgactgcccaaagtcacacagctattcccaggctgaaccaagtgtctgtttggctctaagtccagtgctctgtcttctgactctttgtaaatgagcacaggctacctgagatcagagctggctactgaactaccaggacacctgccccaggggagagatgctcagttacagacagtgaggggctgcagagatcatccggagaaccccctacccccaagcagacgagataagtgaaacctagagaaggaatagtccaagttcacccaggaccctccacattccacctcctgctccaaactcaagggaaccagaaccaggctagggcaaaactttaggggccaaggagaataccagacagctggcaatgactgaagcaggtagtgggaaagaaaagccagaacagcagcctgcgggacaggtcctgctttctctactgttaaactcactttttcagcctctcaatcccgatcctgccgtatgcgtcacccggagctcctcctggctcagcatgaggctctgaactcctgcagaggtaccaggtagtggcgggccttgagccagctaccggggtcgggggcccaggtggttgaccccgagccttcggagctcccggaggagggagcgagccttctcaaggaacagaggcgtccaggtccacgaaactccctccccaccacctgcagccggttcgaggccctcggttctctcattatccttcccgggaacctgcagcccgcggcccctacagccacctacctggccagtcggtgcaggaagggcaggtggccgagtcctgtgcgagcagctaggctcgaaggtccaacaggctaacagcaaagcaactgaaagcgggagcaaacggctagcaaccgagcgcagaccgccgagctccgtcccgcccaccgcgctgctcccggccaatgagcgcgagccgccactgcggggctccgctagcctcacttccggccccgctccaccgcccctgcctgcccctccaggctctggcgtgcctccagcgcgctgtgggcaccatcctcgtcctgtccctcctgcgggccctgggtacgtggccctggatttagcttgtgttggaggaagttaaatctgtgggtggggtctgtgcccaatttaaggcgtgaatcagcaaactggggtcccagctcctgtcggccgggcgaccttctgcgcgccctccctgaaactgtgtcgtcgtctgtggccgagtttttaaactttagatcgcaacgtgagtttagtgggcggtgactagcacttttgttcttctttaaggacctcagagactcagtgcaggattcgggcatcccctccttgcccctccggtccaccaactaataagccaagtgcggcgggggcttcctcgtccgttcgttaggccgagtgcagccccacttttgcgcaggatcaggacagtcagacccgagaaggcagcgtggcgtggccatctccgggcccggggcccctgccgggcgggaagggagctggaggcccggtctgggctgagctccccagaacaggcgcagggcaggcactgtcgagcgcagacctcatgccggggaccaagctggacatgcattcccaggatctacccacgagggtgcataaacaccagttctgatgacggctgtacgggaagggacagaggtgacctactttagccagacaagggctgaggctgggacagtttcgttctgataggaaagctgagaatttgaccctccttgcctggaaagtttacctctatccacctccacgtgaggcgagggagcaggtcaagtgcctctgggagctgttgaatcgcagcagccccaacccctaggcctttctctgccctgccagccccaggatggcctgactggtgttctctgagtacagctgaggcacccagctgactccttgaatgctgttacaagaacaaatcctgtcccgtccctccttccctgaggaggccatcagtctccttgctgaaacaatcccttatccaactggctgagaaaccagctcctggtagacaaggtagtacagtgtttttggagagctcgcgcaggtatgtgagtgtatcattttatttccttattctatttcaacaatagagtatatggctccatatgaatagcttcagctgtcatccatttccccaacaattatgccctttgtctccaggtctcattctctctccacttctgggccttcaagtcctgaggatcagtttctgatgtgggacagggatacagccacccctcccaggcagctggcagcaaaacatgagaggaaaacagcagagaagtggggccaaccatgggggcatcacacttccagagcccaaaacagtcaagaatggtcaggcaagaacagaagtgctcctgagaatagtgggatggattctgaaattgggtcctgaacacctgggctaggtagttgctattcaacagggaactattgcacggaaggggcaaggaagagagccagggaggcagccagaggggtgcagaggaagcaaactaccctcacacacacctctggactgcagtatctctggactgcagtgtctctgggtgcaaccagccacctaccagagggtctctgaccactgccacagccccaagcttgctttttttttttttttttgagacatagtctcactctgccacccaggctggagtgtgcagtggcacaatctcggctctctggtcactgcaatctccacctcccaggttcaagtgattgtcctgcctcatcctcccaagtagcttggattacaggcatgcaccaccatgcccggctaatttttgtatttttagtagagatggggttttaccatgtaggccagg

SEQ ID NO: 1562640 - DNA, 4001 bp, Homo sapiens
ctctcagaactagtaccctaaccctactcggtaaagatgatgcctacttcccagccagggtgcctggtgagattcaaagccaccaccatgaaaacacgggaaactctaaaaccagctatgtggcagatgtcagtctcaaacatgagattgttaattgcctggatccctggggatactgaagggactgagggcaaaataactaactgcactagtagaggaataagactggcttgaacttgcattcccactctaccaactccaaacttcactgtcctcatttgtaaataggttgctataaggaataaatgacgtaacacatgaagtgttgggcacagtatccggctcatagtaaatgaccaatacatcccagctatcattattctacattaataacaaccatgacacacagctacgatgtgtgtggggggagggggaagacttgagagagcaacctttcctatcactccctcatttcacaggtgaggaaactgaagtccaggaacaggttcggagccagctccccgctttccagagttgaggagaggaggaaggagagaggggggaatcgcaggagagggagagaagccggcgggattcgaggtaggcctctggggagcgagccgcatagcttgcagggctgcatctgtgagagtgaggggtgaagcctaaagcagcagccctgcgtgatggctcatgcgtgtaatcccagcactttgggaggccaaggcgggaggatcgcttgaccccaggagtttgagaccagcctgggcaacatagggagacgtcctcccatgtccctacaaaaaaaaaaatttaaaaactggccgggcgcggtggctcacgcctgtaaccctaacactttgggaagccgaggcgggcggatcatttgaggtcaggagttccagaccagcctggccagcatggtgaaaccccgtctctactaaaaatgccaaaaaaaaaaaaaaaaaaattagccgggtgtggtgggcgcctgtagtcccagccactcgggaggctgaggcaggagaatcgcttgaactcgggaggcggaggttgcagagagtcaagatcgcgccactgcactccagcctgggtgacagagcaagaccttgtctcagaaaaaaagaaaaaagaaagacaaagaaagcagcagccttgatttgagagggaggcccccagtggggcttgagggcgggactacggaaggcaggggatggaagcaagaaaaggcaggttccgtgggaaaagcgaattaagggcgtaggatttggaagcggggcttggaggatgtgggtctgaaatgaaaggggggactaagggagtagggaagtggggctcttaggcggtgagcctgaggggacaggggctctcctaaatgagagaccaatgggagggagctgggctcttggaaggcggggtcgaagggagcgaggtactggcctgtggagtaaaggagccgcgaggtgagtgcggcgggggtccggcgggtgacgtacaacatctcacctgtcttcggcgtcgcggcttcagccttcgtgtctggtcggctcccggaactgcccccggtgcgcctgcggccaccgggatccccgaaaagccctagccgggcgctcaggccgctgccttggcaacggcgtcggacgccgcggtgcccgcggggaggggcgggaagcgcgtcacggcgaggggacggtcccggaagtgcgccagtcgtaccttcgcggccgcaactcgctcggccgccgccatcttgcgagctcgtcgtactgaccgagcggggaggctgtcttgaggcggcaccgctcaccgacaccgaggcggactggcagccctgagcgtcgcagtcatgccggccggacccgtgcaggcggtgcccccgccgccgcccgtgcccacggagcccaaacaggtacctctcccccgcccctcagcctgcagccggagggttggcctgggcgctccttactcgcacaggaataagcggccggccgctatgaagggcttggagggactgcaagtcccaagaggctgcgcgcttcccgcgctatggtggtgttctggtagcgaaatgagccaccctgaacgggattctctaagtggtccgcggagcagccccgtcggcacgagccgggagcttcttagaaatgtggagtctccgccgtagatcttttaaataggaatctacatttgaacaaaatcctaaggtgattgatttataagtgcgagaggcgctgatccagcccatcctctgatcttatgtagcagttggggccgccggccacagcctttccccagtaatggctaatttcccagcctgcacggtacatctttggatgttaattctcagcatctatttcggtgtctgccccaagccagacaccgtgccaggctcccacattaccggaatgaatggggcatggtccctgcctagggagctcacaggctaacgagaagacagacatatgagaatgctcaccaaatgtttgttgtcccaatggccatcgatgatacagtgccagcccgcccttaataaagctctccaatctcgaatgtgcacaaaccattgtagtatggtgtgatatgccctgtgatagaagtttcaggtacaaatctaatgaacattgtttgctgggctagaagggatattaaggtagggaagcccacaagagtgagaggtaaatttcttttagaagaaggaataggagtttgccaggtaggtgactagggaagggaaatagcatcctttattcatccagcaaatatttattgaacacatacgctgatcattgctttgggttcagaataaggggggcggggggggggaacatgactgaagaagccatgccttttccacaaatatttaagtgcccgtgtgtccctggcattttcccaggcattgggggaaaataaggtaatagccagataatatgcgcaaagacaccgaggtgaatcaaacggtgtctctgatcaagagtaaatgaacaagtgttgaagcatagacttaggagcgtagtggcaggagatgcgattcttacttaggatttgaacttttccttgtagacagtgggaagaaaagggagtgttttaagccaaatagtgacatttgtgtttcagaaattcaggtaggcagacgtgtggagaatcactatgaggggaggccagtcacgctattccaaagaggctgaaggcctggccgagattagggcagagggggtaggcaggctcttcagccagagtggtgtgttagaatcctggttctgccagttggacattaagctctccatctctcagttttgtcatctgtaatgtggagatattaagagttcttggccgggtccagtggctcacgcctgtaattccagcagtttgggaggccgaggcagacagatcacttgaggtcaggagtttgagaccagcctggccaacatagcaaaactgtctctactaaaaataaaaaattagccaggtgtggtggtgcatgtttgtaatccccactattcgggagagaattgcttgaacctgggaagcagaagttgcaatgagccaagatcatgccgctgcactccagcctgggcgacagcaagagactgtctcaaaaaaaaaaagagtacttaatcttataggcttcttctaaaggttataagagttaatatatttaaagtgcttgggaaaaatacctgggatctactcatagcttgataaaagttttttttaagagaccgggtgtcgttctgtcacccaggctggaatgcagtggtgcagtcatagcttactgcagccttgaattcttgggctcaagcaatcttcctacctcagcctcctgagtcaccgggattataggtgcaagccattgtgcccaacttgataaacgttattatcatcgagtgtggaagctgaggaagagagaggagcccccaactttctggcatgggtgactgggtagctattcctgaggaaagaggttagagatgaaagtgcccagtagttagctgcacctgaag

SEQ ID NO: 1562641 - DNA, 4001 bp, Homo sapiens
aggcaaacattcatttttggggtgattgttcccttcttggcaatccctgttttattgagggtatcactagttattcaatccaaggattttttttgtttccacaggaggtgggtgtttctttgtcttcttagagtcaggattccagatctcctgatgtgtgggacttttcttggccactacgatttcatctacagtcacgagctgtagcaccacctcagccactgctcgaaatccttgggctttgactattagggtgtcccacaccccttcctgggccacatttattatcccttcagttcccacacccattaggaggttcccaccttggtgcactccactcatttctgccatcacgtctgagacagctaagcctgcattctctgccaaagttttaggaagatacttcagggcccaggcaaatgctaggaatgcaggcccactgggcccttccaatctgcttcctttatcagaaagcatttttgccaaagccatttctgtggccccagctcctggaatcagtctgggatcttgacatagctggaaataggcatcaatgccgtggtagacggcctgctctgcactccgcagcccctgggtggtggctcccctgagaaccacagtgagggcaggtgtgcctgtacattcccattcaaataccacagccaaaccatctcccagctcctgcctgtaaaccctctggcacttgcctggcctctggggagggagcagacgaggcagcagaggtgtgtccaacacctcactcaggtaaatgatctccatccaagacctagcttgaatcaccacgatgccatacttgtccgccagtgtgagggtctcctcgtcgacctcccccaacaccactgccacattaattcctgcagctgctagctggcctacttgcttttctagtaattgatcgcttcctttactaaattgagctagatcagcaggactagaaagacgggccgttgctggtgcatttggatgggcaggaccaaaggggcaagcaaagagagccaccctggcaccacttaacactgtggccatttgcccacagagcttcccagatattgctaaccccgggaggaggcaggaatcctccagtgtccccccgggcagcgcgcacaccccaacacgctcaggcttgaagctgccgtctagttccttgatagcccagcaggcgtgggccaccagcttggtcaagtggtccatgggggacagggtgtgggtattcatcacagaatggagggcccaggatggatcttccaaaggccccagagattggatggccagggagggcagtgtggccaggacctctgcagtggccgtggcgtaggcctcccggagctgcgggcgaggcaggccagccttcagcagctgctctgcctgttccagcaaggcttccgtcagcagaaccacgaaggctgtgccgtccccactattctctgcctgggtttgtcctgcttcccggaggagccatgctgctgggtgctccagctccagggccctgaggatggcagtggcacaccccgtgcacactgtttctcctttcatggtcaccaggaacttctgccggccgtgggggccatagcaaggccggatgacactggccagggtctggactgcagccaagctgctcagcaggtggggctcctcctcttctggactcctcgggctctcccttgggttcagtgccagccgctggggcagctccagggctgaagggactgtgctgtccatggcccgcagagagaggagaggccaccgtgggttgcagagatgctctagaaacagcagctggggcactcctgacaccgatcgttgaaagtactcaagaggtcagtggaagcaaggagccaaatgcccattgattggtatctgaagacatcagcacggaccagcactccactgtgggtccaaggatgagctccaaagagcccagtcctaaagccaccccagggttgattctgtaaaggaactgggtcttggggcctctcaaccttggtggctgaaatgggatctttaactgatgaagtcacaaagtggaaaatggaaccaggatagagaatgaggtcacagaaggctggttagaactgaggaggccctaccagcaggcaaaagtcaggccttgtccagcaatggaggtacatgcacctctgcaccaggtttgagacttgtttaaacgtaagagacaatgaggaggagatcaagtgaaaaactacccatttcaccctatctggagtgcaggggcataaccatggttcactgcaggcccagctccctggtctcaagcagtcctcctgctcaggttcccaagtacctgggactacaggcacacaccaccacacctagctagtttttttattttttgtagagacagtgtttctgtctgttgtccaggcaggtctcgaattcctagcctcaagagagccttccaccttggcctcccaaagtgctaggactacaggtgtgagccaccacctcacccaccctttttttttttttttttttgagacagagtcacactctgttgcccaggctggagtgcagtggtacaatcttagctcactgcaacctccacctcccaggttcaagcagttctcctgcctcagcctctcagtagctgggattacaggtgccagccaccacgcccggctaattttttatatttttagtagagatagggggatttcaccatgttggccatggttggccaggttagtctcaaactcctggcctcaagtgatccgcccacctcggcctccaaaagtgctgggattacaggtgtgagccactgcacctggccttttttttttatttgagaaggaactgagagatgatgtctgtgttttgttttgttttggtgttactttctcttgcagtactgtgtaatattagccatgttttgctgtctgcctttgactttttgggtatcttatcagtttgtgcttgtgtatcaggtttcttagggtgtctgttggtctttcagggtgcaggtgtgggaggctgcacagcgtgcatgcctgtgccacgactcccaactctgcctccctggcagaggcagggcaagacaagtggggaaggatgctgacagctcacagacaaatagaagtgaacccagaggggtgaaaagcaaccagcctcccagcggtcagggaggtagaagcctaaatggggtcctgagatttaaatgcgaatcgccttcccatcctaaccttcaatgcttacaatttaagtctctttttttcattctctctcctttcctcacttgtctcctctttcctcctatagagcctactcgggtaatgatgcttctgctttagtttaacacatatttagtctgggcgtggtggctcatgcatgtaatccctgcacgttgggaggctgaggcgggaggattgcttaagctcaggaggttgaggcttcagtgagccatgattgcaccactgcattccagctagggcaacagagtgagacttgtctcaaaaaaaataggggaaaggtcatttggaatcctagtccagagataaccattgtttacaacttgatgaacattactactttgcacatattatatgcatacataattatagatttacaccattttacataagattatgatacatatatgctattctgtgatcatttccccctcaacattatcttggctcagagaaatgtttctttttttgtttggacatggagtttcggagtttcgctcttgtcgcccaggctggagtacaatggcgcaatctcggctcaccctcggctcaccacagcctctgcctcccgggttcaagcaattctcttgcctcagcctcctgagtagctgggactgagtagccatgtgccaccatgcccggctaattttgtgtttttagtagagacagggtttctccatgttagtcaggctggtctcaaactcctgacctcaggggatccacccgcctcggcctcccaaaagtgctgggattacaggcgtgtgccactgtgcctggtct

SEQ ID NO: 1562642 - DNA, 4001 bp, Homo sapiens
ctttacactaacatctctcattccagggaccccggtggcagccacgtggcacttgctgccaaccacagggcactgctggccatcaggtgtgcctcacctggcactggagtaagcagggctccaagtgtcctggtgccaggctcacctcccctcacctgctcaggaacaccgcccgttagtgttcagaacacccctttcacagatggaaaaaacgaagctcagaaaggagacatttaccctcagtcacagaccaacattgctggtaaatgccccagggtgggggtgaagacgatggggaatggggaagacgatttggagggcttggatgcccagtgctgagcccggtgtggggtgcaggtgcaggcctgggaagacaggagacccagctctgcagattcactgcctgtgacctgggcaaggaggtcaccacacagcctcagtgtccttggagtccttatatttaccctatagaggatagtcagggcctgggcacatggcctgagctcactcaatggtgggaatgacgcaagaacaagttttggagccgggatcgggccaacaggggtcgctgtggaggcacatgtggtcgcggggaggccaagggcgggtctgaaggagagcgggggcggctgcaccctggcattcacctgggggtcacccgcaggccgcagtgctggccaggggcccacgtctcatcctggaggccactgctcgggtgcacacagcccacttcctgcgggcatccagctgggtgacgcccccccccaccgctggacagcgggtccctgtcatggttacggcagctcccccaaacctgctctggtccctggaataaggggttaaaccggtcggctgacttctcctgctcctcaaagtccagacgcttcaaggtggagagacggggaaactgaggccagaacggggtagctagttgttcgcagtcgcgctaggggacccggtcctccgtattccaaggggggcaccgtgggccattagggagcgacggggaaagtggaaaggagacgcgcttcgtgcccaccgccccgagttagagccgaaccagcccgggaccgagcgagacggagcggctgcgggccgcgtctcgggtccccgcgccacgtttagtgccgctgcggcctcccggccagtcccccctactctctaagcctcagtttcccggtctaggaaaagggcttcgaatgttgcgggtctggcactgctggggcaaaggcagaacaatctggagggcggccgggattggaagtccgggaaagacttcggccatccaacattccctggggggacggggctcaggacgcggagggtcgctccgcgggggaaggggacgaccggctgtcttggccggaggggaaccggacgggatgacctcatccgcggctccagcctggaatgcggcggtcggggaggggggcagggtgcctgtccatctccccgggccccccaccccccacttcccgctctccgcgtgggcctcggcggaggggagacattccgccgcgtcgcccgctgcccgccccggcccttccttcccccgcgcaggaaggcgcggagacagcccccgctctgcccctcggctcgccccctcctcgcgcattttggccgctcagccgtgtccgatcctctgccccctccaccagcctggaacgggacacgaagcccgaaagctcggagtttcctcgcgcggctccgcggccgcgcccggccttcctgtgggcacccgggggcgcctctcccgggcgggtcccgtccccgttccggccccgggagcctagtagggtgcagagtccccgcgggcgccgggacccgccggcctccacggcctccgccccgaggacccgcgcgcccgggctgttacctggctccgcgagccccgggggcgcgggacgagggcggactcgtcgtctgcagcggcggcggccgcgcgtcccggctggcagcccgggagagtcgctgggccggtctgcgccgccctggccgcgggctccgcgggctggatccgggggcgggggcggggtgtgggcgctcccgcctcccgcccgtctcctcccgcccgcgggcggggcccggccccctccccggccccctccccggcaccgtcctcgcggccgccgagagctggcagggacgcggctggggggccaggccaggcctctgctcgccaccccggacaaggccagccggggaacgtgcgggctgccccggggaggcgactccggtccccggccgccaacccctcttccaccggttcccctcgtggccttgcttggggcgtccaggcctgatgaactctcctccctcctgggccctccagccgcgccctgcgggagttcggggaaccgggaagctcgatctgaggccttgaatgcctgggcctttaaaccttgatgtttacaggcatgacatgcccactcctttgctccccattctcattcccttccatccggtacaggccccgcggtgcccaggaggaagacagccatactggggcgactggtagagtggggtagagtggccgtcaagaccgggaccctggagccggacagcctgggctcctgtcctgcctcagtcactacttacctttctctgcctcagtttcctgatctgaaagtgggatagataatagcagcatcagatgttgtgtgaagtgtttcctgctccaagagcacctaggaggcttgctcggcaggtaaatgaagtcgcatctcagagactttacagaccctccccccaccccgcccacctccatggagggcagggaatcagccatacccgggaccctgtgccatcctcaaggaggggagatagatctctggcccctgcctcccgttgttgtgccctcctttgactactcccatctgactatagagtcctcgggctgtcagggcacagagaggtccctaatacttcctgcagggcctgggggctcaggaaatcttcctagaggagatgatacctgagttaagtctctctctctctcttttttttttttttttttttttttttttttttttttttttttttgagacggagtctctctctgttgctcaggctggagtgccatggcatgatctcagctcactgcagcttccacctcccgggttcaagcgattctccctcctaagcctccggactagctgggattacaggcacccacccacgcccggctaatttttgtattttttagtagagagggggcttcaccatgttggccaggctggtcttgaactccttacctcaggtgatccgcctgccttggcctcctcaagtgctaggattatgggtgtgagccactgcatggttgtgagttaagtcttaaaggacgtgtaggcagagggaagggcagtggaaatgcacagtgcacagctggcaagggacagcacagcaaaggctgggagtggaggaccctgcagcggaggcaaacccggctgaaggagactggctgagcgctgttgtggccggggatgaggagctgtatttacccgcaggtggaggagacaaggtctttactgttcacccaggggctaggcctcttccactggctccctgaatccccatgctggccaccaagggaaggagctatttctgcagctggacaaatgaggaaacagaggcacaaagcattctagcatttgctcaagtggcacagcagtaggaactctttccctgggggccggcccaggagtattttgtcccatggagaactggaacagcatcaggacagtgagccagcaggcagcactggcaggtgtacatttagaagactgactgttgcccggcgtggttgctcacgcctgtaatcccagcactttgggaggctgaggtgggcagattacttgaggctgggagtttgagaccagcctgaccaatatggtaaaactccgtctcaactaaaaatacaaaaattagccaggcgtggtggcgggtgcctgtaatcccagctactcgggaggctgaggcagggagaattgcttgaacctggg

SEQ ID NO: 1562643 - DNA, 4001 bp, Homo sapiens
ggtggtgggcacttgtaatcccagctagttaggaggctgaggcaggagaatcgcttgaacccagaaggcggaggttgcagtgagccaagattgcaccatgacactccagcctgagtgacaaagcgaggttccgtctcaaaaataaataaataaaggctgggcgtggtggctcatacctgtaatcccagcactttcggaggtgggcagatcacaaagtcaggagatcaagaccatcctgactaacatggtgaaactccgtctctactaaaaatacaaaaacattagccaggtgtggtggcgggtgcctgtagtcccagctactcaggaggctgaggcagaagaatggcatgaacccaggagacacagcttgcagtgagccgagatcgtgccactgcactccagcctgggcgacacagcgagactccgtttcaaaaaaaataaaaaataaaaaaataaaccaaaataaaataaaataattttaactagaccatattaaaaactgctagattccaagcaccttacaatcaaatttctgcaaaacaagttaaaacaagttcaaagttggggctatccacattcattatctttttttgctgtcaattttgcttctacaacttgggcgtggtaagtcaccagtaaatacagcatgtttttctcttccatattgcctaatgtagctgatacttaaatacacgcttaatctatcgtggaaatagaatgctgtgtcaagaaattacaattgagtaaaaagccacgttattctaaaacgcatcttcaatacctgttctttatgctcaagaaatgcagtttcaagttcttgccacccagaaactggaaccagcgtatattgcacgtggtcacactggaacaaggcctggagagagagtgttttcaaagcctatcttatttaggacattagcaatttaccttgaaaagaaactgaggaagattagacgggttgagagacaaaagacacgggataacattaaagctagtgaaatgcttacgggaaaagctaggtgctagggatatgagcgtttaccataccattctgtgaattttgcaaattaccaaagtaaaacatcggggagaaatgccgatttaacttccaggccttctgaaaagttcctgatccaagggcctgaccaaaacaacgtaaatactatgccctattcaaaaccaaactaacgatcttccctaatagactaggggctcccatattcccagcaacacctgtgacacgactatacccacagttgtcacagattcctctctctcaaatcccccatttgagaggccacgacagatccaaagtttcccccaaatgcaactgctgtgttcacctattaatattaatagcttattgcaaaaatacaaactagtctctttaccttttacttaatcctttatcccaccccacaccgttgggacagggaggcaacctctcctccgagtctctctcctctcacttgctgttcacctcctgccctgctccctctcccaccctaagccctcagcacccatcctgacactctgcccgccctgcgcccccacgcagcaccctcacctcgcgcgccggccccgccctcctagggtccgcagaactcacctgaaggatcttgcacgcacacagagcatccacgtccgaggccacgaagagaaggaccctctatcggggaagagcagaccggctgaacacggcgacccgaaccccggccctcccctgcctcccggtcacccacggtcgctccccctcatcccttccccaccggcaaggcctcggcgggggtcccggactgggcgtcacctggctctggaccacctcgtagaactctttgcggaaatcggacacgaacatagccacggcggccggacgcctggcgctcgcgctgaggtaccaagagcccggcggcggtcaagactcccgccaaatcacggctcctccgattggtccagggatcaccaaccaatagcttcttagttcccagccttcctttctttctgattgggccacattggaggcggccattagcgctctgccattcacggccagaaaactccagcccgcccccaaagaagcgtcacctctgaggccgaacgcaaacactgttgcccccttcaactctgactcgcttttacccagaaaagcgacgctgggcggacatctttactttgggaagagaagcctactgcctcccactgggaaccctcagggaaagtatacttctaaccatacattaaactcagtcacatacccaatggggcagcatttacgtttgcaataggtttttggtgtggtttgaagaaggatttgtagcttagttccgcccgagtcctcgatggctgaagcagaggcagtctgggtagtgcattgtgggtagtgtagtcgtaaggacaatgggccctactaaattcgtctggaggggaatactgtcaacacgtaatttaaaataacgtttaaaaatacctataaaaggggaaataaatcacgaaagggcattttaatgcttctactgagggtgttttagagcctagcgtcttcgcctggccttttctcttttgcagccgacgctttgtcccgggcaccccccctccgggtctcgggtccggcacttccggtgagcctctggggcgtaccggcttggcgcggcggcagcggcagcggcggctgggagagcggtcggcggggtttcttcgttgcattgcctgagaggagcggagtctgccaggtggtgtccatcatggtaagcgctgacgggcagcgggcgggggctgggccttggcccggggcctgaggtagggcccggcggggcagggcggggcgggacggcggcggaggtgccgagtcacccgggcctgagtccggcctgcaggctcatcggccgcaccgggcacaagcaggacccttgaccactaaccgcctgtggtcgcgtccgccggtcctgaacgtggctcgcattctgtctcagccggacttgccctccttgacgaaagaaaggaaggtttgtgtccattcacgggtttcccaagtgctggacgcgcaacaggtttccataaacccaaagttagttgcaaggttgctggggatgggaacagaatcagggcgctccccagggagaatccgtagtgggcatcccccgctcttgggggacacccagctcttgccccagctccgtgagctccgtgcctacgggttcgtgccttcgaatctgtacagcggtgttgtgttcggtaatgataacgatggaagctaatacctgctggtacatttcctgttacacagcttttaacacctgtactccctcatcgcggcttatttcttttaatccctacaatccctttggaagcaaggatgatgatgattttaaacatgagaaaactaacgtttacagaggtactttattcgagtcacagaagtagggactggagagttgaagccaagtctgtctggctgcaaagcactctacggtattgtcttcctgtcacctgtttattttagtaaagacaaggaatgattgttagattttatcccaagtgtgtcactgtcaaaccctggcttatttctattcttgagttcatccactcaagaatacctgatatgttccaggcagtgtgctaggtctcgggattgaaaaggaaagtgagagatgggatcgggagcagcaaagaaggggcagaaggtcgggttcatgggtaaactgcaggcaggttgttaagtatgttgcccctttgtgcggatttaccttttatattcaaagagaagaaatggcttacataggttggctagtgagaagcactcaagggaagcaagcccctaccctgttctggccttgttcacccagaaacgctatttcctgtgttatggttctggccaagatttagctgaacagttatgctgcttaaaagaagaaagacaaaagattggaaattactgtgttagagtgccagggagtaaagaaccatcccagattttaggcgggaacatgctatgtttgcatttt

SEQ ID NO: 1562644 - DNA, 4001 bp, Homo sapiens
gagatggggtgtccctgggtcacaggctttctcaggaatcctgcccctttcccagctatgaagaccctaaccatatagtcctagcacagtttcttgcctccctaccgtacccttttctctatccccagctgaaacaggttttcaccggtgcccagagtgacaggatttgctgtccatattccaatggtttaaggtttttgtactgctagagagaaggatccagacaggatcaagccagagcacccatctcttcttccaggtctgcaccacggtaaaagcgttccggtctcctgctctgccccattctttaccacaagcccccagtgaacgctggtggagaagggcccagagtgggtgcaaaatctcctgtttctgctgctcctagaagctctatgccctcacattagtccacacgtggtgtggacattagaactgttttcttggccaggcgcagtggctcatgcctgtaatcccagcactttgggaggccaaggcaggcggatcacgaggtcaggagatcgagaccatctagctaacatggtgaaaccccgcctctactaaaaatacaaaaaattagccaggcgtggtggcgggcgcctatagtctcagctacatgggagtctgaggcaggagaatggcgtgaacccaggagacggagcttgcagtgagccgagatcgcgtcactgcactccagcctgggagacagcgagactccatctcaaaaaacaaacaaacaaaaaaactgttttcttatctgcttgtatggaacccccttctcatgttcatggttgggtcttggaggcctctctttccttagatttctggctaaatggctgccatctgatgggttcatcaaaagttacaattttgctgattacccagctccttctttgactatggaatcaagtacgacattatcagctggcccctagctcttggctgtgacctcccctcgcctgaactgagcgtggtgtataaaggcgtatcaaatgcgatggctttccccactgggtgtccccagatgcaactccaggaagcatgggttaccagtgactttaaaagttaagtctggcccggtgtggttgctcatacctgtaatcccagcactctggtagccagaggcgggcggattacctgaggtcaggagttcaagaccaacctagccaacatggcgaaaccccatctctactaaaagtacaaaaattagccgagcatagtggcgggtgcctgtaatcccagctacttaggaagctgaggcaggggaatcacttgaacctaggaggcggagattgcagtgagccgagattgtgccactgtactccagcctgggcgacagggcgagactccttctcaaaaaaataaaaattaaaattaaataaaataaaatattagccgggcgtgggggcgggcgcctctaatctcatctactcaggagactgaggtaggagaatcgcttgagcggggggttggggagcgggggctgggggggcggaggttgcggtgagccgagatcgcgccactgcattccagcctgggcgacagagcgagactctgtctcaaaacaaaagttacgatcgatcgcgggtgtgcgtgaacctgatcccgcttctcttctgcacgccggggcgtcctaggcccctgccgaggctcctgggggcggtgcctgtgaacagggacggctgagagggtccggggatgctggtggtccccgcgagcctccgcctgccctctctcgccccagcgctgcccgaggtcaggggggacagtcccgtgaggcccacaccccgcttctcggtcccgtccccaaagctgagagcggctgcgccgactcctggcgcttggaacccagcaggccacgccggcgcggaactcagtcccggcgagcgggaggcaccctgaggcagcgcagggaagggccacagcacgctcgccccagtcactctgccacctcgaactcaccgccgccctcgtcccacggctccgcgtccaaggcgcctgagcggccccgccccaccgcggcccggccaaccccggtgcagccgcagacgcaggcgcggagcgggaggcgggacctcgcggtggttttccgcctctgccttgcttttccggtcgccgcggtcctctgcgcgggatgtggctctgagcttcggggtagtccgcgaggctgggttccgtgctgaggggcgtcgcgtctggccgtgcgctgcgggagcgcgcgggcctggcccgctgtcctggccgctgcgaggcgctcagcttctttctgagtgttccgccgggttcgacagggtcgaggtcgccggcgcgaggctcccggatagctgaggggcgcgagggcgcctccagtctcccacctgccctcccgcgccgcggactaggctgccagtctaccccaccgggacgtctgcccccgcatgcaggagggggtgtgtcggcccaacggggtctcaggacctgtccctgctcctccaaagcccacgtcgcctgcggcgcccctcgggtctgcgccgcgttctcctttagcctcccgggcctctccgctgcccctcgcccccaggcaccagccacacctgcttccttctgttcccgcccgtggcctctgacacgccgtgccctggacccgaaatgcccgccccactcctggagcctccggtgtgtgagaggcacctttccttggggtcaggggcccggactctgaagccggcctggctttgcctgtgggccccgatcctcccagctcgagtccctcgccccagccgccgcgggccttcacctgtgctttggggacgacaggatggccaccctccttcccccaaagatttgagggttttgctccacgcgggagaaggtctgcctgtgccaccagccggcagcctttcacatgctgttgcgttacggggccctctgtgacctttccctaggccgaggggtgcttcgtctctgttcctgagagaccagaatttattcttggtttgtcaagccacatctgtaggaatgttgcccagttgcagcaggctggggtctgggacttgctcctttggcgaattgagaagtaaggatatagaaggcattttagcactaatggaaaccagaaccactcttagacctgggcaagaggggccccagaaattagcaagcgattagcaagcagctggatttcgatgacctccactgtacttagagcaacggcattcgattcgttggatcatttcaaagatgacatactgggttgtttgtttgtttctggcggtgtctaaagatggaacatcttgaagcattttgaatttgacctgtggctaccctcagatacaatgatggtaaccccatgagtgctgttaaagcaatttgacttattgtagacaggttaacacatgagatgcgttaaaagagttaagtgaaataataggcagcattcaaagagcaaatcgtggtctttggcagaaaatagagttaattttgtatttgagctgtccagttattacaattagaaaacgttttaaagaatccaaaaggatttaaaatattgcataaagttttaggagaaaatggtttccaaaaagcaactgcatatgaaataagcactaaaatgacattaaagtacaatgtaagaaaatcggaactagaagcatttgctggagtctgaagaaaaagatttatggatgaatgattctgaaactaacttctatagagacaattttccggcgatggtagatcaaggtgtagattgtactgaagagagagattcaaacaaagtgagtaatctaccgcagttttcagttttcttggtaataccccaacaacgtaaaagaaaaacgtaagaaatcctgtatggatctaaatgtaagaaacgatgataatggtgaaataataacattattttatataatgaaaatattgtgtaatattttctgcaatcataatttttcatatgcaccctttctacactgtttaaacatgatatcaacagtcatgattcagttctacatataacgctttaagaa

SEQ ID NO: 1562645 - DNA, 4001 bp, Homo sapiens
gaggtgggcagatcactggtgcccaggagttcgataccagcctgggcaacatagcaaaaccaaaatacaaaaattagccaggcgtggtgtattgaacctgtagtcccagctattcatgaggctgaggcatgagaagttcttgaacctgggaggcggaggtttcagtgagcctagattgcaccactgcactccagcctgggtgacagagcaagactctgtctcaaaaataaatacgtaaataaaatttttaaaatgaaaataaaacgattgtttctctacacttgaaagtatgatacagcatactggaacatgtcaagactgtaaattaggagaccttaggaacagcctcaaattagtatcattctaactgtgcaaccttgggcaaatcactaacgtctccagatctcagtgtcctcacctacaaaaaaggtaacttggacaagatcagtggttttccaagtgcagcatgaatatcatcagtggcataaatacaatcttaggtggctcacaaatggataggggttatgttgacagataggtaattttaaaacatgtattagcacatcaaacccatgatatcgtaactattattgtttttgttgaaaaatttttaagttaaagaaaaatattaagtaaatagaggtgcaaggatatgacaaaaatggaaagtttgctactcattaaatcattttaatatccaagattcttcccagctcagttattctgtagtacatcagatagcaaagaaaattttaagaaggaactagtatcagcaatatgcagttatggcagaagctgtacccccaaaatcagagtgctggacgtcagcagaacccctttaacttcattaagtccttgactctcttttttgaccacggtgtttgcctgctactaaaatctctagggcaggagcacggtgacttctatgtcaccatcccacctaccccatgccacattctccatcaacagccccgccccttgtccctgtctccctggtgacacataacaaaggccatcaagctcccaaatcttcaactccatcctctccaagaaggaccccaaaagcatttgtgtcccagcaactgtgaacttttccaggctgccagacagaagtttatctaatggtggtcaagacctgcctggttgaatactagtaaaaacaatccttattcacaatttattgctatatctacttcatcttctctcctccacaagattttccttttacttttaaaagaggatgcatgaaaacttcataaagtagtttgcttccagactaagaagaaaggaggctgggtgtggtggctctgcctgtgatcccagccctttggaaggccgaggcaggcagatcacctgacgtcagtcgttcaagaccagcctggccaacacggtgaaaccccgtctctactaaaaatacaaaaattagccgggcgtggtggtgggtgcctgtaatcacagctattagggaggctgaggcacaagaatggcttgaactcgagaggcagaagttgcagagagccgagatcgtgccaccacactccagcctggtgacagtggagtaggccacatgcatctgtggtcctgagtaaatgcccttgggcccattttcaaaagcctgttgggagaaagcctgttactcctccactgagagtctcagacccagctcagatggagacagggagaggtgcaggtggatcaagcccaagctccggacttcccagctacctcctgaacctcatcatcccacagctcccaaaggaccccagttacctcggaacagctccagaaactgagggctgtttgctcagcgccccagcatctgtgcagagcaccggaaaagctcaccaactgtttcacttcctgttggggtaggttttatttccctccagtgtgcaccagggatccaactagaggccggggagaggggctctgcagtgctgaggcagccagagtggcaagtgtgtggcttacatgcatgcttgctgtgtgcatctgagtttgatgtggggggcttgtgcgcatgttcatgtgggtgtttgtgtgttcgtgtgtgtttcggtttatgtgcatgtggggtttgtttttttttttttttttttttttttgtagacagagtttcactcttgttgcccaagctggagtgcaatggcgcaatctcagctcactgcagcctccgcctcccgggttcaagcagttctcctgcctcagcctcccgagtagctgggattgcaggcgtgcgccaccatgccccactgattttttgtatttttagtagaaatggggtttcaccatgttggtcaggctgctctcgaactcctgacctcaggtgatccgcccacctcggcctcccaaagtgctggaattacaggcgtgagccaccatgcccggccgcatgtgggtttatttgtgttggagggagggtgtgtgtgtgtttgtgtgtactgtgtctttgaaaggtccacagcatgttggttttggaaacaagcaccgcaaagaggcactccaaaatctgttcatgaactctgggaagttctccttcctcaaaatgtgattgtggactgtggggcaacccattagacagagagtaaaaagtagctataataaaatatatgttttaggggggaaatcagggatgcggggacaggacagtagagggggcaggaggtaggagacaagagctggggtgtgaagaggaccagcaagaacaacgctccaagggacaagtggagcagacaaggctcctgtacccaggacggtcagagtcagacctcgctttgtagctggccttagcactgtagcagtggggcctcgaccaagttgtttcaactctctatacttcagtttcctcatctgaaaatgtggataataaaagcacccaccacagagggtccattgtcagaattaaaggaaaaacacatgcaaagtacctgccacatagaaagctcttgataaatattagccatgactattcttagaagtaactattgggatgcctcatccaagccaattagaaatgcagacatgggaggctacaccagggacctccatgtcacatgcatggtctaaagactcgattgcaccccactcctccccagtcccactcaaatctacccccaagaccccaaatctacccccaaaagcccacggcagtttcagttctgcagctcccatacatctggagccttgatgctcctttttgtcattttctccaaaaagtaccaaggtcattcatttaataaacaggaagaaatcccaaagtgaaaacacagaggggtcagggattccctcatcaagagttcaagactaggctgggctcagtggtgcatgcctgtaatcccagcactttgggaggccgaggcaggtggatcacaatggaaggggttcgagaccagcccctactaaaatacaaaaattaggtgtggtggtgcgcacctgtaatcccagctacttgggaggctgaggcaggagaattgcttgaaccctggaggtggaggttgcagtgagctgagattgcaccattgcactccagtctggatgacagagtgagattttgtctcaaaaaaaaaaaaaagagtttaacactaattttttgaaagttagaggaagcagaatgcaccgcaagtaataaggagaaacaagattgattccagcgccgcacaaagggaaaccaccaattctgaaagtaaatcatgtgaagggttttttgtgggttttttttatactttaagttctagggtacatgtgcacaatgtgcaggtttgatacataggtatacctgtgccatgttggtttgctgcacccatcaacacatcatttacattaggtatttctcctaatgctatccctcccccagccccgacccccccgacaggccctggtgtgtgatgttccccttgaagggtttttttaaagaccaggtcaaagctaaagatcaagcttttctttccaaacgctttagctaaaagtaggagctaattttcacatctccgaaggtggctcca

SEQ ID NO: 1562646 - DNA, 4001 bp, Homo sapiens
tagtagaaatggggtttcaccatgttggtcaggctgctctcgaactcctgacctcaggtgatccgcccacctcggcctcccaaagtgctggaattacaggcgtgagccaccatgcccggccgcatgtgggtttatttgtgttggagggagggtgtgtgtgtgtttgtgtgtactgtgtctttgaaaggtccacagcatgttggttttggaaacaagcaccgcaaagaggcactccaaaatctgttcatgaactctgggaagttctccttcctcaaaatgtgattgtggactgtggggcaacccattagacagagagtaaaaagtagctataataaaatatatgttttaggggggaaatcagggatgcggggacaggacagtagagggggcaggaggtaggagacaagagctggggtgtgaagaggaccagcaagaacaacgctccaagggacaagtggagcagacaaggctcctgtacccaggacggtcagagtcagacctcgctttgtagctggccttagcactgtagcagtggggcctcgaccaagttgtttcaactctctatacttcagtttcctcatctgaaaatgtggataataaaagcacccaccacagagggtccattgtcagaattaaaggaaaaacacatgcaaagtacctgccacatagaaagctcttgataaatattagccatgactattcttagaagtaactattgggatgcctcatccaagccaattagaaatgcagacatgggaggctacaccagggacctccatgtcacatgcatggtctaaagactcgattgcaccccactcctccccagtcccactcaaatctacccccaagaccccaaatctacccccaaaagcccacggcagtttcagttctgcagctcccatacatctggagccttgatgctcctttttgtcattttctccaaaaagtaccaaggtcattcatttaataaacaggaagaaatcccaaagtgaaaacacagaggggtcagggattccctcatcaagagttcaagactaggctgggctcagtggtgcatgcctgtaatcccagcactttgggaggccgaggcaggtggatcacaatggaaggggttcgagaccagcccctactaaaatacaaaaattaggtgtggtggtgcgcacctgtaatcccagctacttgggaggctgaggcaggagaattgcttgaaccctggaggtggaggttgcagtgagctgagattgcaccattgcactccagtctggatgacagagtgagattttgtctcaaaaaaaaaaaaaagagtttaacactaattttttgaaagttagaggaagcagaatgcaccgcaagtaataaggagaaacaagattgattccagcgccgcacaaagggaaaccaccaattctgaaagtaaatcatgtgaagggttttttgtgggttttttttatactttaagttctagggtacatgtgcacaatgtgcaggtttgatacataggtatacctgtgccatgttggtttgctgcacccatcaacacatcatttacattaggtatttctcctaatgctatccctcccccagccccgacccccccgacaggccctggtgtgtgatgttccccttgaagggtttttttaaagaccaggtcaaagctaaagatcaagcttttctttccaaacgctttagctaaaagtaggagctaattttcacatctccgaaggtggctccaggactccaagtcacaccttggcaagggtgtggcagctggcagaggactgcaggtccttgtcaggcagaacctgccgggttctggggagtggagactcagatcttgaggtggaagcagagacaagagctgggcacacttacctggatgtggggttgggagcggtgaatcagagcccagttagatcctggaggctggcagcaggctctgcagaggtgcaggggcacctcattcagaaggggccatttattggccctctgtggctaaaaccagctccaagcaggactttttatggctggagtcgcctccaaaggggcgtcggcctccactcaggtgtgactctgagcgttgcctagctgaaaaggcgtgatgatagggagcacacgtgaggccattcgggaagaatattttgccaagtgcagaggccgtaaaaacgtggaacatggctctgttttttatgctctattgaaaatgatcatcagaagcagaaactgggcttgtgttcagaacctgaaaatctgcagggcagaaaaacaggacaaaggcatcttttagtgactgcaaaactaaacctcaacagaaagatgcctgaagagacaggtggattatgacctcagaattggagacaggagaggttttcagaattaaagatcatctatggctacacaaacatttgagaggtattttcattaaaacatccctttcttcacaccaatatcatgaattatatgctatgcacaacctataacagagtatagcagagttaccagtggtttaaagtgctgcatatatgattgttatatgaggtaaataagattctctgacccagagttaagaaaatggaaataataattgctaaggcatattaagaattatatatgtatgtgtgtgtgtatatatatatatatatatatatatatatatatatatatatatatataacatttaatccctacagcaatacatacctataaatgagtatatacaaatatgtgtgtgtatgtgtgtgtgtgtatatatactcatttaatccttgcagcaatcttataaggtagggactattgcaatccccacttgagagaggcgtaccctgaagcacctggcagtaaggtaacttgcccaaggtcacacagctagtaacaagcatagcacggccttgcaggcccaggtgggttccaccacaccgctttccctggcagcaagaaaatggaaggtttttgaagtagtgggggagtcaccgggcacaaggaagcagatccctggaggaacacacaattagcaaaagtggagcccaggaatagacgttaccaggcataagtgatttttccagacactgggaacttgtgttttgaaacaccaaagtatttttaggaagcagaaaagttagctctttcattgaactgctatgtggttttgaagaaaatgtcctaatatccataaaactcaaagctttaatctgcaagaaggaaaaaatgtcatgtgcctcctactaagttttttttttctaagtaagttttttgtgtgtgtgtatgtatgaaataatatatgtgaaaatttttttttgagacagagtctcgctgtgtcacctaggctggagtgcagtggcacaatcttggctgtctgcagcctctgcctcccagtctcaagcaattctctgcctcagcctcccgagtatccaggattacaggcacctgccaccatgcctggctaattttttttttgtatttttagtagagacggggtttcaccatcttggccaggctggtcttgaactcctgacctcgtgatccacctgcctcagtcttccaagtgctggcattacaggcgtgagccactgtgcctggctgaaaatatttttaaaactataaagcaactatacaattacacagcataaatgattttcatttttctttttttttgagaaggagtttcactcttattgcccaggctggagtgcagtggcatgatctcggctcaccaccacctccgcctcccgggttcaagtgattctcctgcctcagcctcccgagtacctgggattacaggcatgtgccaccacgcctggctaatttttgtttgtttgtttgttttgttttgttttgtttagtagagacggggtttctccatgttggtcaggctggtctccaactcccaaccttaggtgatctgcccgcctcggcctcccaaagtgctgggattacaggtgtaagccaccgtgcccagcccagcataagtaattttccttgcacaaatctttctagtattttttctg

SEQ ID NO: 1562647 - DNA, 4001 bp, Homo sapiens
atcctagcactttgggaggccaaggcgggcggatcacctgaggtcacgaattcgagaccagcctgaccaacatggagaaaccccgtctctactaaaaatagaaaattagccgggtgtggtggcacatgcctgtattcccagctactcgggaggctgaggcaggagaatcgcttgaacccgggaggcggaggttgcggtgagccaagattgcaccattgcactccagtctgggcaacaagaacgaaactccgtctcaaaaaaaaaaaaaacaaaaaaattgagaaactcagtacccctgcataattagtggggctggaggccgaccacatttcagaattttgcttgccctgagttgtctcctgtcatcaggaggcccctgccccctcctgtagaaaggtgacagtcactagagtgacatctcagccctggcggcacattggcatcactcaaggagaggaaaaatgcctgtgtcccaccccagagcaaccaaatcagaatctgtggggtagaagcttggtgtttgtaatctcccaggtggtgctagggtgcgatatacagctgggctgaagatctgccactgttccaatcgacagacaagtaaatagcacaatgacagcatagtcggatgagtcctgtcaaaaagggagcagttaagagggtgcgtgttctcgtaaagcgacaccagcaacatgacacagggttcgcttcattcagcaaggagccaaatggaattttgaatgaaaggtctgctaagaatccaggcaaaagcatgggggctggggagcgcgggtacagggagcactagaaatgcttactgtatgaacgacaacgtcttagaaaacgtctgggaacgactgtcacaggttctctgccaccgacgtgtctcccataagctctcccctccataagtgccagcagggccatcccctgtggataaccctccggggtcttggaagagccccatgctaaagactcaggggacccagtctgggcctcagactctgccgtgggggaaggggccggagcccaggagataagacccgcctagcgaccgttgctaccggcgagcagcctttgttactgagcattaggaacacaatgggaggctcagcggccaggatagtccgtccacagcagcccaggccggaattagcctgcgaccaggcagggggaggcgagggggctcagcaaaaggattctagtgaagactgtttttagttgttaatgtgttggtggccccccaactctggctaatggggggcattaagacctagactctccgtggcaaaagcctttgttccagggtcagacccgaacaaatgggcacatcccctccccctccccctccaccagaatcccaaatcctagcagcccagcaccttctccaaaggttggctgggggacgggcggagacgggcagagtgaggacagaggactggagctgggcaggcccccaagtctctccacctccggctctggaaggagaaaatggccacctgcagaacaagggggaagatggaacaggaagccagtgctctggcccttctcttcctccctccgatccaaccgctcagcaacttctcccacatgcctccccaccaggctcaagatgaaagcctctgtctcagcgtctcctccctcccctcctctatcctcttcccctccacccacgaagatcccagggttctgcgagggtcggagttccctatgcactcccacaccaagacagttgtcaggatttgcccaacaggaagttctcccctaccagagcccagttccattccagggaatccatctcccctccggaaaaaggaaaattgaagccagatgctctctgggatcgccatttgaggtgggcgtggctattaggacgctcagagagcccagcgcggtgaggaaagcgacgaacttaggagccctggtctgggtccagccaccccttactacctatttgaccttcatcaagctctttgacctttccaggctttagtttcgacatcaataagatgaattaatagctgggcatggctcgcgtctgtaatcctagtactttgggaggccgacgtgggtgtatttgcctgagctcaggagttccagaccagcctgggcaatatggtaaaaccccatctcgccaggcgcggtggctcacgcctgtaatcccagcactttgggatgccaaggtgggtggatcacttgaggtcgtgagttcgaaaccagcctggccaatatggtgaaatctcatctcttctaaaaatacaaaaattagctgagtgcggtggtgtacacctgtaatcccagctactcgggaggctgaggcaggagaatcacttgaatccgggaggcggaggttacaatgcgccaagatcacgccactttactccagcctgggcaacacagaatgtctcaaaaacaacaaacaaacaaacacaagaatcacctgctctgggaagtgcagtttcttccagcctacctaggccaggagcaaagtcagctcatcaatttttgccagcgcctcccttttcagaaattcttttctcaataaaagatgagaccctctcttttcttttaaaaggatgatttgtgtcctgtgtcttgtctgtctgctctgtccacaaaactgatgaaagctccactgcaaggcaaagttaatgttcccctcccacttctcaagaactcagaaatggaaatataactctgcactcagagagttaaaatagaaaacaagcaacagatccaagtggagacatgcagatcacacaagagatcggactctccaggatccagccttgccgctaaactcaccaagggtattaacatatctaaggaaaaggccgggcatggtggctcgtaatctttgggaggccgaggtgggtggatcacctgaggtcaggagtgcaagaccagcctagccaacatggtaaaaccctgtctctactaataatacaaaaattagctgggtgtggtggtgcacgcctgtaatcccagctattccagaggctgaggcaggaggttcccttgaacccaggaggcggaggttgcagtaaaccaagatggtgccattgcactccagcctgggcaacaagagcgaaactctgcctcaaaaaaaaaaaaaacatatctaaggaaaaaggtgggtcagtccaggatgccaagcaaagggagagttgagacccacaaactggaataacttgaataacgagtggatcagctgaggtcaggagttcaagactaacctggccaacatggtgaaaccccatttactgaaaatacaaaaaattagccaggcatggtggtgtgcatctgtagtcccagctactcgggaggctgaggcacgagaatcgcttgaacctgggaggtggaggttgcagtgaggcaagatcataccactacactccagcctgggcgacagaaattctgtcaaaaaaaaaaaagaagaagaagaaagaaaagaaaagaggagaatttcctgatgaagcataagtgtctggtccgaatgataacagcattctgactttcttgtttacacatctatcccttatgaatttgttcagtgtgtattgatcctgcggagtcctatcacttctgggtctacaaacagtaaacttcggagcgtataaaagcctacagaatatgctaacaaaactaaaatactgccaccatgtgggcctttccacaagcttaactgtcagtccccaaggcatttgtgtatccgatcaatatgtaaatgaacgagcagactctcttggatacaatgtggagaagactctaccaaaggtcactttccccaagccactgataacctttaaccagctcaaacccgtctgagctcaccacataaaacacccaaggatcctgcccactcccacaataccccatctccctcagcccaacaaaaacatcctcaggaaagttctctccaataaactcactgaaataaaactctagcagtatttgagcacctagggctgctctcctcgaaagatccctcccctaccaacacg

SEQ ID NO: 1562648 - DNA, 4001 bp, Homo sapiens
cctctttctctaactaaatcacagctcttccactgagaagagcctatagggctgctatgcttctgttttctccctgcccccttagagcagtctacaaataattgatcataataaatgcttgtggaatagatgtgtagtacattactaatctttagcattcacagaaaacaccagtcactctctctctcttttttttttttttaatttgagatagagtcttgctcttttgcccaggctggagtgaagtggctcaatctcggctcactgcaacctccccccagcccccgggttcaagtgattctcctgcctcagcctcccgagtagctagaattatgggtgcccgccaccatgcccggctaatttttatatttttagcagattatactttgtaaagtgtcaacacccttgctattactatgtaacctaggttgttttttttttgggtggggggtgttgtttgttttttgttttgtttgagatggactctcactctgtcgtccaggctggagtgcaatggtgcactgcaacgtccgcctccagggttcaaacagttctcctgcctcagcctcctgagtagctgagattacaggtgtccgccaccagcccggctaatttttgtatttttagcagagatggggttttgccatgttggccaggctggtctcaaactcctgacctcaatgatatgcccacctcggcctcccaaaatgctgggattatagacgtgagccactgcacctggcctgttcttttgttttgttttgctttgttttgttttgctttgtttgagacagggtctccctctggcaccgaggctggagagcaggggcacaatctcagctcactgcaacctccacctcgtgggctcaagtgatcctctcacctcagcctgccaagtagctgggaccacatgcacacaccacgatgcctggctaatttttttattttttgtagagatggggtttcaccatgttgcccagactcatcttgaattcctgggctaaagcaatctacccgcctcagcctcccaaagtgctgggattataggcatgagccactgtacctagcctagtgggttttttgtttgtttgtttgtttgtttgtttgagacagggtctcactttattgcccaggctggagtgcaatggcagatcttggctcatggcaacctccacctcctgggttcaagtgattcttctgcctcagcctccctcatagctgggattacaggcacatgtcaccatgcttggactaattttttttttttttttccgagatggagtctagctttgttgcccaggctggagtgcaatggcacaatcttggttcactgcaacctctgccttccaggttaaagtgattctcctgtcttagcctcctgagtagctgggattacgagccaccatgcttggctaaatttttgtatttttagtagatacggggtttcaccatattggtcaggctggtctcgaactcctgacctgaactgatctgccggcctcggcctctcaaagtgctgggattataggcgtgagccacttcacccggcctagtgttttgttttgtttgtttttcaaatggtgtctcacgatgttgtacaagctggagtacagtggttattcagagaagcaatcatagcttgctgtgtccttgaattcctcgggcacaagggatcctccggtaacagcatcccaagtagatgggactgcagacgtgccactgcacccagctctgcgtaactaatcaccgcattttaagattatgtttaagcctttcatgtatacttgattttctatttccacttagtttctccacttttcagtgatttccataatcctttttgggattgtttcctgatcctgatttttcccttgtattgttatcaggcttttggtttctattttcatatcaccaagttccacatacctcttcatttcacatggcgtcaagctgagtactatataagtgaaaccacacaggcatttgttcatcctttttcctttaaggccaacagcactgccctggcatctagggcaaacatgggctgtaaaggaacaaagggtaagtcataaggaattcaacaaaattttcctttatcgtgtcacagatgctatctgagctcatcttcaggtctccttcctgttgcacagcctcccagcttctgtcctgctctccctccaagctgccatggaccctgtggttcttacactctattacttccccttccatgggaggtttgtcagcgttgaatgttctgtgaagcaagtttgaaaagtgattcactgcggggaggttccaaaaagattgacaggccaccagctgggaaagaagataacagagactactggagagagaaaatggcagaaagttttttgttttttgttttttttaaaaaagcatgttgggaaaagtagccagtcactataagaattcaccatggatgggacgtggtggctcacgcctgtaatcccagcactttgggaggccgaggcaggtggatcccttgagtccaggagttcaagaccagcctggccaacatggtgaaacccagtctctgctaaaaatacgaaaatttgccgggcatggtgctgcgtgcctgtaatcccagctgtgcaggaggctgaggtgggaggatcacctgagcccaggaggccaaggctacagtgagccatgattaccgcgctgcactctagcctggggacagagccagaccctatctaaaaaaaaaaaaaagaaaagaaaaaaaaagatggctcccacctgtaatcctagcacacactttgggaggcctaggcaggtagatcccttgggctcaggaggtcatgaccagcctggccaacatggggagaccccatctaaaaaaaaaaaaaaaagaaaagaaagaaggaaaaacaaaaagaaaaaagaaaagatcattcactgcgaatagagaatctgtcagaaattatttggctaatcacactgtgctctgtatcaatgtcctcccatttctagaaatttctataagcatttttccagttaattacctttcctaaagcccaggttgaagtggaaacatgcctaacgtactgtggctcttctttctacctggccacagcactctcagcactccttagaacagagactttcattactgtggatttgtggggcttgcaagcctcaacgtccttccctggtgctttagtaacagctgcaaggctgcctgagaccaagcctacgtgagcagctctctttattttggcccttaagattggtaatttgttattgccgtgaaacccaagtgtcaagcttgaaagcctcctgaccctggttgagaaagaagttcagcccggagaaaggaggctgctgctttctggagtattgcttctgtgctctggctcaagccagcctgcatcagagctgggggctgtatcctaacaaatatgttttcacagccgggcgcagtggctcatgcctgtaatctcagcactttgggaggccgggaacagcggatcacctgaggtcgggagttggagaccagcctgaccaacatggagaaaacctgtctctgctaaaaatacaaaattagctgggcgtggtggtgcatgcctgtaatcccagctactccggagtctgaggcaggagaatcgcttgaacccaggaggcggaggttgtggtgagccgagatcacgccattgcactccagcatggggaacaagagtgaaaacctgtctcaaaaaaaaaaccaaaaaacaaaaaactaaaaaacaaaaacaaaaaacaaatatgttctcacactacacgcagccatggaggaaattagtacaaatgttagttcactcagtacccagtggtgggaataaaatggggctgagggagtcctttctaccgtgggcatccactttgattcaggaccaaagtcctcaccagattttatgtcctgctgaagggcttttgttcaattctagtctaaaaactctaagaatcagctctcttgctgctcctgggttgcttagtccctg

SEQ ID NO: 1562649 - DNA, 4001 bp, Homo sapiens
tcctaaaaagtggagaagcccacatttcctcacattgttttaatcagcttaaggaactaagaatcgccaaaagccagtgagtggccctagactatctgtctacattcctcttcattctcccatccccaacccttttgatctttttattttcctgatttcattaactgcgacgagagcaagttcccacacttcattcacagaagaagcaactgatatttcagcaaacacgactaaatctaaaaataaaggtgaggcaaagagctctgaaataaacgagttaaaatcaacccgaaaatggcacaaagtaagatccgtggggctggggaggcaacaacaacgatttgctcttccaaaagagtggctctaattttgattactgcgtcggcgaacccatccgcagaacagaaaacaaaaactgaccaacgcagttgccattcacctttgtccaaaggcaaaaggtgaaaagtcacgacacatattgccatagaagagaaggcaattcaacctgccaaccaatcgactaattctcagctccttccaaaaataaaaataaaaataggagaaagggggctgccgctgggctggccgatgcctggccgccgagtgcgccgcgctccgcaagctcccgccacccgccgcgctccaggaccctcgggtttcggcccagttatcacaaagccccgggctggaaaacacctccggcctggccagaatggccagcccgtcctccgcgctcgcccggggggataatggtggcgagatcaactccaagggctcccgagccccgcgataaagaggctggatattacgggaggaaggacgctgtggaagaataacggagtcccaaactttccttccacacctccagagccccgcgcccaggcccggtccccaccggcccgaagttggccggagcgcctcccgggagcttggggcctccgggagcccctgccacgcgcccgcccgccagagcggggctagccctccccgccggccgcggccgactcccgccccggtccgagttaatcccgcgcgggccccccccccgcgcccggccccgccggagcagctggctcgcgcctcaatggcaccgggcggcgagcgcgcgcagccctcgcgcccacacccagccccagcccaccggagaagtcccgggagggtcgccgggtcccgctcccgctccctctcccacaaaagcacgggcccgccccgccctcgcggtgcctgctcctccaccccaggatccggcgtccccggcccgacgcccctcggcacccgggcacagcccggcggcccccgcccgccctcctgcccttttgcgccctcctcctggcccccgactcccggccgaagtccctcgggccccggcccctctgcgcgacggcccgggacaccccgcgcggggcagggggagcagggggcgcagcgcgccgcctcccgcccgcgcggccactcacctcgatctcgaagtcgggcaggcggaacgcggtgcgaaagagcgagcagaagtgcgcgatggccgggacctcccaccaggagcggagctcgcccagcccggccgcgccgccctcctctgggcacatctccccgctgcggcacaggcggcggcccctcgctgcccgcgctctgcccgccgacctgggactcccgccgcggcagcgccgcagcctccgcgcggtcctcggcgggggcggcggggcgctcctcccgctgctgccgccgctcggcgagtgcaggagccgagggcgggcgccgggcggggggcggcggcgcgggggcccgaactactgaggcggctgcggctgcggctgcccgcggggtccgcgcgctcgccccatcccgcggctgcggcggcggccgcccccagtcccctacaatataatcgagtccccgccggagaaacagatggggctaggggcggaggggccggacgcggggcctgggggaggggccgcccacgaggagggggcggggctgcccgcgccacaacaacaacccccgcccccgccccacccccgcccggacagctgcaccgccagggagggggaggggcggggcgcgcgcccccgggcccagatccgcaggacccagggggcgcgggccgcacccccgagaactctcacgaggcgccctccgccctccaggactttgggactggggagttgaagcactttcccaagggaggacggccaggagctctcccacccccacttggcctgagtggtcgcgtccttttaaagggcccgcggggtggtcctttcggtcgggctagagacagaaacgtgcacgtgtgggagttcagttattattgatgccgagggcagagccggagcaggagcgggctgtccaccctagaaatatgaagcctagagaagtgaagtgctttccacctgtttcttaacgcttttattccagccgagaacggcgcccaaggagctctgaagtggcttttttctccgagggaagaaggcggtggggctgattgagctggaacgaagtaggatggaggctggagagcggcgggaagggtggggtagggggaggcaccaatcagcagccaagcgggaagagcgatccccaaccccagggaatggacacgtgtgaccgccccggagaagacgggctcggaaccctgctactgcccggccgctgaaagagctgcctggaagagtgagcacaatgtgcttggaaggcggggggatggggcagaggagatcgggaagccggggactgtgctcggaggggaggagacccccacgccccggcggagggattgaatgtgctacggccgaagggtgttggagtgtgtgctttagaaatgctaactgctgtagcgcggtggagtactgctaaatcctaagaaaaaaaatcaccccagaaacaggctagaagtttggaaaaactccattgaatgctcagatatttgtattggtcgtcgcacttgcatcctgctggtctcagagggccgcctctgagttcggtggtccacctttcagataggaaacactgctcctggtgcgtcccccaaattaatcaactatttattgagtgacaggcacaatcacaaagtgtacaagggttaaactcaaagatcctcttctacctttaagtagtgtacaatctggagataatttatatgatagattttggaatgggctgtctggataattacccctccactctccctcactttattatgataataacttgttgtattttttaaggcagcattcagaaacataattttaaatggttagagtatattcacgtgcatcttctgtgaatctagtaatctcaaaatacatcatcttctaacaagggtctcctccgccccccaccactctctcctggcacagaaaaacaacccaaagttctgctctttcattccctggaactatttgatgatttaaagtgcatcctcaaattctaccatgctttttatttaatgtttggcaaaaatgagctcacatgtgactgctcccaaaaagccaagcctacgtttgtgtgtgttggtgaagcacagctaccccgtgagtattgcattagcaagggagatgggagagggacacaggccaccccggaattgtcacgtaacctgaacgaggtgctttctggacttgcttctccgtcttttatttcctcacagtttgactttgcacactttttcctctgtgtgagttggccgggcgcggtggcttacgcctgtaatcccagcactttgggaggccgaggcgggtggttcaccttaggtcaggagttcgagaccagcctggccaacattgtgaaacctcgtctctactaaaaatacataaaattagatgggtgtggtggcaggcgcccgtagtcccagctactcgggagactgaggcaggagaatcgcctgaactcgggaggcagagattgcaatgagccgagatctcgccattgcactccagcctgagcagtaagagtgagactccgtctcaaaaaataaaaattaaaaaaaaaaagtgttactgcgt

SEQ ID NO: 1562650 - DNA, 4001 bp, Homo sapiens
ttgctacctggcttcagaggtccaggattctctaacttgagcatccatcagaatcacctggaggtctcctaaaaacccagattgatggcgctccctttggagtttggatgtgcatatctgatcagctccccaggatgctcatgctgctgacccactttaggaagctctcctttaggagttagcatgtctctgagcagacgctggaccagtatgttctggagaccatacacttcccatcccagaacagatgctgctccctgttctctatccccagcccccagccacacctatatgaccacagttctgttcaactggtgccccagcactgatatctgtgggccctgctcatctcaagtgagccacatttttctcccaggcctgccttgctttcggtcatcctcagttgtggcccaaaccccataaaacagcagccattcctggcaggaatccgaggtgagccagttcttttcaggaaaggtagcagaacagaagatacactgtgggaagttccggcctcacacgtgtacaagctcgatgccctggactctaagctgcttgagggcagtgtctctctgattcacctgtctccctcacagtcctgtcatgcaggatgccttgcacatgatgggtgctcagtttacattaataggcaggtgaggccaggcacggtggcctgtaatcccagcactttgggaggtggaggcgggcagatcacctgaggtcaggagttcgagaccagcctggccaacaaggtgaaaccacgtctctactaaaaatccgaaaattagctgggcatggtggcacgcatctgtaatcccagctactcggtagtccgaggctggggaatcgcttgaatccgggagatggaggttgcagtgagctgagaccgtgccactgcactccagcctaggcgacagagtgagactccatctcagaaaaaaaaaaaaaaaaaaaaaagcaataggtgaatgactgttcatactcctactttctccacaaacttgcacaaatgtgtctgcatctagatgtctgtaaacctgctaacacccacacacattttctattagttaggattaggtttggctgtaagacacagaaacctccaaagagcagtggcttagataagaaagaaatgtgtttctctcacataaacgaagtagttgggagagaacaacacagccttggtattgtggttccacaaacttgttaggtacccaggctcctattttgctccctcacggccttcactgcacagctgccacttcatggtctaagatagctgctcaggctccagcccttatgttcacattccagccaccaggaaagagacaaaaaggggtatcccatttccctacaggtgcacttccaaggagtctcttataccacttctgcttacacctcattggccaaaacttaaccacatggtcatgcctagcagcaaagaaggctagaaaatatagccttatgactggctaaaagtcatggttgcttttccacatgagaaggaataaaggataaaaggagggaaactggcatatcctacctcacaccagtaggaggcagacgaaagaaaagagaagttggttcccagtacaggaatggcagggaagctgtggctggaagaacaggggtggaggatggccaacaggccacagagagatgggcaggtccccctggctggggtcaggaagggcttgcaggagggtttactgctcactgtctctctctctttctatctctctccatctctctcatcacacacatacacactcagtcttgctgagggagaattctgagaaggtggagttctctgtagggaagggatacatatttcctactagtcatgtttccctgaaaatgggacttctgttaataatactcctggcctctctctacctggggaagaggaaacgtgagttacctgagagaagctgggaagaaagaaccaagcatacatgatttagtcccctctcctctttaggagccagctggtccaccagaagtctgtgttctgcctgtccctgcagcacggagggctgggctttatacctgtgccaaggacaccaacggcagcatcagcaagtccgtgttgtctcccaaataagtggtgttctccaacaagcttttagcagtaataaagctgacatttttattctcatatgtcccttgtctctttttcaatgatttagatttaagcaggaaagcctgggttccttttgtgtgtgtgtgacagggtctctgtcgctcaggatggagtgcagtggcgcgatcaaagttcactgcagccttgacctcaagcaatcctcccacctcagcctccaagtagctgggatcacaggcttgcatcaccatgcccagcgaattttttttttctagacacggtctcactatgtcactcaggctggtctagaactcctggcctcaagtaattcttctgcctccacctcccaaagtgctgggattacaggtatgagccaccataccttgccttttttttgacatggagtctgactctgtcacccaggctggagtgcagtggcacgatctcaactcactgcaacctccacctcctgggttcaagcgattctcctgcctcagcctccagagtagctgggattacagacgtgcgccaccacacctggctaatttttgcatttttagtagagacaagttttcaccatgggctccagttttaccatgttggccaggctggtcttgaacacctgacctcaagtgatccgcccaccttggcctcccaaagtgctgggattacaggcacgagccactgcacctggcctctttttttttttttttttaagagacaagttctcactgtcgcccaggctggagtgcactggtgcaatccttccacattagtttcctgagtagctgggactacaggcacacgccactgtgccaggctaatattttttggaaatggggtctccttatgttgcccaggctggtctcaactcctggccttaaacaatcctcccgccttggcctccgaaagtgatttattcctaaaactccaacagcctctttccccaccagccccatactagagacccctactgcaccttcccatcccccgcagatgagcagaataactggcgcctctgttgtaatgagagttcaggtgcccatgccatctcgggaccgttcctccctgactccccaggtcccttctgaaggcaagaaccacagggagaacagagaatgctaaaaggtgagctcattccctctgtggcatcaatacctgacacttggtcctatcctgaacataaactctgcacgtggcaaggaaggcaaaggcaaggggcactatgagaatgacaaggcgaagcgacaggcagagacaggcccgagggctccagtggcaagcttacacactgcacggattttgggacaagttctttcatgttatcaagcccacctgtctctcctgcttagaaaaagtcaggtgcaggacatggccatgttaattctgggctgagggtaacaagattttgactcccaaactctcaggcccctttatggctgtgcccaggcattgggaaaaagaggtgatgaatgaggtgcttccaaggcttgccagagatatgtgtgctagggctgcagtggactggggctggggtcctggtcagtaagctgggatggtgacccagtctgagatggaatgtgtggccctgattcataggcaggtgacatttatagaaaagattaggcacctcccaggctgaacactctgtcactgagcccatccaccctcaccctcggcctcaacgctccttgccatagctggggggcaggggtggaagggtgaccttccaacatcctgacccatgtatagaagaaagtaactcagggaggccgggcacggtggctcacgcctgtaatcccagcactttgggaggccgaggcgggcagatcacaaggtcaggagatcgagaccatcctggctaacacggtgaaaccccgtctctactaaaaatacaaaa

SEQ ID NO: 1562651 - DNA, 4001 bp, Homo sapiens
tttttttgataagagtcaggatctgttgcccgggctggagtgcaatggcccgatctccgctcaccgcaacctccctcccaggttcaagggcttctcctgcctcagcctcccgagtagctgggattacaagtaatagatccattacatagatggggaaactgagcttggaaagctatgtaaattgccttaagtgaagccgctaacagactgcacaggattcaattctaaagctcgtgctcaaactctgtcatcctgcattcttctttttctgctctaccggaagagtcacttggagacatttcgggactctgcagagatgctagagccaatacaacagttataaataagggcgatatttccttatatttatatcctgacagtttgtaagtccttttatcaacatattctaatttcaaacttccaccttggtcacgtctagctatgtgacactggccaagtcactcagctgctttgaaccttagctgctccatatttaaaaatcataaaaataatacagctgttaagagcttagactctggcaccagactacctgagttccagattctgccacttaccagctgtgtgcccttgggtaagctgcttaacctctctgtgcctctgctccatctataaaatgggaagactaataatagtactttcctcggagttgttataaagattatacgaataactgtgaagtacttagaatagtgcctggcacaaagtaagcactatgtgtttttttcatgcaagtaatttggccgggtgcactggctcatgcctgtaatctcaccactctgggaggccaagatgtgaggatcatctgaggtcaaaagttcgagaccagcctggccaacatggtgaaaccctgtctctactaaaaatacaaaaattagccggatgtggtggcgggtgcctgtaatcccagctactcgggaggctgagacagaagaatcgcttgaacccgggaggcggaggttgcagtgagcagagattgcgccactgcactccaacctggtgacagagatgccgtctaaaaaaaaaaaatgcaaggattactgtgaaatccgtatgttaatgtaaaatattacttgtgcgtttagaagacaaagtgattcctttttccagaaaaggcaaaacggcccaagggagcgtgagagccgtggatctgaccaacctggtttagtgtcctgtgccgtctcccagctgcaggacctgagaaaacgtacttgaaaactcgtcaagcttcggcttcctgaccacacaaggtcacaccttctcagaagttgcggggaggctcacacatcactaccgcgccgggcacacagcaggcgccggctccagccctcctgctcccgcccgcggagcctccagcgctcagtcgaggtcacagcgagctgaactgaacccaaggcccgcaccaaacccacaggcacttgggggcggagcacccgcaggcgcggctcccggcgcgcggcccagtttcctccacatgcagatgaaaatcacgacccaaacgtcctcatggtggaaatcagaagacgcgcagggaaaacagggacgcggaaactgccgggaagcgcaggggctgacaagcagcctggcccaggccgtcccacgagcgctctcccgcgggagtagcgtttccgaggccgccagcgagtcagaggaaggcagggcgcatccgccctccagcaagaacgcgatgcactcgggcgcgacgacggtccaggcagttcccaggaggctgggataccagcccggccgcccctccttccccgcggctccccgccccgcctccggccctgagtggcgagtggctcggccagaacccggacgtcctcacctgagcggggcccacagcatagcacctgcgggcggggcggccctggagccccgcagccgcgcgcgccgcccgccagcaaagcccacgcgccgcgccgagcgcagccacacagccccacgcagccatccggccgtcgccgtgcgcacgtgcacggcgtgcggccccccccccccgcgagtccgtccgctgcacagccaatcagcggtcggcgcgcgcggcatcacgggagttgtagtcctgtaagcgcgcggagcccgtcgggcgcctatggaactcgacccgcaggccaaaggggctccgttgcaaggaagaagtgcggggtcccgccgcctcctagaccgagatcgcggtgagctggccgcggcgcacaatgggcacggcctgggcggcggcgtccgtactatcgccctgtgcctgcggatcccggtaacattgcgcggcaggccccaggccggcctccctcagcttcgcggactgtctgggccgggggtctcaaccttgacttcagggccgggccgctggggcagacccttagtgatgttcaggtcctctgggcccctgccagtcaagggacgctcgtcgcgcgccaattgttaagtctttcattgtttctgtaaacctgctgacgccctcccagcgcatagggagactgcgcacgtgagtccgcccccgcgcgcactgcggagaggtagaggcacgaatgtagtacaaggtacaaaatgactactccagagagggccagatgactaagtcagcaaacacttagggaacacgactgtgtccgctgcgcgtttcccggagtagacacaagggtgaatgaacaaagaatggatttcggtcactgaaagtggagaggtagccgactccgtccgtggaggcccttagcagagctggatctggtagtcccccggtcatgaggggagattctgctggaggaaagaggtctccattcccaccgtttgaaatgtgtaggatgccctcagattctttggcccattcataggtatagctatgctaaaaacgcgggaccctacaatgtacttagcactagcagagagggagtcgaggatatggacagagactgcactagctcacacattagcaggccagggtgcggtggctcacccctgtaatcccagaactttggaaggtcaaggtgggaggaaaacttgagtccaggagttccagaccagcctgggcaacatagggagaccccttctctattttaaaaataataaaatagggccgggtgcggtggctcacacctgtaatcccagcactttgggagactgaggcgagtggatcaggaggtcaggggttcaagaccacctagccaagatggtgaaaccccgtctctgctgaaaactgcaaaaattagccaggcgcggtggcaggcgcctcaagtcccagctactcgggaggctgaggcaggagaatcgcttgaacccaggcagcagaagttgcagtgagccgagattgcgccaatgcactccagcctgggtgacggagtgagactccgtcttgaaaaaaaaaaaaataataataataataataaaatgaagaagtagttagcggtgtcctttggtcctcagctttgaagggcaagatcttaattcagttcaactacagctaatcagaatttggaagactaattcaagtcagtcaaactcacaatagcccgacacttaaaccctgccaggggacatagctctctaggattgcaatgttcctaatcccttccttctattaaactacctagaaactgatttagtcattagaaatttcttggtatgatggcttttaaacatgcccacagttttttttgacaatcggctcctcaaaagcatagccaggcgcggtggctcacacctgtaatcccagcactttgggaggccaagtcaggcggatcatctgagatcaggagttcaagaccagcctggccaacatggcgaaacccgtctctactaaaaatacaaaaattagctcgtcatgcacctgtaatcccagctacttgggaagctgaggcaggagaatcgcttgaacctgggaggtggaggttgcagtgagctgagagcgtgccactgtactcgagcctgggcaacagagtgagactctatctcaaaaaaaaaaaaaaaagaaagaagaaaaaaaggcc

SEQ ID NO: 1562652 - DNA, 4001 bp, Homo sapiens
acaaggacccgtgcccttcaccctcaattctgagaggccacagccagggtgttgacatagccatgagcacccccctcgttctccgagatgcagtggcccagctgggagcctccctgaggtggtggcggaggtggtggaggggcggagggcggagcaccgtagccccctctggcccgactcggggaggcccgattgccccggtcccagcagccctccagggcctccaggccccggcagccgaggaagaagaggttcttgagcatgaagatggagaggggctgctggtagctgaccaccaggaggcagcgcagcgccagcaagggcacgtccaccaggcagccgcccagcaggcgcagaaggcggctgcagctgccaggcccggaggcctggccccaggatgcagccgctgcggccgcggcgttgagctcgtagagccagagcaccggcgaggcgagggtgaggaagtagacggcgataagcaggtagcgcaggtgcgcgggcagcggcacgcggccctccagcatcagctccaccagcgtgaagctgtcgagcaggtccaagcacgtgcccaggaagcatccggccgcgcggtgccgctggggctgcagcagcaggggtcctgccgatcccgggggcgcgcccgcctcgctgatggcccgcaccaagctgtagagcaggggcaccgacagcgccatggtgagacggaagcccgtggtgccgaagggcgcgcgtagctcgatgaggtctaggatggacgtgcccaggatcagcaccaccttgggagtgaaggcgatggagtagataagccaggccaggtaggcgaaggcgaactcgcccgctgccgcggccgcccccaggccgccccccgcgccgccggcgcccccgcgggctccgcgtgccttggccccagcggtagcggccgagggggcgggcagatgcaggggcggcgcggcgtggtggtggtgcaggtggtggttgtgcgcgccgctggctgcgccgccccgacggccccggctgttcttggcgaagaagatggcccagcccaccaccaccaccaggtcagtggcgatccaggagcaccagtacaggtcggtgacggcgatgaggtacaggtccagcaggccgccctgcgccagcagcagcaccacggacagcgcctggtagccccagcggcacctgggactgggggcgcagccgcggcgccgacctctgcggccggggcggtctgggcagccgcagcagcagcaacacgggcagcaggaggcgccgctgccggtcccggtgccgcccgcgccccccgccgagcggctcccggggcccccgacggccccggccgcggcgcccccgccgaagtccgcggctgtcatgctgcaggaggaggtgggcgtggaggtggaggaggaggtggccgctgaggaggagaaggcgacaggcgcggggccggcgggggcgcccacctgagccggcggccccaggagcgcggcgttgggcaccagcggcttgctgacgctgaggctctcgtcgtcgtcctcgcgctcggcgcccgtgctgctgctcggggagccgccgcccccgccgcgtctgccgccgcctcccccgcggctggtgctggtgctggtgctgctgtcgccggagcctctccggccgcggaaggagcccccgcggaggaagaggggctgcagccgggcggctgccgggggcggcgggaaggaaccggacgcggaggagaccgagcgagggtggccgagcgccgggcgcattgtcctccgaggggctctggggccgcccagctgttccctccccgccaaccccgggcgggcgaggcgggctaggcggccgaggggagccggggcccgccgcctccccagcagtggggactcgcacctgggccgggcggcggcgagatccggactggagccactggactgggcgagccgggccgggcggcagggagagggggcaggcggtgaaccgagcggaccgcggtgaagacaggcgaggcgggggcggggcggggcggggcggggagcgagtcccgccgggagggagggaggctggcggcggggaaaccaggactggattcgagggggagaggaagcagcgagaccagaggaggagaaagcgcggcgcgctggatcaacgggaagagaaggggcgggggtgcagtgcgtcacagtcgggtcgggagccctgtggcctggaggaagcgggaggaggcgcgggcagccgccagggcgaggcgacccggtgcggggggactcccatggagcgcggactcctaaggaagtcgctgggaatcccaccggctgtaccgcagggcgttagtacctagatggcttcggtgcccccaagcgatgggctcaagctacagggcgggctttgcacctggccttctcagctctgaggcaggcagtgggcagcttcgcctccaccctccgtccagcgcccttcccatggggccatccgcctctccctaaggcactaaaaaccagtggaggagtcaggccatgttggcaaaaagggctcgggcagcagccccagacctatagtcctaaatatccatgtacccagccctggggtcgcgagccatctcagggacgacccgattccagcggatggagaagttccctgaaaacacctgcctgggaggagagacgagggaacgagattgggcaagtggcatccgcccagcgggcttctcaaaggtttttaaagcagaatgggacgtaataggaagatgtgtctagcagagagtaaaataaaggggcatttagaggtgtgggcacctggatgaaaacaaaggctccaaagggatgatggtgagggttacagcccaccacagtagacagagacaccaaggaaggaatgcagtcagtggccctgcgtagacagtctcaggagagagcacaccagctcaccccaggactcatccaaggctggggatggatgtcgatgcagcaactctggaaggcagaaggtagagtgctgcctttaggggtttaagggagaaggaaatgactagagcagttggggctcaaaaacaatctgaggttcaccaataatggaaacatcccattcccagccccatgaaaacaaggcagaaagcttgcctgccctattggcctctgcacccttgtggggcctgtgggctccctgatttcatgacctttgaagctgctgctgcgggctcatctcccctaggtaacagcttgcagcgtgataacaccatgcagtgtgagggagctgtatgcagtggagccgcaggggttagtcaggcctcgcccctaaatctgcctcttaaataagagtccgtttcagccaaacctgccttttccagttccgtggaggtcagtctgcacagccaatccctggtaaatatacaatttagaacctgcaccatctccacctcccccacacacaccacttttggaaagctggcatggtggtgagggcaggagctctggggccgccatcccacctgtgccacttaacacctttgtggtcttagcctgaatatttcacctcagaatgttgatctgtaaacaggaccccaccccagccgggcgcggtggctcacgcctgtaatcccagcactttgggaggccgaggcgggcggatcacctgaggtcgggagtttgagaccagcctgaccaacatggagaaaccccatctccactaaaagtacaaaactagccgggcatggtgataatcccagcaatttgggaggcagaggcgggcagatcacctgaggtcaggagtttgagaccagcctggccaacacagtgaaactccgcctctactaataatacgaaaattagccaggggtggtggcacgcacctgtaatcccagctactcgggaggctgaggcaggagaatcgcttgaacccgggaggcagaggttgcagtgagccaagattgtgccattgcactcctgcctgggcaacaagaataaaactccatctcaaaaaaaaaaaaaaaaggacctcactcctaccttaag

SEQ ID NO: 1562653 - DNA, 4001 bp, Homo sapiens
acagaaggtagaagacaagggggttggggactctcaacccaaaaacaaggacccgtgcccttcaccctcaattctgagaggccacagccagggtgttgacatagccatgagcacccccctcgttctccgagatgcagtggcccagctgggagcctccctgaggtggtggcggaggtggtggaggggcggagggcggagcaccgtagccccctctggcccgactcggggaggcccgattgccccggtcccagcagccctccagggcctccaggccccggcagccgaggaagaagaggttcttgagcatgaagatggagaggggctgctggtagctgaccaccaggaggcagcgcagcgccagcaagggcacgtccaccaggcagccgcccagcaggcgcagaaggcggctgcagctgccaggcccggaggcctggccccaggatgcagccgctgcggccgcggcgttgagctcgtagagccagagcaccggcgaggcgagggtgaggaagtagacggcgataagcaggtagcgcaggtgcgcgggcagcggcacgcggccctccagcatcagctccaccagcgtgaagctgtcgagcaggtccaagcacgtgcccaggaagcatccggccgcgcggtgccgctggggctgcagcagcaggggtcctgccgatcccgggggcgcgcccgcctcgctgatggcccgcaccaagctgtagagcaggggcaccgacagcgccatggtgagacggaagcccgtggtgccgaagggcgcgcgtagctcgatgaggtctaggatggacgtgcccaggatcagcaccaccttgggagtgaaggcgatggagtagataagccaggccaggtaggcgaaggcgaactcgcccgctgccgcggccgcccccaggccgccccccgcgccgccggcgcccccgcgggctccgcgtgccttggccccagcggtagcggccgagggggcgggcagatgcaggggcggcgcggcgtggtggtggtgcaggtggtggttgtgcgcgccgctggctgcgccgccccgacggccccggctgttcttggcgaagaagatggcccagcccaccaccaccaccaggtcagtggcgatccaggagcaccagtacaggtcggtgacggcgatgaggtacaggtccagcaggccgccctgcgccagcagcagcaccacggacagcgcctggtagccccagcggcacctgggactgggggcgcagccgcggcgccgacctctgcggccggggcggtctgggcagccgcagcagcagcaacacgggcagcaggaggcgccgctgccggtcccggtgccgcccgcgccccccgccgagcggctcccggggcccccgacggccccggccgcggcgcccccgccgaagtccgcggctgtcatgctgcaggaggaggtgggcgtggaggtggaggaggaggtggccgctgaggaggagaaggcgacaggcgcggggccggcgggggcgcccacctgagccggcggccccaggagcgcggcgttgggcaccagcggcttgctgacgctgaggctctcgtcgtcgtcctcgcgctcggcgcccgtgctgctgctcggggagccgccgcccccgccgcgtctgccgccgcctcccccgcggctggtgctggtgctggtgctgctgtcgccggagcctctccggccgcggaaggagcccccgcggaggaagaggggctgcagccgggcggctgccgggggcggcgggaaggaaccggacgcggaggagaccgagcgagggtggccgagcgccgggcgcattgtcctccgaggggctctggggccgcccagctgttccctccccgccaaccccgggcgggcgaggcgggctaggcggccgaggggagccggggcccgccgcctccccagcagtggggactcgcacctgggccgggcggcggcgagatccggactggagccactggactgggcgagccgggccgggcggcagggagagggggcaggcggtgaaccgagcggaccgcggtgaagacaggcgaggcgggggcggggcggggcggggcggggagcgagtcccgccgggagggagggaggctggcggcggggaaaccaggactggattcgagggggagaggaagcagcgagaccagaggaggagaaagcgcggcgcgctggatcaacgggaagagaaggggcgggggtgcagtgcgtcacagtcgggtcgggagccctgtggcctggaggaagcgggaggaggcgcgggcagccgccagggcgaggcgacccggtgcggggggactcccatggagcgcggactcctaaggaagtcgctgggaatcccaccggctgtaccgcagggcgttagtacctagatggcttcggtgcccccaagcgatgggctcaagctacagggcgggctttgcacctggccttctcagctctgaggcaggcagtgggcagcttcgcctccaccctccgtccagcgcccttcccatggggccatccgcctctccctaaggcactaaaaaccagtggaggagtcaggccatgttggcaaaaagggctcgggcagcagccccagacctatagtcctaaatatccatgtacccagccctggggtcgcgagccatctcagggacgacccgattccagcggatggagaagttccctgaaaacacctgcctgggaggagagacgagggaacgagattgggcaagtggcatccgcccagcgggcttctcaaaggtttttaaagcagaatgggacgtaataggaagatgtgtctagcagagagtaaaataaaggggcatttagaggtgtgggcacctggatgaaaacaaaggctccaaagggatgatggtgagggttacagcccaccacagtagacagagacaccaaggaaggaatgcagtcagtggccctgcgtagacagtctcaggagagagcacaccagctcaccccaggactcatccaaggctggggatggatgtcgatgcagcaactctggaaggcagaaggtagagtgctgcctttaggggtttaagggagaaggaaatgactagagcagttggggctcaaaaacaatctgaggttcaccaataatggaaacatcccattcccagccccatgaaaacaaggcagaaagcttgcctgccctattggcctctgcacccttgtggggcctgtgggctccctgatttcatgacctttgaagctgctgctgcgggctcatctcccctaggtaacagcttgcagcgtgataacaccatgcagtgtgagggagctgtatgcagtggagccgcaggggttagtcaggcctcgcccctaaatctgcctcttaaataagagtccgtttcagccaaacctgccttttccagttccgtggaggtcagtctgcacagccaatccctggtaaatatacaatttagaacctgcaccatctccacctcccccacacacaccacttttggaaagctggcatggtggtgagggcaggagctctggggccgccatcccacctgtgccacttaacacctttgtggtcttagcctgaatatttcacctcagaatgttgatctgtaaacaggaccccaccccagccgggcgcggtggctcacgcctgtaatcccagcactttgggaggccgaggcgggcggatcacctgaggtcgggagtttgagaccagcctgaccaacatggagaaaccccatctccactaaaagtacaaaactagccgggcatggtgataatcccagcaatttgggaggcagaggcgggcagatcacctgaggtcaggagtttgagaccagcctggccaacacagtgaaactccgcctctactaataatacgaaaattagccaggggtggtggcacgcacctgtaatcccagctactcgggaggctgaggcaggagaatcgcttgaacccgggaggcagaggttgcagtgagccaagattgtgccattgcactcctgcctgggcaacaagaataaaact

SEQ ID NO: 1562654 - DNA, 4001 bp, Homo sapiens
atggggggcgagccgtggtccaccgcctccaccccgaagctgtagtgctccacctcctcgcggtccagctcggcacacactgtgatccaaccggagctgttgtggatctggaaggggaagtcaggggtgggggcaggattcttaggcccagcgctgccgccccccagaaaggtggaggccgtgtccaccaggcgatagtgcagccgggcgttctctccagagtccgcgtccaccgcctgaatgtgcaccacggggtagcccaggggcacattctccagcaccgtggcctggaaggggctgctcacaaagataggctcgttgtcgttgacatccagcacctgcacagacaccacccctgaagaattgatgagcgggggccggcccccatcctgggccttaatgctcagcgagtatttctggacatcctcgaaatccaaggggttgatcacatccaggatcccgctcagcgagtgcaggtagaactggccggccacgttcccgctgaggatgctgtagtgaatggccgcgttctggccctggtcccggtccgtggcctgcactcgcagcacagccgtgttgagccccacgtcctcgggcacctggaccacgtagttctgctcgctgaactgggggtagttgtcgttctcgtcctccacctcgatgtacacggtggccgtggcactgagcgggcccggattgcgcccctggtcgttggcctccaccaggagctggtactcggccgcctcctcccggtccagcaccgcccgtgtgctcaccacgccagagctctcgttgagctggaagacgtcccacgcgccccccaacacgcggtaacgcaagttggcgttgatgggcgagtcgcggtcgctggcgcggatggtcagcacctcgtagcccacctccaggttctcccgcacgcgctcgcggtactccgactgctcgaagaccgggctgtggtcgttggtgtctttgaccaagacagtgatgtaggtggtggccgagcgcggcggcgtactgtagtccacggctttcaccctgaggacgtgcgtctccttggtctcgcggtccagtacgctgtccgtgctcacggcgcccgtggcagagtcgattcggaagtagccccgggagcgctcgtcgaacagcccctccatgtaatagctcacgcgctcctcctcgccctcgatggtgtagtgcgcgtgcagctggaggatgagggtgcccgccggttcgttctcaaacaacgccacctggtagttgggcatcggaaacttcaggctccctctgccgctcgtgccccgccgggcccgtcgcgccggccccgcccgggcttcgggcaagttcggcggcaggggcggcgatggggatggcgacgcggagggcgtccccgcggtggcggcctccagcgccagtcccacccggacggcgccagccgcgcgccgcagggcgcacagcagacgcaggcggaccgagccgcccggcggcaggcagatgggacggccgggacagcggggcctggggcgcggcgggcagcggcaggcgggtaaggtggtcggagctgcgagcgccgaatgctgcgcggccgcgcagccgccggggacggggaagcagagcgccccgcagagccgggcaccggttccgcagagccgggcacgggctccgcagccgggaaggtgcgtgcgcgcccgcaggcggcggctcagcgccgtcggggcactgcgggccaccaagcggacttgcagcggcagcgggcgccccgcgcccgagacgcgccgacgtcctgccagccgcccatcgcggcccacgtccagcagctcccgcggcgcccggggcgtgcaagcggcgcccaccgcgtaggtacagccgggccggagggcgaaggcgcgggtcccgccgggtacgcgcggctcccaggcggccgctcgcagccccatcgccggcagggcggcggcggcggccaggagcagcagcacgggcagcacgggcggcggcggcggcgccatggcccggagcccgagcccgagccgggcgcccgaacacaatccatgcacccggcgcgcctccgcatccacccggcgaggccggggagcggctcccgggcgcccggccctcggggcggtccgcgtcccgcctccccgggggccctggcggggactgtggggaccacgcgcccggcctcccccgcagcttccacttcgagagcactttgcgaaagtttgcgaagttggtttcaagatggctcctccgcgcgtcccgggagggcgccgcgcatcaacctgcggcggcggcggcggctccaggcggctccaggtggctccggcgcgggctcggccggacgggcgtgggaagcggggcgggcccggcgcggggcgggggctgagttcccggagcgggctgggcagctccgcgccgcgcagaccccggcggccggctgctgcctgggcggtgcgcttggcccgcgcccactccgcccgcgctctccccgcccccggcccggccccgccccgcccccggcccagcggcgtattgttcggccccggggggagccggctcggaggtgcgcgccgagaggatcgctatggagacgcgagggcgcggccgggacggggactggggccctactccccggaggcctccccacccagcctcccggtggggcggggccgaggcaacagggccgggaaaggtggggctggggcccccggtggccgctacccgtggggcggtggctccgcacctcgggctcggggccgcggctcagagcctggctccccaccccggcagaacagatccacggagaccgccgccaggagtgccgcgcgggtaggacccgggggcggaggactggggccgagaggccggggagcccccccccacccattaaggactgcggaggctgtcgaggagggttacccattttacagcaagacgcacggaggctaaaatgcttcaccccgactaaaactccctggactttgaagcccaataggcagctaccggatctgcgtcccacttggtttaaagcgcaacttttaaatgaaagaagaaaaccccggttgacataagggatttggagaggacggcggaggcgcgctcatctcccgcgtgcggcccgacccgagcgttcgcggacgcatcgcggaatccccgagcgtccggctcctcccgaagcgggttgcggggaaggcggggggctgcgggtcctggaagctgcctggggcaagcaagcacccgcagggatttagagctgtgccacagcccctgcccagcctcctacggaggacagcggggggcggggggcagagaccttagagctttcagaaaagtgacacacacccccgcctcctgcggggaaccacggggggccgggggcagctttaggtttgcgtgacgggtacacctgcctccggatggggcacagggataaagggggtggaggcttaggacttggcgaccccccgcatgggcggggctttgggactgtgccaccagcggctgggaagggcgcgcactcccttggtggcgctcggggcgccggagtccagtgcagcccttaggcctcccagtggtcggggacggtaggtgggggtcgcctcttctctcctagaagggcttctcctggggccggtcggagcggtgggggtgggagtaatgcgcagtcacccctagaacgggtctttttggcaagggagggtcggatcctgcagccaaatctctgagctgagctgagatgagtccagtctcaacgaggaccgtgggcggctgtggagaaccggaagggtttctcccccggagcgatgtgtctgtgtgtgtgtcacacgcatactcagccaacttcgctcaaagctgctgaaacagtgtctttgtgctgaagcccaatgtgagcattttcttcccagtagcaaggatttgaacacgttatattgatctaaaaggtggagttgctttggaaccttttaattcgaggtttccactggagagtcctgttgggaaatgtgtgtgtg

SEQ ID NO: 1562655 - DNA, 4001 bp, Homo sapiens
gtgcctcagcaagaagcctacggccgccccagctttcccttggctgggggtgggcagtaacaggcgaggaacgtacttaccacctgtggcgaggaaacacaccttccccaagaagaagctggcatccacatggcgcagggactcctctgtgttctggagactggggtggccaggccagggtgagaaaacaaaccagagaacaaaactttacaacggagaaagcagaagtccttgcttctctgatcctagaggccagagaatgacaagagggtgactttctctggagaaatatttgtcctttaattttttttttttttttttttttagatggagtttcactttgttgcccaggctggagtgcagtagcgcgatcttggctcactgcaacctctgcctcctgggttcaaatgattctcctgcctcagcctcccgagtagctgggactacaggtacatgccaccacgcctggctaatttttgtattttagtagagacggggtttcaccatgttgcccaggctggtctcgggcaatctgcccaccttggcctcccaaagtgctgggattacaggtgtgagccattgtgcccggccgttgtgtattttaaacattgtgcactgaccactggctcctctctcctcaccttacagattgacctcagccagcctctcccatcctcaccacttcccatcacaagttaggtcaccgtctcagcacagtcctgagccaggcctgcctgagccctgactgccccttcctctggctctcacctgtatttgctgtgaagattaaccacaaacacgatcaggtcaattcggggccgattcacactggagggcaaagggagggactttgccaagtggctgaaaaacaggaaattgcaggactcaagatatccgtacccccctcatagcgaccgtttaaatgctgcccttcatgtggaaagaggccgtcaagggctccccacctcatcctagccacccgaggctcttgtggccacgactccttgggccagcacagaggcaggacaggtccggtcctattcagattactcctgtctgattccctctgccagaaacgggctctgtttagtcaccacctcggcaaggggaggttgggatataagacggcatgggactagccagctacgctgcatgctgggagaaggaccagcctcagaggagggggcgctgggcttcggagtttagcagctaggaccgaatccctctggagtgagagacacgtgggcccaggccacagccgcggctacttacaccttcagctcggaggcgcagtcctctttgagcatcgagtccgccagctgctgcagaagagcatcctccgtgcccaccagctgcgcagggagagagagcggacagtcgagccctaggcacagcaccccctggggagggcctggcccttcgacccactcccggggggatcgggacaccgccagcaggcggctcggaggacatttcccgagaagtggaccccgcgaagcggcacgggctgggggcctgaggtttggacccgctgcaggcctgtgggcaccgcactctctactacccgaccctcgctcccaccgccggcctctccaggaggccagacccccagacgcgggaaaaccaattccaggcgcgggaactcgccaatcagaagctgggaaagggtccgccgagcacctattggtgggtgcgtccctcaacctcagagagcggctactccaattggttcagagcatggctctccgcctattccccgcccccgccacggtagcgcgcgctggcttggcgcctcagagagctcagttgacctagtggctgaagcaccgcccaggaggaaaaaccggcgggggaagcagggccgcctgcacctaccaagatggtggccgtgttcaggccgggcagcttgtccaggggcctcaacaccgacatcacagccgcaggaccaaccgttgctcctgcggtgcgcgccgatctttcaaaccgccctgagtccagcccctagagcgcggcctgggggcacgtgcctccttataggcggggcttcgcgggacgggacggggcctcttaaaggaaccgaacctttatctccttttctgaggggcgttccagcgctacccgtggaacacgtggtggacaggcctttggttccacgctccacagtaagcaggtttttagtgattcctttgttcactttcattcattcatgctcatacacagtactttttttttttttttttgagacagagtctcgctttgtggcccaggctggagtgcaatgcgcgcaatctcggctcactgcaacttctgcctcccgagtttaagcgattctcctgcctcagcctcccaaggagctgggactacgggcgcgcgtcaccacgcccgacttatttttttatttttagtagagacggggtttctccaagttgcccaggccggtctcaaactcctggcctcaagtgatcccgcctcggcctcccaaagtgagtgctgagattacagacgtgagccaccgtgcctggccctttttttttttttttttttggagcgtcactttgttgcccaggctggactatagtgacacgatcatagctcactacagcttcaaactcctgggctcaagtcatcttcctggcttagcctcctgagtagctggaactacaggcaagtgccaccatggggatctggccatgttgcccaggtgggtcgtaaactcctggcctcaagcagccctcctgcttcagcctcctgagtagctgggactaccgctgcacaccagcaggccctgccaattgactgcttttacagtgagtggtaagcatgctgttctttgtccaatgggagactttacctcatctttcaaggttccttgctgcaaacacagcctgagtacagagctgtcagggtcttgctttcttgacatacccagcaagaacatgcagggacgctcagggcccatagcaaactggttctgccaacagttatataataacttgttcactgtctctacatctaaaatgtaagaaacaagaggttagagactttgtcactttgtatgtccagcactctaaaagtccctggtacatcgtagttaataaatatttgttgagtgaatggatggattacattcatccattcattctcagcagtcattcattcatcatttcctatgcccagacccaatgccctaccctaggaagtcagttgaatcagacattattgattaacttagtttgatgggggtgggatagacaatgataacagtgtgttcattgttgtaataactgggagagcagagacactgtctagcctaaatccttcttactgcagactaaactaactgtgtcttgctcagaaagatcaggacgtaaatggccccatagagccactgccctcagcacagatacggctttcattcctcatggcatggggtgtggagaggacttcctgaaagtcaagcagtagtaggcactatgacaagaaaataaagtaagctgaacgccgtggctcatgcctataacccagcactttgggagaccgaggcgggtgaatcacttgaggccgggagtttgaggccagcctaggcaatatagtgagacctcatctctacaaaaaaatttttaaattagctgagcagggtgggcatggtggttcacgcatgtaatcccagcattttgggaggccgaggcgggcggatcacctgacatcaggagtttgagaccagcctgaccagcatggagaaaccctgtctgtactactaaaaatacaaaattagctgggcgtggtggtgcatgcctgtaatcccagctacttgggaggctgtggtaggagaatcgcttgaacttgggaggcagaggttgcagtgagctgagattatgccagtgtactctggcctgggcaacaagagcgaaactccatcacaaaaacaaaaaacaaacaaacaaattagccaggtatggtggcggtggcgggcgcctgtaataccacctactcgggaggct

SEQ ID NO: 1562656 - DNA, 4001 bp, Homo sapiens
ccacctccgcctcccaggttcaagtgattctcctgcttcagcctcccgagtagttgagactacaggcctgcatcaccatgcctggctaatttttgtatttttagtagagacagggtttcactatgttggccaggctggtctcgcttttttttttttttttttttgaggtggagtctcactgtgttgcccaggctggagtgcagtggcacagtctcagctcactgcaacctccgcctcccgggttcaagtgattctcctgcctcagcctcctgagtagctgggactacaggcgcccaccaccacatctggctaatttttgtatttttgtagagacagggatacaccatgttggccaggatggtctcgaattcctgacttcaagtgatccacccacctcggcctcccaaagtgctgggattacaggcgtgagcctctgcacctggcccaccctgccctactcttaattgttctgagtcagtttcctcatctacaaagtcaaagtggtgaatgagaccagtgatttttaaactttttttagccacagaccttttgttcaaaggaaaccttaaatggagatgtaacacgccagctgcttaaagacacaggctctgcaagagtgagtgtgggagtgggagggggctacagtctcgccagctgggccccctcgctgcttctgcccagctctccctgctgcagcactggcactgcagggaaccttcccagccacggcgggctgagcctgggcctgtcaagccctgactggacatcctcaacagagaatgtttatggagtcagcacgaagccatgagaaggggcagcccaggggccagccaccctcacaggtcctccagggaggggccctcagagcttctcagcagggacagcaggttcagagctgagacaccgggcacgtggccagcacagatctgcagcacgcgcaccaggcgctgcgccatggtggccctaaagccttccacctgcggggagagcagagaacagcagtgagatagaatgctggccctgctcccttacccagagcagctgcaggggctgccagagcagggctgggggcggatacttgggggtagctcaggtcaccactgcccaccacagccacgccctcattcatgccacacctcagagtagcttccaactgcctcagcttgcccaatccttcaaacaacctccggagacatccagagcctgacctcctgctcaagaggaaatgaaggcttaacaaggctggctaggtcgaacaaactgtctagggtcacccagctagtgactccagagctgagctctgaatcagggctacttccaaccaatgcccaggcagctcgggccccagatgctcaagaccagggagcagaagatacagggataggaaggagggaggggcagcgggtggccctcaccacagataagaaggtgccatcaaaaaggaatgggcccaggggagctgtggggccagagagggacaagactgctctaggcccgggcacagatgttctagacacgtccgctggaagaacacgatgctgcccagtgtctgtctcaaaaaagaaagaaaaagaaagaaaaagaaagaaaaagaaagaaaaagaaagaaagaaagaaagaaaaagaaagaaagaaagaaagaaagaaagaaagaaagaaaaagaaagaaagaaagaaagaaagaaagagcctccagacctgtctctctatttctgccctagtttcccttcagtccactctcctcccggcagccagaggggtccatttaaaacccaagtcaggccacatccctccctggccccaagccctccagcagctccccaccaggctccactgatccagccccaccattcctgatttctccaccccaacccgccctttgctattgtgctgcagccacccaggcctgcctgccagaccttgagcacaccaggcaagtcccacactcggcccatgcacttgctgttcctccttccacgaggtatctccgtggcctgcctgcctacttccttcaggtctttatttatttagaagtcctgtttgcaggggcgttccctggttaccctgcctaactcttgcctgtttaccaccacctgacacgccacgcctccactttccagcacgtcatttaccccatttgtttccttgactagaacaaagctggggctttttttgttttgttttgagacagagtctcgctttgtcacccaggctggagtgcagtggcaccatcttggctcactgcaatctctgcctcccaggttcaagcgattcttgtgcttcagccccctgagtagctgggattacaggtgtgtgccaccatgcccagctaatttctgtatttttagtaaagactgggtttcaccatgttggccaggctggtctcaaactcctgacctcaggtgatccttccacctcggcctccctaggattacaggtgtgagctaccgtgcccagcaggaagctggggtttttgactcttttgttctgtgctgtgtccctggagcctagaacagtggtcggtaccacagaaactcaggaagtatttttttaataagtcctctaagtttggtggcctttgttcctgaaatctatctctaggctgctgaggcttgggttccacaacctgcctcctgcagcagcctcgacccagcctcctgcctctggccaggcttcctccaatccacatcactccagagacgtgacccaaatgcccaggtctgaccacaatcatgactttgctcatgacatccaagaagaaatgacctaattctaccaccaggctcccagagctcagcaaatccttctgctgttgcttatgttacatgtctgcttatttcatgagattctgagagggcagggccaatatctgactcatttgtgttcccagggcccagcacagagccctaccagcagacctaggcaattatttcactgggccaatcacataccttcctgtgtttcctcatcaatggaacggggccggtaattcctgccacgcaaaggcctcaagatatatggtggggcttaaactcaattatgcagaagagtgttctgaagaggacaacaccagcatgaagaaggaggccagttcaaaccctgggtgctccatctgagggatgcaggcctatgtcctgagcaggcatttctgcagctcctgctgcggcgggaaccaggctgggacctcctgcttcctgcccaggccaagagagaacccaggacctggcctggcctgccacctcatggccacagacagaattacaccacttgtcacagggtgagtaggcaccactgtcccccaccagcacctgaactatggagcaaagatcgtgactcccctttagagatgcttcgtggcagacaaagtgacctattcaaagtcacacggtcagcaggctaggacagcagaacagctggctctacccctcactcacgagctgtctgaccctgagcaagtcgcctgttctctctgggaggaaagcctggcggggcaggcacttcaggtgtgcccaggcctcagggtcccatctgtgagatcagagtgctgatctggtcaggggctcaaaaagtagtcatcaactaggaaatcaaatgcgtgatagagtcaagtgtgtatcatgatcgatgcatcgagcaaggggcaggcctaatggctgctgccacatgagacagtgatgagacctgcccaatcctaatgtgatatgaaaacatccccatttctactggcgacagccacagactgctatcctctgaattctgcccttagaccagaggagtgccctgacaccaggataagggaccctggtctagacagtggtgatggattggtggtcacagatcatgtgctgactcggttctccctgcatttcatcactttgctttcggtaacaggcacaagacccagaacagagcagaaacacaactcttcgaaatgtatctcaaaaccaataaacaggtttccaaaggaatggagcaggcctggcacatgggtgtggcagtgc

SEQ ID NO: 1562657 - DNA, 4001 bp, Homo sapiens
atgggagctggctggggacgccaaggcagaaagcagtgatgactgacctcccacacagatgccctgtaagggtctggcgtctctgcggcggctggagcctgagggaagccttacagcccagtggctacaagcacagcagctaattgggccagtcacttccagcccctgcagatcggcccctgcatccctaggacgggagcagctgcctctcaggaacccatccggtttgaagcccagtggcccgcacttaggaagtgcttgggggaggcagtcatcttcctgaagcctagggatttacaacaaagtacaaacccttcgggcccaggtcaggcacctgttctccttgtgtgtgggccctggtgggtgatatttggggtgtgacatttctaccaaaggggacatgagaaataccttaggaaagtcaagtctcagatgcccagccacagataggtgaccccagggctggaaaccaagtgttggtcatgggtctgagaccacccctcgaccttggccccacctaacgttcaactctgtccccaccagaacccaacccacagatcctcaccactcagcaccagaaagcgcccagaagaactcctgacctcgactgcccacagggtctaaaggtgtcatcccaggctccgaatatccaccagagaatcttggcctccgccacacccaccccattccagctccgcacatccagcatgaatcctggcctctgccacacccaccccaataattaaaaagaaaaaaggctgggtgcggttgctcacacctgtaatcccagcactttgagaggctgaggtgggcagatcacctgaggtcaggaattcaagaccagcctggccaacatggtgaaaccctgtctctactaaaatacaaaaattagccgggcgtagtagcgggctcctgtaatcccagctactccgaggctgaggcagggagaattgcttgaacccaggaggcggaggtgcagtgagccaagatcgtggcattgaactccagcctgggcaacagagcaacactccgactcaaaaaaaaaaaaaaacaaaaaacaaacaaaaaacaacaaaaaacaaaaacaaaccctctgtcctcctgcagggctctctccagggtgggctatgcgtcctccatgtttaccaaagtcactcttctcctcatccggagggcctctgcggggcaagtagccaacccgtggcacggaaaccaattcccccatcccgagcagggagcacaccccacagaaagtcaggggccccttctttaacttcttaacaggaagtcctcaccctgcaagggcgcctctcaggtttcggatccctgctaaagaaaagcatctgttcttggagtaaactgcaatgcgcgcggtggggagcgcctggcaccccccctcgggatccatccacagtccgtcttgtccagaggtgccctgcggacagaccgcaccgggggccacgaccccgcgccccgggtcccacctccccgcggggatggggcgccggcctcccctccactgcgcggcgctttgtcctcgggttcccggagcagacggcggcgcacagcccggcccctggccccggcctccctcccgcctgccccgacccctccctggcgcctgcgctcccagggcccccggccttaccacagccgctcgctccctgcacccggtccccccagccgggtcccccaagccgcccccgctccctggccaggtccggccgaacccgggcggcggcgacactcacccgcgccgggggcgccggctccgggccccgggctccgccaccagcgcagcagagcccgcgcgggctccaggctcacggcgcagcgctgctgcttcacccacagcacggattgcagcggctccgccgcccccgtcgcccccatctccgccgccgggctcgtccgccaggctgggggcgcgcggacgccgaggggcgccggaccgttagcggcccctgcagtggcccgggcggcgggcggcgggcggcgggaggcggcgctgcgtcaccccgtacgcgggcggcggggaccgcggaggggacgggcggggcgggggcgaggaggaggcgtgggtagaggaggggccgggagccagggagagacggggggacccgagaaggggagaagagggaggaggaaggggccgggatggggctggccgaggccagggcgctggggccgggaggcggctgcctttctctcctctcttctccggcgggtgccgggtgctgaatctggcgctcccgcggccggccgggactcagtggcgccttccgcgcgggcctcggttcaggcggggtccgggcggcgtggaaacgcagtcctggcgatcgggcgcggcggggggcgggcctggatgggggcgccacgggcgacgtgaccttgggcggcgggtgccctctacgatcctggcgtcctgtcggcctgggagggggcctgcagctgggccccgacaggcaggtaaggctttcaggaggcggaggtctttttagggggcgggggcgctggccctttgaactgctctggggcctgaagccacagagcagacagctgagcagccgcccccgagctggccctaggaaccggagcctgggccccagacttggagagacacggcccctgtggccccaattcaccgcctccccaggaaggcctccttgaccccacagctgaaggaatcaccagcctgcagggactccagccctgccttcagagcacgccgtgcgccttcatgcaagctccagtctctgcgtccgcagtgcttaacacagccccataggaagcagccacaacctggttcggagggcacatccctccctgatttatcagtgaagactgtgctcacagaggttaagtcacttgcccaagagcacagggctccagtgtggcagagcctaggctcacactgacactgcctggatgtgacactgaggtctgaggcctgcccctcccctcggctcccctacccagccctgctgctgcaggcagaggtgaggtgggctaggtccacgtggccttgctgctgtgcctggcaccaggtggcagcatatacaggtcttaccctgccagctccttgtgactgtcttgtctatagggcgggaaccagccatgaatcattcctccctgggagcccagcccctgttcaggccatgcagtgaaggccccaggacagtcctgcagccaccgtgggcccagtcagagtcctagcaggcagtacctgatcgtggcacacagtggggtgtgcagcagcgaggcctgcccagcctcctccctccctcagctgccgctctgaggcctgggaaatgtggatctgaaacttacttggaaagaaaagctcatgccagtggcaggagggtgccgctgcatgcgaagagggttggcaggcaagggtggcatgggcaggggcccgagagcaccagcgtccctactggggaccccttccctgggcctccctgtgcttaggctccccgtgcccctcccggcgtattcacgttgctgtcccccggctgcacgccttggcttaaaatcctgcagccagaggtgggggcccagagacgactcagaagtgcttaggccccgaaggagctccgttgggggagacagcaacatcagttacaaaacacacaggagattcaatgaggctgttagggtgggccctcatccagcgcgtccttacaagaagaggaaatgttgaccgggctctgtggctcacacctgtaatcccagcactttgggaggctgaagcgggtggatcacctgaagtcaggcattggagaccatcctggtcaacatggtgaaaccctgtctctactaaaaatacaaaaattagctgggtgcagtggtgcgctcctgaatcccagctactccggaagctgaggcaggagaattgcttgaacccaggtgagctgagattgcgccattgcactccagcctgggtgacgagagcgaaactccatctcaaaaaaaaaagaagaggaaacgtgaacacacac

SEQ ID NO: 1562658 - DNA, 4001 bp, Homo sapiens
gcctttgcaagtgctgcttcttccccggaacactcttttctcctgtcacctttcccatatttctcttcatccgacccctgacacctcctccaggaagccttcctctccagtgccctgggcatcacccactgtggcatttttcacactgtgctgtccctgcctcctcgctctctctcctccactagctgatgactctgcagagcagagaccacacctcaccctgccacagcccgcctctccaccacagggtctgcagtgaattcagtatcgatctatgggtcacctacttattccattcacacagtaaggattttaaatagatcatctccctgttactggtttttattattcccattttacagaagtgtaaactgaggctcaaagagaagtaatttgccaaggtctcccgggcaggcggtggcagatcaactggtgcccagcccaggctcctccctctgggtccccaccttgccccactgccactctgtgcctgtgctcctgccctgctgacctcagggatggcgtctggcacctcagtgaggttctggtaccggcaggcaacgtgtcgcctggagttgtcacagatgcaggcctgtgggcagcgctgggcggcggcctgcctagccggggccagcagcagaagtacaagaagcggcagcaccaaggggacatgggtggagctccggggcctgggacggggagggagagtctgttgtgcacaagggccgaggccacatgctgtccctcacttagtcccagccatggtgcagctcctgccccaaaaacccctcagagcctcctcctttgggcccaggaaagtgccaatcaccctgagcctccctgccccccaccccccacgcagtggaggtcctatgattagtcctgttttacatgggaggaaaccgaggctcagaaaagtgacctggttagtccctttgcctctgcccaatggctcagtgaggacttgctgactgtgagaatgactccagttcagagcatgttctcaggctgtggtgaggctctggtccagggtaggctcggaagcagcctgtcctcagactgatatgatgccagctcccaggtggcaggagcataatggtaccccccagaaaggagggaggcatccagtccgggtccttgagtctttttttgtttgtttgtttaaatagagacaagccttgctctgttgcccaggctggagtctggagtgcagtggaatgactatggcttactgcagccttcacctcctgggctaaagtgatcctctcacctcagcctcttgagtagctgggactacaggcacacaccaccacgcctggctaattttttaattacttctggtagagacagggtctcgctatgttgcccgggctggtcttgaactcctggcctcaagtgattgtcccaccttggcctcccaaagcgctaggatgatagatcacctcccctgcccagctggcccctctgttctcagcctgtgtcaggcatggcctctcccccatcgctgggctgttccccggcccccaggagcctccccctcgctgctcactggactatcgtctgttttggagtctcctttgggtcccaggctccagcccctgcgttggagttggtggcttctccagagcctgtggtgaaggctgtgcctcagggcaggccagggaggggacccatggggacagatcgctgaagcgacaagcattcataatgcagggaccactgctgggctctcagacaagccccagaggaccagttcctggcagtggccacattgccacgtgtctcagagcccaccttgggagacccccttcctggagaaccccaggaagtccccagagcccctgcccgccagcctctgagaggcccagagggggcagagacttacctgaggccactgagctgctctgaatccccccttgcaccatcgggcccaaagactcacccctccatgccgcctggaactgctggtccagcctggaggcgcagcgcagggacaggctgtccccgcctggcaggagcccccctccacggcccgcaggcctggcagctgggacagggctgaatgggaggcattgtcggcagaccaggcaagccaggcttccccaggctgaggtgaagaaggggcgggcggcgggcgggagcagcggctggagttacagggcctcctgcctgccccagccgaggactgaggccccggcctgaatccttgggccagcccgacagggagggggcaccagcagctggcccgggagtcagcagtcctgggctccctcctgccatgtgggctgccctcccagaggctgcttcctagtctctgaaaaacacatcccattaataagtagctctgaggtcacagtgggggttcaggcccgcacctggcacacagtgggtgcttcagaacaggtgaccctttccttccgtttgtgcttacacattgacataaatagtttaatactggacacacaggattctagacactcatttttttcacttaacctcagattactgggagttatccaaattgactcttccgaatctcattattctgtggtatatagtattccattgtgtaaatgtatcacattgacttagccattcatcttggacattggctacctccaattttttgctatttacaaacaatattgcaaagaatatccaaatacgcatcttcccaagctcgtgtttgttttttaaataatacatccagaccatggccaatgttcatgtatcttgatttttcagattcctgcttctgatggaattgcatcttctactgtttgttcctttaattggaaacaggggtcaggcacagtggctcatgcctgtaatcccagcactttgggaggctgaggtgggaggatcacttgagcccaggagtttgagaccagcctgggcaacacagactctgtctcaagagaaaaaaaaaaggccgggcgcggtggctcacgcctgtaatcccagcactttgggaggcggaggcgggtggatcacgaggtcgagatcaagaccatcctggctaacacagtgaaaccctatctctactaaaagtacaaaaaattagccgggtgtggtggcaggcgcctgtagtcccagctacttgggaggctgaggcaggcaaatggcatgaacgcgagagccgagatggcgccactgcactctagcctgggcaacagagtgaaactgtctcaaaaaagaaaaaaaatatatacatatatatatatatatatatatatatatatatatatatatatatatatatgtatgtgtgtgtgtatacacttatgtgtgtatatatttatatataataaaaatataaatgtatatgtttatatatatttatatatgttaaacaatgaacatctgtgtgtacttttcctagactgcaggagttttttgttttttgagacagagtctcactttatcgcccaggctggagctcactgcaacctccacctccctggttcatgcgattctcctgcctcagcttcccaagtagctgggatgacagatgtgtaccaccacatctggttaatttttgcatttttagtagagacggggtttcgccatgttggccaggccggtcccgaactcctgacctcaagtgatctgcccgccttgatctcccaaagtgctgggattacaggcatgagtcaccacgcccagccctgcagtaacattttaaaaaaagaaatagtgccatgccacacagccatctgctttgtgctttttttgcttggcaaattccaatcaatggaacttcagtgtgctctttcgtcctttttttgagacagggtctcactgttgcccaggtgtgagtgaagtgtgatcatggctcactgcggccttgacataccagcctcccaagcagctgggacctccagatatgcaccgccacctccagctggttttaaaatttgttgtagagttggggtcttgctatgttgtccaggctggtcttgaactccggggcacaagtgatcctcccacctcggcctccc

SEQ ID NO: 1562659 - DNA, 4001 bp, Homo sapiens
tgcaggactggcccccgagtctgcaccgacctcttcagggcagggagctcagacctgggaagggaggggcagcacaggctggtggtcagcctgcaggtgcaagaggagggttggcctctccccctccccgcctgagtcggggtccactcactcaccatggtagtacttgcactgcttcagggcctcgctgaagccctcacacagggacaggtcactctgagtggtggaacagtccaggaactgcctgatctcgtaggcgcagggccccatctgcaggggctggggggcagcgggggtgggggcctgggggtacagtgcaagaggctgcaggatcagcttggagttggcacctggaggtgcgtttcaaacctggggccacctgcccctccccacatccccagcctgggtgtcccaagggtcctaggcaggctgagtgatccagcagcagaggcggctacagacagcatgtttctgctgcctttttttttttttttttttgagacagagtctcactctgtcacctagagtggagtgcagcggcgcagtctcggctcactgcaacctccgcctcccgggttcaagtggttgtcctgccttggcctcccaagtagctggggctacaggcgcccgccaccatgcccaacaaattttttgtatttttagtagagagggggtttcactatgttggccaggctggtatcgaactcctgaactcatgatccacccgccttggcctcccaaagtgctgggattacaggcatgagccactgcgcctggcctctgctgccttctaatgggcactttgggcgggtgcaggagagggaggagaaggctctaggaaagcccagtactctgcctgtactctcagagtatgagccccacccccacaagttctagcaccttcctggctcagctacactaatcctcatgacccctgacctagccacaaagccacatttggcttacggcggtggggttcctagcaggggaaaggtcatcagggaagtggctccccttcgcccttgcgcccagcggccacagtgcccagacctgggtgtggggagaacaggggctcaggaaatccaacatccctcccctctgctagggtgaggtgaccttgggcgagtctctgagccctcagggcctgggtttcccatctttaaagggctggttggtgtctctccctgggagcttagggaccctggcctcaagggagaggccgggaagcctgcctctaagtgacagtgaactcaagaccagtggactaggacccttcccgggcagagtcctgggctgaagcaatggtgaatacacgcggacactcctcactggacacttgggcagctccctgtgtggcctcgagataatcctgcctcagtttctcttggactcgctgctcacctgctggacagcaggctgggagggctccgagctccccccgctgaaggctccggtcagggcgctgcccatgacgtgtcccacagccgagcccacggctacccctgcggccgtggtcgccatctgagccatgagccccggctggcccgaaggggcgggggctggggcggctgccgagggcggtgggtgcgcgggcgggtgggcagagggcgcggctgggcggctgcgggggtgggaggaagcagggttaatcctggccagaccccaggctggagggctgcagctcctggaaacgacccccggagagatggacgacccacgtctccacacgtgggtgctgcacccccacccctccccccgccaagatggcgcagcagcagccaaggtcactctgcggacgcccttaggggagtgcccacacttccctaaccccctccccacagggcccttgtccccctcacacctggctggccgggaggccgcgctgcggcttccccgaggcatggtggcggcggtgggacccgggcgaccttagagacggcggcagcggtgctgtcgcggggacaaatgccgcagcgcttgtcacagccggcgcaaaaaaggcggggccccgggcggggcctcaggaacacgcccccagcgggaggcggcactgcccccaaccctatcccccttctcccgtcctccggacatctcccttccagcagctccgggtctcggctggaaatgggaccctgctccctccctgcgcctggcaggctgtgcgggttctggggacaggggccagtgtcgcaaagcgccgagggcttaaggagggcgacagtgccttctgttaggaccaccgcagagggcagggagcggagttgggggttgttgcgagccctggaggggagaggagacggggaggcgacgggatggggccagctgggaaggggacgcgaggctccaggctggactccgctctctgccccctcccggactcggctgtctgtcccctccctccagacagggtctgctgaccaccgcgtggcctgggagtctccggtggcctagggaagtgaagcgcggccctggggaaggcctggagcaacccatccccagaactcccacgagggggcgtcccaacccgtcttcgactgttggccaaaatgcgctgccaatgctggcagccttacgcagtgcccgcgggggatatgaggccccccgcgcggccctgaaccccaccggattccccgggccggcccgaccgcccccacctagtccctggccccgcgagtgcaacccccgacactaacggcctttacgcgacatccgagcagcgtgtctatcccaaaggcctaggagcatttgcccggctcggtcaaatctagcgcaagtttgaagcctgcggcctcgcaattttagcagcttcgttccaggccaggtgagctggagcgcggatttagaatgctttcctgctcttcgagaacttgaggttttaattttactttttacttttttttttttgacacggagccttgctctgtcgcccaggttggagtgcagtggcgatctcggctcactgcaacctccacctcccggattcaagcaattctcctgcctcagcctcctgagtagctgggactacaggctcgtgccaccacacctggctaatttttgtatttttagtagagacggggtttcaccatgttggccaaactggtctccaactcctgagctcatgatcctcctacctcagcctcccaaagtgctgggattacaagcatgagccatcgcgcccggctgagcttgaggtttttatggtcttttctgggtgactttgcagtggtcatattattactcctaggtgggggaaggtagggactgtccctcatcactgctgtgcctgcagaggactcctgacaccgggattgtcggcagggtgcaaccaagagcaaaagcacccagaagtgggggtgtgggtcaccaagtaagagaggaggcccctccataaggaaggagcaggtcaaggggcaaggggagtggtggctggggcgtttggccctgcctggcatgctcaattctgtgtgtgcacagctgtccccagccatgcatgctctccatggaagtcaggtgcagccctgtgttctctcacactgcagtcctttcagccagcctgtgaacagggcccttccccgccctgtcttcagtttctcctctctgaaggggggtgaccacccaccttgagggtggcctcccagtgaggtgagcacaccaagggtgggccattctttcctggcagactcaccaggcctggtccagccgctactcccttgttcatgcagtccatgccacctggttcctgtttgccacaccaaacaaactgaacacttctcatggtggtccccgggcctaaactgcagagagttgttacttcagctcccatggctgatggactgcaggttccacaaagcatggccttgcacctcggaggcacccaagaccacttaagtgggttacacaaatgaaaatgaggctgaaaggatgacactgaagcaggcattgaaatgccaacttttttttttttttttttttgaaacggagtcttgctctgtcgctcaggc

SEQ ID NO: 1562660 - DNA, 4001 bp, Homo sapiens
atcttagaaaaaggctctatcttatattttaaaaggcattatgccaacagggaccagatgtttgtctaattaataaagactgtactggccatgtacagtggctcacgcctgtaatctcagcactttgggaggccaaggcgggcggatcacaaggtcaggagatggagaccatcctggtcgacatggtgaaaccccaactctactaaaaatacgaaacttagctgggcatggtggcgcgtgcctgtagtcccagctactcgggaggctgaggcaggcgaatcgcttgaaccagggagtcggaggttgcagtgagccgagatcgcaccactgcactccagcctggtgacaaagcgagactctgtctcaaaaaaaacactgtactaaaccagataaggatataaatatgtacacgcttttgttattagtcctcacaagaaaattctttggtcataagagcaggactttattaggtcaaaatggctgtcctaacagacaccatcttgctgtcactcatgattaacacccagtatccgccatcaaaggctctgcccgcatcaaaaactcttccttacaagacactgacaccccagataaagccaaaacactctctttgtccacattgctctccttggactggtttgataaccactttccctatccccttttctccgaatgttaaatgttactttaatgtaagatttttaatctataacatttacatattaaataaatatactattgtgtacggtttacaatactgactgacttgtggaatggcttgagcctgtgtgcccatggctctgaccaccaagtaaacagggagtactacggaaaattgcttccttgggaactccatatagctcgtggcttttacaattaaaataaaacatcaataagtctgatcttgtggaaagacacaaatgtgcatggacctggttatgtctgaccttgcactgttcacatacaccactggtgggaatgcaaattagtatagccactatagagaagagtattgtgattcctcaaaaaattgaaaataggccgggcgcggtggctcacacctgtaatcccagcactttgggaggccaaggcaggtggatcacctgaggtcaggagttcgggatcagcctggccaacatggtgaaacctcgtctctactaaaaatactagccgggcatggtggcgggtacctataatcccagatacttaggaggctgaggcaggagaatcgcttgaacccaggaggcagaagttgcagtgagcccagatcgcgccactgcactccagcctggcaacagagagagactccgtctcaaaaaaaaaaaaaaaaaaaaaaaaggtacagatggtaatcatatatgtatactttatatcaaaaataaataattttttttaaaaattccagaggtctttcaagtgaaacacaatatttttttcaagcagaaaacctaagtccgaaggaggactgatgccctcctacccacttctggccaccctatcccatacatttacttagggacttatttagggacacgcagaacatcctcctacacagctcagtgcgtttccagtccctgcagcgcccagtagctaagactggcttctctataagtattttatagattgaacctaaagaatggcaacgatttctaacatctatagaatttttacgaagtcacttcgctctgatattgaagaatacaacgctgttcttcttatcctgtatgttcaggcctgtttcagcttgcaagtaatacgggaagtgaacttcacctcgaggatgatctactgaaaaggaagagagtcgcccacacactcccccttcagctcaaaactacagacaaagcgaagctcaggagactccgttcgcacaaaacgcttaagatgggattcgaaccaccaaacacccaacagaagttccccatatgactcaccgcgtgagcccacctggagccgcacactctccgcagcctcagccagcagagtggcgctaaacctgcagatacaaactccaccctcagccaatcaaaaccccctcccctgccgccggaccaatgaggagcagcagatgtggccgtcaggcgccgcctcaatgcctcctgggagttgtagtttagaagggagagcggaacttagaacccgggttcccctcgggtgatcccgccccctcgactccccagccaatcagcaacattagtctggttagacgctctctttgcttttccccacgagtgaccacggctagataggccgccggccagatgtggcgggggagagccggggctttgctccgggtgtgggggttttggccgacaggggttcccagaaggagaccgctaagctgcgatgctgcgtcgcaggcgggaagcaattatccccgctgttggaactgcggcggcccatggggccccgggcgggaggacaggttcttctgcccacagtgccgagcgctgcaggcacctgaccccactcgagactacttcagccttatggactggtacgagcgacggtttcgggaaacgggcccgggcgagagacacgtcgaggtctggcctgcgagaggggaggacggatctggctggcggaagagaaggcgggactgatgggggggcggaggtctagagagcaggcgtgagagaagtgtcttgatttctcaggaggaaattgagaggcggggactgagggaagcaacgttgaggtgtggagaagggagacgaacgggactggaggggcgggcgctgaagttagaggaaataggggggccgaggctagaggggagggagatttgaggggcggtacctacgggaaagggaaggagaagtcgaggggcggaacttgaggaaagggtacttgaggggcagggcctgggagactggaagacttgaatgaatagggtgagtaaggtttaaagttgggttgatgtatttaagaaaggactgcagaagtgtgatccgagattagggagtaaagcatgaaaagcttaatattgtgggcgaggcctgagggaaaagtgagaattggagggagagggtccaataaatggtttttccccctgagactgaggttcttggagagacggggcagtgtggatagagctgaactggtaaggaaataggacagactctgggagtagaatgtgaaaggggctgaattaaaataaaccgggagagacagggatgaagggacctgggccgtggaaaagttagggtggtattaaagaaaacatgattcagtcacacttgttcaagcaccagaaagactttcttcaagaccatcttgtagaggggccactgcaatagggtcttgcagttggggagagagattggtctcaactccaaaaagggcatgggcagaaggaaatttgtagccaaggagcagagtaaacgggattctggctaagccgacctaacgggattcttgctgaagacaggccaggctgcttagacaccacctgggggatagtagaggatgaagaatctgatcagagatctaggatgatcaaaaatatgaggatcgaggattctagctaaactgacttggcaagattatttgccaaaactgtattttacaagaaagcatacatctgggcctaggagaaggttcagaaatctgactaaagtttggccaggcaaagaatctttgtctgtgtaatttaggaatgtcccttttccttaactatgggatcttccccaccagtcactgaacatgtatgaggggctacagtaacgctgatctttaagttcctcaggcatccccatcttgctcccacctcgaggtccttgctcttgcaattctacctggacgtctctttcctctgatctttgattactcatcatcattcaggtttcagctgagtgtcatctctttgtccactacatctgctacactctctgactctgttctgtgtcccttcataggacttaccactttttgaaattaactgcttatatgttattgcatcttccccataagagcaagaaccaggctcatggtagataaac

SEQ ID NO: 1562661 - DNA, 4001 bp, Homo sapiens
tgaactcctgagctcaggcaatctgctcacctcagcctcccgaagtgctaggattacaggcatgagccaccgtgcctggccttggcaatcatttcttttttctttttttgtttggtgttttgagacagagtcttgctctcacccaggctgaagtgcaatggcatgagctcagctcactgcaacctccgcctcctgggctcaagtgatcctcccacctcacccacctcggctcccaaagttctgggattacaggcatgaggcactgcatgtggcctctggcaagcatttaaaagcctgttctgtgacagcccatgacatcagatccactcaagtggagggctggatagagcccccgacacatccgctggcatggaggttcagctcaggagtacaggagccctgaggaggctcctgactcaccgctccatggtcccaaacagccagtggggctccttggtgaaaggcatctccatgccatgaaattgcgccatcttcgtggcaatggctgctgacaacactggctctcgaagctcttgagttttcaatggccgactctgcacccaggaagctatcagggtggtgatggggctggggcaggagtgggaagggctggggcaatgaggggaagtcagggttttgggggaaattccctacttggggtgagggatgtggaggcagacattgggcactggggtagggttagggggtggaggtgccttggggaggagagggtaggactgggcccgtactgggatgtactgttccagccggccctctgggaagactccgtacagctggggccccagcgaccgctccgcaagtatggcgaacatcacgctttctagcaccagggagtccacgccctgaaaaaggatggacagcaaaggggccaaggcaaagtggcacagggacacacatgagggctcgccttcctcccaccagagctgcgacttctgatccaattgcctggaggctctggagcacaggctttagcgttggtctatttttatttagagatgggggtctcactatgttgtccaggctggtctcgaactcctgtgctcaagtgatcctctcgcctcagcctcccaaagctctgggaatacaggcccaggcttcggtgtaatgaggtgttactcagaccgtgaacctcggtgtcctcaactgcgcaacgggaacaatactacccgcatcgcgtaagcgacaggccctaaagccactggtgctgcggcgctcacacccccctcacctgcaagatggctccgtacagccgcagaagcacctcccggggctcctcgccaacgctgggcaggtggtccgggagcgagcagcggaagagcaggttgctgaggcctccgctgcagacccacaccaggcgcgctcagcccgcggccggccctacctgccgcggccccggccccctcccggccaggccggccccgccccgccccaggcgcgggcgcaagaggggggcgaaaacatggagcatcctgagggccccgcggctgacccctgaccccgatccgcgcaccggagaggctgacccctgacctcccacctcacggggtaaaccctcagctcctcgggctgcactcggcgccaggccccgcccaagtactcccggcaccattggtaggctcggcgctcggcgtcacgcgacagcgacgaggcgcgccgccgttttggggtagtgtccgggcacttagactgctgcaagccgtctttggccaggcagccgccaacagccccgcttccggccacagctgtcgcctcggccgccatggcgcgggctcgaccgggccccaggccaggctgcgctccgctcccttcggacgggctcggttccttccggccgcgctcggctcctcttccggccggcctgggcttctccggtcatactcgggtctctccggctctattcggctcacggctgcggcgctcggctctctccgtgccccggcccgggggctctttccgaaggccgaattccgcagatctctgccgggccccgcccctatgggcaaggaccaatggtctctctctgggcggggctgctgttggacggcctgggccaatccgaggcgccggaggccaatcagttggcggagcggcgcgtgcgcgggcgaggaactgcccgggcgcggtagcgtacgggaagaccggagaggagctgcgtctctgccccgtgggagccggcggggcggcggggcggcggctgcagctgcagctccggcgcgagggctcccttgccgggccctcttccccgacccctggggcgctccgacaaggaagagccgtccagcgcgcgtccgtcctgagcgtgggtgaggcctggaggaggcgcgcgcgctaggcagggccgcacagcgcgggcagagtgcgggatgcgggcacccggtgggtacgcagtaaacatttgctgaaggaatgtgacccttgggacagttccgatgactccagttgcataaatgcccagtctacacggggactccctggccggtagagccgcacctctgaatgaggagtcttttgctgccccgcttgagatgcgcgtcttcattcattcccctctccccctatcctcctcgtctcctccaggcctagaaccaattacagagtcaaacccaagagccgaagaaagtgaagactcgcagcttgccgcagccccctcctcggcctgcgcacctcccattgagggcgtcctgatttaaacgcgtgcctcctgcatttctgcttctgccccaggctagagcggcgaccaggaacgctggacccacagagatctgtggcaatgtctgtcgaaccatggtgttctttggggcatctgactagagtattgtttgataaccagaaagaaatcaaaaattggtgatcacaaggctaatgtcacttttgctgcagtggaaaatcatgatcattctgtttaaatctgagtcagttttgagacctagagcccattaattgacaaggaggcttggttcctctcaggaaggatcttacaataccagcatctgagcatataccaagaaatattcctccaatccttccctaaagggacctagagccactttaaaaagtaactggtccgggcgtggtggctcacgcctgtactcccagcattttgggaggccgaggcgggcagatcacttgaggtcaggagtttgagaccaccctggccaacatagcgaaaccccgtcgctactaaaaatacaaaaattagccgggtttggtggcttgtgcctgtaatcccagctacacgggaggctgaggcgtgacaatcccttgaacccaggccttgttgccgcgagccactgcactccagcctgagcgacagagtcagactcagtctcaaaaaaaaaaaaaaaaaaaagaaaactgattctggctgggggcagtgggtcacgcttttaatccctgcactttgggaagccgaagtaggaggatcgtttgagcccaggagtttgagaccagcctgggcaacatagcaagaacctgtctttacaaaaattaaaagattagctgggcgtggtggcaggtgcctgtggttccagctactctggatgctgaggtgagagaatcacttaagcccaggaggtcaaggctgcagtgacctgtgttcacgccactgcactccagcctgagcaacacagcaagactgtctgaacagcaacaacaaacacaccaaaaaaactagtttacttcggaaaagggactgtctaggtctttgaagggctgatacaggatctgagctgacactgtttccaggagccctgaagcatcatggccctctcattagggtgcaggcttatggaaatcagatgataagcagaattcccaacccgagtcctgtggttacttctctggtctcaatgcatacttgggatgtttttacctagcagagggcggagcgtatacattgatcccaggcctttggtaccatatgtaaggaagcgcaaagtagaaacctttgaaactcctcaccctactgaaacctttccaag

SEQ ID NO: 1562662 - DNA, 4001 bp, Homo sapiens
tatggaaacagcgccgcgcacagaaaaggaaacttcattccgtctgttaagggcagggccgggctagtggcaggagaaggtcagctgcgggcgcaggcaggagcggatccaggagccgcgtcggggcgcagagccggacgttccgaggagcctgcgcgccgcgctacccggcggaagccgcggtccatgcggggctccccaggcttatccaacgcctcgcaggcgtggctggcaggaggggcccggccgtgcccagcgccctcagacgtagttcttcttgtcgtagtcgccggtggccgtgggccgccgcggcgctgagtacttcacggggaagctgaggtcgggacggccggtgcagacccaggcgccgcagcacaagaggcagccgcctaccatgagcagcgcggtggccgcccagccgatgtacagcgctgcgcccagctcgtacttctgcgacacgggcacagacgggtcgtaaaactcgcggacgacaatgttggcgaaccagcagagtggcacgagcgccagcagcccgcaaaacaggtagagcacgcctcccgtgagggccacacgcgccttggccgggcccggggccacgcaggtggtgcactgcgcgcccgccagggtcacgaagagcgcaacgaacgccagcagcacggcgctcacggtgagcgcccgcgccgcctgcacctcggtgctcagagccagcaccgagtcgtacactttgcactgcatgtgcccggtgctctgcaccacgcacgacatccacagccccttccaggtggtctgcgccgtcacgatgttgtggtccaggaaggcggtcacctgccacatgggcagcccgcacgccaggatcagacccccccagcccaccaggcacagcaccaggcccaggatctccaacgctgcggaccccatggctagaggcgagacgcgcacccgaaggcccgcagaacccccaaggccgtgctgcgcggcgccctgggcgggccctggtgcctttgcgcccgcgctcccggctcttggccccagtccgtttgccccgcgggtctgtcgcacctcctgggtctgccagctcctgccggggggtaccctctttgaaggttcgggggcggattctgtcccccgggcccggccccccggcccgaagcagccaatccgtgcgcgggtcatcgtgccgcagccaatcacagagcctctggcagctgaagttagggaaacaacggctcttgaggggtagctgagggcgcgggaccgctccccgcccggcagccgcccccagccccacccgccgttgtcctagtcgcggccgagcgcattctgggctggcctagggcgcgcttcttgggccgcctccctgcgcgtcccggccccgtcacttcagaaggcgctcgacccccagtctgcaccacccagtccactcccacatccccgactgagccgggtggtctcttccactcgagccagctccacttccctgaccaaggtttgcagaagccccccaccccgtcaccgccgtagaggccctcgtaggggggctctccagaaagcccgccccggggtccaagccccacccaggccctttctcgcactctcactctccagccccgctctgagtcccagcactgtctctctcatcccatggcaaacagagaggccaggcaggcgtgtggaggtcaggcccagggccccagcctcaccccccatgccactcactgcctctctggagcctgagtctctggcaaaaagcggtggcacaggggctttccccctgcctggcgacccccactctcccaagccgcaggggcttcccagacctctcaatcttcacaggggctgctcctcttcctgcggtactgcccgcaccccatccttgggggcccagttcaggtgacaccacttcaggaagttcccagtgacccagcacactgggtgtagcacccaggggcagtggtggccccaggcctagcagcctgctctggccttcagacaggagagacaaagggacacggaggggctgtgccctgccctcccaccagtggcgatggtgtccctggcaccccagcccccaggccaccctccggaagccaacttggagtttcctggccaggaggaagagcccccatccttgctggaggagggaggcgcgggatttccgggcattcttctgcacaatggcccagccatttctcgaaaggtccactggtgtggacactccgggccccctgaggctcaggtgggggcacgcggctccaaaacccacagccccatgggggcaccagcccctttctagtagttctttccccagtctctctcggcccctttgtttccagtaaagtttgaactccaggccctggactgaggccactgggtgcccagttcttttatctggtctgtgctcagttccattggacagggccctccatagaaaaagtatggcactgaggctggtcacagatgtgggaggtttgatgactttctccctcctggggcccggttcccttctcccccttcagatggctctgagatggtaaatgagataaggccagcgtctggctcacctagtgtggggaggttctgaaggcaagtgtgcccagccctgaggctggaaggaaatcataccctctttgctcagccccacgtggcctctccccaccaggtatggctctgaggaccactgccttctcccagctatcactttagtcactgccttcctcctgctgcagacccatgggccatgccccttcctctacagaccctcctggacatctcctcctctgtgtactccaggggtacagctgacccacccaccctctcactcttactaccccctaacccaagcccagggaacttccccagatccccctactcccagcccttccatgccaccatcttcctgggatgactgctgcggcctcctcaggtcatcagggacctgcccttgcccagctaggccacccaccccaccaggcccctctcctgggcctcaccctacctaagaccctccatggctcacattgcccatggacgaagagccgactcccagagcagctggattgatgtgtacctgcatgcgctaggactggccagtccagccaccagtcttggtgcggccctgagcacacactctgccccaggagacttacctgcctatgggcctcacatgggccgtctcttaccttggcctcttctgcccgcagcgtgtatctgtcaggttgggtcctgctcatcttctaagatgtgttgccgaggtcatttccaggaacaccttgctgcaccgtcccccagcattgcttttagaagcttgagctggacctgtccttttgcttgccgactttcccacctagtatccaggaataacctccacagggtggctgtcttcatgcgtctgtcctgcacaggaggctgcctgttgccctctagccagcttggagctgcagccagcccaaggctctcccttctcacctggctgcctgtttttcttctctcctagctgtcaccctagggtggccccagcaagctcatgtttctttggcggcagcctcacagcatctcagggacgtggcagaggagtctcaggcttcacctttcacaatctggtttctaccctgaccccactatgttggtcgaggccccaggctgcagtggaacaatgccaatgcagagaggcccagagagggccgcaggggctgacgccaccccagacaaacccacctcagatggaggctggcctctgagtagcccaggccagactccggaggggcatgagggtgcacccacctttcctgccactcatggagggtctgctcacctacttcgtggcaagcactgtctctaggcagagcacacagcacaagaagctcctgcccagaaggagctgacaggaacctatcaaccaagaactgggcaggaaagacagtggtgaaggcctctctgaagaggtgacatttcacagggatccggggaagaagttccaggcagagcagaagcaatagccagtg

SEQ ID NO: 1562663 - DNA, 4001 bp, Homo sapiens
ggaagaaggataccagatccagaacatagacaagaaaggacacctacttttgaggtaacaggaaggcaggaaagggtggctgcagacaaacatctaagtctgcagccatataggtgagaaacatcccagttatggcttcagttttctccaagtcatctgctggttgcaaggcaggagtggcaggatcagggatttaaggaacaggctgaagtctcgaaatgtctgtagtgaaggcagtgtgtgctgactcagtgtttgctctacagaatgcacagcagcctcaaagacccagtcagtgttagagaccacaaaccagacttgcattcacgtggctgcccaccacaagccacaagcattttccagataatggaacatatcaactctgatggacattacaaatcctgatggacattagaaactctgatggacacctaaaatatcttgttgctttcttgccctttgaaaagaacatatttagatagtggttaagcacaggcattggaatcagacctgggttagaactcaagctttgtcacttactagccatgtaacttttgctgaaggaattagaatattaacctcagtgacccatggtagaaaacaggatatcactatctgcctcagttatcatgaggattaaattaaaccagatttataaaatacagtagtctagtgagtggcaagagaaacggctcagtaaatgataactacatcatcatcattattatgagcagcagcagtattttgctacctcaacatgactggtgctggcttagcttagtggcagaatgaagcccggacagatgtcagggcactcccacctccatacaacttccactgtgtcactaaccaagtgaccctggcaggatcccctggatatcaagtttccagtctgcagaatgaggggactggactgcactacacagttcccaaggcttttcccgtctgcatctagggctaacagtgctctgcactgtgaaaataggaactttcaagcaagcacgttcctcgatgtactactttgtggtcaaaaagacttgagtctgaatcctgttcttattgaatgaagatgagttctttaacacttttgagactcggtttcctcatctagaaaagagtaagcgaatcgcaacgaatggtagtgtgatgatttaacacagagcactcagggaggagccgctggctatccctcctctgccgcacctcccagggtaaacgtggggaccagcaccgctcccgggcagacccgcgagcggcccgcacgacgcccgacctgagcctttgctcaaagcagggggccagtccttatgtttctgaacacaaacaaatggagaacaaactgggaccttattaaaaaggcaggctttgggggtgttactgcattgaaaagccctatttaggcttggccctgagaaatttttctcttgggtcacgcatgttcacggtcctcccaggcgaagccgccctggggacgaaaaccgatcacagaggcaaactcaggggcgaataaggaccgcaggacgccaaggaggggcgtggagctgtgggatccgcgcggcccttgggttgccctgcctgcagcgggaatttgtgtgcctcctcgcgggcactgagcggggcgtcccagggggcgttggcttccacccccaccattccccagccggccccgccggtaacgggcttcggcgacggcacccaagcgggtcctcaggagcggccgccgcgcccgggacgccgcagccccagcccaggtgggaggtcggaaatcggcgcggccagctgggcagcggctcagcggggctgggggcgcggggtcaagcctggcagtccggcccggcggaggcgcggctgacagggcagccccccagcccgccgggcctcacctggaagtgctcctgaaagcgaacagggaggatctgcgccatggctggtgcgggacctcggcggcggcggcggcagcggcaggaatgaacgccgacccctcgcgcgggctgaccggtggcgacggcgcaggcgcagtgccccgagctcccggtcctggcccccgccctcctccctgaccgcgccccggcccgcaccccctttccccgccccttcccccgcccctgccccgcccctgccccgcctctgccccgcccctgcccccgcccctgcccccgcccctgcccccgcctctgccccgtcccgcctgcgcggatccctccgcccgctccgagggtccgcggaaagtagtcccgcgcgccctctgccctgacgcggtgtgtgccagctacccgagtgaaaggttttcgggggattaatcctgatggggtctgcggcggcccttgcccagcgccttccacatgtggagcgggccagtggtgctagttctgccgccaactctggacggttgagttcagggccactttttactcaggcacggatgtgacagaaagatggaaaagggtcttggaagaaccacatgtgccgtataacgaacgaccttttggtctgaggaggaccgtgtatatgacggtggtcccataacatgataacggagctggaaacttcctgtcctctggtgagggcttagctaaggacatttcctctcctgtatttggagatacacgtacaggtatgtcattaccgtgccaggggaataacgcacctcacacgcggtgcgggtttgcggcctagcagcagcggaccgcatcagctgcctagttgtgtagtggctgtgccatctgagtttgtgtaagttaccttgtgatgatcccacaaccgagacgcatgtctcagaatgcatggatgcatgggacgcgtgactgtacgtgttacagacgtgtttcggcgtgaggctcggcccctgctcctttaggaaacacctttcctggctcatgcggtttctagagaacactgtgtcggaatatcaatgtagagagtcagcgaaggtcatctagcagcagatgaccagccccaggccagtgaggatcacccagagtgcccgtggctgcacgacagtagtagcaggtggaagctggagcccacacctggtttgcccagcagccagttgtttttccgaggcaccgttggctgatgttttgcatacagatgattcagctgcataaaagatgtctgtcaggaaagggaagcccttggcattcagcacaggcactccctacggggtaatcgatagccgtctctgctgcttcccatgttgctcactggtaattttaagaaatgaacggcccaccttgaataagacaaggatggtgcaattatttgcgcaatggcttgaccatctagtagccaaaaatatgttaaggaatagaacagactgttcactttcaaattaaatctcttttccagtattagccaagacctctgcagcccgccctttctaaaatccatgtggcctcatccgctaaatatagagctgggttttgctgtggttagtactacatttcccaaatctctttattttggcaatgatgcctgtgactccaagtaccctttaccccaaacattatataaattttttagtaattaataccatcactccctaaatcaccttccccagggctttttggggattaaaactaaaattttataccctaaaagaaagaatttaagaaaatcatagttaagcaaagtgacaggattgttaatacgtcgggacctcaagtggggattaagtttcaacattaattttagaggagacacaaatctttctgtctcttcaaaccatagaagagacagaaagcacaacagttatttgaatagacagaagtgaatataagtgatagttgtagttaacaggaaataaagttgttaatatacttgtaaaaaaattaaatgttctgacttgaaagggactttaatattctcaccacttgtaggtaacttgctaagtaaccctaaaaaaacctttcaattcttttttttttttttttttttttgagacaagagtctcgctctgtcgcccaggctggtgtgcagtggcacgatctctgctcactgca

SEQ ID NO: 1562664 - DNA, 4001 bp, Homo sapiens
tgtaggctcaaaaactgggtttatcaacagctccattcatctttgtttttatttctttctttctttttatttttttattttattattattttttttttttaaagataggggctctctgttgctcaggctggagtatagaggcaagatcatggctcatggcagcctccgcctcccaggctcaaacgatcttttcacctcagcctcccaagtagctggaactataggcccatgccaccacgccgggctaatttttaaattttttgtagagatggggtctttatgttgcccaggcttgtttcaaactcctggcctcaagtgatcctcctcggcctccaaaagtgctgggattacagacatgagccactgtgcctggcctgttatttttgtttcctcattaaatgcttgactgcttgcatcatccagcaaaaatcctttgctaccaagtctcaacagatggtcccgctggtagtttatgaacacaacacagaacagaaaatggacggggactgttgagaggaaagaagcaggtctctgctcttcttgcacagggggagtgctgacaaagaccctccctccccacactccagccaggctccttagagtccccttctccactgggcctcaccctggcctatctaggctggaacgaacactaacatagctcctaacagctcaaggccacattcccagaacgatcctagccccctctaaagtgcctgcctgagaagttcaaggctgccacaagaatttcctgtgtgttccagccaacacctgaggatggggcccctgtctcccagtctctgtgggaggttgggggcctgacttcggtaagccccagtggcaaacccagatcagttggtttcacaggggccaaccctcccttcccagttttggtgattttctgtttccctaactctactgagtccccaccccttcccactccctcactctccctttaaactccaggcacatctagacaaatcagcatggagccagctttttctcatgttgtcagtagttaccaagtaaaatctgttttttctgcattaactagtgtctcactgggctctgcagggcagctcctacggtccctcaggcttggagggtcactttaaacaataaaaagcaacaggacacaaaaatccctggctggaaaaatccaaaaagcaggtctgttagcagggcaggcccggagtgacttcccctttctctaacattcccacgtggtcctgcacaccacacatccccccgaccctggggagtcctgggccccttcctggtggagcagcctctctcttgcagggaaaggccctggggtaccccaaggcctccaacagggagcctgttggagaagtcaccaaggccctctgagtctggggctccacagaccctcccccaggcctcctgcaactctccagctctgagagtctgatcccagcccaaggaccaagtgggaccctcccctgtgactctaccacaccctcaccaggtcaagccctactccagggagaggcttatcctcctggtctggacccccaacccagtcttgaagcgggatctctcaccgctatctggagcccctcatcacagcacagatcttcaacctcagctttccacaaggagtctggggaccccaccccggtccaaagatccccacccaaggtccgaattccccagttcccatccagattccccaccccaagtccggagactcccacccaacgtcagatcacttcacagcggtccgaattccccacaccctatcccagtgttccaccctaggtctgaaggcccccgccccgaatccggccgcattcggccccggtctagccagcgctctcacctctcccgcgacggcccgcccgggactggacccgccccggtccggcgcaggcagcgcggcgggcagccctagctgccccagaagccccacgacgatggcggcaatggcggtggcgctgcggggattaggagggcgcttccggtggcggacgcaggccgtggcgggcggggtgcggggcgcggcgcggggcgcagcaggtaggatggggtcggggcgtccccgcggtaggtgtccgcgcggccggggtgtcctcgtgagggtgtccgcgcggcggtggccagggtgtccccgtgggggtgcccacgcgggggtgtccacataccggcctcttggtctagtcttgctcaggagtccgggctgcttctagccacaagtagcccccttcccaggtggggaaactggggctgggtgccttgtctaaggtcctgctgtgctgactgcacctgtggtctcccagagctggtatcccagtaacaactacagttctgaagatgatgatatcccacctcccgaggtcaccaggcaccggccccactggccagacttcccaacttctccccagacccctagactctagaggttagaggctgcacagagcaatgggaggatacacactcgtcctcctggagcccctgaagaacagttaactaaatcaggacaataatcataactgagcactcgaagcagaggctgggtgtctggtcactcaggacagttcaagcctcatcctgtaggacagactcccctagatccgaccagagcgccaccatatctgttatgtgtggccagtttcattccatgcacgacaacatggtcccccaccatgcagggggcccctcgacccagccccctggatgcttgtgacagcgagcagctctccccacaggcagtgagtgtagaggggtgtaaggacggggtcagggctccttcccagggatggcggctatgggaggcatggtggctggccctctgcccgcggtggactcgggagggagggctgactgtgtgtgtgaatgggcagagttggtgctatggaggttttgggggtctccaggacggagggtggcccaacagagttctgggaggcagtcaccacctcgtggccttgctgagacctggaaccctcagccagggcactccatctttcaaagcttcttggctgcatgcgtcaggtgggcaagctcaggaaggttaaatgcacccgtgctggcggagtcccataaaaggggattcggcatcaaaaggaggaaaaaggttcaaagggcatttatcatggggttcagaatcacggatgtgaggggcggtagtggggacaacagacagaaaagcttccccttcccatactcacagtccagacacggcaatagccaaattccaaatttctaggtattctggactcagaatggggaatatcatacgagacttagggggataatgcccttatcttcctattttaagggaaagaacaaactgaaccttctatgcaaaataggatgatgatcctggtcctcccagtaagaaataaaataagtagtctccaggcattcctttccgccagaggagcaactgttttttaaatagccctttcgtgcccagtctgttactaaaccatatgagttgtttttttggggttttttttttttttttttttttgagacagtgtcttgctctgtcgcccaagctggagtacagtggtgcgatctcagctcactgcaagctccgcctcccgggttcacgccattctcctgcctcagcctcccgagtagctgggactacaggcatctgccaccacgcctggctaattttttttgtatttttagtagagacgggatttcactgtattagccaggatggtctcaatctcctgacctcatgatccacctgccttggcctcccaaagtgctgggattacaggcatgagccactgcgcccagccgagtcattttttaatactactgcatgtgagttaacacaatcattcccaaattgaagttttagatgggccctcaaaatttttaggatatggttttcctacaggtttatattgaaagtatggggtatctcctattactcctctttttatttgtcttaaaggagaaagggagaggccagagaccaaatgtccccatttccctatagctaatctctctggaagaca

SEQ ID NO: 1562665 - DNA, 4001 bp, Homo sapiens
actctgtcacacagactggagtgcagtggcgcgatctcggctcactgcaacctccgcctcctgggttcaagcgattctcctgcctcagcctcctgagtagctgggattataggctcacaccaccacgcctagctaatttttgtatttttagtagagacaaggtttcaccatgttggtcaggctggtcttgaactcctgaccttgtgatctgcccacctcggcctcccaaagtgctgggattacaggcgtgagccactgcgctcggctgttttttttttgttgttgttttgttttgttttgagacggagtcttgctctgtctcccaggctagagtgcagtggcgcaatctcggctcactgcaagctccatcccccgggttcatggcattctcctgcctcagcctcccagtagctgggactacaggcgcccgccaccacgcccggctaacttttttgtgtttttggtagagacggggtttcaccatgttagccaggatggtctcgatctcctgacctcatgatccgcccgccttggcctcccaaagtgctgggattacaggcatgagccaccgcacctgcctggcctttttgtttttaaagacagggtcttgctctgtcgcccaggcgggagtgcagtggcgtgatcacctctgccgcccaggctggagtgcagtggtgcaatcagcttgctgcaaccttgaactcttgggctccagcagtcctcctgcttcagcctcctgagtaactgggactacacaggggcatgccgcagtgcctggctaattttttaaaaattatttttgtagagacagcgtcttgctatgttgcccaggctggtcttaaactcctggcctcaagtgattctccagcctcagcctcccaaagtgctgggattacaggtgtaagccatactgcacatggcttctaacagctcaaggccacattcctaaaatgatcccagcccccttcaaagcgcctgcctgagaaagtcatggctaccaagagaatttcctgtgttctggccaacacctgaagatggggcccctgtctcccagcctctgtgggactgggggcctgacttcagtaagcccccgtggcaaacccagattggtttcccaaggctaaccctcccttcctgcttttggtaattttccactttcctcactccactgagtccccactgttcttcctccccactccccacttctttgcacaactcggagcggagctcggctctctcccctcctgtcactggtcaccaaatattataatttccgtcctcaccactttaatgtccagctgtgtttctctgtgatcaggggccaggacttggatctggatgggaaccaccatccgatcaaccctcggatgcaacaaccggagcacacagtgtacacagcgatccgtgttatctccactctgcctgctcatgcgggagtcacatggtttgatttgtgatccagtggtccggaagaatatcggatgcagcagtgaggacagacattgcttctaatgattttatgattctgagtaaggctctgaggcgctaagagtcccaggctttttttttttttttttttgggacagagtcttgctctgtcgcccaggctggagtgcagtggcataatctcggctcattgcaagctccgtcccccgggttcatgccattctcctgcctcagcctcccaagtagctgggactataggtgcccaccacaacgcccggctaattttttgtatttttagtagagatggggtttcaccgtgttagccaggatggtcttgatctcctgacctcgtgattcgcccgcctcggcctcccaaagtgctgggattacaggcgtgcgccaccgcgcccgccccaggcttcttctgaacgctacctacctcctgggctggaagttcttcttcctagtgcctcgttcccagaggggattcactcctgactcctggtggagctgtcttgccccctctgttctgtgttcttgctcctcccgtgggagcgtcttactggagccctgctgatcatgccctctgcgctactttaatcagcacatcaaaacaaaactgcaaggaacaagtgcgcctctgtctgcttccttccttgttgatgtgactttaccaaggataatttggaacatcagtggctcctttgggatacttgagatctccccaaactagctcctctcaggcctctcccttcctatcacctccatacttccctactttctcttgaaggagacacccccttcaagtctggcctcctccacctgtggatccccgctgcaggcctctctcttccccctccagcccctcaactccccacggtccctggaactttaggcttcctgccccatcaggggctcgcagtgcctcagggacccacaaaagcaaccagctgagctcactggaaacatgtagtcatccatcagggcaaaacaagtcgtaaaggtcttatccacaaatacaggtagaaagccttcccctcacatggagcaagtgacccttaacttgtccaatttgccagaaacacagttcagataaaaatataaaatagggctgggtggtggctcacacctgtaatcccagcactttgggaggccaaggtaagtggatcacttgaggctaggagttcaagaccagcctgggcaacacagcaagaccttgtctctacagaaaaaaaaaaaaaaaaaaaaaagaaaagaaaagaaaagaaaaaatatataaaatagagtaaaaaaaaaagtgagaactagctcttatataaactagtgagttgtgttttgttaattgcgtttgataatatattggcctaaaaaagcttacaagatgttttcagtaactttcaacctcagagtcatactaagtgaagttaaataatagacattcattgaatatctaaataatacctgaagagaagaaagtgctgaaacattcattattaagcgtaactttttgtactttttggcttcttatttttatatggtacagactggctaaaggtattctggtctgttaataaacatgtacttggcacttaaaaacattgtactataaaaaggatatacctctagagattataagatggtatattcataaaatttgccaacaaactggtaaatgacagacaatttccaattgtcttcttcccagttttacttgtaaaatacaagttatggccgggcgtggtgactcatgcctgtaatctcagtgctttagggggctgaggttggagaattacttgagcccgggagttcaagggtgcagtgagtcctgattgtgccactgcactccagcctgggcaaaagagcaagacgctgtctctttaaaaaaaaaataccggttactaatggttaaaaattataatcaatatatgaaaacaaaactcctagaaacaataagaatgagggaaacaatttcctatacaaagtatgggaggaagataggatgtgtttttatatgaaaagtatgcaaagaatgtagagtgtttttgttaaagaaagggatgtaattttgtcctgaagtaaaattacaaaaagaggaaaaatatgggacaaagcctgaatggcccaggaattcgagacaagcctgggaaacatgatgaaaccctgtttctataaaaaaactcaaaaattattagcctggcatggtggtacatgcctgtagtcccagctacttgggagggtgaggcaggaggatcgcttgagcccaggaggtcaaggctgcagtaagctgagatctcaccactgcactccatcctgggtgacagactgagattctgtctcaaaacaaaagcaactgtgaatggatacagaaagttatccctatgtttcccaggctggtcttgaactcctggcctcaagaaagtctgcagaaaagaaattttatgttatgaggtcaaagctggctagaattgacctcataatcattgaatggatttatgtataaagtttctttaaatttttttttttttttttttttttttgagacagagtctcgctct

SEQ ID NO: 1562666 - DNA, 4001 bp, Homo sapiens
tggagttggagaccatcctggccaacatggtgaaactctgtttccactaaaaatgcaaaaaatgagccgggcatggtggcgggtgcctgtagtcccagctactcgggaggctgaggcaggagaatcgcttgaaccgtggaggtggaggttgttgcagtgagtggagatagtgccactgcactccagcctgggcaacagagcgagactctgtctcaaaaaaacaacaacaaaaaaacaaagccccagcatctggaccaggctctgggccaggcctgcatccagaccgcactggatgtgagtggaatctgacctcctcattgctctcctcaaggctgagtggcagccccacccccagcgcccaggccatgagtcctgaggcccaccgtggcagcagcctggacaaagactcccccatcacactccggccaggctcctctgagcacgtttctcggctgagcctcaccttggcctatcaggccttgaacaaacactaacaaagctgctgctgcttcattttatttatttatttatttatttatttatttatttatttatttatttatttattttttgagacgggctgtcactctgtcacacagactggagtgcagtggcgcgatctcggctcactgcaacctccgcctcctgggttcaagcgattctcctgcctcagcctcctgagtagctgggattataggctcacaccaccacgcctagctaatttttgtatttttagtagagacaaggtttcaccatgttggtcaggctggtcttgaactcctgaccttgtgatctgcccacctcggcctcccaaagtgctgggattacaggcgtgagccactgcgctcggctgttttttttttgttgttgttttgttttgttttgagacggagtcttgctctgtctcccaggctagagtgcagtggcgcaatctcggctcactgcaagctccatcccccgggttcatggcattctcctgcctcagcctcccagtagctgggactacaggcgcccgccaccacgcccggctaacttttttgtgtttttggtagagacggggtttcaccatgttagccaggatggtctcgatctcctgacctcatgatccgcccgccttggcctcccaaagtgctgggattacaggcatgagccaccgcacctgcctggcctttttgtttttaaagacagggtcttgctctgtcgcccaggcgggagtgcagtggcgtgatcacctctgccgcccaggctggagtgcagtggtgcaatcagcttgctgcaaccttgaactcttgggctccagcagtcctcctgcttcagcctcctgagtaactgggactacacaggggcatgccgcagtgcctggctaattttttaaaaattatttttgtagagacagcgtcttgctatgttgcccaggctggtcttaaactcctggcctcaagtgattctccagcctcagcctcccaaagtgctgggattacaggtgtaagccatactgcacatggcttctaacagctcaaggccacattcctaaaatgatcccagcccccttcaaagcgcctgcctgagaaagtcatggctaccaagagaatttcctgtgttctggccaacacctgaagatggggcccctgtctcccagcctctgtgggactgggggcctgacttcagtaagcccccgtggcaaacccagattggtttcccaaggctaaccctcccttcctgcttttggtaattttccactttcctcactccactgagtccccactgttcttcctccccactccccacttctttgcacaactcggagcggagctcggctctctcccctcctgtcactggtcaccaaatattataatttccgtcctcaccactttaatgtccagctgtgtttctctgtgatcaggggccaggacttggatctggatgggaaccaccatccgatcaaccctcggatgcaacaaccggagcacacagtgtacacagcgatccgtgttatctccactctgcctgctcatgcgggagtcacatggtttgatttgtgatccagtggtccggaagaatatcggatgcagcagtgaggacagacattgcttctaatgattttatgattctgagtaaggctctgaggcgctaagagtcccaggctttttttttttttttttttgggacagagtcttgctctgtcgcccaggctggagtgcagtggcataatctcggctcattgcaagctccgtcccccgggttcatgccattctcctgcctcagcctcccaagtagctgggactataggtgcccaccacaacgcccggctaattttttgtatttttagtagagatggggtttcaccgtgttagccaggatggtcttgatctcctgacctcgtgattcgcccgcctcggcctcccaaagtgctgggattacaggcgtgcgccaccgcgcccgccccaggcttcttctgaacgctacctacctcctgggctggaagttcttcttcctagtgcctcgttcccagaggggattcactcctgactcctggtggagctgtcttgccccctctgttctgtgttcttgctcctcccgtgggagcgtcttactggagccctgctgatcatgccctctgcgctactttaatcagcacatcaaaacaaaactgcaaggaacaagtgcgcctctgtctgcttccttccttgttgatgtgactttaccaaggataatttggaacatcagtggctcctttgggatacttgagatctccccaaactagctcctctcaggcctctcccttcctatcacctccatacttccctactttctcttgaaggagacacccccttcaagtctggcctcctccacctgtggatccccgctgcaggcctctctcttccccctccagcccctcaactccccacggtccctggaactttaggcttcctgccccatcaggggctcgcagtgcctcagggacccacaaaagcaaccagctgagctcactggaaacatgtagtcatccatcagggcaaaacaagtcgtaaaggtcttatccacaaatacaggtagaaagccttcccctcacatggagcaagtgacccttaacttgtccaatttgccagaaacacagttcagataaaaatataaaatagggctgggtggtggctcacacctgtaatcccagcactttgggaggccaaggtaagtggatcacttgaggctaggagttcaagaccagcctgggcaacacagcaagaccttgtctctacagaaaaaaaaaaaaaaaaaaaaaagaaaagaaaagaaaagaaaaaatatataaaatagagtaaaaaaaaaagtgagaactagctcttatataaactagtgagttgtgttttgttaattgcgtttgataatatattggcctaaaaaagcttacaagatgttttcagtaactttcaacctcagagtcatactaagtgaagttaaataatagacattcattgaatatctaaataatacctgaagagaagaaagtgctgaaacattcattattaagcgtaactttttgtactttttggcttcttatttttatatggtacagactggctaaaggtattctggtctgttaataaacatgtacttggcacttaaaaacattgtactataaaaaggatatacctctagagattataagatggtatattcataaaatttgccaacaaactggtaaatgacagacaatttccaattgtcttcttcccagttttacttgtaaaatacaagttatggccgggcgtggtgactcatgcctgtaatctcagtgctttagggggctgaggttggagaattacttgagcccgggagttcaagggtgcagtgagtcctgattgtgccactgcactccagcctgggcaaaagagcaagacgctgtctctttaaaaaaaaaataccggttactaatggttaaaaattataatcaatatatgaaaacaaaactcctagaaacaataagaatgagggaaacaatt

SEQ ID NO: 1562667 - DNA, 4001 bp, Homo sapiens
cacaggcagctggctccccagttcccaacaggccacccagccaggcccctggcccagctccccacccatctccacccaccacagggcctcctcagtcccccacactcccagacctcaggtggtgcctccagagcgagctgtgtccacacagggctctactggaatgcctggctctttggagaggctgaggctgactgaatgggctctgggcagcagctggcacggatgccatcctggttggggctcacctccaagagaagcgtgtccggcaggtaccggtccttccagtggtcgaggaagaccatgtccagtgtgtccacatcatacttcttcttcagctgggggatgatgtcctgggacgctccaaccacaagggtgacctggaacagcgcctgtcagtgcccacgtcctcacagacaggaggccatccctacacacctatacaacagcgcctgtcagtgcccacgcccacacagacaggaggccatctttacacacccatacaagcattcatcagttttctttagggttctgggatgacaaggccccactctgtccctgcccctcctggtgccaccttggcagtttacccagagctgtgagaccctcactgagctgctgggggggtctttcctcagccccaggctgggaagcactgaggggcctggtgatagtgggttttcagtgaacgtggtgtgaacacctggtggggaggacaaagtgcgcatgccctccctgcccacagccggccctttttccaggtctgacaacgggtcaggcatgcacaccttgtccttcacgccagcgaaatccaccatccgctgggtgatggcggcacagtcggggttgatctcgatggtgatgagcctcgcccctggtgacagcaggcgggccatgcgcacagctgagtagccacagtaggcccccagctccagcagcacggagggctggtgctcctgaatcacggcgtccacgatcttgcctgtgcagggttggggacggaggagaggtgagcacaggtggagagaggggaacttggatccccaggcacggccccccacctctcccaaagagcaggagcccctcccaaatgcctggccgctggccctcctctgcccaccctccctacccgctggaggggtatttcacctccctggtgtccccagcccccaggacctggtccccactgtgagcgcgcttggagctcccatggtcccttagcctctatgctcacgctggtccctatcttttccacccttcctggctggccccagtgtgtcctaacacagagctgccctctctgaatcaccgaaccgcccaccttggggccctggggcggcactagttccctgagtcactccgtgagcccggtaacacatcctgtgccccaggctgaagttcaagcgggaggcgggcccaggagaacctgtctgactggtccccaggcaggtcccatggtggccagaacagagttcaaggggaactgcaccaccgtcagaccctgtgagtgtgggggcctgttgtcctggggcagcaggcagcagggcctgcaggggtcatcagggaccctggcaccctgggactccagaggagccccccagccctatctgggcatatcccagggttcccagccccctggaaatggggtgataacagcttctcctgtaagggctttgatgcctggtcctgggtccctgtcccagagctgagcacctgctggcccggaccccacctttcttgtcgcccacgttcatggcccactccttctgctcgcagtaggtgtcaatggcctccagcacgctctgtgcgttcccgggctccgcatgctgcagcacgtggttcaggatgcgctgctccttggtgtcacccatgagcaggttgtggatgggctgcaggatgaactcgttccagccgataaggcacaggccccagccccagtgcctcagaagcagcagcagcaccaccagcagcaccaggcccagcaacacagctgccaacagcagaggcggggcctccggcatctgcagggcgggaggggaggggcgccagtgctctgtgctcctcctgcagcacccacacgcccctttgcttggagtgccaccatcgcccccttgtgtttgcagaggggcaaggttcagaaatgccagccttgtgcctcagttgcctgacgtgtcagcgccagggagccagccttctcgtgccctctggtgccctcgggtagacagagcaggtgtgtgcctctggcagtcctgtgtggagcctgcagggtcacactccctggccctgggtgcttccccaggcagcccagggatcctctaaaaccacacaaaatacagaagcagacacggactcaggctgttgtctcccagctggcttagaggacacccaggggtagggaagccccatggcccggagttgggggtagtcacgggtggccaaaggagaggctgtatggtgcagccccttggcctcatgtggtgagcccgtgctggtcacccatgctctggacgccccagggattcatgtggccttttcattgagtgtccaagtaaggacactggcagtccccaggccaggcacaccaggacagacccactcaccactccccttgggaacagcaacgtggcatgtcccagatgagaaaggccagccctgccgcccacaacagtgtacctcgtggggcacagtgatggcaagtgaccccacttgaaacctgtttgaaatcctcctggtgtgaccctccaggcaggtagcctgggaaccagacagaagcctggtgaggggacccagcaggcagagagcagagcacaggaggcctgaggcagaagcccaggggttcaggtcacagaccctaaaacgggaaggacacaaggaaacttcttctagggcccctgtgctcactcagaggtctttctgggatggggccctgggctcccagtggcataggagatcccactctctgctggacgctccattttagaaaggcacacccaggcaaggaggcaggcctagggccacagaggggacacccctggaggccagcctcagggcaccagaggacagagcagaagagaacagggaagcagaggctccgccctagggggaggtcatgcggacaccaggcttctaggggatttcaggccatgtggcctatttacacaggcagagtggacatgtgctcagcagacctgtgcccatgcaccgggccggaatctgtacccaccctggcactgccccggcttccgttggccaactcaccttcaaagcacctctgagcaggctccagccctctggctgcgggaggggtctggggtctcctctgagctcggcagcaaagcagatgttatttctgtggaaatcaattttgcctttggataatcatcaacataaaccctaacctggcgatgaccaaggtccagatacctgagccccttccccggatagggccagcctggcctgagccttccctagcagggcgagggcagtgcttcgcctttccggcctcagaagagacagcagaaggcctcagagaggccaagggacatccctactagtgtcccccagccagggaccccaggggcagtctcctggtccctgtccacactgccctgtgggctatgtgtgtgtgcacctgcaccttgtgaaccacaagaggagggaaccactctgctcaagttgtatttcccctgaagagtccttagtaccttggaaatgatgtgtaagaccaagggctagtttaccaagaacatacacaaaccagtaagaaaaagatgatgagacagataggtcacagtggccaacatgcagctcacaggaaaaggccaaaggccagagccccgagcaggtgatggaacccggtgcagggctcagtgacagtgggggtgcccctgtccacagctgcaggagtgggaatcgtgctgccttctgctgctacccttgggaagggtcccaggcctgcagggaaacccgtggcccactgtgtttcccagcggggcaggacg

SEQ ID NO: 1562668 - DNA, 4001 bp, Homo sapiens
gagccagtggaaaaaatggaaaccaaccagcaactccctgagaccctcagagccatcccagcccctccaggacaaaccacacaccaggcaccagtgccctgtctgcctctcccgtctagctcagaaccccaaaggagtccaaagagtctcaacccaggtgcctgaacccctccactggctgctgctcacagcccagatcctggtcaagttgctggtcttgccatgcatctcaaacatccacccatggtagcagagaagcagcttcagggtttggcggaagaagaagatgcccgtcacccagacgcccgtggagaagatggccatgctgagaagtgcccgggtctgcggggtctggtaggggccacacctattggagaggggcaagggctgcagggggtcctcttgaggccagcctcgggtggctgtgaactgtctcaggggagacaccaaggggaagaacctccctgggcacactcatgtctgactgcatcaaatgagcggatgtagggctaagacaatggttgtcataggggagggctgccccgtgactgccaatggctgctgtcctgtatctgcccagctcaggaacctcagccttgggagctgggcccagccctccctggtggcacctgtgcccttccagtttcactccttacccctgagggaggcatctctggatgcaactgaccagccccaaggagatgtccacgttgcagaaggaggaacccactgttgccatgatgacgaccagccagctggtggggctgccagggtacacgcccctgaggatgccattctgtgggcagaaacaggcgcccttatggagccggaaggcgggaggttagcctgcctgtgaagtcttgggaactggctcctggtcttggcctggaaggctttctctcctgatgccctgctgtgctccttcctccgccacacccacagctccctgtgtccgaccacatcctgtgcacccctctggtgtctgtacttccacaacctgtaccgggcagaagtgccagccaaggaggcagtgagggaccctaacaaagcgcttaacagctgacagccggcctctgcctacgctctgggagaagcacctgtgcgcaccttgatgcggatcaggcgtttcttccaggagttgatcccagacaggtagacgtgtttcagggcctcccgactgagccggaagtcgaccccgtctggggtcaccgtgaactggaaggccacggcctggtgagcttccgccatcctgggggttggtcggcacctaggacgggggcagatgggtgcgcgggcgcgcttaggccggccccgccgccagccgcgccgagacgcccccagccagtccgcgacccctcgcgccccccaccccgcgactagcggctgcccccggcccgcgccccccgccaggccaaccgccgccaaatcctcgcgccagccttccgggtgggcacagccactgtggtgcaggggatttgggccttgaaagctccaggagccccaaggacggcgaagggcagcctggagttggggggcgtcagcgagggcgcgggcaggggagagaggcgcccctggaagtggagccggcctggacagaggcagggttcgggagcccgcccttccccacccgagcgcgcgggccccagcgccgtcctcgcccctgtgcagggctgagggcccagacccccgcgggccgccctgtgccggcccctactcacagctcgggttcactcctgtccgtgcgtggggccagccactctggcccgtgtccccacgtccttcaggcctagccacccccgccccgccctcaccaggaacctgacacctactcccaaatcggggtcggggaaaaacgtggggcgagaaccagaacccacccaccttccgcggtgggaattgcagggcgcggctgggtttctgtgcggtgaaggttgctcaaaggtctgggagcctggggggccccagagtctcgtgaggatggtggctttagagctaaaaatagccaaatgtagggaaaaggtcaccgatgtgtcagctgctgcctgttctgggatcgctggtgctccgggcggcatccccacctcagggtcgtcttcatacccccatcactctcctcctccccaagtcctagtatttattattctaagctgcagccaggggactggggagggatgggggaccccaactggcagcatgaacgctaaccactttcaatcccagagcactgaagagtccctttgtgtgtactgctcggtttggtactttctgctgctgctcagcagggccaggacagggtgggaagaagaagcttgtttattgtgttacatacacagcacggggctctggcctgccagccatggggacctactcaaactcaggaacaggccggtctcctgaacctcagtttcacttgggggctcagcccagtcgccagggccttctgctcgttgttcctccctccaaggtcctgccctggaggctccaggagaaatccaaggagtgggagggtggagtcaggatgaggagtggacactggtcagctgccccttctgctggaagtagaactggaaccgagactgggcatagtcctagggaaggaaacccaccccacacagtggtgagaagacgtgggaccagcattctacatccacctcaggctgcccacagccacccgggactccccaggcctcctggaagagtgtggctgctgctgctccccagccccccagctagcattcccatccccagggtcacttaccaagtaaccaaattctatggtggacatggatgcctggaggatggaccacagaccccagaagaaatgggatgccagagcatacctggggggagggcaggaaaaggaggggcattcaagagcatgtctagcactgcttggatcccctcacccaggttggccaatccctacagttttaacttctcccccactgtcctaactccactctccacagccaccttccctgcagcttgataaatctgcctcttccccaatccctctttcctctgctctgccctaccccaccctgcccctccttcctcaccgactgacttctaccagcaaatcttcttccagttttctctgctcctcttgggagagggtctcacctttctttgcctctgccaggtaatgacgaataaaatgcaactacgatcaatggccaagagtcaggaattggggagactgtggagtatttcccaggtaacatcctttccggccattccttccagactccacctccctccttcctcacaggatgggtcctgctccccagcctctggcccacatacctgctgttcttgagtggggtagtctgtgggccttgctttgtagaaaggccattcctcgtgagtataatcataaacccactcacaaaaatggttcccaatgtcaaagcccctgggagaataaggtggacattcagtccccaaatgccctgggcagctggcctgttttcaagagccctatgggaacagatctatgggaagccatctttccagcctcacctatagttataactgctgtactcgaagtccaccagcatgaggctgtcagcattttctggctctgagagcagcaagatgttccctgggggaatggggtgaggttctgctcactccagagccctctggctcttccatcttgggttaggagactcagatgccttctcctaccttcctggatgtcattgtggcagaagacgactggcgatggggtagactctagtaacttcctacaggggtatgggagcatgggtcctgagcaggagtgactagaggaggatcagagccaccctaacaggccaggccctgacaccagccctcagcaactactggaagggcggacaccattaccattagccttgtcctgcctgccctcacctgaggttgcccatctcatccttcaggctgtacatctccagcaggttcatctcagggaggccagttgggggcaggtcctggatctgttttaggtacctgaagcc

SEQ ID NO: 1562669 - DNA, 4001 bp, Homo sapiens
cgaaggtagatgtactcttcccaccagtcactcacctgtggggaggtggaaggttagagctggggcgggtgcagccaggacacatggcaggtgacagtgagcccaggggcaggaacttacatagttacttgcccaccatgacttgagcaccaggtatttctgcagcctgggggcagtcttgtcctggaattctttggccagcaactccatgcggtaatattcctcatcatccaacaaggggcgcacagactctaggtactgtccagccagttatcatcaccgtggggccagatggcaagggctgcctctatcttaatcctcttcccacctctccctcctcacccagccccattattctcaagcccttaaggccactctttgcacagaaccttatatttggaaacatctcctgaatccaacctcccctgcccactgggatgcccaagcgaggccctcacccgctgaattgtggctgacaccctgggcacaggaagcttgggcagagatgtctggaagctgtagagcatagggtgccggctggatagaaggcggatacacatctgggggtacagagcagagtgctggggtgggagccagtggaaaaaatggaaaccaaccagcaactccctgagaccctcagagccatcccagcccctccaggacaaaccacacaccaggcaccagtgccctgtctgcctctcccgtctagctcagaaccccaaaggagtccaaagagtctcaacccaggtgcctgaacccctccactggctgctgctcacagcccagatcctggtcaagttgctggtcttgccatgcatctcaaacatccacccatggtagcagagaagcagcttcagggtttggcggaagaagaagatgcccgtcacccagacgcccgtggagaagatggccatgctgagaagtgcccgggtctgcggggtctggtaggggccacacctattggagaggggcaagggctgcagggggtcctcttgaggccagcctcgggtggctgtgaactgtctcaggggagacaccaaggggaagaacctccctgggcacactcatgtctgactgcatcaaatgagcggatgtagggctaagacaatggttgtcataggggagggctgccccgtgactgccaatggctgctgtcctgtatctgcccagctcaggaacctcagccttgggagctgggcccagccctccctggtggcacctgtgcccttccagtttcactccttacccctgagggaggcatctctggatgcaactgaccagccccaaggagatgtccacgttgcagaaggaggaacccactgttgccatgatgacgaccagccagctggtggggctgccagggtacacgcccctgaggatgccattctgtgggcagaaacaggcgcccttatggagccggaaggcgggaggttagcctgcctgtgaagtcttgggaactggctcctggtcttggcctggaaggctttctctcctgatgccctgctgtgctccttcctccgccacacccacagctccctgtgtccgaccacatcctgtgcacccctctggtgtctgtacttccacaacctgtaccgggcagaagtgccagccaaggaggcagtgagggaccctaacaaagcgcttaacagctgacagccggcctctgcctacgctctgggagaagcacctgtgcgcaccttgatgcggatcaggcgtttcttccaggagttgatcccagacaggtagacgtgtttcagggcctcccgactgagccggaagtcgaccccgtctggggtcaccgtgaactggaaggccacggcctggtgagcttccgccatcctgggggttggtcggcacctaggacgggggcagatgggtgcgcgggcgcgcttaggccggccccgccgccagccgcgccgagacgcccccagccagtccgcgacccctcgcgccccccaccccgcgactagcggctgcccccggcccgcgccccccgccaggccaaccgccgccaaatcctcgcgccagccttccgggtgggcacagccactgtggtgcaggggatttgggccttgaaagctccaggagccccaaggacggcgaagggcagcctggagttggggggcgtcagcgagggcgcgggcaggggagagaggcgcccctggaagtggagccggcctggacagaggcagggttcgggagcccgcccttccccacccgagcgcgcgggccccagcgccgtcctcgcccctgtgcagggctgagggcccagacccccgcgggccgccctgtgccggcccctactcacagctcgggttcactcctgtccgtgcgtggggccagccactctggcccgtgtccccacgtccttcaggcctagccacccccgccccgccctcaccaggaacctgacacctactcccaaatcggggtcggggaaaaacgtggggcgagaaccagaacccacccaccttccgcggtgggaattgcagggcgcggctgggtttctgtgcggtgaaggttgctcaaaggtctgggagcctggggggccccagagtctcgtgaggatggtggctttagagctaaaaatagccaaatgtagggaaaaggtcaccgatgtgtcagctgctgcctgttctgggatcgctggtgctccgggcggcatccccacctcagggtcgtcttcatacccccatcactctcctcctccccaagtcctagtatttattattctaagctgcagccaggggactggggagggatgggggaccccaactggcagcatgaacgctaaccactttcaatcccagagcactgaagagtccctttgtgtgtactgctcggtttggtactttctgctgctgctcagcagggccaggacagggtgggaagaagaagcttgtttattgtgttacatacacagcacggggctctggcctgccagccatggggacctactcaaactcaggaacaggccggtctcctgaacctcagtttcacttgggggctcagcccagtcgccagggccttctgctcgttgttcctccctccaaggtcctgccctggaggctccaggagaaatccaaggagtgggagggtggagtcaggatgaggagtggacactggtcagctgccccttctgctggaagtagaactggaaccgagactgggcatagtcctagggaaggaaacccaccccacacagtggtgagaagacgtgggaccagcattctacatccacctcaggctgcccacagccacccgggactccccaggcctcctggaagagtgtggctgctgctgctccccagccccccagctagcattcccatccccagggtcacttaccaagtaaccaaattctatggtggacatggatgcctggaggatggaccacagaccccagaagaaatgggatgccagagcatacctggggggagggcaggaaaaggaggggcattcaagagcatgtctagcactgcttggatcccctcacccaggttggccaatccctacagttttaacttctcccccactgtcctaactccactctccacagccaccttccctgcagcttgataaatctgcctcttccccaatccctctttcctctgctctgccctaccccaccctgcccctccttcctcaccgactgacttctaccagcaaatcttcttccagttttctctgctcctcttgggagagggtctcacctttctttgcctctgccaggtaatgacgaataaaatgcaactacgatcaatggccaagagtcaggaattggggagactgtggagtatttcccaggtaacatcctttccggccattccttccagactccacctccctccttcctcacaggatgggtcctgctccccagcctctggcccacatacctgctgttcttgagtggggtagtctgtgggccttgctttgtagaaaggccattcctcgtgagtataatcataaacccactcacaaaaatggttcccaatgtcaaa

SEQ ID NO: 1562670 - DNA, 4001 bp, Homo sapiens
ccttatatttggaaacatctcctgaatccaacctcccctgcccactgggatgcccaagcgaggccctcacccgctgaattgtggctgacaccctgggcacaggaagcttgggcagagatgtctggaagctgtagagcatagggtgccggctggatagaaggcggatacacatctgggggtacagagcagagtgctggggtgggagccagtggaaaaaatggaaaccaaccagcaactccctgagaccctcagagccatcccagcccctccaggacaaaccacacaccaggcaccagtgccctgtctgcctctcccgtctagctcagaaccccaaaggagtccaaagagtctcaacccaggtgcctgaacccctccactggctgctgctcacagcccagatcctggtcaagttgctggtcttgccatgcatctcaaacatccacccatggtagcagagaagcagcttcagggtttggcggaagaagaagatgcccgtcacccagacgcccgtggagaagatggccatgctgagaagtgcccgggtctgcggggtctggtaggggccacacctattggagaggggcaagggctgcagggggtcctcttgaggccagcctcgggtggctgtgaactgtctcaggggagacaccaaggggaagaacctccctgggcacactcatgtctgactgcatcaaatgagcggatgtagggctaagacaatggttgtcataggggagggctgccccgtgactgccaatggctgctgtcctgtatctgcccagctcaggaacctcagccttgggagctgggcccagccctccctggtggcacctgtgcccttccagtttcactccttacccctgagggaggcatctctggatgcaactgaccagccccaaggagatgtccacgttgcagaaggaggaacccactgttgccatgatgacgaccagccagctggtggggctgccagggtacacgcccctgaggatgccattctgtgggcagaaacaggcgcccttatggagccggaaggcgggaggttagcctgcctgtgaagtcttgggaactggctcctggtcttggcctggaaggctttctctcctgatgccctgctgtgctccttcctccgccacacccacagctccctgtgtccgaccacatcctgtgcacccctctggtgtctgtacttccacaacctgtaccgggcagaagtgccagccaaggaggcagtgagggaccctaacaaagcgcttaacagctgacagccggcctctgcctacgctctgggagaagcacctgtgcgcaccttgatgcggatcaggcgtttcttccaggagttgatcccagacaggtagacgtgtttcagggcctcccgactgagccggaagtcgaccccgtctggggtcaccgtgaactggaaggccacggcctggtgagcttccgccatcctgggggttggtcggcacctaggacgggggcagatgggtgcgcgggcgcgcttaggccggccccgccgccagccgcgccgagacgcccccagccagtccgcgacccctcgcgccccccaccccgcgactagcggctgcccccggcccgcgccccccgccaggccaaccgccgccaaatcctcgcgccagccttccgggtgggcacagccactgtggtgcaggggatttgggccttgaaagctccaggagccccaaggacggcgaagggcagcctggagttggggggcgtcagcgagggcgcgggcaggggagagaggcgcccctggaagtggagccggcctggacagaggcagggttcgggagcccgcccttccccacccgagcgcgcgggccccagcgccgtcctcgcccctgtgcagggctgagggcccagacccccgcgggccgccctgtgccggcccctactcacagctcgggttcactcctgtccgtgcgtggggccagccactctggcccgtgtccccacgtccttcaggcctagccacccccgccccgccctcaccaggaacctgacacctactcccaaatcggggtcggggaaaaacgtggggcgagaaccagaacccacccaccttccgcggtgggaattgcagggcgcggctgggtttctgtgcggtgaaggttgctcaaaggtctgggagcctggggggccccagagtctcgtgaggatggtggctttagagctaaaaatagccaaatgtagggaaaaggtcaccgatgtgtcagctgctgcctgttctgggatcgctggtgctccgggcggcatccccacctcagggtcgtcttcatacccccatcactctcctcctccccaagtcctagtatttattattctaagctgcagccaggggactggggagggatgggggaccccaactggcagcatgaacgctaaccactttcaatcccagagcactgaagagtccctttgtgtgtactgctcggtttggtactttctgctgctgctcagcagggccaggacagggtgggaagaagaagcttgtttattgtgttacatacacagcacggggctctggcctgccagccatggggacctactcaaactcaggaacaggccggtctcctgaacctcagtttcacttgggggctcagcccagtcgccagggccttctgctcgttgttcctccctccaaggtcctgccctggaggctccaggagaaatccaaggagtgggagggtggagtcaggatgaggagtggacactggtcagctgccccttctgctggaagtagaactggaaccgagactgggcatagtcctagggaaggaaacccaccccacacagtggtgagaagacgtgggaccagcattctacatccacctcaggctgcccacagccacccgggactccccaggcctcctggaagagtgtggctgctgctgctccccagccccccagctagcattcccatccccagggtcacttaccaagtaaccaaattctatggtggacatggatgcctggaggatggaccacagaccccagaagaaatgggatgccagagcatacctggggggagggcaggaaaaggaggggcattcaagagcatgtctagcactgcttggatcccctcacccaggttggccaatccctacagttttaacttctcccccactgtcctaactccactctccacagccaccttccctgcagcttgataaatctgcctcttccccaatccctctttcctctgctctgccctaccccaccctgcccctccttcctcaccgactgacttctaccagcaaatcttcttccagttttctctgctcctcttgggagagggtctcacctttctttgcctctgccaggtaatgacgaataaaatgcaactacgatcaatggccaagagtcaggaattggggagactgtggagtatttcccaggtaacatcctttccggccattccttccagactccacctccctccttcctcacaggatgggtcctgctccccagcctctggcccacatacctgctgttcttgagtggggtagtctgtgggccttgctttgtagaaaggccattcctcgtgagtataatcataaacccactcacaaaaatggttcccaatgtcaaagcccctgggagaataaggtggacattcagtccccaaatgccctgggcagctggcctgttttcaagagccctatgggaacagatctatgggaagccatctttccagcctcacctatagttataactgctgtactcgaagtccaccagcatgaggctgtcagcattttctggctctgagagcagcaagatgttccctgggggaatggggtgaggttctgctcactccagagccctctggctcttccatcttgggttaggagactcagatgccttctcctaccttcctggatgtcattgtggcagaagacgactggcgatggggtagactctagtaacttcctacaggggtatgggagcatgggtcctgagcaggagtgactagaggagga

SEQ ID NO: 1562671 - DNA, 4001 bp, Homo sapiens
atagcagccacagaagttgtggtgtggtcacctctgtgcacacagggagaagcacctggacaggtcagtcaggacagactctcaggtgagtggactcagctgtgaacaacctgagtctgtgaacccctgaattaacagcacagctgggaagacatactcagagttttacgctaaagcatgaggttagtggtgaggctgcagccagacggtgcgaagtgctccaagctgtgttggggatgggggaggcagccatccggcagggtcccagaccctacagaaagctgatgcaccccaggtcccctctgtgcttttacctcccaagaatcatgagaagaagaggggaagtgacgtaggagatgggatttccctgaggagaaacgcaccgagacagtcgggaccgtaggttcctggagagcagcacactttcagtgtcttcacacaaaaccactcgaataagtcaggatattcgctcttcctgaggatggaggaaaacattcactgaatcccagcagacacggttctttaaaacaaacatgcagctgaacgtaacatatgctctggagtattgtaaggtccaggaaacaagagtctaggtgtggacagaatcttctccttaatttcctggttttgatcgctgactctggtgataaaaaacggtaatgcaggggtaaggtgggtgcgaggcaggtgggagctccctactgttcctgtacctttctaagtctgaggttatttcaaattctaagttggaaaataaaaagtatcttctaagaggttttaaggcactcacagctgcagccaccaggcctccaggtgctcctcctgcgcctctagcatctgattgcattcgaagtcgctgctctcgcacagcccctccaggatctccagcaggcgaatctcgctgaaacacaggcccacaccggcccaccgtcagcgcctccaaggcagtgaagaaaaatccgaaccaatacgccaacctgggtgcaggggccggggagccaggactccgggcacagagaataaggggaccccactgtcaggggaagccaggagcggttcccacaagtggggctggtgttccagtttacattttgaaaagccactgtctgttgagggggtagggaccagagcagaagctggaaggccagagaggggccagccattagtcctcagggagaagccgaggtgactcggacgggtgactggtgcctcgggggctgttctgtctccctgtcattaacacaggcaccaaaggcaggacacgacttcccaggacagcgccaggccaagacccacaggggtgctccagggcacccacctggactcgtacttggacagcgtcttttcctcccaagccgtgttcccgccgccaaagttcttctttgcggtgtccaccatcccctgcgaggagacagtgcccatagtgcttggtaccacctgacccgggtccagggtgggggcgagcccaggtcgagggtgaggggactccaggcccacggtggcgtcgaccctggttccacggtgggggtggatccgggtcaagggtgagggggactccaggaccacggtggagggactctggatcgacggtgagggggatcccgaatccagggtgagggggaccccggatccagggtgagggcgaccctgggcccaaggtggggcgaccccggatgcagggtgagggggaccccgggcccaaggttgacgaccccgcccggccccttcccacctggttaaacttgtccaccagcccccggcaccggtggcagggcgtcggcttcttggcggcctccggcgcgggcggcagcagcagcagaagcggcaggagccccagcgcggcccggcgcggcaggcgcatggcgggtagcgctgcgggaagacgcagccggagctccaggtcctgcggccgtgctgctccggcctcccggccgcccacccgctcccagccgcgccggcctgtcccccaggctacttgacggcgccggcgaggccccgccccacccgccagccccgcgccgctattggttgatgggacccgccccggcctgatatggcccaatccgagttcgccacgagaggtgaccaatgggaaggccccggatcagcggccgccaggagtccgggggcggggcgtgcaggtccgaccccgcctcccgctccccgcccctcgcgcgcagcccgcggcggccatctttactcagggcacagagggtctctgcggccgtagcggccggggctgcggtagccactttagatttgggcaaggactttagattcgggctctgttctgtttccgccgtcctgcttcctgccgaggctggcccaggcagccgcgcttcgaaggacgccgccgggagctgcggaggtcagtgcgcgctgccgcgaccggggccttcaggcgggcgcgcggcgagaccagggaggaggcgggcgagggcgcgacccgagctggcgctggcgctggattcctgaggcctcaccgcgcatgtccacgcgtcacagccccgtgctccttacctggggctgcacccctcacttggggccgggctcctcacctggggctggacctgtcacctgggggccagacctctcacccgggggccggacctctcatccgggggcccgacctctcacctggggctggacctctcacctggggccgggctcctcacctggggccggacctcccacctgggggatgggtttttcacctgggggctggggatctggggtccacttagggtctctgggggctggggatctgcatttctacaggcgcttgaggtgatgaacactcgctcatgttcaggaacccctggtttaaattaggggaaataaaacgtgcagcgtctggatttcagagaactcctgcctgtggaaggaaggagtgcagataacactgcacatttaaaaaaaaaaaaagtaacatctgatttgaccagtttcttttctgtttttttgagacggagtctcactttgtcgcccaggctggagtgcagtggcgcgatctcagctcactgcaagctccgccttccaggttcctgtgattctgctgcctcagcctcctaagttgggattacaggcacccaccaccaggtccggctaatttttgtatttttagtagagacggggtttcaccatgttggccaggctggtctcgaagtcctgacctcaagcgatctgcctgcctcagcctcccaaagtgctagggttacaggcgtgagccaccatgcttagcctgatttgatcaatttcggtagaggccttaaaatctggattgatggggacaagagggtctttgcaggtcattccctaatctgagatgccattgttctgtaaaccaccattttaaagtgtcatggcctgggcccgttttaacctgtgggtgctctcgaagcacccgtcacttagattagccacagctgctgcccagctgcccagcagagtgggctagtgcaggacagtgtccgttcaccctcgcctggtggggggttcgtcgtggttttcgtgcttgctggtgttgacttggtcttcccgtgctcctggcagagaatccagactcacccttggtcttctcatgccctcgaaagtgagctgtgctggtcatcagcagaaggcacaccttgttgggtccgaggaggtgctgggggcccgccaggagtgtcagagtcagcacgtaatgttttcaccccacagctgaactcttccttgctggggaactcccctgggtggagaggtgtggagtggggttgtgggggactgccaagcagcacttgctgtgtgcacctcccacatcttggcacgtagatgctccccgttccgttttattttttatttttgtagaaatggggtctcatgatgtagcccaagttggtcttgaactccgggcctcaagcagtaccccccatgtcagcttcctgagtagctgggattatttttgtggagatggggtctggctctgtagcccaggttggtcttgaactcctgagtagctggaa

SEQ ID NO: 1562672 - DNA, 4001 bp, Homo sapiens
cttaacacaaaaagcatgtctgaaattgaactaggatacaactaagtgtcattcaaaaattttccttaataacattctagcctaattccaccttggaaattaaccagactgatctctggcctactaatggtcctcggggagaaaatatgcaataaattttccaaaaaatatcctcgctgaagccaatgcaccttctcttatctttgtaattaacgtactataaaagtggtggtgtctggcctgcttcaaacttggcaccacagtatcaatatacagttctgatattttggttaaaggtttttttgtttctaaacgctaaagcattttcatttttttgactgttccaaaggctgcagtcctggagttcttaacctggagttcagagatctggagggagtacaagcacccgggatggtgtgcaaacttgtgtgtacgtgcctttggcggggaggggtgggggtgggggtgggggtggggtggtgagtgctcggctatcttcagattctcaaagaagtctatggcttaaaaacggtttttggccgggtgtggtggctcacgcctgtaatcccagcattttgggagaccgaggcaggcggatcacgagggcaagagatcgagaccatccaggccaacatggtgaaacaccgtctctactaaaaatacaaaaattagctgggtgtggtggcgtgagccagtagtcccagctactcgggaggctaaggcaggagaatcgcttgaacccgggaggcggaggttgcagtgagccgagatcgcaccactgcactccagcctggcgacacagcgagactccgtctcaaaaaaaaaaaaaaaaaagaggtttttagaaaaaccaacaaatccctgcatcagtattacacccagagaaagtcacgaaaggcaaaaagcgtgcattttaactatgcaaccaccgttaaacattcaaaacgcatcctcttcacattgagaaacagcctcgtgagagggaaaaaaaaaaaacgcatcctcttatccagtgacccagatcctgacactagctttctgttaggaaggccttctggaaaataatttggttcagaatgcggggaatatgggttcaagcgcgccccacccccctatacaagcactcttcgacagacccggttctcgaccttcctccgcggtcggggagggctctcgcgtacctgggcgcaggctcgatgagggtggtggtgtccaggtagtggatcttgtaaaactccagcagggccggcaaatggtcaaattcctggtccccgatcttaaaacggcggttgggcagcgagttgatgatgtagtgggagacccgcgagttctcggacaccgacagcacatagtccccagggcaggtggaagaatcgcggacgaggaacataccgtggcgctggccctggagccgggtctgcgcctcctggcgagacaccggccccatataccaggcggagcggtccgaggagtcgaacctggcggaggacatggtgttggaccggggactctgcggcggtaggggcggcggctgtcctcgcctgctctgcacgccttagcccggcagacggctttggggccgaggaagggcctctcgcacacctcgaggagcgctcagagggctgggccagcactttcctctcggctccgggcccgcagcatcctccgacgccgcccgcctgctccggggccgccacacggagagagccgcccgggaatgcacggcagagccggggggtcggggcaggcaaacccgagccgcagcggaggccaccccggggttctcgggctgctcggcgtcccaggggtgcctccagtgactcccggcctggaacgcgccggcgccgcagctcgacgggtcttcaccgacccccgccgtcacacgaggcaccgaactcgaaggagcgtcgcgcctccggggtgcttttgcccagcttgttcccaatagccacagcaacaaaatggcggacgcgggagaagcggcagccacctccccctccgctcagcgcgctccgtctgcgcacgcgctgggccccggctcccggcggccgccggggccctcccgttacgtcacacagcgcagccaatcaggagcaccgtcgcgacgatcagggtgggcgctggtcgcgcccgctcccgcgttccaggaggaggctgaagaggcgccggcggtaggcactctcttcctgggccgctgcgcgccgctgggggcgctgcggctgccgggtctcccagcgctggcaggaaaacagctggagccgagagggaaccgcgtttcgaaaacctgcttctgggaacaaagcgtaacgtgcaggctgaatcgcgggccagggaggcgtggcactgaggcgacctggccagcctaggggcctgagggaggtcaaggactgacaggtcccgatgggccgaggtggcccagtaaaaggatgagcccaggggcagatgtgaccaccagataggtgactgactgaatgactcagtccccaggtggcctgataggctaaggaagccctagtggctacgtgacccgctaaatggagtgagaggagagagaaggtgagggttagattgactcaattaagtggtcaaggaagtccacaagtgggtaacctggctatcatgggctctgaactgctgaaagtaaaatacaaatgcctctcgggcgtggccccgaggcttcccctgccccggattatgcctgcttctgcctatttattaatccctatttgtttttgtttgttttctttctttctttctttctttctttctttctttctttctttctttcttttcttttttcttttcttttctttctctctctctctctcttcctttcctttccctttccctttcctttccctttccctttcctttccttctttcgacggagtctcgctctgtcaccaggttggagtgcaggggcgcgatctcggctcactgcaacctccgcctcccgggttcaagcgattctcctgcctcagcctcccgagtagctgggattacagctgtccgccgccatgccctgctaatttttgtatttttagtagaaacggggtttcaccatgttggccaggctggtctcaaactcctgacctcaggtgatctgcctgcctcagcttcccaaagtgctaggattacaggcgtgagccaccgtgcccagcctgtttgttttattttgtttgtttttgagacaggttctccttctgtcacccaggctggagtgcagtggaactatcatggctcactgcagccttgatttccccatctcaagggatcctcccacctcagccttccgagtagttgggactacaggctcgcgctgccatgcccagctaatttttttgatttttttttttttttttttttttttgagacggagtctcgctctgtcgcccaggctggagtgcagtggcgggatctcggctcactgcaagctccgcctcccgggttcacgccattctcctgcctcagcctcccaagtagctgggactacaggcgcccgccactacgcccggctaattttttgtatttttagtagagacggggtttcaccgttttagccgggatggtctcgatctcctgacctcgtgatccgcccgcctcggcctcccaaagtgctgggattacaggcgtgagccaccgcgcccggcctttgatttttaatagagacgaaatctcaccatgttgcccaggctcgtctcagacttttgagctcaaacaatcctccccctcagccaagatgtgagccaccccgcccagctatgtatgaaacaagttaatatatgcaaagtgcttagaatagtacctggcacatagtaagcatcatatgagtcttccattattattattcagtcattccctgggcctctacctctataccctaaaaccctgagcatacaccctcagtgggtgggtgagggtggagagaaaaatctccactttgttttctaactacttttcactgtcagatttaccacttcataatcacctgctccttgccc

SEQ ID NO: 1562673 - DNA, 4001 bp, Homo sapiens
cctcaatggtcacatctggccagtggctctgaaatggatggtgtagatgtagaacatctccatcattgcagacaggtccactgaatgacactggtctagaaagtcttggtgtgttattagtgtgtccttaacacctctctgtgtctcactaatctctctctctcactctcttttttgttttttaattttttttttttttacaaaaaatgatcaggccacatgcttagcagcaagactatttagctaaaaattaatagcattaaaacattatgtttatttttacagttaccttctactttaggcgggtgatgttggctttcaatttacggctgggagggacatttttagatccaacactggattctaaggatctcctgcagaactgcctcatccagtgggcagggtctgtgtaaatggcaccctcctactgttgggcagtgcgcaacctgcataatcttacatggcagtcctgcacactcctcagtacttcaggagggcacaacagtaagagcctagggagaggggacctagaatatctaaaagtcctagcacccgtctctaggtcccttcctgtccaccctctaccccaactcagtgtccccctagactcacgctccactcagcactttcaaagatcgcacagtctcgaagccaagctccagcacgctggggcactcggccgtgaactcgtgccgccggccctggaagccgtcctcatcccacaccaccatctgtgccaggaaaaaaaaaaggtggagatccgcatcagagtcccgtgaagggtgagaggttgggggctcgccccaggatctggcaggtaaagcagggattgcaaactcagattcctccaggagccaggaaggcaagagcagtgataaatgtgagacactagacagcacaggtgccaggtaaatgggtggcctcttcccagtgccaccaatggttgccaagtgggaatgcaggccagaccttccaatttctcaagacaatcactagatctggacttttatgtggttcttccaggcttttaaaggctgatgataaatccaaaagctttataaaacaaacaaacacacacagagatggtcaaagaaatcatgcccaaagactgcaacctctgccaaagagtgtaacaggtcaactttgggaaccagaagacccaaattcacattcaacctccctgtatgtgacatacaagtcccttctcaactctgagccttgattgcacctctgtgaaataggcatttataatgcccccctcctaggattcatggggacctgaaccctccccataccccctgaacaccccctccccatgcctcttcctaccttccagggtcccgctgactttgtgcattgcagggtcattgtggccccttcctgcagaagagaagaacattataatcttccaccctgaccctctgctctcctctttatgcagatggctggcttggacctggtcaggatccacatagggagtccaggagtgactgggctaggggcaatgcatggctttggcctgtccctctcctgtcctttccatctgtcaccaatgccatcttccatcctatccccatctcaaaactcacccttgctgggtctcattgactctgagccccactctgtattctcttatctgcttgttatgggaaaatttttgtggctgctggtgggtgggtgcatcaccccagcgagtgctgaaatgctcagcataagagagcccttccaaagacagcacctagctcaaagaggtagctctgatggtggaaatttaggcaatagggctacaggaataatttgtttttaaatgagggaagcaggtgctggtcttgatggttggggctcatccttggttaggatgaggatggcattcaggatgacacagtgacatccctaggactggggacctgggttcctcgcctcccagaatgctcactcagaactctgatcccacccctcctccaaacctgggacttaccgagataggcccagggaacatgtcagatctgagaccagccgaggtcgggctcttataggcagggagggaagaggggcccctgggagacaaagccccgactcagcaactgggccacagaaacaaaagccagccctggctgaagagccaatggcaagccgtcagcagctctggctttagcagggagggaaaggaccagatcaccacccccagggatcagccacgaagaaggagagaggtggaatattggccctcatcagccccacaaggttcctgactagagcaggagaatgagcactagatgaggagtccagaagcatccttcctagctatgtgagctccagcgagtcatttcccctcaatttctgcctataaaatggggcagaaacaaaccatatcacagagttgttgtgaggttacataacatgcctggtacagagtaaacattcaggaaatgcctattcctttccttctctctttcccctttctcttccagttgaagcaatccagataggcttgccgttagaggaggcatttgaactagactctgaaggatgaggaagatatgtacagagtgagatggaaggagaggcattctaagaaaaagttcagaggtgggaacttggggcacatgtacaagaaagagctggtagcccaattggcctggagctcaggggacctgaagggaagtgaggcaggagaagagggctaggccagggcctgctgggtccacaaagcctgaagatgaatccggatggcactgtgggcagcatagaggagctgttagttgcaaacatgctttgcaaactgtggcacacttgccaaatatccaggacttgtacaatttgctgtgtgcctcttgtcccgaaaccctgccctctgaattggcgtatgagggacctaagaggtccctcatacatacatacttgtgtgtaaaatgggtgtaacaagcataggaaaacagcatgactggaaaccagatcatctgagatgaaatccagccctgcttctttcttaccatccgtgtgacctggaggacacctgagtcctgctcatgacctgtaaagtggccacaccagtttccttttaagagggtgaaatgcagctctatcaaacgcatgactttaggctgggcgcaatggctcacgcctgtaatctcagcactttgggaggccgaggtgggtggatcacctgaggtcaggagttcaagaccaggctggccaacatggtgaaaccccgtctctactaaaaacacaaaaattagccgggagtagcgcgggcgcctgtaatcccagctactagggaggctgaggcaggagaattgcttgaacctggaggcaggggtttcagtgagccaagatcatgccatttctcttgaccctgggtgacagagcaagaccccgtctcaaaaaaaaaaaaaaaaaaaaaaaaaaggaatgcatgactttgatgaagggttggcatgaaaatgaaaggttaacaatgcaccctctacagccagactgcctgggtttgcatcccactggtgctggctgggtaacttttaagcatgttacttacgcactctgagcctcagtttacttgtgtgtaaaatgggtgtaacaaggtaagttgggattagtctaagaaacagggggattgtgaggataaatgtgaatagcacatgaacagcagctggaattgctcctgcaacataaaaaatattgtggtatttccatcatcttcatcatcaccattgctaataagaaagatgattattattaattgttgatcaaaaagcaggggtgcatagtttttaagagcctgggttcatgagtaaagaagatgtgagttccaattttatcttacatttccatttttatgagaaagtggctgagagagaggaaggaaagggagttgcttcagtttccttatccgtaattggggttaatcccagagacttcatccttatactgaggagtacaggacaatgcaaaaaaaaaaaaagaaaagaaaaaaagaaaagaaaataaattggctccataag

SEQ ID NO: 1562674 - DNA, 4001 bp, Homo sapiens
gaggtgcggaggagtaagaggtgaaagaggaagaggaggaggagaagaaggaggaggagggaaggaaggaaagaaggcatggcacccagccactgcacccccaggtccttaccctgtagttcccaggaggcagttccgccgccttggcgctggtaataggcacggttgttggggccagggtagtgccgggactaggggatgttcctgcaggtggggcccccttccccttggtgtcaggccctgggttcaccgccactgtggccgaggccgaggcctttgcagcctgagacatggttcccgcctgcaaaagtctgtaaagaaactctggccttcagggatgacacccccaaactgcctcctgccctcatagccccacatcctgtgctttcagcctccttggagctcgtttcctctctatctccttctgaaacggttaagcctggaagtttttctttcatccctacttcccagccaagaccttcccgtctgggggccactcatcccacatatatccttcctccaggcttttgaccatgcggttccctccactagctgttccaccctccattaccccgctaggtccttccttagccccctgcaattttccacactgcttatcacactgatttgcttgtgcaactccaatttgcctccctagactaataacaagaagtcccatttgggagtacttaaggtgtgccaggcactgtgacatacattaattaacccatctgaccatgaacctcacccgatggagtagctgctatcatgatcccctctgagcagcagggggctggagaaggaaggggcccagctcaggcccaaacagctactaagtggtagggctctgatttcaactcaaggaaatggagccagcaactgggcttttaaagtattctgccatttgcttaatctgatttattcaccgtccatccctaacacttgctctgcacctggcacataggagatgcccaattaacatttgttcagagaatgaatgaatgcatgctcccagctcctttccccgtctgcttcctctgaggggttggtgtatgggtgcaaatacaggccggggactgaggcttatgggaggacccaagaggatgtatttactgcatgtggagggttctgaaaatgaggactggggctgggtaggctttgggtggagagggctttggtcaattccagtggttccttgttgctttggggtcgtggactcctttgaatgtttgatgaatacctcaactttgtccccggacaaaaataatgctctctttaactttggagacaatgttaagggatttgaggaccccctgctagcacagattaagaccctctggtcaagctgattcccgaacacattctgtaaggcggagctagttgggataagcacatccctcccccagcctcctccaggaaggctgtgcatattctggggtgccccctgttcaccaggggtgaggccagacatctggaccacatctgtggctttaaacactcccccagggctggcagctggactcatgccttcctggagatattctcattctctctctctccctgcttcaccctctccctctgttcctcctctcttccctgtctttgcctctctatctgtttcttacttctctccctctttctgcctatctgcctgtctgtttctctccctctctgttcctctctcccccactatctctccctcattgtatctttgcttatctctctatctgtcctttttaattatatttacttctctctctatttctgtcttttctcactctctcccctctccctctccctccctttcttcctctctccacttccgtctttatctccatggccctgctctctgactctcatggcactgctatctctgcctccctctctctgtctcccttttctcttcccctccccttcagctctcagctgggctgtgggttccctcttacctggggacttgctacttcctgctggaggacaggcaggcgggcaggtgctatgggtgactagagtccgaccccccattttatagtctggcagacatcaggccctatagtctgtggcacaaaggggaagctggctcagcaggcctgggcagggagtgggggactggggccctgacctcgcctggatcactgcagacagcagcactttcctttgtgagaccagcacacacagcagaaaccctggccacagcagcttcaccttccaaccctaccctgactcctttctcaacaaccccagccagggatgggcccccaaaagggtccctgctggctgccaacatggggcagggaaaaggggagaccctgggaggcaggagaccagagtttgaatcctgactcagccactgcgcgctgtgtggcttttggtaggtctctacccctaggggggcctctgtgtctgcaattataaggtgggcacgtgtccctgttggatgccatatagaaaagaaggtgacaatgagcacagaagcgttttgtaaaggcagatgtgggtttgatatggacagccttttttacggagtgcttactgtgtgccgaacccgtgttatctcggtcagtccccgggacaatctgccttatttggtactttcattatgcccatttcacagaagaggaaagtgaaggcacagagaggtcagagccagcccaggccagccagctctgggcctgtgtgctttcttctcctgctgtccagccttgaccttggcctgaggccccctggcctgacttcctctttgtaggttggggtgggaatgggagagtcgcactgtgctcagctgggttggatatcggagacctgggtctttttcttttccccacattgggccccatcctttcctgacctatcgacagtgatccctctcgccaccccagttccccgcctctacccaggccacgttatctgacctggaggacagtgctggtggccagaaatatgactgcctgtcccagagcctcctgccctggcaagccccagatgcccaccacatcttgttcaccactggccccagcacctagctgggcctggctaggtagagcttggcacatcatgggttctcagtcaataactggtgactcaatggtggttccaatggatcggaacagaaggtagggtacggaggagatagggaaaccaaggcaaggagagagaagtaaggaggcagatagaagtaacagacaaagagagaggtggagacagagacacagagaggcacaggggacatggacagtgaaggagcgagagacggagagacagaggtcaagttggggtgatcaagcctcaggacggaggaacagacgccagaaatcacagggcccaatcctcccatttcacaaatggagaaaccgaggcccaggtggaacaaatgacttcaacatagtcacatggcgggaactcacagtacagctggggtcagaaggagcctggggagctgctcagctaggtcacctgcagtcggctccccagtcccaggcagggtatattgcgggggcatctggataggctcctgtctcttctttttcggggttctaggctccccgtggagcccagctctgtcttgaactctccctggcctggagccagctttgcctctgtccctccaccacccagcaccccctcgcttcctagcctctccttggcctttcatcctgggccaagacttggtgggtggggtgtgggcaggaactgcaagatggggtagccactggaactggggccaagacgcctgtggtgagggcccacccaccagtctaggcttcaaagccaggtcatctggggcagttccgtgccccccctaaagccccaggaatgggctgtctgccagagggtgggggcagagaagggggatggcccaccatgttggtggctccactctgagcatttattattattattgtatccttcattatatctttttcttttttgccctgtcttatggagccaatttattttcttttctttttttcttttctttttttttttttgcattgtcctgt

SEQ ID NO: 1562675 - DNA, 4001 bp, Homo sapiens
cagtatcagctccaactgtgtgggtagaggagactgagtcccagagaggggcaggggtcgagagggggtacccatgaagaaagatgccaagcccattttacagaagggcaactaagtctgggggaggagcattgcatgccccctcctctgagaggtacccaccttggggttgagggactgtggcttgcccgcctgggtctggtgatctgaggccatggtggactgtcctgtgcaggaatgacctggaagacatgggaagcagcagtgaggacctggaggggccactggctttttcactctgtggggccttgagaccactcccctctggccccaaacattctctttttctcctggtttcagactgtcccagagctgtggggtccgtaagcagctacttcaacttctgtccttagcttcatttatttctatccaggccagctgcaggaggagggaaaaacgaggtctactcaaagaaagagagcagtaataaactagagcttaaatgaggtccaaagtgggttcccaacactcaaccccagacaatggataccacacagaatatagaatggtcaatcccagaacttctgcctttatgcagtaatttcttaaataaaattgtgtggaacaaacaaaacctatgcattggctgtatttggtggtgtggtggtgcccagtttaggaactcacaaagttccctgttcccctgctccttctcccaccctctccctgggactcctctccccatcctggtacctagatttctcttctctgccactggttttactcccccattagtgaaatcatctgatacagaacccacattacaagaaagagaagaaatgggtgcgacggtagaaatccaggcactgtggcaggcagcagggtagacctgccttagctagtgagaacatcagaaaagcctggaaaattgtcagcctcttcccccttcctgcagaaggggtggtcaaaccaggctgtgtttccccaggggtaagagaggaagcctggcctccctcttcagagataacgccagcttccagaagccccttccacatgaaaggccaatactggatgtttcccaggaggaagaaatgcagttaagcaccttggcagccaaatctactgctctcccgcaagaaaccagccctctgggcttgtcagagtgcctgaggtcctgccatatcacttcccagtcctgagtgttcacagactgaagaagctcagttggtccagttcaggagcagtctctgctgcctgccagaattgagactctgggcaggtctcatcctctccctatgcctcaacttcctgttctataaaatggggacagtaatgatgtctaataatacctgtgaacaggttgtgaggattcaattatgtaatgtataaaaccggaagcacttggccgtggtcccagaacacactcagcatgcagcaaatggcagcaattgtggcattattagagtcatttctaccatgctttagtggcattgaaatcacctgttgctgggacctgtcacatacctgtggctgcatcctatcccctagcactcccagaggctaggcacagagtgggtgccccctaattgcagatgtggaggaaaactgactcacccacctagaaacaatgctgaactgtcactggtttgattcttgcaaaaccctcagttacattctcctcctcagcgactggcgaaacaaggatgctgatagtctgtttaatattaataataaagaacattgccccaatgcccactgtgtgccaggcactgtgctggatgatcccctaacttctcttgaatccttacaataaagaaggctttttaacccccttcccagttaccagaaaagaaaactgaggctaacagcattgaagtctctgcccaaagtcacttgtcagaatctgggtgctcccatgcttgcggacaggggtgaggatgagagaaagaagggaagacaagcaagagaggcaatcttaccagtgacaccagcccctgcgagtgccgtgaagctcggccagcgggaggtggcatttataccttccccagaagtgccggtgccaagatgagtgaccgctgtgctcctgcgaaaagcagggtgagaatgctggattaagctctcaccaaagctcgggtcagcaaatgcccacagacattgtgtctctgcacaataatgtcattagctttcagattcggccgcgccagggcggtcaggcggctgggcaaggagatgcccgctttgcatgcatcagccgtccggctgccagggccaggggtacgctgggttcactggtacggtcagtcaggccgtgaggcatggcagacagaggaacatctcagtgggcctggggaagaacaagtaaagaagggtggtttggcagagtctgggcttcattcatctacccatttattcattcaacaaatatttgttgggcatccacttggtgacaatctctgttccaggggagtgtcaggaagaggacctacgccagcccaggccattcagaaaagctcctgggaggtagcgcatccctcagggatggagaagaggaagcctgggaacagggtggggggacagttccaagcagaaagggtccatatacaaggaaccagcatggtgtatttcaagaagacctgaaaacaggttaacaaagctaaagcatgacatgtgacaaatagggcctgtgccaggtggccaaggtgggcagggcctgatgttgcagggccagggaggccaattatggagagtgcattttattctcaaggcccctggctgtttctctttcttttctttctttctttctttctctttctttctttctttctttctttctttctttctttctttctttctttctttctttcttctctctctctctctctctctctctctctctctctctctctctcccctctctctctctctctctctctctctccccctctctctctctctttctttctttctctttctttcttttgagatggaatctcactctgtcacccaggctggagtgcagtggtgtgatctcggctcactgcaacctctgcctcccaggttcaagcgattctcctgcctcagcctcaccagtagctgggactacaggtgtgcgccaccaggtccagctaaattcttttttttgctgtatcttgttagagacagggttttgacatgttgcccagggtggtctcaaactcctgagctcaggcaatccatccaccttggcctcctaaagtgctgggattccaggcatgagccactgcacccggcctgtttcttaaccactgtcctagagtgagttgctcttagatccctaccactggccccatcgctgccacatgggtgcccagcctttactcacatttcttttctattttttttttttttgagatggagtctcgctctgtcgcccaggctggagtgcagtggcacgatctcagctcactgcaagctctgcctcccgtgttcacaccattctcctccttcagcctccctagtagctgggactacaggcgcccgccaacacgcccggctaattttttgtatttttagtagagacggtgtttcactgtgttagccaggatggtctcgatctcctgacctcattatccgcccgtctcggcctcccaaagtgctgggattacaggcgtgagccaccgcgcccggcctttactcatgtttctttagtgcacacaccttccttgcagcccaggctgtgtcttgatccaatctgaggcttggagactgggtcaagtatacctgctttcccctgtctctcattttcttaatgcacatatgcatgcacacgcatgcacacacactacacacacatgccccagccccctagctgggcttttccttttgcagcactcatcactacccaacattctgttactcatttattttctgtctttccaatgagaagataagcaccacaaaagcaaagaagttgtccccctggtttaccatggtatctccagagcccagtgcctgacgcatag

SEQ ID NO: 1562676 - DNA, 4001 bp, Homo sapiens
acatggggctgttgaggcccagagagcctccaaaccctgtgcccttttccccagagtgggcaagacaccaggctgaggtcagacaggagagtcagagctcagagccgtttccagaaacccccgggcctctctgatccattggtgcaggcaggatgtgggtgaccatttctgttttgcagacgagggaagatgcagcaaagtcatgaagcaagtttctaacgggagggtggcagtgagaggacccacccggagcgttttgtcctggcctgggtggttggaaggatggctcttccttcctgcagaggtgctgcttggctgggaagatgaccctgaggcccaggagtagcctgggccctctgaccccctccctgcccagtaccttgtagctgcccccaaggtctccatggctcttgccagctgcagcctgttcgggtgctccgtgctgttccgccatctccccaggaacacctctggcttcaaaccaaaagaaaatggttcactggatccacccgggagaagccaggtgttgatgtgactggagtccaggatgagctacagagccttgctgcccatggggcgtggctgtaacttatgatcgacattcagtcattcagcaaacatccattgagcacctgccatgggccacgtggactgagacagtgggatcaggagccccattgtacagaggggaactctgaggctcagcaaagtgaggccacttcctcaagcacacagtgaggaagtggcctgggtcgggcctggctccaaagcccgtgcccttttcccctgatccagatgctccccgaaacccaggtttctcagagctctctgcagatgtcccacccccagaacctggctaaagggtgggcttcagggagtttcctctacaggggtctctcccacctccgtactccaggaactcttttgttcactggttactttattcaacaaatattccatgagcacctacacagtgccaggctctgggctgggtgaccaggagggacaggagaccccatatgtcgggaggtggacagacagacctctagagaaaaggcttgtaagaccaggtcgttggacacctgctccaggtcagtttccctgcgttcggttactcattccttaagcatttattgaacacgactgtgtaccagccacttcaagacccagacaccgacagttcttcattgctacagggacagtgacacgcaatacaggcccctgccgcagtcacatggaaggattctcatcattgttgcacccatggacacacacaggactgttctgtttgtcagcacacacacataggtgcacacactcgcaaaagtttctatggtcactatcagttatatttcacccatgggctcacaggacagcttctttctctctctctctctctctcctcacacacacacatccctgcccatttcagacatccacagtggtaaacaaggcacctacatctacaccccacatccaactgttacccacccacggctcccagcacggccaccccagcatgcacagctgcacagcccacatactctggatgtgggcctaaccatgcacagcctgcgggctgtcggttctgtctctcctagcctcagcaggaaacagggcttggtccagctcacaggggactctcgggggacttggcaggtaccatgtgtgcccactcccctccctcagaggagctgttttggaaggtcccctgccctaagcacatgtccaggggcttggaccctggccactgcagacaagggtccctcgttccacccccagctgggctgtcagggtcctctcactgggacctgacccttaagggaggcgctgtttttctttgcaggcggtcagccatgcgcgtcccacagaaactacaaaaggtccgggcctgccagggtggcttttgcctccccacccccaacccatcccagaatgaacctgttgctgtagcctcgggaagaacagaggagccacggccgtctgcagactcgcctgtcttcgcaaggggcatgctatttatgagcactttctgacagcccagcacatcccagcctgctgaggcagcaccctgtccacccaattccatccaggccacttcactccaatagcgggtccacggaggcccccagtgcctgtctcctcagccaccgtctctgatgacttcctggggacagatgaacctcactggctttgtgggaagcccagcagcgccaggcaaggggcacggtgtgcagctctcccgtgtctccccacaaccaccaactccctttctttggtttcttggggtcaccatttcctattgagtcacacgcaacctttggaaaaattctagttcttaaagtgagggaccccagacactctccagtttccatgtgccatgtggcctaagttttaagtcagatcacgctaaccatactctccaacttgggcgcaaatccacccaaccgtttccataggatgccgtcacagaactcacagactgactttcttcatgtagaagacacgcacgaataatagctaccatttcttgaacacctactacacgcaaggcattgtgccagcttcacaagcattgtatggaattctcatccagccatccttaggggaggaattctgattccactttatacatggagaaactgagttcagagaggtgaacccatttactcagaatcacacagcagagagaaggggctggcctgctccaggacctgggatcttagcctcaatagaaataaaagtgaccatcacagtcaacttatttatgaccaaagaaaaaaggtagatccaggtatttttattttattttttagagataggttgttgctacattgcccaggctggactcaaactcctgggctcaagcaatcctttctcctcagtgtcctgaataaccggaactacaggcacgtgccactgcacccagcttccaggaattttttaagtgtctaacaaagtataattttgcctgtaatcaatatctaataagtgattattttatgaataaaattatattggagcaaaggagtgagttaacaaggttttcttttgttgttgttggtatttgtttttggctaaaatcctcaagtcagcataaaacccagttacaggccgggcgcggtggctcacgcctgtaatcccaacactctgggaggccgaggcaggcggatcacgaagtcaggagctcgagaccatcctggctaacacggtgaaaccctgtctctactaaaaacacaaaaaattagccaggtgtggtggcgggtgcctgtagtcccagctacatgggaggctgaggcaggagaatggtgtgaacccaggaggcagagcttgcagtgagctgagatcgcaccactgcactccagcctgggcaacagagcaagactccgtctcaaaaaacaaacaaacaaacaaaaacacagttaccctgtaccccctagagggagatggtggtgagatgctgtggatgacagctggactctgagtcaggcagatgtgtgtgaccttggacgagttcctgaaggtctcagagctactgtctcctcaccataaatggagaaccttctctccacttgggccattttgggaggtcatgcaagcaaagcactgcgcacagtatctgttatttttgacttttattcccagcatcctgcctactctggacagttcaagccaaggggctacttcctgctgaaggtcacagaaagcagtcggtttggaccccctgagttgggatgtagttgccaccagctgggacagaaggaggaaggcagaggtggggatggcgtggctccccctcccatcacatctttgaggaccttgcagacctactgcacgctcagcactttgatgtaccacatctccccaatctagacttttcaaccttgacactactgccatttggggtcgggtcattctttgtggtggggtcggggtgggagctgtcctgtgcactgcaggatgctgagcagcatccctggcctctactcacttcctggagc

SEQ ID NO: 1562677 - DNA, 4001 bp, Homo sapiens
gagccaaatacgcaccccagtcccacctgtgcttggctgtgcgaccctaggcaagtcactttcccattttgagaccccctagagagaggaatagactggtcaaagtcatacatacatacagcatctgaacttgaactccaatcagtgtgaccccacagctttctggtgtgccatgccagccccccagcccaggagtgtcattttgctggctgtggggcagaagagctccctactacttttagcctcccattttgctgctcagcatggacaaaggtctgaactgccccaagccccattcctacaaggctctgggtcctggctgccccagttgtgaccgtggacatgactggctcagccaggtcctgagcgccctctaccccctagggggctctactccagactggctggcaggtgtcccctccccaccagccatctgagagtgtccccaagtccccctcagggaatccccctgcgcatccgtgaacattgcctagccatgtctctccaagcctgggagagccatctgtggccaaaactgtcctctggcctttcccaggacacgggcaggcagttcctgtctatacctgtctttttttttttttttgaagggggtgaggatgggtcaagatgggcagacacagaaaacagacatttttggagaagacttcaaggaaatggggggcggcagggcaaagctgggaggaggaaacattcagaatttggagggtccagaggactctgggatggagtcaggtttgggaaaccagttccccatcccccagaaagctggagaccccctttcccagggagaggcccctgccggatcacagccaggcagcatgatgccaggctctcagagaggttgcccaccccccactgggcatacttcctcctctcctaccccagccccagtggatgcagcagttcacactctgtatttattattgttctcgctctgtgtccccctcccctctccctgggaagagcctgcaggctggcagcttggcaggaacctgctgtctccttgtgggtgccagcgtcgccccttatctccgcctggactccttgtgccagggtcaggccattcatgggcttggcaccagccaaggccaccctaagtccctgtatcccaagatagaggcctggcaggccctgacttatcacccctgccctccgggggctgtgccctggcaagggtggaggtcagagcagaccagcaggcaggcaagaagcaagggctcggggtggggtggtacctgggggaagagaataaccacacggagccacctctctaagccaactaacacaattatccccatcacactggggaaaaaatagagtcaggataagacagctgctccaggtccaactgtctgcctttcccagccggtcccttcccagcccaacattccaggggaaggaccagcaagggtccctgctgcactctgctttcagcaactggaagcggcactggggtttctctggtcaaggcggtcctctctcccgctgcttcccagacaggaggctgcggcttggcaggtatctgctgctctctgcctcctgagccagacgcaggtcccagacacagacacagacacagacacagacatgctcccacgggagccacacggcctcacctcatttgggggtcacggggagagaatgagggagggagagacaggtggtatcctctatacccccaacaccctatctgtaagctgaactgggctgatccagcccccaccttcacgttgtacctctctccttcggcctggccaaagccacagtttctggcacagtgtcctcaggccccatctagcccctcacctctcctgggcagctggggtccaggcactgcctcctgcggcgtccgcgctctgtctctctctggctcgtggagctggcaggcaggggatgggtctggaagatgtgtgtgtgtgtgtgtgtgtgtgtgtgtgtgtgtgtctgtgtgtgctcgcgcgggcggtacctcagcccctcactcactcacacgccttccagctgacgtcagggagagcaggagggagggatgagaatttgtactccctgcttaaagggacaccaggctctgtggctcatggcccagacatcacctcctgagtcaggcactgccaggtgagaggctcagctgcgtctctcgggggccttaaagcttctttttttggaaagtggcttttatggtcgggccacggtataatttgccctgcccagtgagggcagctgctgaggaatgcaggggaggaagaacctgagacagcgccacgttcctggtaattagagagcaagtggggtggtgagtttgagtgtgagtgtgtgagtgcacactggggggcccctcggggtgggtgggcatgagtgggggtgagtctgggagaatggaggtcagagccaagaggagccccccagaggggtcgagacaagccaggttcccagggacacccagacactcgtctcccctccggacgctcagtggtcctgccctctgctagtacagacactgacacggctcatctctgtctaccccttgtaatatttccatggaattgaattgacgaggaccccaaggaagtgatcggcttgaaggtgcacaggtgaacaccccacagcctgggaggctctgagtagagaagtagagagggctgattgaattcaggcacccagcctgttctacaccacacgccctggcttcgaagtgctccgcactgtcaagctgtgtgaccttgggccagcccctgagggcctttggaggttgagtgtgtgatgttcctaaacccagggccagctggaggaggcctccacaaaggtgcttctcttcgttcttcccattccttctcagcctcagcttggaaagaaggaagcctttccctggtgtctcctggtactactgaggcaggctggcattttcaaaaggagtctttttaaaataaaaaggaggtgggagttaaaagggaaaccgcagagaaaaatacaagtaactaatacaaatagctaagacgccacaagagcttgctctgtttcaggcagcaagctttgccctcattgaaacctcacaacaatttaataatttatttttatcatccctactttaccggtgaggaattagaggctcagggaggaggaaggacttgacttgcctatattcttccaactggctagagaggtactggaacccaggagcacccagtgtcaccacacgcccctgcccttccagaacctctcaggacaatcaggctcagacagtctgggtttctggttctgcaggagagactgttgagaaatgctgcctgtggttacctggggatgttctgaattattattattttttttagagagtattgctgtgtcgcccaggctggagggcagtggcttgatctcagctcgctgcaacctccgcttcccgggttcaagcgattctcctgcctcagcctcctgagtagctgggactacagacacacaccaccacacccagctaatttttttgtatttttagtagagacagggtttcactatgttggccagaatggtctcgatctcccgacctcgtgatccacccacctcagcctcccaaagtgctgggattacagacgtgagccaccgcgcccagccagggttctgattttatttcacagccccacctgagaactctacccagaggagcctcccttcccctttaaattctcctctctctttcctcctttttatttatttattttttcttttttgaaacagggtcttgctttgttacccaggctagaatgcagtggctcaatcacagttcactgcagcttccaactcctgggctcaaatgatcctcccgcctcagcctcatgagtagctgggactacaggggtgcaccaccatgcctggctaagttttcaaaaaatttttatagagatggggtctcattatgttgcccaggctagtctcaaactcctggcctcaagcgatcctcctaccttggcctcccaaagtgctgggat

SEQ ID NO: 1562678 - DNA, 4001 bp, Homo sapiens
aacactttcacagatgtggaaaaattagaaacaatctaggtgtcgatcaacgtgagattagatgaattgtggtgtacccatcctaataaatgccacatatttcttagggttacttaacgagttaaatctgtatgtattattgtagaaatttggaaatattccaaaatacaatattaagtgaaaaaattaggaatatatatatatatatataaataaaataatcccatttctgtaaaaagaaaaactaccatcctggcacagtggctcaagcctgtaatcccagcattttgggaggctgagacaggcggatcatctgaggtcaggagttcgagaccagcctggccaatatggtgaaaccctgtctctactaaaaatacaaaaattagccacgtgtggtggctcatgcctgtaatcccggctactcaggaggctgaggcaggagaatcacctgaacccgggaggcagaggttgcagtgagccaagattgcaccactgcattccagcctgggcgacaagagtaaaactctgtcacaaaaacaaaacaaaacaaaacaaaaaacaaacaggaaaagaaaaactatatgcttgtatcatgcttagaaaatgttctggaagaatacatgtggtgaaaagaataagctatggaactagggaaaagaaattgctggggactttgtctcttgtgctacataattctagattattctaattttcatgaaggtaggtttctgtgtagttgcttgtttagcattaaatacattccttatacaactcatgaattatcctgtggtgttggtatatctgtatactggaacaatataaataaaactgctggatgaaaaaaagagtgaccaaaagctaataggaaatgtttactcattataaaatgattacaaagcaggaaagatgatagaaaaaaattagaattgggctgtacaaaaatataacagcagggtttttgaagactaaaaattgcacatatgcagcttgtcgctagcacctgtctgacaaggtcccagtgaaacacctgccctttcattctcagggccagtacacacacctgcacacaccctgaagcaggcaccccagatacccacccacccagccagcatacttgggtacagaacacacacacctgggccccaacccaaatcagcaacccaaatcagcagggcagagtgtcataactaaaaagacagacagacagagagagagactgagagagagagagagagagagagagattgctggatagtgcctggtatgtctctgggcaaagtgctgggctctttctcaagttcaaagtgagcttctcaagccacaccgcacccagctctgggcctcagcgcagcaagcttccaggtttcaccctctgcctcttagtctctctgcactcctgcatccccagacatccgcacatgcacatacacacacaggcacacacacaaatgcacacacgggcaaacacacgagcatgcgttctctctctttctaaaccaagatgtcagggactatccatgctccccattccacagatgaggagacagaagcccagggtggacagggggtgctctcactaccaccagcatcttagtgacaaagcgaagacagactataggtgcctgactcccaggcctgagctctcttcaccccactaggcgtccttcccaccaggaccaaccagatcccgctagcgaggctgagtcctccccagagctctcctacaacacccaagcagcttggcacccctggctgcctccccatccactggccgccctaggagtctgggctcaggtcatcctaagaggccaagccctaactcctccaagtccccagggcacagctacccacaggacgccccccaggctccccctgtcctttttcatcctggactccccacattcccccctgctctgaccccacccctcagccctgctcctggacgccgggccatacctctgtgtggtgggagagaccagtcttcttctggagcctctaggcagagtgagcctcccacgtttcctatttatgttgatgtcatcaggaaacagagaagcagaaagaggaagcagtgccggcccaggcctactttgctaatagtgcacgtgacttttcttacttccagaaagcctcctactccaatttaccttcctataaactcctaggcctccttcaagcctcagctgacgcagggcctcctccatgcagccttccctgactgcttgatggggatgcaggtggaagtggctgcaataaccatagctggtttgagcccagagccagacagatctgtgttggacttccaagtccactgcttcttaaagcgtgtccttgtgcaaatcatctgcgtgttacttccccaagcctcgggacatccatctgtctgttacttttgcagaagcatctacaaacctggaaggactgttgagggaatccagtgagattctgtgcaggaagaccttagctcagagctggccacaggagaaccccctacaagtggtagctggtggcatgttgatttccccgatgtcctctttgccctgccgccccaccccaccatgtgtcatatggtcatgtgtgttcatggctgtctttcttctgacactatcttcagtgctggcttgtgtccggcttgcacttccctcccaaatacctagcacatggcctggtacagaggagaaattgcacctttgactgtgtgcaaatgaatagatgaatgaatgaatgaatgaatgaatgaatgaatgaatgagtggctccctgagcacagcagggccagcagaattaaggtcaggtgagtgaggcagtctctcgtgctcaaaatttaaacaggcatttaaaaattcagtaattgttgtaagtaatattttaatgcaatatggtttaaaaaaatcccaactgatgcagaaactattcacggtgaaccaaatatgaaaagtttgaataaagacaagatgaatcacagtgccaagacacaacaaaacgcagtcatatttctcctacatggggctgcctcccaggagaaagggcagcaggcaggaatgaggggaatggagggcaagaatgaggggaatggaggaaatggaggggcaggaacctgcctcgaagccactggaattctggcctgattgttgttctttgctttcctcctaccaggaagggcagggttggccaggaagagctggcagggcctcaccctagcagagaaagcccagggtagaggaaggcatgtgtggttctctcaggcactccggtcagtgtgaggtccctgcctggcatggaaaaaccctgcaggggcttctccagggctggagaggatggaattaaagtgacgtcccgggctctcttttctcccaggtgtccccactctgcctgtctttgctgaggtcctctgtgggactgggaggctgcgggcctggatgccctcaggagcacagaggatgctgtctggtggagaaacgaagaacccgagactctgagtcaaaatcactccggacaccagacccaaaatgtgaaggagctttaggaacacctcagccaattcacttgactgaccctttccttttaaaagtcatcatagagcagcaggggataaaaatctacatttgaatgagtctaacagagttctctcaataagtattaaaagttctaagcgagaagaatcacaccgtcaggaattcattgaatgttttcgtttgtttgtttgttttttccttcagtggtatgtaaaataccgtgtcttgcaattgacgatcttttagagactaagaaacccaagaaaatgttggcaagaacgtagtactcataatgaccagggcttgagcatttacgctgtgagcagaccttcggctgggggcttctccatctcttcccaataacctttatgtagctgttactgtcttcaccttacagatgaagaaattgaggcatgaaaaggaagataacttgttgaaagtagtaactcgtatatgttaacattgcatttttttccatttccattt

SEQ ID NO: 1562679 - DNA, 4001 bp, Homo sapiens
tgctgcttctcccatgggggagggggggagataaacaaagtggggggaaaagtggatataaaggttcaagagtttcagcaggttaaaaaaattagacaaactaccaaccagcatggcacacgggcagtgcttcttactccccgaacaccatcgcctacccctgagccggggcccttgtccctcggacgattaaaataaaaattgaagggacatcatagaaacgaaggcaaaggagacccaaacacaggcattgcttggaagcaacttgagacacttgtgtccccttctcctctctccaaatccttctccaggaaggaggctatgccaggaagaaaatatgcaagaaaactaagggaaaagttggggagggggctcaccccacttcgagttagggtattaacaagagcttgggaatcctctaacgacacccagacactgttttgcgttccttagagacttgcaagacatcaatctctcacacaaaaatgggagaatccgatccgacaaataacccccacccctttctttctctccacaaagaaaaacaaatcagtggcctggtgaccacacacctcttcaccttaggacccccaaacgcccgtcatccaacgagcgggcgcagccttgcgaacccccaggtccgggcgccggggccgggagagcagggggcgccggtgattgtccgatgaaacgctacgcgggcccgaatcaacagtatccggcgcccagcaccccaagccccctccctcagcgtccccaaatcacagccggggtggccgcctggccggccggggcctcggagggcccagcggggggaagcggaggcaggccggccggggggcctcccccgcgagcctgcaaaataacaggccccctcctcctcgtccccagccgcgcctttgtcctcgccgggccgagcgggcggcgcccgggctgccccccctacaccccagcgcgaacgcgcgtgtgtctgccctcccttccctccctctccagcaaaaacaaagaggctgagggagcccgattccccccaggtttgcacccttccgcgggcccgcggccccccgatatttaccccgccgggaaggcgccgatgccgggccactgctcggggggctgccgcgggcgggggcggcccgccggggcggatgccggaggattcgcggagccgcccggcgcgccagcctctcccggcccagccgccgccgccgccgccgccgccgcgctccgctcggccccggccgggctctggctctgggctctcgccgccgccgccgccgccgccgccgcctccctcctcccggcctcctgcccgcccgcccgcccccgccgccggctcgcgcgctctcgcaccgcgcgcgcccgccggctcccattgagccccgggcccgcccgctgatgtcatccccggcccgccgccgccgccccggaggatttaaagggcccgcgccctccgcgctgggggccgcagctgcgagacgcagttccccagcctcagtgcaggcgcgcgggcttacgcgtgggggtgggggagcacacagatactgacaccctaatgcagtccagggcacaggtggaaaagacggggtgcgggggggacagagggaagaggagggcgcacaaaaagcggaggtgaggggatgggaggggagggtctagacccaaagtctcctctccccgcctgccaggatctctctcctctccaggcagagcactgggcccctgcgaaaacaggcggctattcacgacactgcaaaagatgttagactgctggaggctcagtccgcctccaggttccgagtgccgcagagaacacaggccaggttgattcagggcaagagatttgaggagacagctagggatgtcgacacaaggcccagaaaggtagcctgggctcatacattctcctcccgtggaaaaacgaagggcaaagacctcttcttcttttccctgaagctcaaactgtgatgggcacagagaggacccctcagatcccaacctcattctcccctgttgaaggaggggtgccacaagtaccaaagcaccgacacttgagtctgggctccgagtggtgcacgtttagccaagccacctcccagctctgagcttgggtttccttaaacagcaaatgggaggaaggaccctgtcctccccaggtcacagaattaataaaagcttctaccggcatgcagagccgcgatgaaaggttgcagaacaaagtcattaaagtgatgatatttacactgagccatgcaaagcttccaattatgacacacctatattcacacagttgtgactgtggacacgcaaaatgcctgaggccctgcgtccaatcccggaagcacagttcctgggaggagtcacttctataatagccgtatcttccctcctcgaggctgagggactgagtcacacacgtgtccaaacgggcaggagccccacagactaagtcctttcgccggccaggaaactggcccagagaggggaagggctttgcccaggaccacaaagcccaacaggacagctctgttctcccagcgatcaccaggaaactgggtctatctagagcccatttccaagagcaggagagtgagaagcctcctcccaggagggcctgccttcagtgacacctttgccagagcagggggtcaccagccaggtggtgggctttacttggcctgcgcggtgctttctgttgttgttttgttaattaatccccaaagtttttttttttttttttgctttttgtttttgttggttttgagatagagtctcgctgtgtggctcaggctggagtgcagtggctcaatatcggctcactgcaacctctgcctcctgggttcaagtgattctccagcctcagcctccctcctgaatagctggaattacagatgtgcaccaccacacctggctaatttttgcccaggaccacacagtatttttagtagagacggggttggccaggctgggctggaactcctgacctcaagtgatccgcctgcctcggcctcccaaactgctgggattataggcgtgagccaccatgcctggccactccccaaagttttaaaactggaagatttcatatttcagatccagattccctgtttctctgggggcattaggagatccggtaactctgggcccaagttctcagccggcctgagcgccaccccaccgccacccattttgtttctttcctcacatgagcccaggcagagaggcctgggcacaattgagcagggggtgaagtctgcccctgtgtcctccagtccttaccacccctaaccttccaacctgggccctgcttcccaaagccctcctcttcttcagcactttcaaggcaaccagccctgggagaggaggttatttgttatctcatttaatcctctcaaacaacaacagattacactgtattctttcagagaaggaatcaggctcctcccagtgcttgcctaagggcacagatcaacctctcccttaaactgggcctggctggaacagaccccctgccccttcctaacccagccagatcgccaggtctgactgcagcacgttcacgttctcccctctgcattcaggacttgtaaccacacctcccaccccagcacccccaccccaccccctgccccagttaagatcctgctcagttccctgggccagccaggctgaggagcccggctcatccccaggcctgctagggagcctccctgccttgccattggaaggacatgctgttgtccactgcctgagttgtgggcccaagtccttgtccttcctatccctggaagacctgtgtgtgggcccttccaaagagctttgcagtgaagctataagggaaggcaaaccatgacacaaaacccagctgaggaggggagactggtccaaagtgaaaaacaaaaccttacgtgttccagcagccccacagcctgacttctctctccgacttggttcacagtgattcctctcagatttaactcctaactttaaaacccaacggt

SEQ ID NO: 1562680 - DNA, 4001 bp, Homo sapiens
gacctccaccagagctggccaaactctgggctctcaatcaagggccgctgcccatatgcttggcctgtctcagctgaggtgccacgctgccaggggaacacagtccacgtttgcaggaaacccacacgccacacatcccacgtacacacacgtccagcttcccgagtgtgtacactccaacggaagaaagaaaagcaggcacacacagtgagccctgttggggggtaagggggggtgtgcacgcaacccccccccaacacctcagtccactttctgccaacaccaattcagagaccacacatggcagccaggaaacccgcaggttaggaaaggaacataaatatacccgcatcctatattacataaatacccacgccgggttatataaatacccgtgccctctgtctgggtgtcttacataaatatactgcacatgaccccccagtctctccccactcaccggctgtctgcagagaacgagagcgggaaggggcaagcccttcaggaccccctgactgctatgtgccagccacccagacccccagtcgctccccaacaccccaggggtccaaggtccctgggggagcctagactgtcccggcaccaatacccaaaaagcctcccagaggagagcagaaaagcttcattcaggaatggagaggcttttcagttcttttgctgcttctcccatgggggagggggggagataaacaaagtggggggaaaagtggatataaaggttcaagagtttcagcaggttaaaaaaattagacaaactaccaaccagcatggcacacgggcagtgcttcttactccccgaacaccatcgcctacccctgagccggggcccttgtccctcggacgattaaaataaaaattgaagggacatcatagaaacgaaggcaaaggagacccaaacacaggcattgcttggaagcaacttgagacacttgtgtccccttctcctctctccaaatccttctccaggaaggaggctatgccaggaagaaaatatgcaagaaaactaagggaaaagttggggagggggctcaccccacttcgagttagggtattaacaagagcttgggaatcctctaacgacacccagacactgttttgcgttccttagagacttgcaagacatcaatctctcacacaaaaatgggagaatccgatccgacaaataacccccacccctttctttctctccacaaagaaaaacaaatcagtggcctggtgaccacacacctcttcaccttaggacccccaaacgcccgtcatccaacgagcgggcgcagccttgcgaacccccaggtccgggcgccggggccgggagagcagggggcgccggtgattgtccgatgaaacgctacgcgggcccgaatcaacagtatccggcgcccagcaccccaagccccctccctcagcgtccccaaatcacagccggggtggccgcctggccggccggggcctcggagggcccagcggggggaagcggaggcaggccggccggggggcctcccccgcgagcctgcaaaataacaggccccctcctcctcgtccccagccgcgcctttgtcctcgccgggccgagcgggcggcgcccgggctgccccccctacaccccagcgcgaacgcgcgtgtgtctgccctcccttccctccctctccagcaaaaacaaagaggctgagggagcccgattccccccaggtttgcacccttccgcgggcccgcggccccccgatatttaccccgccgggaaggcgccgatgccgggccactgctcggggggctgccgcgggcgggggcggcccgccggggcggatgccggaggattcgcggagccgcccggcgcgccagcctctcccggcccagccgccgccgccgccgccgccgccgcgctccgctcggccccggccgggctctggctctgggctctcgccgccgccgccgccgccgccgccgcctccctcctcccggcctcctgcccgcccgcccgcccccgccgccggctcgcgcgctctcgcaccgcgcgcgcccgccggctcccattgagccccgggcccgcccgctgatgtcatccccggcccgccgccgccgccccggaggatttaaagggcccgcgccctccgcgctgggggccgcagctgcgagacgcagttccccagcctcagtgcaggcgcgcgggcttacgcgtgggggtgggggagcacacagatactgacaccctaatgcagtccagggcacaggtggaaaagacggggtgcgggggggacagagggaagaggagggcgcacaaaaagcggaggtgaggggatgggaggggagggtctagacccaaagtctcctctccccgcctgccaggatctctctcctctccaggcagagcactgggcccctgcgaaaacaggcggctattcacgacactgcaaaagatgttagactgctggaggctcagtccgcctccaggttccgagtgccgcagagaacacaggccaggttgattcagggcaagagatttgaggagacagctagggatgtcgacacaaggcccagaaaggtagcctgggctcatacattctcctcccgtggaaaaacgaagggcaaagacctcttcttcttttccctgaagctcaaactgtgatgggcacagagaggacccctcagatcccaacctcattctcccctgttgaaggaggggtgccacaagtaccaaagcaccgacacttgagtctgggctccgagtggtgcacgtttagccaagccacctcccagctctgagcttgggtttccttaaacagcaaatgggaggaaggaccctgtcctccccaggtcacagaattaataaaagcttctaccggcatgcagagccgcgatgaaaggttgcagaacaaagtcattaaagtgatgatatttacactgagccatgcaaagcttccaattatgacacacctatattcacacagttgtgactgtggacacgcaaaatgcctgaggccctgcgtccaatcccggaagcacagttcctgggaggagtcacttctataatagccgtatcttccctcctcgaggctgagggactgagtcacacacgtgtccaaacgggcaggagccccacagactaagtcctttcgccggccaggaaactggcccagagaggggaagggctttgcccaggaccacaaagcccaacaggacagctctgttctcccagcgatcaccaggaaactgggtctatctagagcccatttccaagagcaggagagtgagaagcctcctcccaggagggcctgccttcagtgacacctttgccagagcagggggtcaccagccaggtggtgggctttacttggcctgcgcggtgctttctgttgttgttttgttaattaatccccaaagtttttttttttttttttgctttttgtttttgttggttttgagatagagtctcgctgtgtggctcaggctggagtgcagtggctcaatatcggctcactgcaacctctgcctcctgggttcaagtgattctccagcctcagcctccctcctgaatagctggaattacagatgtgcaccaccacacctggctaatttttgcccaggaccacacagtatttttagtagagacggggttggccaggctgggctggaactcctgacctcaagtgatccgcctgcctcggcctcccaaactgctgggattataggcgtgagccaccatgcctggccactccccaaagttttaaaactggaagatttcatatttcagatccagattccctgtttctctgggggcattaggagatccggtaactctgggcccaagttctcagccggcctgagcgccaccccaccgccacccattttgtttctttcctcacatgagcccaggcagagaggcctgggcacaattgagcagggggtgaagtctgcccctgtgtcctccagtccttaccacccctaaccttccaacctgggccctgcttcccaaagccctcctc

SEQ ID NO: 1562681 - DNA, 4001 bp, Homo sapiens
gctcagtttgtggccagcctgggcaacatagcaagacattgtctccattaaaaatacaaaaaattaggccaggcacagtggctcactcctgtaatcccagcactttgggaggctgaggcaggtggatcatctgaggtcaggagttcgggaccagcttggccaagatggcgaagcccaggtgtgatggcgagtgcctgtaatcccagctacttgggaggctgaggcaggagaattgctggagcccaggaagtggaggttgcagtgagctgagatcatgccactgcactccaacctgggtgacagagagagactccatctcaaaaaaaaaaaacttagccaggcatattggcacgtgcctgtactcaggacactgaggtagaaggatcacttgtgcccaagaggttgaggctgcagtgagctatgatcgcgccactgcactactgtctgggtgagagactcttctcaaaaaagaaaaaagaaaaaagaaatgtatggagcagccaggtgcaggggacgtggccataaatccaaccaccagctggaaggtatggaacaccaccaaaaacagcagggaagggttgggtggagaccaggggaagctttagagacacaggcaggacatttcaacaataaaggaggcagatgctttctggggaaaaatgggccgggtgttgcatggaggttggggtgatgcccacaggttcaccctggccaaggttgcctggggtctgaacatcccgaagttctgggttgggccacactttccttagcaaccacccaagccaagaggccttttgcctggatccccaaggaggagactccaggtcctccccaaggagggaggacccaggtgccctccaagtggcagatgccaggcatagaggtagaggtggaggtggaggagcactgggctgattcctcctgtgccagcctccccacgcctagcgggtcacagttgacaggagagctgccctctgcagccgcagcctccacatgtccacacagactcaagcctccagcctcaccatggtcaacttttgagaaactggggagaggaggtggcctggggggaagggaaggtggctctaggccagcccaggagtgacagcagcagagtggactttgaaaccccatggagcaggctccttccggcggcagcgttgtgggacggtggccaagactagtttgcatttccccatctgtgaaatggggcaaacagcactgacaccgcaaagtgtgaggtccccagcacagcttgcagggtcagtgggagcctggccttgatgggagcctggcccactgagcattgggaggatgcccccgtgtcatccgggttctgttccttgttgctaaacgtgcaaaaccctctgacatagtgacatcgcacacacacacacgttcagtcgcagtcagtgacatcgcccattcacatactcccgtacacacacacacaccccatcacacgtttccatgcccgcccttcacacccacggtcacactcacacacacattcactctcaagccattcacacgctcgctcacacactcacactcagcggcacacacgctcacaaccacgggtccctccagcagccaaggccccacggcggccagggcagggcccaggtgcccccgggtgctgggctctggcgcgccccccgggcaggagggctgggtccccgctgcagactgccagggcgtaagtagcggtcaccacgtagctcgcccaggcccttgtggggtggggtggggcgcggcgggctgggcgggcgaagtgggtgcggccgggtgcggcccgggtcccgcgtcacctcccgcaggccagcccgccccctcgccgccgggtcccagtccctcgcgacgccccgcggccccggcgccccctccccgcctaccgtgctgagctgggcccccatggtggccccgcgccgcgctcgctctgtcgccgccgccgccgccgccgagaccgtcgcgcccgggcccgcgtcactccggagcaggggcggggccgaggggccaggcgggcgcgcggggcggggcgggcgcgggggcggggaccgggtcgctccgcctgcttctgccggggatggagactgggaactggggatgcggccctctgcgctccgagctctcccgccgctgtgctgccccgcgcgggacggtggcctctctgggcctcgttcgccgccataaaggaagcaagatggcgccccccggatgggagcgagaataagaggcggaatcttcccccggcctccgagactgcaggggccggtcctgcctggcctggcctgggcctgtgcctgcagctgctcagcgcggcccttccccgggcctttgaatttgtagttccctgggcagcactgttcccagctgcctcgggccgggttaaatgctgcggtctcagcacggcccgcccggagcctcctcgccggcggcgcctccgctccccacgccattgtcccactgtggagtgatctttgtcccacttagctgaaggcctcctgcgtgtttcccccactcccaccccatcccagtggactgtgcgctcccggagggcaaggccctatctggtttgaagtcccgtacatccccagagcctagccacacagagcctagcatatagtaggtgctcaataaatacctttttttttttttttttttttggtaaagcagggtctcactcttgcccagactggaatgcaggagcctgatcacagctcactttagcctcaacctcccaggctcaagtgttcctcctgcctcaacctcctgagtagctgggcacatgccaccacgtccggctaattgtttttttttttgagacgcagtttcgctcttgttgcccaggctggtatgcattgacgcgatctcggctcaccgcaaactccgcctccagggttcaacagatcctcctgcctcagcctcccgaaattacaggcatgtgccaccacatctggctaaccagctaatctttttttttttttttttttttttttttttgagacagagtctcgccctgtcccccaggctggaatgcagtggcgccatttcggctcaatgcaagctccgcctccagggttcacgccattctcagcctcccgagtagctggcactacaggcaccccaccgcgcccggctaattttttgtattttcagtagggacggggtttcaccgtgttagcgaggatggtctcgatctcctgacctcgtgatccgcccgcctcggcctcccaaagtgctgggattacaggcgtgagccaccgcgcccggcctaattttgtatttttagtagagacggtgtttcaacatgttggtgaggctggtctcgaacttccgacctcaggtgatccacctgcctcggcttcccaaagtgccgggattacaggtgggaactaccgcgcccggccatttttgcatttttttgtagagacgggtttcactatgttgcccaggctggtccggaactcctgggttcaagccatcctcccaccttggcctcccaaagtgctgggattataagcgtgagccacgatgagcagcctaaatacttgttgaatggatgaatttgacagacagtgggcaccttctctgtgtaggctcatgctgggccttagcgtcattctcttgccttgctctcctggtagggtcttggacccagatgtgagctcctggtgctctgaggggatggggtgggctgtgtgttcaggcaacgtggcacagaccaggcagagaaagggagaagcgccttgctggcagggcctggaggtggagacaggtgaacagaggcctgatgggcaaggttagaggggctgatacagccgagctggggtgtgatgtgacgttggggaggcaatgtggagccccgggtggaaagaactggaatgtcaaggagaatggggagccctgcaggatctaggtagctgagggagtgactcactgggtttatttacccagagaagagatctcgctctgatgcccaggctggagtgtagtgatgc

SEQ ID NO: 1562682 - DNA, 4001 bp, Homo sapiens
ggaggcccagggtggagcctggtttctgattttctgttgctttcccacttccctcccttgccctaaacctaaacccatggaagtgagcctgggtgggcgctgggccaagaaaaagacacccgcgtattagtggctccgatggcaagtccccgaatgctggcctccaaccccaggctgccggctccccacaagtctccagaagtggccctggagcagaccgcaggatctgtgtctgtcgtcaccactgtatccccaacactccacacagaaagcactcaacaaatatttgtggaatgaattagtgaagggacaacaggctcccaccctcccagtgtttttattttgcctagaagtttccagaaccaggacaagagcccagactcctggatgagggcgcggcacagcctgtcctgtttgtcagaaaagcccgcttgtcctccaagagcacaggcctcagaggtgggcttaggatccggctccaggctgtttccacgcctgttccacactcagagaggacatacgcagctcccgtggctgagctgggagtcaagcactgctcagaaggccaggctcgccgtgggcagcagatgagagtcaaggaccttccttccagtgtctgctcccaacaacaggggctgcccggagccaggcgggcagcctctgctcacgccacctcattcagtcctcaagcctgttcatgactcctcccacttcaggtgaggaaaccaagcctcaggggacagacttgagcccggggacactttctggccactaaagagaaggggtgggctttttataggtaaaagttcttatctggggaggcagccacaggcagaccatcaccgtcggtcagtcgtttagtccacaaaccccagtgggcactgaggtggcaggtcccatgtgcaacgcaggggacacaggccaggaggccccgcccgagttcaagccagacggggagacagacaccggcagagagggcgcaccacagccaggagcagtggaggggcgaaggtttcacctccagaaagccagaggccctgccagactcacacggtggggtgcactctcttcctacccacacgggttggaacaggctctgccccgtcctcgtccacagcaccaccccaaccctcaccagcagtgggccaagtaaacagaaggcaggtggctgaggccaaggtcccacccctgtgcctcctcacctgtgctgcgtgcacactcacacacacactcacacacacagaccacctcaccccagccacctgggggcccaggagacagctgcctcccagcccctgacctaatgcccacaagccatgctctgccccaccagggaacccatcacccgcctctccttgcctctaataacacagaggggaagagggacacagggtgccagagtcccagggagcccccagctcatgcaccatagctgaggggctgcgtagctctgctccccacacatagaatgccctgcgcagctgcccacccctggaattccccactgggaccctggcctccactctgcccaggccaggttaggggtgggcagagagagctgccagggcccccgacctggcaggcccggtcctccccaggtgccagctccctgccctggagcttagacaagccagtcgggtgacttgcttacctgtcccctgcctgcccgccagcggtcctgccagaatctgagcggcacctccctcctggtcctgttctaaccgggaggaagtgggagggagtggaggaagttctgcagtggggggctctggcttggctgggaactgtgggggaagggaacccaggagaaggaacaggtggacacagagctgggatctgggccgcagagtaagcatggggctgccagggacagtaggaaagcccggcagactgtacctgtcagcctgtcagggtcgctgagcactcacagccgggctgggaggcaggggaaccacagttcaggatggcagaccaagctccaatgttttcccagtgtggctggcagactccagggccaacccctggcctggatcccacaaagtgttgggagaggcctcccatggggcctgcatgtcttagataagacacctagagcaccaggcccccagccagcctcctccagactgtggggagcccgtaagccaggaggcctggctcagaatgtgctggagacattctgggccaagcgaggatcccagcagcacccacaaagggtaatccccacccacccttggagagatggggctgggcgggggagggttggtggaggtctcccgactcccaggcagtgctctgccccttacagaggactgctcagccattcaacagaaatatatggaatgaggccaagaacggcgttcacacctgtaatcccagcactttgaggagctgggatgggaggatcacttgagctcagtttgtggccagcctgggcaacatagcaagacattgtctccattaaaaatacaaaaaattaggccaggcacagtggctcactcctgtaatcccagcactttgggaggctgaggcaggtggatcatctgaggtcaggagttcgggaccagcttggccaagatggcgaagcccaggtgtgatggcgagtgcctgtaatcccagctacttgggaggctgaggcaggagaattgctggagcccaggaagtggaggttgcagtgagctgagatcatgccactgcactccaacctgggtgacagagagagactccatctcaaaaaaaaaaaacttagccaggcatattggcacgtgcctgtactcaggacactgaggtagaaggatcacttgtgcccaagaggttgaggctgcagtgagctatgatcgcgccactgcactactgtctgggtgagagactcttctcaaaaaagaaaaaagaaaaaagaaatgtatggagcagccaggtgcaggggacgtggccataaatccaaccaccagctggaaggtatggaacaccaccaaaaacagcagggaagggttgggtggagaccaggggaagctttagagacacaggcaggacatttcaacaataaaggaggcagatgctttctggggaaaaatgggccgggtgttgcatggaggttggggtgatgcccacaggttcaccctggccaaggttgcctggggtctgaacatcccgaagttctgggttgggccacactttccttagcaaccacccaagccaagaggccttttgcctggatccccaaggaggagactccaggtcctccccaaggagggaggacccaggtgccctccaagtggcagatgccaggcatagaggtagaggtggaggtggaggagcactgggctgattcctcctgtgccagcctccccacgcctagcgggtcacagttgacaggagagctgccctctgcagccgcagcctccacatgtccacacagactcaagcctccagcctcaccatggtcaacttttgagaaactggggagaggaggtggcctggggggaagggaaggtggctctaggccagcccaggagtgacagcagcagagtggactttgaaaccccatggagcaggctccttccggcggcagcgttgtgggacggtggccaagactagtttgcatttccccatctgtgaaatggggcaaacagcactgacaccgcaaagtgtgaggtccccagcacagcttgcagggtcagtgggagcctggccttgatgggagcctggcccactgagcattgggaggatgcccccgtgtcatccgggttctgttccttgttgctaaacgtgcaaaaccctctgacatagtgacatcgcacacacacacacgttcagtcgcagtcagtgacatcgcccattcacatactcccgtacacacacacacaccccatcacacgtttccatgcccgcccttcacacccacggtcacactcacacacacattcactctcaagccattcacacgctcgctcacacactcacactcagcggcacacacgctcacaaccacgggtccctccagc

SEQ ID NO: 1562683 - DNA, 4001 bp, Homo sapiens
tcactgcgttagccaggatggtctcgatctcctgacctcgtgatccgcccgcctcagcctcccaaagtgctgggattacaggcgtgagccacctcgcccggccagtaatttgaaattatttcaaaataaaaagtgtgtgaagcccatactggtagttcaactagagaggctgagaagccaaagttcatataaaacactggctctcaagaaagctgtttcagagcttgtttatacaccctccccatatacctccctgattgtagttctcccagcaaatgtgcatgtgtgttctcttatcattaccctacaagttcccttttcactttgagtgccaggaagctgagaaacaagttccttgcatgcgtgcaggcctctctacttgctttgtgggacctgctacgggccccttgaggtagtatatcctgcagaacacagacaagtgcctctgctctattcagagccaggtaagatgctcctaacctctcaaggcctagccccattgcccctccccttctggaaacactaccaggagtccctactctccaacaatttgaggaggacgctctggtggagccacgtgtcctgtctgtaaaaagcgagggccactgcctggcctatctccttgaagcgatgtgagatgagatgagctggggcccaggtcacgtaggggtctataacctgggaagtcccggctcacacacaggagcttttcctgccaccctcacggggccactaccaactgagaggagtggaatagccaagtgaaggaagggcagggtgctacaacctcacaccaggcctggcccccgcccccccaccccccaccctgcaacggcccagcagctccaagctgcccagctacagttacaggtcctttgttgggcttaaaacaaaaggcctctctcccaggcagggcctccatgctgggtgcagctgaggcctcgctccatggggcccttggtatttgacccatgggtctaaaggaagggctgtggatgcctagcccacccctcacccatgcccagggccacccagctggggtctctggccaccacccatttaatcagcatggcccaggtgtttcactcatcccaggcctcctttaaggccccagttggcagctgtggacttgggtcagagagaccagggtttgagtcccagctaaggatggcaggagagtcgcttcacttccccgggccctacctggaggatggggagggtggggaggaaggaggcacacagcggtcagcgcccctgagctggcactgttctgagtaggggccgcgggtttcctggaatactccccacctcaaccctaggctgcgggcactgtgatcatcccagcacgtgaggaaactgaggccaggaaaggggagtgacctgcccggagtacaccaaagccagccctccaagcatcgctcaccacatgacactgttatctatccctcagatagatgaagtgacctgccaaggtcatatagccattcagggtgggccgggagtggactctcaatgtccagcccaaagtgctgctcttcctgagccacctcccaggacaggggcactctttctgctccagtcaaagagctcacagcccaaatctgacatcctgcctcccacagtgaggcctgagcacctgcccccagccccgggggtccgaaccaacaggcggctccacccctcctcaaatacccaccatagctccccactgcctacctgaaggcaccctctctatggccccaactctggactcacctcccagctctctgctctttcaacatcaagcccatcttgcttcaggcgttcgcatatgctctcctctctgccccaaatgtccttgctctgcatgcatccaaccagcaaactcctattcattcctcagagcctagctcaaacatcaaatcttccctgatgagcccttccctagctaaccaggcccttggtagacttttcacagcccctggtcccttctggaaactccctggggcaagtactattccgaggattcctctgctatcgacctctccctcagtcacagaaaccacgcccacgtggaatagagtctagggaaaaagttggccgaagttacattcacaggaaatcaccattgttgggggccctggcaatgaacttgaatgacattaggagctggggttgtgcttggtgctccctggagttctgtttttccagcacagctgcgtcagtgcacagcccagcttaaggcccctccgcgggcagctggcttcacgggctgcgaggcaccttcccccatttcctccccggccctcccacagtggtgcaaggtgggaacaaccaggctccccgtgtgacaatgaggggacaaatgtagctcaaggaggcccagggtggagcctggtttctgattttctgttgctttcccacttccctcccttgccctaaacctaaacccatggaagtgagcctgggtgggcgctgggccaagaaaaagacacccgcgtattagtggctccgatggcaagtccccgaatgctggcctccaaccccaggctgccggctccccacaagtctccagaagtggccctggagcagaccgcaggatctgtgtctgtcgtcaccactgtatccccaacactccacacagaaagcactcaacaaatatttgtggaatgaattagtgaagggacaacaggctcccaccctcccagtgtttttattttgcctagaagtttccagaaccaggacaagagcccagactcctggatgagggcgcggcacagcctgtcctgtttgtcagaaaagcccgcttgtcctccaagagcacaggcctcagaggtgggcttaggatccggctccaggctgtttccacgcctgttccacactcagagaggacatacgcagctcccgtggctgagctgggagtcaagcactgctcagaaggccaggctcgccgtgggcagcagatgagagtcaaggaccttccttccagtgtctgctcccaacaacaggggctgcccggagccaggcgggcagcctctgctcacgccacctcattcagtcctcaagcctgttcatgactcctcccacttcaggtgaggaaaccaagcctcaggggacagacttgagcccggggacactttctggccactaaagagaaggggtgggctttttataggtaaaagttcttatctggggaggcagccacaggcagaccatcaccgtcggtcagtcgtttagtccacaaaccccagtgggcactgaggtggcaggtcccatgtgcaacgcaggggacacaggccaggaggccccgcccgagttcaagccagacggggagacagacaccggcagagagggcgcaccacagccaggagcagtggaggggcgaaggtttcacctccagaaagccagaggccctgccagactcacacggtggggtgcactctcttcctacccacacgggttggaacaggctctgccccgtcctcgtccacagcaccaccccaaccctcaccagcagtgggccaagtaaacagaaggcaggtggctgaggccaaggtcccacccctgtgcctcctcacctgtgctgcgtgcacactcacacacacactcacacacacagaccacctcaccccagccacctgggggcccaggagacagctgcctcccagcccctgacctaatgcccacaagccatgctctgccccaccagggaacccatcacccgcctctccttgcctctaataacacagaggggaagagggacacagggtgccagagtcccagggagcccccagctcatgcaccatagctgaggggctgcgtagctctgctccccacacatagaatgccctgcgcagctgcccacccctggaattccccactgggaccctggcctccactctgcccaggccaggttaggggtgggcagagagagctgccagggcccccgacctggcaggcccggtcctccccaggtgccagctccctgccctggagcttagacaagccagtcgggtgacttg

SEQ ID NO: 1562684 - DNA, 4001 bp, Homo sapiens
tgagggaggcgatcacgttgctcacggctttgtccaagagaccgttggggcgaaaggggcgtcctgggggtgggagatgcgggtaaggggtcgccttccccgtcccccgccttcccagttcccgctttgtgcccttctgcccatcacccaccggagtggttggcgaaggcggcacaaaggcaggcggcctcctcggtcacccactgctccagcgacttcttgcccaggcccaagttgcgcaaggtggacacggagaagcgcctctgctcgcgccacgcgggcccatagcgcgccaggaacacccctgggggtgggacgggcacgtgcgcgtggccatgaaggcattagccccaccatccaccacccactccaaccctatgctccccctggtctcccgcagtccctggctctgtccagctggtcacagggcccactctttgtgcatccaccttgctcccttggctggggcagggctttgccccacctcgtctctgcccaccctgaccgcctttgcactcagggaagaccccgcgggccccgcgccacccacactgagcttacagcacaggtgcggtccccgccccccacttcgacaccggattccagctgggaaatgcgccagcctcacccattgggctcctgccaggtctcggcagtggccccgcccactcgtcacaagccccgccctcgtccccatgctcacacctccctagtgcaggtggtttcttggcccgctgtccccactcgctggcctgtttcatgtccacgaccccgcgccctctctgcccagctcggactacggtcatcacccacccgggtcccacggaaatctgtctctgtccccaccgctgcttgccttgggaacgcggcccgaaacccaggatctgggtgatgggcacaggcgggcggtcggcggtgtcctcgccgtgggtcaccagcgcctcgcgcacggccgccagcccattgagcacgaccaccggcgtccaggccagctgcaggctgaacacgtccccgaagcggcgccgcaactgcagagggagggtcagggcctcttgtcaagccaggatcaccccagactacaggtcctagtcctatttgaaccttggacgacccccggggctaccaggagtgagcaggtggaaggaggagacccagcctcctgatcgtggggcgggggtgggggtcacaccttctgtgatggaggaactcagtttggatgcgtcacccaggtatgaccttgcaagagtcaccaaaattgccgagaggccccagttagcatcccattcccagatgatggtccatgccggtgagcagtgaggcccgaggacccacagtgcaaaaggtttgaaccgggtcactgcacccccttcatcctcgatttcgtgatttaaacggcactcaggactaactcatcttccattcccaaggcctttccttctggtgtcagcagaagggactttgtactccataacatatgttgcccaatgggcttgcatgcccactgccaagtccagctccacctccaggcccttgccctactcttccttggcctttggaaaatccagtccttcatgccatgtataaatgcccttctccaggacgtcccccaaacctgcttccccttctcagcctggcttctggtccagcctgtggtttcacccaccatccatgtttgcttctggtaggggagcctcagcacctctgccgccctccaggacctcctccctcacctggtcgaagcagtatggtgtgttctggaagtccacatgcagcaggttgcccagcccgggcagtggcagggggcctggtgggtagcgtgcagcccagcgttggcgccggtgcatcaggtccaccaggagcaggaagatggccactatcacggccaggggcaccagtgcttctagccccatacctgcctcactaccaaatgggctcctctggacacacctggcacccccaccccaccaggcacagaggaccaggcaggacactctcagcacaccgagcgcgtgacccttcccttataaagggagctgatgatggcctttgccctctgctgtgagtgaacctgctgtgttgactgtgctgccagtggcagagtcaggccagggcgggtatgggctgctccagaggttcttgcccctgcttcctgctccaggcccttacccagggtaggccggtggaggggcctggtcggagaagtcaccccctctccccactccaagctcctgaagcctgcaaagccttctgggataaccagggtttcagtggacccggccatccacctcccagctaggctcatacaccctaatgtagtcacaacccctcctccagaacatggccttgccctttccctacccccacctgcccactccagagtgaccttcagcacccttatctgtcactggcacttacctggggccttagagctcctgatgatgagtggcatcatgggcctggtcccttcacttcaccttgcactcttgacatgcacagacgctatgcacacacctgatggtgcacagatctcttgtccactcccagacacttgtccacttgttcacacttgcagggacacgattacacacgcagaaaatcacccacacaaagacaatattcacacatacacagactcacactgacacttagggcacacattctctctcacacacaccagtcacacacacatacagacccggcaccaagtaccccacttcccagccatgccggaggtttcctggatgggaccactcctgtccagaggctgctcccagcccagcccacattcctgggctctggccgggctatggcttcttgtttgcaacagggctgttcccagagctcccagttggtagccggaaggcccttgccccagcctgtgacaacatcctcccgggctgcctgagggtcgtcctcctccactgctttctggcctccatgtttctgattagaaatctggtgggaacgttatggaggatcctttgttcaggatatgttgctttattttttttttctttagacagggtctcactctgttgcccaggccggagtgcagtggcaggatcatggctcactgcagtctcgacatcaagtggaccccctgcctcccaagtagctgggactacaggcaccacccagcctaattcttttttttttttttttttttttggagacggagatttcctcttgttgcccaggctggtggctcccctccattgtgcaatgatgcaatctcggctcactacaaccttcacctctaggcttcaagcaattctcctgcctcagcctcctaagtagctgggattacaggtgtgtgccaccacgtctagctttttgtattttcagtagagatagggtttcaccatgttggccaggctagtcttgaactcctgacttcaggtgatccacccacctcaggctcccaaagtgctgggattataggcatgagccaccgcacccaatcccagctaattttgtattttttgtagagaccgggttcttccaagttgtccaggctggtcttgaattcctggggtgaagcgatcctcccacctgggcctcccaaagtgctgggattacaggcctgagccactgtgactacctgatacgtctcttctctcttgctgctttcaaaatcctgtcttttgtgggagggcagctgccgagctctggacttctacgggatcatccactgaggacaggaggaccgggccctctacaggtggattgtatggcagctgccatgcttggagccagtgctcaccgagcacgtggcggctgtggagctggacgcggggttgataagtccgctgggggtgacgggctcatccatgagtggtacttgatgtggctgcagaaggcggatgtggtggtggcagaagtgacacaactgtccctgggtataggctatgatctgtgccaggccacagccctcaataagtgaatcctgtgcctgctccagccgcagtctggtggagtgctgtcggccatgatctgggaag

SEQ ID NO: 1562685 - DNA, 4001 bp, Homo sapiens
tactcgaagcggcgcccgcaggtgagggaggcgatcacgttgctcacggctttgtccaagaggccgttggggcgaaaggggcgtcctgggggtgggagatgcgggtaaggggttgccttctccgtcccccgccttcccagttcccgctttgtgcccttctgcccatcacccaccggcttggtcggcgaaggcggcacaaaggcaggcggcctcctcggtcacccactgctccagcgacttcttgcccaggcccaagttgcgcaaggtggacacggagaagcgcctctgctcgcgccacgcgggcccatagcgcgacaggatcacccctgggggcgggacgggcacgtgggcgttgccatgaaggccttggccccaccctccgccacccactccaaccctggcgctccacaaggtctcccgcagtccctagcccggtccagctgggcacagggcccactctttgctcacccacattgctcccctgcctggggcggggtttggccccacctcgtctctgcccaccctgaccacctttccactcaaggaagatcccgcccgtcccgcccacactgagcccgcagcataggcgcggtccccgccaccgccacttcgacgcatcagcctcgcccaccgggcttctggcgggtctgggcagtagccccgccccctcccagcccacagactcgcacctcccccgtgcaggtggtttcctggcccactgtcctcagcccactcgctggcctttatctctgtttcacgtccaggaccccacgccctgtcggcgctgcttgggctacggtcactgtccacccggggcccacggaaacgcggtctctgtcccccaccgccgcttgccttgggaacgcggcccgaagcccaggacctggtagatgggcgcaggcgggcggtcggccgtgtcctcgccgcgggtcaccatcgcctcgcgcacggccgccagcccattgagcacgaccaccggcgtccaggccagctgcaggctgaacacgtccccgaagcggcgccgcaactgcagagggagggtcagggcctcttgtcaagccaggatcaccccagactacaggtcctagtcctatttgaaccttggacgacccccggggctaccaggagtgagcaggtggaaggaggagacccagcctcctgatcgtggggcgggggtgggggtcacaccttctgtgatggaggaactcagtttggatgcgtcacccaggtatgaccttgcaagagtcaccaaaattgccgagaggccccagttagcatcccattcccagatgatggtccatgccggtgagcagtgaggcccgaggacccacagtgcaaaaggtttgaaccgggtcactgcacccccttcatcctcgatttcgtgatttaaacggcactcaggactaactcatcttccattcccaaggcctttccttctggtgtcagcagaagggactttgtactccataacatatgttgcccaatgggcttgcatgcccactgccaagtccagctccacctccaggcccttgccctactcttccttggcctttggaaaatccagtccttcatgccatgtataaatgtccttccccaggacgtcccccaaacctgcttccccttctcagcctggcttctgatccagcctgtggtttaacccaccacccatgtttgctggtggtggggcatcctcaggacctctgccgccctccaggacctcctccctcacctggtcgaagcagtatggtgtgttctggaagtccacatgcagcaaggttgcccagcccgggcagtggcaggggacctggcgggtagcgtgcagcccagcgttggtgccggtgcatcaggtccaccaggagcaggaagatggccactatcatggccaggggcaccagtgcttctagccccatggctgcctcactaccaactgggctcctctggacacacctggcacccccaccccaccaggcacagaggaccaggcaggacactctcggcacaccgagcgcgtgacccttcccttataaagggagctgatgatggccttcgccctctgctgtgagtgaacctgctgtgttgactgtgctgccagtggcagagtcaggccagggcaggtatgggctgctccagaggtccttgccgctgcttcctgctccaggcccttacccagggtagggtggtagaaaggcctggtcggagaagtcaccccctctccccactccaagctccccaagcccacacaggcttctgggataaccagggtctcagtggacccggccatccacctcccagctaggctcatacaccctaatgtagtcacaacccctcctccagaacatgaccttgccctttccctacccccacctgcccactccagagtgaccttcagcacccttatctgtcactggcacttacctggggccttagagctcctgatgatgagtggcatcatgggcctggtcccttcacttcaccttgcactcttgacatgcacagacgctatgcacacacctgatggtgcacagatctcttgtccactcccagacacttgtccacttgttcacacttgcagggacacgattacacatgcagaaaatcacccacacaaagacaatattcacacatacacagactcacactgacactcagggcacacattctctctcacacacaccagtcacacacacatacagacccggcaccaagtaccccacttcccagccatgcccgaggtttcctggatgggacctctcctgtccagaggctgctcccggtgagcctcaaagctgtcacatggatcccagctcagcccacattctgggctctggccgggccatgacttcctgtttgcaacagggctgttcccagagctcccagttggtagcctgaaggccgttgccccagcctgtgacagcatcctccagggctgcctgagggtcgtcattctccactgcttcctggcctccatgtttctgattagaaatctggtggaaacattatggaggatcctttatttaggatatgttgcttttttatttttattttttctttagacagggtctcactctgttgcccgggccggagtgcagtggcaggatcatggctcactgcaatctcaacatcaagtggacctcctgcctcccaagtagctgggactacaggcaccaccgagcccaaataattttttttttgagacggagttttgctctgtcgcccaggtgggagtgcaatgatgcgatctcggctcactgcaacctccacctccagggttcaagcgattctcctgcctcagcctcccaagtagctgggattacaggtgcccaccaccatgcctggctgattttttgtacaagaagtttatagaacaccaagcagatttaacccaaagaagacgacctcaaggcatctgataattaaactccgaaaggtcaaggataaagaaaggatcctaaaagcagcaagagaaaagaaacaaataacatgcagtagagctccaatacatgacatggggcagccacctttccagtggaaaccttacaggccaggggggagtggcatgacatatttaaagtgctgaaggaaaaaaaacttttagcctagaataacgtatctggcaaaaatatccttccaacaggaaggagaaataaagaccttcccagacaaacaaaagctgcgagatttcatcaacaccagacctatatcccacaagaaatgctaaagggagtttttcaatctgaaaaaaaaaaggatattaatgagcaagaagaaatcatctaaaggtacaaaactcactggtaatagtaagcacacagaaaaacagagtattataatactgtaattgtggtgtgtaaactactcttattttaattagactaaatgatgaaccaatcaaaaataataagtacttttcaagacagacagtacagtaagacataaagaggccggacccggtggctcacgcaggtaatcccagcactttgtaaggctgaggtgggtggatc

SEQ ID NO: 1562686 - DNA, 4001 bp, Homo sapiens
cagatctcctctgccccagtgggaaaagttgcttcctcccatctgtaggtctgtgtccatttgcacagctgggtcagggtcctgcaggatgtggctcctgcctctccaccccacccccaacattccagaccaacacctgtcccccagggttaggcccatggctgggtcactgctgtccccagcactgcatagcacactggaaggtcgtttgtagagtgaatgaatgaaaagaccaactactcgatggagaacccattgaccccatttaatccatttcctccctagtaccggctgaagcaaagcagagactcccctcccctgccctctccatagccccggccaacctggggctctctcccgcaggttctcgtccctgctctgctgctgactggccgtgtgacctcaagcaagtcagtccccgtctctagttcacctctgggagcctcagtttccttatctgcaacatggagacagccatccctgtaacctcagtatgttaggacccgaaaggacaaagcgccctgctggacacacaggcaggggggttgcatctcggtgggtgccctccccccctcatcccaccctcatgtctgctgagaggcctgagccaggtgctgcccttcgctgggtctccctgtgccaaccaggtgcccccaagctgtgctcactgagctgtgattttgggagcccccaaagcccatgggagaggcaggggtcagagtgagccctggatagggattcagggaacaggatttggtcctgctcctgccttagagaggctgttttcctcccttggcctcttttctcccttctgccactgggggggctgttgaaatggatcagtggttctctgggttccctggggcccgaggcttccatctgggggtggggaggaagggggatgcccagtgggcggggccaggctgctccacattaggtgcgtttgaagcaagggtgctcctggacaaggctgaggtcatctggacctggggagcagacagctcccacgagcccttaggttctggaattccagcagccgtgttcaccagaactgttgcagctctggagcatgctgacatccagggtgcagaaacttggcccctctaccgggccttcaatttgcctcccaaaacacgaccctgatgttcttttcctcaccatctttgcagcctcctttctcctctttctccccagacacattgtcttagtagctggggagggtttcaaccagagcctctgttgctcactcctggccctcccctggctctaggcagcgtcctcagcctccccaaagaccaccccaacccccgggggccaaaaaggggcctcaaggcccttgtatcacccagacaagcatcgccatcaccaacatcccatcatcatcttaatcgcaagtcacttttctgagtccacctctgagcctttggactggctgttccttctggctggaatgtttgttccttagaaagccccttagctgacatcttcctcaggtccctcatcagacagcatctcctcttggggccttttccaccatgcattcctgtcttccttaccctgctttactgttcttcatcctacctgccatcaactgacatatggaatcacattagagtcactgccggtctcctcatctagagcacaagcctatgaagggggaaacagcgtctgctttgctactgctgtgtgtccagcccctagaacgcaactggacacacaggctgagcccacaaatgtttgcttcttgcagctgcatttcccacctgcgctgtattcctttatctaggaccctgtgaggcaggggctgctgtcccattctaaaagagagcaccctgaggcccagagaggttgacggcagttgcttacctgggtggcacaggtccattccgacgcctctggggaaaagatgacccgtgctcctgtcgcttgccgacccagctgctgttcgggctggcccggcaaggatgcgtcaccttgactgtaacaggctccttcctgcttgccccgcccagccctgtgtggggaggaagtcagtcctggcccacgggggtctcgtgtgcaggcttttgacaaaacagcacttcctaaaaactggcagagttttgagcagcagggacttttgccagggagggacagaggtggaaacaaacaaacaaacaaacaaacaaacagatgaagtgaggggagggccagataaaaaagagaaagacagtgagacagaaagaaacacacagacacatatgcacatacacacgtacacatgcacagacaccgagggcgatgttcactgaggacgaacattttccaggggaccatgggcattcacgtggcagcctcctcacatatatgccataggagcgcccaacttggacagtcctagcagggccccctgtgttccaccccacaagctctcttccaactcccacttgagaagagacaaatgaattcactgctaggaagggctttgcttcccttcaaagaaatatctggctttttcttgtctagtgaacaatcgggtaatatgttccactttccttctcccccaggctgctgggaaactcatcgtcaaatccaaagctcatcgacagctattctatgatgtcatgtgaactttggggcctgactcagctgtttgactctcagctagggctagtcagcctcgctttgcttatctctgaaaggggaataacactaactcggggatatggaaaccatggagtgagaggatgtgtcggagatgcttgggacatagtaggtgctcaataaacactttctcctttgattttaattatcttctttggttaaaatgtatcatgttattccttgtgccttttctggcaggttggttcaaatcctttctgcaaaaagctttgctgtaaagaaacaggtataaattaaatgtgaattccctataacttcaggacacatgcagagttattcatctgtttccccattactctccaggccccatgagggcaaggttaccttttgtgttctggtgtgtggtaaaatgctggggacatagagggtgtgcaagtgtggaatgaatgaacaaatgaatgaatgaatgaatgaatgaagggaacatggaagagatcacggccgatgtgaaagctagctacaagttcacctccttttcactatgccgccgcttctgctgtcaaggggcgaagtccatttctccttccttggaagctgagctggccttgggcatctctttgaccaatagcacgtggcagaaatgatgtgccgtgatgttcgaggctgagctttaaaaggccttgcagctcctgctcttgctctcagccccctgcctggctaccatgagaacaagcctgggctagcctgttggaagacggaggaccacaaggagataggctgggctgtcttggctgtcccctggttgctgcctcatcagtgaggccaggggacaccagaagaagaaccatcaagcggagtcccacccaaactgctgacccatagcactgtgggaaataatacatttttgtggtttaagccaccaacttctgggatgctttgttatgcagccaaagcttgctgatacagaagaaatccaatgctgtcatttcctcggagagaaaactgaggcttatttctgggaaacacttgaccaagttggaacttgagtgagtgccaattcaggcccagaagccaggcctactaagtccccgtctagtgtgctcaggatttttgaaccccgctgcttctcccctgccctgcctccacctgggttcttgtataactcatggttcttttctggaaaacttgttacaattatttccatggtaaactagatttttctcaactgctttgggcctgaggcaccacaaaccatgcccttggccattttaaaactagaaatgtgggctgggcatagtggctcatgcctgtaatcccagcactttgggaggccgaggcgggtggatcacaaggtcaggagatcaagaccatcctggccaacgtggtgaaaccccgtctat

SEQ ID NO: 1562687 - DNA, 4001 bp, Homo sapiens
tactatgtaaatagttgtattgtttagggaataatgacaaggaataaagtctatacgtattttcagtatagatgcaattatcaattttttttcctctaatatttcaatccatggttgtttgaatcaacagatgcgtaacccagtgatacagggggctgactgtattattcctctgtagcttgagggaggacccagcaggatcagccattcctcatcgaccttcatggactaacaaaggctccatttcagaaggtctttttttgtgagccaaggtctcactgtcacacaggatggagtgcaatgcgcaatcatagctcactgcagcctcaacctcctgggctgaaaccatcctcccacttcagcctgccaactaagtgagactacatgtgcacaccaccatgtccggttaatttttaaaactgttttgggggatggcatctcactatgttacccagactggtctacaactcctgggtcaaatgaacctcccgccttggtctcccaaagtgctgggattacaggcatgagccaccgtgcctggacagtgtcctttcaagcttctcatgcccttacttcctcctagacatggatgtggctcaagaatatcttttacccaagaggaaactttaactcggtcacagaacgccaggtttgggttgcagacgcttcttgtgggggagggaggtcttttcccctgtattcacagaagaggaggttgccaactggagatggttcatttccaagtttgtctggggtcccccagctatgcaggacccagaaagcagatgtctagacatccaggccaatggtctttcactactctgtgagtctcccgtgaacttcacctggaacctggctgggacacaggtccaaaatacgtaacttcagaacatacccagaattccttctgaccagcctggaaaagttctagaaaatcacacttcagccacgtgtacctaccctgtcaggtgccaaggcaggtacagcacacagacaatcccacatgacccttgcactgccccgggggtgttaaaagagagccttcccggttcacagacttacacactgaggagcagagccagaaattcattcaatcctgctcgcactttgaagatggtcctaacagcaggaacctaaggggtcagggggccccaaagctccagaccctgatgtgtccttactgggcagggcaagaaatgggtttttccccctgaggcaggatcagtggctccagtctgcggcagtcccacatggatcccctactacccctacgcaccggtcctggcccagggctagctccttggtgagaaactcaaagaagtgggcgctgtggctgcggttgtcctcggcggtgcccactacgccgatggaggagatggacagctgcgcgcagggctcggtggacccgctcagcgccatggccaggcccggccgtaccgtcacgttcacgcgctgagggggacatgaaaagttttgcccgaagttggagccggccgggctacctctggggacgggacccgagcgcgcgaaagccgaaacgcgcagtgttcgcggggcagggatcccgatacgggccgcggtccctgaaggtcacgcccgggtcatgactggggagggcgacaagggaaagacgtgcggagggggagccgcgggatcgtggagcacggaaagtcagagcttggcgtgaggaaaggagtggggagtggtccctggggaaaagattcggggtcactgtcggggaggcggagcagggacagggccggacccctggcccaccaacctcccctcgccccgtgctgcccggcccacgcttacgtccgcaggtttgcccaggatggaggcagcggcggcgcagagtcgtttctccagccccgcgggcactcggttggcgggcaaattcgtgtccagctccaggaacggcatggcgggcagaggaacggaaacagctctggcggaagaaaagctgggggtacccaaggctcgcggaccagggaggaggggcgaggcgccacagcaacctggcttctcattggctggacagagactcggcgctccccgattggctgcctagggtacctcccgcttctgcaaacaaaagtcacgtgtgccggctgatttccggaagtcccatcgtctccgccctacgtgtagccccacccactacaggtctttaacccggtagtggacccaccctgtctcccccgaccctcctgcctggcgccaggtgggtttccctctcaagcttccgcgctgtggtcgcccggttcctagccctattagaggtctgaacaccacacccccgacacacaaggacacacacacacctataggggtcttccccaggctcgaccctaataaccaatacaacgggagcttaaagtttttttgaatgatttgccaccatttcgaagtcaggcaatttcatgttcagtatggaaatctgcgcttgggcagtcaggagatgtggttactcgcgggggcgcgggtagggctaggctcacgacaatacctgtccctgcctggtccccattgacatctgcctgtgtagcctcttgtgccggtggtgagccactgtccaccagggggtggcaaaatatgttctttaaaacatggaaaggccgggcacggtagctcacgcctgtaatcccagcactttgcgaggtccaggcgggcggatcacctgaggtcaggagtttgagaccagcctggccaacatgacgaaaccccgtctctactaaagatacaaaaattagccgggcgtggtggcagacgttgtaatcccagctgctcgggaggctgaggcaggagaatcgcttgaaccggggaggtggaggttgcagtgagccgagatcgcgccattgcactccagcctgggtgacagagcgagactccatctcgaaaaaacatcagaaaacatggaactctgttggcgtggcttaaacatgagtgtggtcagtgtggcaaaatcacttgaattgtacattacaaatatgactgaagttgtggtcgagcaatgtggctcacacctgtaatctcagcactttgggaggctaagaagggaggattgcttgagcccaggagttaaagatcaggctaggcaacatagcaagattctcttctttattttctacaaaaaaaaaaaaaaaaagaagaaatctgggtgctgtggtgtgtgcctgtagtcctagctacctgggcggctgaggcaggaggattgcttgagcgcaggagatctaggctgcagggagctatgactgtgccactgcactccaccctagatgacagagtgagacccaggctcccccctcccccacaaaaaagaaagaaaaaatttgcaagtttatatgtacaatttcaactacgtgtataaaattctctataagtgtgcatacttaaaggagcctccactgaaaggccgacagagtctctgtctgtcatgatcttgtcctattagcagtttgtttattagatgactcagatatcagaaggtctgagacacacgacaggtaaatatgacagtcctaaggggagagggcagggacaggtggcaagtctgggaccaggtgtggggcatggacaagccagtggtccgggagtggggtgtagagaagactgtggtcaaggttatgaggaggcatgggagagggccaggaaataaccagggacttcccttcctgcaaggaggttcatgaaccagccctgcaccccacttgtggaacacaacatcgccccacagtgaggagagagaccgaggagaccaaggctgatcctgattcagacatctttccaccaggtcacccctcatcgatgatacatgctcagtccgggggtatcccccgcaaggaaacactggggctgaggagcccagagaggtcgcctgacctggactggggctggggaggtcagggaagtctccctggagaagagacagggtgccaaatgccaaaagaccaggaagggcaccaggcgaagatgaggagggaacagcatgagcggaggcc

SEQ ID NO: 1562688 - DNA, 4001 bp, Homo sapiens
aaagccttccatggctccccactgccctcatgagaaaggcctcaacacaaagccagccttctccagtgcggtagccatcccctccccacttttcacctcacctcctactaccccccacttatcaaacgggaatgtgtgtatgaatcctccctggaatctggttacagtttatgctcccaatcagtaaggtcagagtggggcctgagcctctgcatttccaacaagctccctggtgatgctgatactcccagtccattgaccacactttggataggaagagtctacacttgctctactcaacttctctccattctgtcctcaaacacaccacgcttccttccccaccagctggagggggctctgctcccaggccccagaggtcaaggcagacacagttaaggtgtggaaacctccttattgcccgatggatcctccagagaggcggtcccttactttcagcagggcgcgtgtctacctgtttcatgctgtctcacacacagggtgccacccctgtgctgggcactgggtaagtgctctgtacatattaattaggagtactcatttcaaaaatatgtgtgcctttgataaataaaaacagtatgtgcatgttgtgttggtgtgtgcttccttgattattactgaagttaaacatgttttcatccatgtattgaccatttctctttgtccttcaatgaaacctctgctgatttccttcgctcatttttttcctgtgtcttcgtctgatgagtttctcttctttttgtttgttcgtttgtttgttttgagacagtctcgctcagtggcccggctggagtgcagtggtatgatctcagctcactgaaacctctgcctccaaggttcaagtgattctcctgtctcagcctcccgagtgtgccaccgcacccagctaatttttgtatttttagtagagacggggcttcaccgtgttgcccaggctggtctcaaactcctgacctcaactgatccgcccatctctgcctcccaaagtacagggattacaggcgtgaaccaccacaccctacctgtctgatgggtttctaagaacatcttaaaggacattacttccttctgacgtatcttttaccgagatccttcccagttttttgcttaaggttaatccattttttcctccacaaagtaaccttgtatatgtattggttttttctttgttgagttctcccactgttctgaggcttagaaagtcctttcatacccagacatcagagaaacagatcccgtgagagtaactgggattgcaggtgtgggccagcatgccctgttatcactccctttctctgagtcagcttttctctctcagtctcgtctactcctcgaactcaggaaatgtcactacaggtggccccagctcccgtttacctccccatagggagctcctctctccagttccagtttcaaaactcccaaggaagcattctggttcactcgcttgggccactggccagagggatgggatactctgaaagattcagctagagtcccgggcccagccctggaccatcactgtgccccctggtgagatgccagggctgggattcagggagaagaaaggaggttcccggacagtcattcctgcctcccgcggctgcgggctccctgcccccatcctgtgcacgaagtgggagctcccgctgtctggcagctcccgctgtctggcagcagctgctctgcaggggacagtctggacggcagaaagttcatccttaaccccagccttccagtcaaggttcccaccagtttgggacacctgcaagtgtcacatcccactgggtgaaactctaagatcccttttaggggatcccattcgctccctcccttccgccaccatgcagcgccgagaaacagagctctgaacgaaccctcagatgtccgtgcgctggggcctttccaggacggcggcgcccagtcgtttctgggtcagggcgacgcctggaactgggcagggtccctggcaccgggatcccgaaaagcagacctgcttctccctgtccagccggttccccttccccttgcagtcggccccctgcatccgcgtcctccctgccagtcgagggtccccagctccaactccaccctcccagctgtgcgttcatagcgaccgccctccctgtagggacgcacggatctggtggtggagtcttggccggcaggactggacaggaaccgaaggggcgaggcgggtccgggggtggtgcgctccaattgggtgctgtccccagggggtggggcctgatcccctatttcccggcgcgccgggatcctgccacagctgctgcccacaccgcgctcagcgccttcactgccatccccgctgtccttgccgcccccgccatgggcctagagctgtttcttgacctggtgtcccagcccagccgcgccgtctacatcttcgccaagaagaatggcatccccttagagctgcgcaccgtggatttggtcaaaggtgggcccagcccgtttccccgcgtgtccacaaacccagtgcacccccaggcccccgccctgctctgccctgagcgtctcgccgcccgcacagccccctcacctcctcctgcagcgtctgccaccagagaatgctgtggactgagtggccttggagggatcacagcctctctgaaccttagcttgccttctgaaaaggaggataatgttaccttctgctctgtagggatggaaagaaaatactgaatggagttgacagagttcttgcgtggaatgcacgcatataaattcacaaagcccagaagaccttgggaagaaggacatgctgttgtgagaattaagagatgggaagagatgagccaccccagtttgcctcccctcccctggcccaccagagtccggctagaaaacttctctttatccacctgctgcacctggccccacccaccaaagccccccagctgccccggaatgtggcagggcagggaggcccagccagggagtgaggctgatccaggcctctagtcccagaccttgctgtttctcagggctgtggggctccgcttggggaggaggagggagggtgtagaggtgcagcgtttttattctgaagaccttttctgacttcttcctcttcagggcagcacaagagcaaggagttcttgcagatcaacagcctggggaaactgccgacgctcaaggatggtgatttcatcttgaccgaaaggtgccctccttccctcacccctcaccgcatccggagcccatgtgaccttggctctccccactggccccgggccccagtggccctcccataccccatggggcagcgagggaggggaaaggcgagggatctggccgggcgcggtggctcacgcctgtcatcccggcacttcgggaggccaaggcgggcggatcacgaggtcaggagaccgagaccatcctggctaacaccgtgaaacaccgtctctactaaaaatggaaaaaaaattaaccgggcgtggtggcgggcgtctgtagtcccagctactctggaggctgaggcaggagaatggtgtgaacccaggaagcggagcttgcagtgtgctgagatcgcgccactgcactccagcctgggcgacagagctagactccgtctcaaaaaggccgggcgcggtggtttacgcctgtaatcccagcactttgggaggccgaggtgggcggatcacgaggtcaggagatcgagaccatcctgggtaacacggtgaaaccctgtctctactaaaaatacaaaacattagcagggcgtggtggcggccgcctgtagtcccagctactggggaggctgaggcaggagaatggcgtgaacccaggaggcggagcttgcaatgagcagagatagcaccactgcactccagcctgggtgacagagggagcccactccagcctgggcgacagagggagactccgtctcaaaaaaaaaggaaagaaagaaaggagaggtatctggggagaaggtacagcttggggtgtgaccggga

SEQ ID NO: 1562689 - DNA, 4001 bp, Homo sapiens
aagccttccatggctccccactgccctcatgagaaaggcctcaacacaaagccagccttctccagtgcggtagccatcccctccccacttttcacctcacctcctactaccccccacttatcaaacgggaatgtgtgtatgaatcctccctggaatctggttacagtttatgctcccaatcagtaaggtcagagtggggcctgagcctctgcatttccaacaagctccctggtgatgctgatactcccagtccattgaccacactttggataggaagagtctacacttgctctactcaacttctctccattctgtcctcaaacacaccacgcttccttccccaccagctggagggggctctgctcccaggccccagaggtcaaggcagacacagttaaggtgtggaaacctccttattgcccgatggatcctccagagaggcggtcccttactttcagcagggcgcgtgtctacctgtttcatgctgtctcacacacagggtgccacccctgtgctgggcactgggtaagtgctctgtacatattaattaggagtactcatttcaaaaatatgtgtgcctttgataaataaaaacagtatgtgcatgttgtgttggtgtgtgcttccttgattattactgaagttaaacatgttttcatccatgtattgaccatttctctttgtccttcaatgaaacctctgctgatttccttcgctcatttttttcctgtgtcttcgtctgatgagtttctcttctttttgtttgttcgtttgtttgttttgagacagtctcgctcagtggcccggctggagtgcagtggtatgatctcagctcactgaaacctctgcctccaaggttcaagtgattctcctgtctcagcctcccgagtgtgccaccgcacccagctaatttttgtatttttagtagagacggggcttcaccgtgttgcccaggctggtctcaaactcctgacctcaactgatccgcccatctctgcctcccaaagtacagggattacaggcgtgaaccaccacaccctacctgtctgatgggtttctaagaacatcttaaaggacattacttccttctgacgtatcttttaccgagatccttcccagttttttgcttaaggttaatccattttttcctccacaaagtaaccttgtatatgtattggttttttctttgttgagttctcccactgttctgaggcttagaaagtcctttcatacccagacatcagagaaacagatcccgtgagagtaactgggattgcaggtgtgggccagcatgccctgttatcactccctttctctgagtcagcttttctctctcagtctcgtctactcctcgaactcaggaaatgtcactacaggtggccccagctcccgtttacctccccatagggagctcctctctccagttccagtttcaaaactcccaaggaagcattctggttcactcgcttgggccactggccagagggatgggatactctgaaagattcagctagagtcccgggcccagccctggaccatcactgtgccccctggtgagatgccagggctgggattcagggagaagaaaggaggttcccggacagtcattcctgcctcccgcggctgcgggctccctgcccccatcctgtgcacgaagtgggagctcccgctgtctggcagctcccgctgtctggcagcagctgctctgcaggggacagtctggacggcagaaagttcatccttaaccccagccttccagtcaaggttcccaccagtttgggacacctgcaagtgtcacatcccactgggtgaaactctaagatcccttttaggggatcccattcgctccctcccttccgccaccatgcagcgccgagaaacagagctctgaacgaaccctcagatgtccgtgcgctggggcctttccaggacggcggcgcccagtcgtttctgggtcagggcgacgcctggaactgggcagggtccctggcaccgggatcccgaaaagcagacctgcttctccctgtccagccggttccccttccccttgcagtcggccccctgcatccgcgtcctccctgccagtcgagggtccccagctccaactccaccctcccagctgtgcgttcatagcgaccgccctccctgtagggacgcacggatctggtggtggagtcttggccggcaggactggacaggaaccgaaggggcgaggcgggtccgggggtggtgcgctccaattgggtgctgtccccagggggtggggcctgatcccctatttcccggcgcgccgggatcctgccacagctgctgcccacaccgcgctcagcgccttcactgccatccccgctgtccttgccgcccccgccatgggcctagagctgtttcttgacctggtgtcccagcccagccgcgccgtctacatcttcgccaagaagaatggcatccccttagagctgcgcaccgtggatttggtcaaaggtgggcccagcccgtttccccgcgtgtccacaaacccagtgcacccccaggcccccgccctgctctgccctgagcgtctcgccgcccgcacagccccctcacctcctcctgcagcgtctgccaccagagaatgctgtggactgagtggccttgaagggatcacagcctctctgaaccttagcttgccttctgaaaaggaggataatgttaccttctgctctgtagggatggaaagaaaatactgaatggagttgacagagttcttgcgtggaatgcacgcatataaattcacaaagcccagaagacctcgggaagaaggacatactgttgtgagaattaagagatgggaagagatgagccaccccagtttgcctcccctcccctggcccaccagagtccggctagaaaacttctctttatccacctgctgcacctggccccacccaccaaaaccccccagctgccccggaatgtggcagggcagggaggcccagccagggagtgaggctgatccaggcctctagtcccagaccttgctgtttctcagggctgtggggctccgcttggggaggaggagggagggtgtagaggtgcagcgtttttactctgaagaccttttctgacttcttcttcttcagggcagcacaagagcaaggagttcttgcagatcaacagcctggggaaactgccgacgctcaaggatggtgatttcatcttgaccgaaagatgccctccttccctcacccctcaccgcatccggagcccatgtgaccttggctctccccactggccccgggccccaatggccctcccataccccatggggcagcgagggaggggaaaggcgagggatctggccgggcgcggtggctcacgcctgtcatcccggcacttcgggaggccaaggcgggcggatcacgaggtcaggagaccgagaccatcctggctaacaccgtgaaacaccgtctctactaaaaatggaaaaaaaaattaaccgggcgtggtggcgggcgtctgtagtcccagctactctggaggctgaggcaggagaatggtgtgaacccaggaggcggagcttgcagtgtgctgagatcgcgccactgcactccagcctgggcgacagagctagactccgtctcaaaaaggccgggcgcggtggtttacgcctgtaatcccagcactttgggaggccgaggtgggcggatcacgaggtcaggagatcgagaccatcctggctaacacggtgaaaccctgtctctactaaaaatacaaaacattagcagggcgtggtggcggccgcctgtagtcccagctactggggaggctgaggcaggagaatggcgtgaactcaggaggcggagcttgcaatgagcagaggtcgcgccactgcactccagcctgggtgacagagggagcccactccagcctgggcgacagagggagactccgtctcaaaaaaaaaggaaagaaagaaaggagaggtatctggggagaaggtacagcttggggtgtgtccggga

SEQ ID NO: 1562690 - DNA, 4001 bp, Homo sapiens
cgtactatgtaaatagttgtattgtttagggaataatgacaaggaataaagtctatacgtattttcagtatagatgcaattatcaatttttttcctctaatatttcaatccatggttgtttgaatcaacagatgcgtaacccagtgatacagggggctgactgtattattcctctgtagcttgagggaggacccagcaggatcagccattcctcatcgaccttcatggactaacaaaggctccatttcagaaggtctttttttgtgagccaaggtctcactgtcacacaggatggagtgcaatgcgcaatcatagctcactgcagcctcaacctcctgggctgaaaccatcctcccacttcagcctgccaactaagtgagactacatgtgcacaccaccatgtccggttaatttttaaaactgttttgggggatggcatctcactatgttacccagactggtctacaactcctgggtcaaatgaacctcccgccttggtctcccaaagtgctgggattacaggcatgagccaccgtgcctggacagtgtcctttcaagcttctcatgcccttacttcctcctagacatggatgtggctcaagaatatcttttacccaagaggaaactttaactcggtcacagaacgccaggtttgggttgcagacgcttcttgtgggggagggaggtcttttcccctgtattcacagaagaggaggttgccaactggagatggttcatttccaagtttgtctggggtcccccagctatgcaggacccagaaagcagatgtctagacatccaggccaatggtctttcactactctgtgagtctcccgtgaacttcacctggaacctggctgggacacaggtccaaaatacgtaacttcagaacatacccagaattccttctgaccagcctggaaaagttctagaaaatcacacttcagccacgtgtacctaccctgtcaggtgccaaggcaggtacagcacacagacaatcccacatgacccttgcactgccccgggggtgttaaaagagagccttcccggttcacagacttacacactgaggagcagagccagaaattcattcaatcctgctcgcactttgaagatggtcctaacagcaggaacctaaggggtcagggggccccaaagctccagaccctgatgtgtccttactgggcagggcaagaaatgggtttttccccctgaggcaggatcagtggctccagtctgcggcagtcccacatggatcccctactacccctacgcaccggtcctggcccagggctagctccttggtgagaaactcaaagaagtgggcgctgtggctgcggttgtcctcggcggtgcccactacgccgatggaggagatggacagctgcgcgcagggctcggtggacccgctcagcgccatggccaggcccggccgtaccgtcacgttcacgcgctgagggggacatgaaaagttttgcccgaagttggagccggccgggctacctctggggacgggacccgagcgcgcgaaagccgaaacgcgcagtgttcgcggggcagggatcccgatacgggccgcggtccctgaaggtcacgcccgggtcatgactggggagggcgacaagggaaagacgtgcggagggggagccgcgggatcgtggagcacggaaagtcagagcttggcgtgaggaaaggagtggggagtggtccctggggaaaagattcggggtcactgtcggggaggcggagcagggacagggccggacccctggcccaccaacctcccctcgccccgtgctgcccggcccacgcttacgtccgcaggtttgcccaggatggaggcagcggcggcgcagagtcgtttctccagccccgcgggcactcggttggcgggcaaattcgtgtccagctccaggaacggcatggcgggcagaggaacggaaacagctctggcggaagaaaagctgggggtacccaaggctcgcggaccagggaggaggggcgaggcgccacagcaacctggcttctcattggctggacagagactcggcgctccccgattggctgcctagggtacctcccgcttctgcaaacaaaagtcacgtgtgccggctgatttccggaagtcccatcgtctccgccctacgtgtagccccacccactacaggtctttaacccggtagtggacccaccctgtctcccccgaccctcctgcctggcgccaggtgggtttccctctcaagcttccgcgctgtggtcgcccggttcctagccctattagaggtctgaacaccacacccccgacacacaaggacacacacacacctataggggtcttccccaggctcgaccctaataaccaatacaacgggagcttaaagtttttttgaatgatttgccaccatttcgaagtcaggcaatttcatgttcagtatggaaatctgcgcttgggcagtcaggagatgtggttactcgcgggggcgcgggtagggctaggctcacgacaatacctgtccctgcctggtccccattgacatctgcctgtgtagcctcttgtgccggtggtgagccactgtccaccagggggtggcaaaatatgttctttaaaacatggaaaggccgggcacggtagctcacgcctgtaatcccagcactttgcgaggtccagacgggcggatcacctgaggtcaggagtttgagaccagcctggccaacatgacgaaaccccgtctctactaaagatacaaaaattagccgggcgtggtggcagacgttgtaatcccagctgctcgggaggctgaggcaggagaatcgcttgaaccggggaggtggaggttgcagtgagccgagatcgcgccattgcactccagcctgggtgacagagcgagactccatctcgaaaaaacatcagaaaacatggaactctgttggcgtggcttaaacatgagtgtggtcagtgtggcaaaatcacttgaattgtacattacaaatatgattgaagttgtggtcgagcaatgtggctcacacctgtaatctcagcactttgggaggctaagaagggaggattgcttgagcccaggagttaaagatcaggctaggcaacatagcaagattctcttctttattttctacaaaaaaaaaaaaaaaagaaagaaatctgggtgctgtggtgtgtgcctgtagtcctagctacctgggcggctgaggcaggaggattgcttgagcgcaggagatctaggctgcagggagctatgactgtgccactgcactccaccctagatgacagagtgagacccaggctcccccctcccccacaaaaaagaaagaaaaaatttgcaagtttatatgtacaatttcaactacgtgtataaaattctctataagtgtgcatacttaaaggagcctccactgaaaggccgacagagtctctgtctgtcatgatcttgtcctattagcagtttgtttattagatgactcagatatcagaaggtctgagacacacgacaggtaaatatgacagtcctaaggggagagggcagggacaggtggcaagtctgggaccaggtgtggggcatggacaagccagtggtccgggagtggggtgtagagaagactgtggtcaaggttatgaggaggcatgggagagggccaggaaataaccagggacttcccttcctgcaaggaggttcatgaaccagccctgcaccccacttgtggaacacaacatcgccccacagtgaggagagagaccgaggagaccaaggctgatcctgattcagacatctttccaccaggtcacccctcatcgatgatacatgctcagtccgggggtatcccccgcaaggaaacactggggctgaggagcccagagaggtcgcctgacctggactggggctggggaggtcagggaagtctccctggagaagagacagggtgccaaatgccaaaagaccaggaagggcaccaggcgaagatgaggagggaacagcatgagcggaggc

SEQ ID NO: 1562691 - DNA, 4001 bp, Homo sapiens
tgtttccaatatcctgttagcacgaatgctggtatataaacttttctgtacaaggatcctggggtacctgtgcaaggatttctctaggcattacagtctagggtataaagcttagggaggaattgctgggtcgttttcaactttcctagataatctcaagttctttttctaagtcaatgaactgaaattcacttctaaacttagcaatactgtcacacgcgaagcaaacattccacctctcatcctctaaacaatgagataaaatattttccttcctaataaggtataaatcaaaataattttgtaaaaagtggcaactgaagtgcttgagactagtaaatccagcagttgtggatctgaaccacaaaagacaaaaacgtttggagaaaatatcgttaacagagcgcctactacagtgagactattacatccattatctcttaattcctgacaacacagcaaagtaaaggcaattatcacgttcctcagaggaaacaggctcacaaaaggtaggatcttgaccaaggtcacacacacacatatcaagtggcgtcacgtaactctttggggaagcgggggggtcgggggagacggagtttcgctcttgccacgggctggagtgcaatggcgcgatctcggctcactgcaacctcctccccccgggttcaagcgattctcctgccttggcctcccgagtagctgggattacaggcatgcgccaccaagccaggctaattttgttatttttagtagaaacgggatttctccatgttgatcaggctggtctcgaactcctgacctccggtgatccgcccgcctcggcctcccaaatcgctgggattacaggcctgaggcaccacgcccggtccacaataccaagaactttctagcgaggcagaatagttgacgctgcagtccaattagagaaaaaaggctgaaatattaagattaaaactaaagtaacgacccaaaaacccatccttcccccaaacacggtcatttagatggcaagcaactccactgctttacatcccaatgcatttcctccgacttaaaatataactgaagagaattaaaatctatttctaaaaatgagaagttggtcttttcgtctcccgtgccttaaacagtgaactctggggagagaacgtcaagggtgccatttcgtgtaaggctttcctgggctgaagtgttctctcaggaagatccgcgtttttcagatgaacgccgaggcctggagacatcgaacagcccgcccgaagcggcccggctcgagagccgggaaaccaggcgaggcgccaaagcccgggcctgggctgatgcggccaggccgcccctcccgatcccccgcggggctgggatggggccgggccgcgccacgacggccgtccgcacggagaggcccagcgtcgccaagcggccgccctcctcgggtcccgagtgaccccggggccgaggtccgcgcacgaaaccgctgtctcgcctcgagtcgcctcccctcgcctcccgggtcgagagcaaggctcccaggctcgcagtccgccgggcctccccaagaagcaactcccccacccccacgccaggcctctcctctcctcccccacccttaccctccacggtcacgatcccggtcccggtccccaaagcctcctccgcgcatggtcccaaaaggatagagatctgggagcggggcacggatggccgggctcgggagggcctgcggctccggtctggtgacgaccgatggcggcggcgcctccgctgttggggcggcggcaggcgcagcgctctctcgctccgacgcgctgtctcccgtcgcagacgccaccgtcgccgcctctctcgtcggagacgggagcaaaacacagagaatcggggctacaaagccggtgggcaggtttggctacgctcaaaccgggcagtgccgcggtttaggcgtctccttccttcccagcgactgcacaaaatggcggccgccgctgagtcggctccaacttaacgctgcgtacggcggagacgatacgtaaacagcgcctcggaatagcccgagggctccgcggggaactacgggtattcttggaagcactttacgtcagttgcgacgatgggtgtattttgcggtctgtacaagaaaaacaaagtacggagcgagcgtagagttctcgcgccacccgaactagaacgtgggatgaggtgggaggaagcgcctctggtgcgacgtaacattctttgcgtcgttagccggcctgctgttgctaagatgcgcagtatgcgtaacgcattctgtttagagaatagaggattttgcctgattccgatctcggtacagaccccgcggccggcttgaagaagttgctttgcagagacaataaccgtcctccatattgttatcaagtttcagagtcctctggcgccagaggccgggagggtcttaaattccgtggctggccttcctatatggcgccgccagccctctcgccccaccgccctgggcccgctgagaatggcggcgggccccggcgccatttcctttccgttgcctttcgctgctctgtctccggcagccatgatggaagagccgtgtccctttctttccggagtttgtgaggtggcgatgtcccttccaggttaaagtgccctcagctacatttggttcacactgaggtgcattttctgaaccgtatatttttaccgtccctggccgagcacagctgttgctaatacagaaacaaaatgtgcttggaggccaggcatggtggctcacgcttgtaatactaacactttgggaggccgaggcgggaggatcacctgagtcccggagttcgagaccagcctggccaaaatggcaaaaccccgtctctacgaaaaatacaaaaattagcaggacatggtggcgggtgcctgtagtcccagctacttgggaggctgaggcaggagaatcgcttgaacccgggagtcggaggtcgcagtgagccgagaacgtgccactgcactccatcctggacgacggggcaagaatccgtctcaaaaaaaaaattgcttggagccccagtggactccgtgggccctttgctgccgttgaacggcgctcctcagaaggcccggagaagaccccagcactctcaggagaacaaggtttcagagcgatggtctttagacacagaaagggcgaaggctaaggacaagtgtttaaccaggctagtccacgttctccgctcaattccttccagactggcttccctctccttacctgcttcctgtcgtctcaaactgcattttgaagccccgcaagcttggccaaatggcgtcacacgactgttgagctgttagggccctcgagacgggcccatctaacgtctcaattcaacagatgggtagaagcggggagatttggcccctcagtgtgggtgctgagtgtttgtttcccaaatttttgggaacatagcataagaaaaggagcttcaaaaagaaaaaaaacatggaccactgatttttctgtggttatgtgttctttttccccaagtacgttcttaacattggcaagtgaacctcttaaagtgattgagactcgcctgggtcatattctttttcttttttttgtctggagtgcagtggcacaatctcggctcactgcaacctctgccgcccgggttcaggcaattctcctgcctcagcctcccgtgtagctgggatcacaggtgcttgccctcgcacttggctaatatttgtagtttagctggggtttcaccatcttggccaggctggtcttgaactcctgacctcgtgatccacccgtgtcgacctgccaaagtgctgggattacaggcgtgagccaccgcaccggcctgggtcatgttcttttatttacactgttaacctgccccaatcctcatcatctcttgcctggatgactgcgctcgcctctttttaatctgcctgctcctgtccttgctcactctgaatttattcttcacactgcagtcataggggtccttttatta

SEQ ID NO: 1562692 - DNA, 4001 bp, Homo sapiens
aagagtcatgtgctcaggccccggtggatccactgccaggtttctgcacagactcagtgatctgcaggtgcccagatcattgctatggagggtttcgctcatggacctgggtccccaacactctgccagctgaccatgcccctagtccgagctgagcatccccagcaaaagctcaggagtccaagcacacacagccttcaacagctcagaaataactttccgaatgggttttagaaaataacacgagaatgtcttaaggaacagaggaacctcctttttttttttttttttttttgagatggagtctcactttgtcgcccaagctggagcgcaatggtgcaatctctgctcactgcaacctccccctcccgggttcaagccattctcctcctcagtctcccgagtagctaggactacaggagtgtgccacctcgcccggctaatttctgtatttttagtggagatgtggtttcaccatgttggccaggatggtctcaaactgctgaccttgtgatctgcctgcctcggcctctcaaagtgctgggattacaggcatgagtcaccgcgtccggccaggaacctcttaacttcttttgtgattttgtggggaacaatctgggcaacagtattgaactaagaaaggttttcaaccctgggcaggtcaccacacttcttggtactcagcccccacccagtgatgctgtttgaggctgtgcacctgctggggaccgtgtgtggtgggaggggctccagagagtgctagagttaatgcttttctgtttagaagactatatgcttctcatggcctcttggagttcagcagggccttagaaagcatctcccaaccacagagacgcgctgcctggctttcctgatgatgatgatttggcctgatcttggacacctgcggtaatagagagctcactacccctcacgaggttccttgcgccagcgcggggaagcctccctccatctgcaggtgggcctcccctgtgctggtcagctccctggtgtgtgttacacaggacacagagaagatcatcctgcggggcctccctggaggaaaggaggctgcctgtgtgggtaggtgagtggaggcctgcaggcagcagaaagaccacatcgaaagcccatgggcacagccgatgaacagacccccacgagcaagaacaccacaagacgcaggtggagggacggggcccatggggtctggatctgatgctaggtgaacaaggaggcgctgcagggttttaagcaggagagccacaaaggttgaactctggggtgcagctggggtggggatgacatcagtgatggcagcaaaggaacggatccgagacctttgttgcagaaggagccgtcagcctcgcctatgcccagagatgggatgcggagcggagggtaagcccgggactctggcgggagccactgaggggatgaaggtgtcactgctccggtggggaatggaggggggagatgtgagacatttactgggaaaaatcgaaagagtaccacttaggttatgcaaaatgctccatcccaatgtgaagacaagatccgactccgagcagctcgccttccctcctcggcctggggagcgcttctggagcccggagaagaggcccctccaggaggcggcggccgaaggccagggagagtgcggggcggccgagggccccaagcgaggcgggactggccccgagaggcgcagccctgcccacccgcccgcgcccgcgctcgcgcccgctcacctccagcgcctggcccagctccaggtcgaaggtgaccacgcacacacactccagccaggcggagaagcgcgcccagggcgccgccggggtccgcgccgcgcgacctgaagacgtgggtccagccgcgcccaggcagccgcgagcccggcgaggccctgtgcccaacagcgcgtccatggcggcggccgcgggttgccggggaaacgcgggcgggggcggcgcgcgtccgggccgctcctcagaacagtcgagcggccgccgcggcccagtgcggctcccgcgcggccgcgcgccccctagcgcccgagaagcgccagcggccgggcgccgcccagggcaccagcgagccggacgcgcgcgggccagagcggccggagcccactgggggacttccggggaagcggccgaactggggccttccagggtccacgccgtctgaggcccgagagagtcggttcggccccggtgttcgcggatcccggctcgcgggagcctcggggccaggccagggaggcagagcaagctgcagccagccggcgccgggctcgtcgggcttcgcaggtccggccagcctacctcgccccaccgcgcaggggccagcggcgtcgcgggcgttttcgtggcggaatggcgtcctcactgagcgcccagccaccaccgcggactcgcgctcgcttcctctggggcccgcgcggcctggggtcgtgtctgaccgcgggtgtccacgcaacacctctgcagtttcactttccgggggaatcgcggggacctggagcgaactcttccctccctcgcgagggccccgggccccgctgtggtccacagagcaccttgaggcccggcgtggaagggcgagtttggggctgtcggtaacttaatgaggcacgcctttgagtcgtgggcctcatgacgtttccgtggaaggcgggccgcatatactgtggtggtcccttcagattaccacgtgttggccagacgcggtggctcacgcctgtaatctcaccgctttgggaggccgaggtggggtggcggatcacgaatccaggaaatcgagaccaacctggtgaaaccctgtctctactgaaaatacaaaaattagccgggcgtggtggctggcgagcgccgtaaccccagctattggggaggctgaggcaggagaatcgtttgaaccccggaggcgaagcttgcagtgagctgagatgtcgccattgcactccagcctgggcgacagagtgagactccatctcaaaaataaaaaaataaaagattaccacgtgttgttcggatcatctggcctaggtgtggggtaggctgtcccatctaggtttgtcacataacaaaatcgcctaatgacacatttctcaggacatagcttcaccgttgagtagcacatggccgtattgttttttgtttgtttgtttctgttgttttttttgagacagaatgttgctcttgttgcccaggcaggagtgcaatggcatggtcttggctcactgcaacctctgcctactgggttcgagcgattctcctgcctcagcctcccgagtagctggaattacaggcgtgcaccaccacgccaggctaatttctgtatttttggtagaaacggtttcaccattttggccaggctggtctcgaactcctgagctcaggtgatctgcccgcctcggcctcccaaagtgttgagattacaggcgtgagccactatgccaggcccgactgtatagcttttatttttatttttagaggaaaggtctcactctctcccaggatggagtgcagtggcccattgcagctcactgcagcctcgatctcctggctcaagctatcctgccactcagtctcctaggtagctgaggctacaggcacacgccgccataccccattatttttttatttttattttttgttcgtttttgtggagatggggtctcgtgctgcctgggctcattttcatttctcttgggcgtgcatagaaaccaaattgctgaggcataacctgggtatatgtttagctttccccaaagcagccatacatttaaaaacattcctaccaggccaggcgaggtggctcatgcctgtaatcccagcactttgggaggctgaggctagtggatcacctgaggtcaggagtttgagaccaacctggccgacatggtgaaaacctgtctctactaaaaaatacaaaaattagccaggcatggtggcggtcacctgtgatcctagctactcaggaggctaaggcatgag

SEQ ID NO: 1562693 - DNA, 4001 bp, Homo sapiens
gcatgcacctgtagtcccagctactcgggaggctgaggcagaagaattgcttgaacctgggaggtggaggttgcagtgagctgagatcacgccactgcactccagcctggtgacagagcgagactctgtctcaaaaaaaaaatgccaataaataataaaataaaataaaaagattcattatattgttaactccaatttctgaagtaaataatgctgttaagacagaatggaaaattattcccttacaaaagaaaaaaaaattatactaagtgcccttttattcttcagatttatggattcaaggcactaaggagagctgggtacagtggctcacgcctgtaatcccaactattagggaggttgaggttgaggtggaaggatcttttgagctctagagttccagactagcctgggcaacatgggggaccgtgtcccaaaaaaaaaaagaaaagaaaagaaaggaaaaaaaatagatgttaagagaaactattctaaagcccttcaactttcagataaggtacactaggagcttgcccaaggtcaccaggaaaattagaagcagagtagatactcagactatagctcagtgcagaataacatgctgtatcctgctccttcttcccatgcctacaagccaggcaaaggttcatgctttgatcatacctgctctatgcacatctatgccacttctctctcactcaatgtaaaaactgataaacgattttagtttctcttatctgccaaaccagtgcaggctggaattttatggaacatacacggaagatttgtaattaataatgcaattcaacaaatgaagggtagtaaaccggcagcattcacaatgttccttaaaagtctgaatgcaaatgcattagaagggtcctgccatcctcctattgttactgtatgacagttgctgctttagtctgtttagtcgcctgtttagcctcaattgtcacacgagtcagtgtgtaatttctaggtattgcacacaccagaacctcagccaacttacaaaacctctaaagaccaatcgatactgaccactgcccccaaagcccttcttgtggatgacgagtttgtagacctttgttgttctcatcttgcactgtttttccctttagctgttccaagcttggggcagagaagtcatcttgcctccctgccacagaaatacaaacgaaaaggttggaatgtcagatttttccttgcaaccactctttgattttaggccagtgaagatactggtgttcctctgctgtgaagtggtgccaagtgactctcggaagaagtcactcctccagttacaaggagcgatggagaacaaatagaaccacagaatccaggaactaaggggaattcgggccaggggctagtcaaacctaggagaagatattctatcacacccccataggggaagcattgcgctgaatgggtgctcatcaccttgtctccatctacaccaataacacccaaatagtaaagagatcttaaaagaggttagcccactcattttgtagatgatgaaagtgtgactccgggcaagggacttgctcaaggtcactcgagacttaagagacactcccaccattctcgttttgctgccaatgtcctgagcaaggcaaccacaaagaggaggaaggcagaagttccttccccaaacctcggtctgtgcgaactctcagcagaccttccctgactccgtttcacagctgaggccgttgaggctcagagagggagagagacttgtccaaggtcacacagcggaatggggatggagcctggaactcgaacctgggccaaggtcccctatctcaagcccccccaatccccagtccggggcgggcagctccactcaccgaagctctagagccccttcccgcctctggccggggcactgagggctggaccctctccaggttccctgcgcctcctccagataccccgcctacgcccgcgcggcccgcgctgttccgcccctaagcctgaagcgcctactaggcccgccccgaccgtgtagcgctcacctgagaacccgcgccgctccggtggctccgccccggggccccgcctccttcccgccctcgcgcccccgcgccgctctcgccgggcctccgtctcgtctcggtggccgcaccacttcctcatccggggctcgagccgggggcggggcgtcgtgtgcggcctcttccttgggccacctcctggcgtttcctgccctcgagcactagagcctcccgccccacggaggaaatccatttcctcctagtctatccgaagtagatccatggccacagagcttcgtttccgactcagtgatctccccacaggggaaacgagatccgtcagagctccgttttctgttatatgaacgaggttaatgactcatgtggcctcattgggcagctaagaggcgccaacgagagtttctgggaggacttctgtaaaatgcaaggggctgagcacgcgagagttagggtgatggcctctgctgggaagtgtccacttacggggggcttttcaaacccttgcaaactctaaacgacgttctgcgcccctcaggttattaataagaatggctgccgtggcttcatagtccttatgtaatcattgcatccctattacctgatggatgcaggaggcagatactatcctatttcacaaaccaggaaacagcctgaggacacaaaacccttcagaaggaagcaaggacgaatcctgacccgttcccagaacggggcctttaaccaacatcctttggtcatacccagggcactgcctaaactcgcgtctgtcaggatatctttctctccaagcagaaaaccagagagctgggtgggctgggtcaggctctggccaaggactcctgacaattgccagctccgcctgctgccactgatacccccgccccctagtccagtccaccgtttctgacctgagcggcagcaactcgatagggactccctgcttcccctcttgaagccagagagaccttataactagaatcggtgtcttgggtcacgcctctcctctgctgcttctaatcacactgactgctaaatctaaacgacacagcacttgtcttaaatttctttatatctttaatactaacagtgcccatttcttacggatttggaaaacttaaaaatgttgaaagaaaaaacatgttacactgtagtgaaagattctgcagtggaccaaggggaccctgggacaggacaagcaacgttcttaagcatggatgcctttatgttgggactcaggagaagttaggtaaataatgcaagtgttaagtaattgcaatttttttgtttgtttgtttttttgtttttgttttgagatgaggtcaccctcacccaggctggagtgcagtggcatgatcccgtctcactgccatctctgcctgcctggctcatgcgatcctcccacctcagcctcctagtagctgggattacaggtgcatgctcagctaatttttgtattttttgtagagacggggttttgccatgtggcccaggctggtctcaaactccagagctcaagtaatccgtccgccttggcctcccaaagttctgggattacaggcaccaatcactgtagccgggccttttttttcccccaagaccaggtctagctctgttgccaaggctgcagtgcagtggttctatcatagctcactgcaacctcaattttctgggctcaagtgattcttctgcctcagcctcccaagggactgggactacaggccaagccaccactcctggctgaaattgtttatcttgtaataaaacatatgtgatacagtggattgcaacagttacaaaattttttaagaataacaatgttatgttaaaaaatgtttctatgttgccacttcaggagatacacctagatcccccaagatagtttttgtctttagcaatggtggttgatgggacattcttccatccctggggaagctaataggattctctcttcttagccctcaagggaatttgatt

SEQ ID NO: 1562694 - DNA, 4001 bp, Homo sapiens
tgcaacctctgcctcctgggttcaagcaattctcgtgcctcagcctccctagtagctgagattacaggcacgcaccaccacacctggctaatttttgtatttttagtagagatggggtttcactatgttggccaggctggtcctgaactcctgacctcatgtgatctgcccaccttgaccttccaaaatgccaggattacagtcatgagctaccatgtccagctgttagttgtattttgacctatagtcttgcagaagactggatacagcatctaactacctttgtattttatacataaaaacatgtatttgtatacgttgtatatactgtatccttgtattcttttctctgccaaaagttatttgctttattccactccacaaatatttaggcaacatcaacagcatcaaagtaataacaatagactgtgcattttagcagaaattgtagtttaaatatagcaatgcctgtagcctggtaattacaatggctacatttattgagcacagagtctaacactctgctaaatgcattacatgtatcactttacttaagcctcacaatgctctatgatagagaaactattgttttccctttttggcagtccttcccctctggaggcttatacctacataatgtagaagtaaatacaccctaaaatacaatgttaaaaagactcatgccagcgcggtggctcttgcctgtaatcctagcactttgggaggctaaggtgggcggattgcctgagctcaggagttcgagaccagcctgggaaacatggtgaaaccctctctactaaaatacaaaaaaaaaaaaaaaaaaatagccaggtgtggcggcatgcacctgtagtcccagctactcgggaggctgaggcagaagaattgcttgaacctgggaggtggaggttgcagtgagctgagatcacgccactgcactccagcctggtgacagagcgagactctgtctcaaaaaaaaaatgccaataaataataaaataaaataaaaagattcattatattgttaactccaatttctgaagtaaataatgctgttaagacagaatggaaaattattcccttacaaaagaaaaaaaaattatactaagtgcccttttattcttcagatttatggattcaaggcactaaggagagctgggtacagtggctcacgcctgtaatcccaactattagggaggttgaggttgaggtggaaggatcttttgagctctagagttccagactagcctgggcaacatgggggaccgtgtcccaaaaaaaaaaagaaaagaaaagaaaggaaaaaaaatagatgttaagagaaactattctaaagcccttcaactttcagataaggtacactaggagcttgcccaaggtcaccaggaaaattagaagcagagtagatactcagactatagctcagtgcagaataacatgctgtatcctgctccttcttcccatgcctacaagccaggcaaaggttcatgctttgatcatacctgctctatgcacatctatgccacttctctctcactcaatgtaaaaactgataaacgattttagtttctcttatctgccaaaccagtgcaggctggaattttatggaacatacacggaagatttgtaattaataatgcaattcaacaaatgaagggtagtaaaccggcagcattcacaatgttccttaaaagtctgaatgcaaatgcattagaagggtcctgccatcctcctattgttactgtatgacagttgctgctttagtctgtttagtcgcctgtttagcctcaattgtcacacgagtcagtgtgtaatttctaggtattgcacacaccagaacctcagccaacttacaaaacctctaaagaccaatcgatactgaccactgcccccaaagcccttcttgtggatgacgagtttgtagacctttgttgttctcatcttgcactgtttttccctttagctgttccaagcttggggcagagaagtcatcttgcctccctgccacagaaatacaaacgaaaaggttggaatgtcagatttttccttgcaaccactctttgattttaggccagtgaagatactggtgttcctctgctgtgaagtggtgccaagtgactctcggaagaagtcactcctccagttacaaggagcgatggagaacaaatagaaccacagaatccaggaactaaggggaattcgggccaggggctagtcaaacctaggagaagatattctatcacacccccataggggaagcattgcgctgaatgggtgctcatcaccttgtctccatctacaccaataacacccaaatagtaaagagatcttaaaagaggttagcccactcattttgtagatgatgaaagtgtgactccgggcaagggacttgctcaaggtcactcgagacttaagagacactcccaccattctcgttttgctgccaatgtcctgagcaaggcaaccacaaagaggaggaaggcagaagttccttccccaaacctcggtctgtgcgaactctcagcagaccttccctgactccgtttcacagctgaggccgttgaggctcagagagggagagagacttgtccaaggtcacacagcggaatggggatggagcctggaactcgaacctgggccaaggtcccctatctcaagcccccccaatccccagtccggggcgggcagctccactcaccgaagctctagagccccttcccgcctctggccggggcactgagggctggaccctctccaggttccctgcgcctcctccagataccccgcctacgcccgcgcggcccgcgctgttccgcccctaagcctgaagcgcctactaggcccgccccgaccgtgtagcgctcacctgagaacccgcgccgctccggtggctccgccccggggccccgcctccttcccgccctcgcgcccccgcgccgctctcgccgggcctccgtctcgtctcggtggccgcaccacttcctcatccggggctcgagccgggggcggggcgtcgtgtgcggcctcttccttgggccacctcctggcgtttcctgccctcgagcactagagcctcccgccccacggaggaaatccatttcctcctagtctatccgaagtagatccatggccacagagcttcgtttccgactcagtgatctccccacaggggaaacgagatccgtcagagctccgttttctgttatatgaacgaggttaatgactcatgtggcctcattgggcagctaagaggcgccaacgagagtttctgggaggacttctgtaaaatgcaaggggctgagcacgcgagagttagggtgatggcctctgctgggaagtgtccacttacggggggcttttcaaacccttgcaaactctaaacgacgttctgcgcccctcaggttattaataagaatggctgccgtggcttcatagtccttatgtaatcattgcatccctattacctgatggatgcaggaggcagatactatcctatttcacaaaccaggaaacagcctgaggacacaaaacccttcagaaggaagcaaggacgaatcctgacccgttcccagaacggggcctttaaccaacatcctttggtcatacccagggcactgcctaaactcgcgtctgtcaggatatctttctctccaagcagaaaaccagagagctgggtgggctgggtcaggctctggccaaggactcctgacaattgccagctccgcctgctgccactgatacccccgccccctagtccagtccaccgtttctgacctgagcggcagcaactcgatagggactccctgcttcccctcttgaagccagagagaccttataactagaatcggtgtcttgggtcacgcctctcctctgctgcttctaatcacactgactgctaaatctaaacgacacagcacttgtcttaaatttctttatatctttaatactaacagtgcccatttcttacggatttggaaaacttaaaaatgttgaaagaaaaa

SEQ ID NO: 1562695 - DNA, 4001 bp, Homo sapiens
gcagtgagctgagatcacgccactgcactccagcctggtgacagagcgagactctgtctcaaaaaaaaaatgccaataaataataaaataaaataaaaagattcattatattgttaactccaatttctgaagtaaataatgctgttaagacagaatggaaaattattcccttacaaaagaaaaaaaaattatactaagtgcccttttattcttcagatttatggattcaaggcactaaggagagctgggtacagtggctcacgcctgtaatcccaactattagggaggttgaggttgaggtggaaggatcttttgagctctagagttccagactagcctgggcaacatgggggaccgtgtcccaaaaaaaaaaagaaaagaaaagaaaggaaaaaaaatagatgttaagagaaactattctaaagcccttcaactttcagataaggtacactaggagcttgcccaaggtcaccaggaaaattagaagcagagtagatactcagactatagctcagtgcagaataacatgctgtatcctgctccttcttcccatgcctacaagccaggcaaaggttcatgctttgatcatacctgctctatgcacatctatgccacttctctctcactcaatgtaaaaactgataaacgattttagtttctcttatctgccaaaccagtgcaggctggaattttatggaacatacacggaagatttgtaattaataatgcaattcaacaaatgaagggtagtaaaccggcagcattcacaatgttccttaaaagtctgaatgcaaatgcattagaagggtcctgccatcctcctattgttactgtatgacagttgctgctttagtctgtttagtcgcctgtttagcctcaattgtcacacgagtcagtgtgtaatttctaggtattgcacacaccagaacctcagccaacttacaaaacctctaaagaccaatcgatactgaccactgcccccaaagcccttcttgtggatgacgagtttgtagacctttgttgttctcatcttgcactgtttttccctttagctgttccaagcttggggcagagaagtcatcttgcctccctgccacagaaatacaaacgaaaaggttggaatgtcagatttttccttgcaaccactctttgattttaggccagtgaagatactggtgttcctctgctgtgaagtggtgccaagtgactctcggaagaagtcactcctccagttacaaggagcgatggagaacaaatagaaccacagaatccaggaactaaggggaattcgggccaggggctagtcaaacctaggagaagatattctatcacacccccataggggaagcattgcgctgaatgggtgctcatcaccttgtctccatctacaccaataacacccaaatagtaaagagatcttaaaagaggttagcccactcattttgtagatgatgaaagtgtgactccgggcaagggacttgctcaaggtcactcgagacttaagagacactcccaccattctcgttttgctgccaatgtcctgagcaaggcaaccacaaagaggaggaaggcagaagttccttccccaaacctcggtctgtgcgaactctcagcagaccttccctgactccgtttcacagctgaggccgttgaggctcagagagggagagagacttgtccaaggtcacacagcggaatggggatggagcctggaactcgaacctgggccaaggtcccctatctcaagcccccccaatccccagtccggggcgggcagctccactcaccgaagctctagagccccttcccgcctctggccggggcactgagggctggaccctctccaggttccctgcgcctcctccagataccccgcctacgcccgcgcggcccgcgctgttccgcccctaagcctgaagcgcctactaggcccgccccgaccgtgtagcgctcacctgagaacccgcgccgctccggtggctccgccccggggccccgcctccttcccgccctcgcgcccccgcgccgctctcgccgggcctccgtctcgtctcggtggccgcaccacttcctcatccggggctcgagccgggggcggggcgtcgtgtgcggcctcttccttgggccacctcctggcgtttcctgccctcgagcactagagcctcccgccccacggaggaaatccatttcctcctagtctatccgaagtagatccatggccacagagcttcgtttccgactcagtgatctccccacaggggaaacgagatccgtcagagctccgttttctgttatatgaacgaggttaatgactcatgtggcctcattgggcagctaagaggcgccaacgagagtttctgggaggacttctgtaaaatgcaaggggctgagcacgcgagagttagggtgatggcctctgctgggaagtgtccacttacggggggcttttcaaacccttgcaaactctaaacgacgttctgcgcccctcaggttattaataagaatggctgccgtggcttcatagtccttatgtaatcattgcatccctattacctgatggatgcaggaggcagatactatcctatttcacaaaccaggaaacagcctgaggacacaaaacccttcagaaggaagcaaggacgaatcctgacccgttcccagaacggggcctttaaccaacatcctttggtcatacccagggcactgcctaaactcgcgtctgtcaggatatctttctctccaagcagaaaaccagagagctgggtgggctgggtcaggctctggccaaggactcctgacaattgccagctccgcctgctgccactgatacccccgccccctagtccagtccaccgtttctgacctgagcggcagcaactcgatagggactccctgcttcccctcttgaagccagagagaccttataactagaatcggtgtcttgggtcacgcctctcctctgctgcttctaatcacactgactgctaaatctaaacgacacagcacttgtcttaaatttctttatatctttaatactaacagtgcccatttcttacggatttggaaaacttaaaaatgttgaaagaaaaaacatgttacactgtagtgaaagattctgcagtggaccaaggggaccctgggacaggacaagcaacgttcttaagcatggatgcctttatgttgggactcaggagaagttaggtaaataatgcaagtgttaagtaattgcaatttttttgtttgtttgtttttttgtttttgttttgagatgaggtcaccctcacccaggctggagtgcagtggcatgatcccgtctcactgccatctctgcctgcctggctcatgcgatcctcccacctcagcctcctagtagctgggattacaggtgcatgctcagctaatttttgtattttttgtagagacggggttttgccatgtggcccaggctggtctcaaactccagagctcaagtaatccgtccgccttggcctcccaaagttctgggattacaggcaccaatcactgtagccgggccttttttttcccccaagaccaggtctagctctgttgccaaggctgcagtgcagtggttctatcatagctcactgcaacctcaattttctgggctcaagtgattcttctgcctcagcctcccaagggactgggactacaggccaagccaccactcctggctgaaattgtttatcttgtaataaaacatatgtgatacagtggattgcaacagttacaaaattttttaagaataacaatgttatgttaaaaaatgtttctatgttgccacttcaggagatacacctagatcccccaagatagtttttgtctttagcaatggtggttgatgggacattcttccatccctggggaagctaataggattctctcttcttagccctcaagggaatttgattccttctcctgagagatgtccataatgggacatcttaaaaaggcaaatttttttttttttttgagacggagtc

SEQ ID NO: 1562696 - DNA, 4001 bp, Homo sapiens
tggggatccttctgagggtggggagagggagggagggctctcaacactcacaggaagccaggggtctgcaggagcctcttgcctccaggctggttggggaagacgtcctccaggaagtagtagatatggcccaccgcaatccctgtgagacagccacggactgtggggtcaccctccacagcccagagtcctagaccagcagagcctgccccaggcccccatccacagcctggtggccctgcaggccccacagcatgagtgccccaaagccttgcacagagtgccagccccgggttggccgtgaaggacaagcttaaaaggcccagaagcaggcaggacccagggaggggagggcctgagaatagtggaggagtgggagccatggggcaggaaccctgaccctcccatcctcactcccatcaggaccgtgcaagcatcagtagatccgtcctgacgatgcaaattatgtgggccggctggcttgaggggctgtaagagcacagcagctgggagggcaggaagatggggatggagccaggtgtgaggagaactccagcaaggatgggagaggggccccagggcataagcagcgtgtcctgaggggagtggccagcctggggcggactagatgtaccgggaggctcacccagcaggtccacgaggatggagttgcccagcagcagcgagaagcccatgagcgcccaaggcaggaacggtgcctggaaagtgagcaggccgaagaagttgaccctcacccgagggctgcggcggctccacacgtacaccagcatggccatgagggcctggcccaggaagaacaggctgcccaggagtcccagcagctgggccagagtcaaggtgctccggtgcaggcctcagcccaagcccagggcccctctgacttcccaagaccctggaattcttcccctcatctcccctatgtgctattccctcatcaagatgagccagtccaataaaggcgacacactccacgggcttcaggtcccacgaaatctgccctgcacacctacagcctcatcccagggcccaaccactgcctgtccctgccccagtttctcccggctactcgcattcagggctcagctagtggccctgacaacccacctggctcttttgtgcatggctttgtattttgcatacagcactgaagatctagccctgacccctgcagctgagcacagagtgggccctcaacacatactaagctggagacagcgactgtgtccctctctggcatggctgtgttggccccaggaccaacacaggctggacgccgaggcgccctagcccgaggttccagagcctgcgggaaggatacggtcataaggacgcccccgaagagaaacatgaagacgaagtcggccgtgcggccgcggaaggagccctcttccagcatgcggcagtagcggaacctacggcgtcggtataggaagtgccaccaggcggggcctcagtttccccgtcccggcctctctcccagcccggccggcctgccctccacccagcccgtgtccgcagggcgcaggatacacgaagagcatgttgaagaagaagctgaatcccaggggcccgaagaagaggaagttggtgacgagcctccagacctacgggggacgggcggtcaggtgcggggtgggtgggtcgggcccacaggtgcgcggcgcggggcggcctcacctggaacttccggaacacaaggtgcgggttgaagtagagttgaaaggggctgaggagctccagctgctgtggaaccaggggccagtcaagagctgcccgggagccacgccgtaaccatggcgaccctcacccctcccgccagaggctgtaaccaaggcgacgtccggtccgcccggccgcttaccaccgcggcggtggtgaggacacaggctgcggtgtaagcccgcgtcaccgccggcacctgcaggaactcggccgctagtccctgccacgccattgaaccttctcaagcacgcgtggcccagccagcaacgcgctctttaacccgcctcccagccccgccttcggccaatccgcatccgaggcgctgcgcgccccaggctgaaaagagagcccctgagcccgacagccaatggaaggaagaagagggaaattaggggcggaaagggagagtgggcgggtagaggctggtggccaatgggcaggcgccaaggttgagcacgtggcggttgttgtggctgcggtggtggcgcgggagaacgtgtggccaatgaggaactggtcatttcgcggctttctaggagaggaccagtagcgtggacccacgacaccacgggggcggggctaagatcgtatgggttacaggagcgaagacccgagcaggcgaggcaaaactggaaagggcggggcgcgtgggcggggcgcggagtgtggcggctcagaccgtgctggctcactaactgacgacctagccacaacgttgtcctcgctgccagcccaagacaggcccacctaacccacagcagggaggcattcgggaatgtgtccaaacctccccaaacgtccagggccccactcaaatgtgccggccgctgtcggggttcttccccgggggcccaaggaaggagaggcaggactgcgggattgagtccaggtggggcgcgagggttgagaggcgcaccagagcaagtggacaggcaggagaggtcctcaatattttggtggaaaatagaaaccaacctacccaccttccttccctccttccctccctccctccctcccttccttccttccaccgtttattaaacaactgtttgcctgacactgttctagatgttggggatgtagcatgcaataaaagacactgtctcttagagtccagccaggaggcagtcaatacaataagctagtgctgacacttgatgagaatattgccaagtgaggggtggggccacgtgggcgtccgcagtgccaggtggggtgacctgggatacctctaaagtttgtcactttgcaagcatccctgtgtccatcaggatggtaactgtgaaaagcaaaacaataaaacaaaataagtgttggcgaggatatggggaaattggaacccttgggcaccgttggtgggaatataaaatggtgcatccgctgtgaaaaacaatatgatcatgactcaaaaaattaaaaatagaattaccgtatgatccagcaatgctgcttgtgggtacacattcaaaagaatcaaaagcagggacttgaacagatgttcatacacccatgttcatggccccattattcacaatggttcacatcagttcacccaccgatgagacagacgaaatgtgctgtctacatgcaatgcaataccattcaaccttaaaggaatgaaattcggatacatgatgcagcatggatgacccttgaagacattacacccagtaacataaaccagtcacaaggctgggcgcagtggctcacacctgtaatcccagcactttgggaggccgaggcgggtggatcacctgaggtcaggagttcgagaccagcctggccaacatggtgaaacctcgtctctactaaaaatacaaaaattagctgggcgtggtggcgggcacctgtaatcctggctattcgggaggctgaggcaggagaattgcttgaatccgggagatggaggttgtggtgagccgagattgcaccactgcactccagcctgggcaacagagtgagactccgtctcaaaaaaaaaaaaaccagtcacaaaaagacaaatactgtatggttccacttatatgagaggggatcagggagttattgtttaatgagtgcagttccagtttgggaaaatgaaaaagttctggagatggatggtggggagggttgcataagaatgtttaataccactgaactgaacacttgaaaatagtttggacaaattttatgttgtgtatatgttactaaaatttaaaaaaaaacaacaaacctctgtgtttgctgtcagggtagtggactgccagaggaatcct

SEQ ID NO: 1562697 - DNA, 4001 bp, Homo sapiens
cgtctcaaaaaaaaaaaccaacaaaaaaaaaacacttgactgatgtaatctattaatgagtaacagcttcctcagtgactttgtaagttttgctttcagatgtgcctcaatcattttaacaactggttatctaggcccaaatccctgtcaaataatgggttggctacataagaattagctgataagctcattaaaaatacagatttttggaccaaaactccaggagattctgatttagtatttgtgaagccttagaatccatataattaaaattttctcattttaaatagatattatgtgtatgtaatacacaggtccagaggtaagaaacagtttacagcaaagtttctcttctacccctgttcccctggcatcaagttcccctttccataagctactgctgttatcaatttcttgtgtatccttacggataattatttgcctaagcaagcacatatatatcctttgatttgcatatttaaagagctattctaaccttgttttttctaatctcatttacaatatatgttggaaatgagggtatctgcatttttaacaagcaccctagatgattttgatgtgaagccaaatatagaaacaactcatggacccacggttgtgagattaagttcaattcactacgacatattagaaactcaaggacattgaaggatgccctcaaaagtagcctcccttacttgatctctgccccctcgtctcacagagatgaactaaatcattcgccagtgtctccacagaagccaggaaaaactagccattcaaatggatgctgtcaaagcttcaattttcaataattggaattctttcctgctcattgttacccgaaattacaaacctgacaattcctgtgttacacaagacattcctgtatttaagttgaaataaggtgtgatcgtcactgaatgagggctggtttttctcctgccagttaagtagtttaatggagcacaaccgaaatactttctttactaatccttattcacacagcctcatccaaacttcccccaaaactgctttcttgccatttgagcaaaagcaattaacttagaaactgtggggagaagactgcttggtgaattctggagttcggggctcctcttatcctgacttgacctacctgggggcgatggctgggtccctaggcagctctatctcccccatcccacctatccctgggactgcaaagggagcttccttttggcactgagacaaggttctccgagagccacccgacctccgcagtgtctctgtcaccacgaggggcaccgcgcggcaggcatcctcacctttcctacaccgcgccaaggaggcaggagtgcactgggctacccgagcgaggcagagaacccgccgggatccagcgctggtttaccccacaccctcgtcgaaggggctctcgagggctcggtttctgcccaagccccctgcaaggtggaggcatgactcctccatcccttccccttgaattcaaacgtgaggatggtatctgcgaggctaaagcggggctcagatggcccaaacttcagaccactctcttctccactcggcttttcttccatcctcctggccatgtgtctccccgtgagtcgtggcccaagtctccccacctcggccagccgccaccctctggcctggctcccgccctcctgcccacctggccccttccccctcacccagcatgatggggctgagccgccgggccaggcctttggacaggtcgtacacgtagagcttcaccggatagagattcggcggctccattgggacccgtggcgacggcggccacgacggccctcgggcacccggcagcggcttggaccttcccgtacccgacgggagtgcgaagcggagggagagggggggaccgagcccgggcccgggctgaggggtgggggagaggccgccctgcgctgctcgcgcccccacacccgctaccggcaacgactactgtgaggtgacagagaggggacagggagggcccacacggaagagggggcgggggcagggatgcacttttgcgcatgtgcttacagtcctgacgtaggaaggggcggggctttgccgaagggggcggggctctcgctgatgggttggctttcgtcagggacataggtagaagctggttggggagtgtgcgtgccagcctgacgcgatatagtgcgcacatgcgtgatgacgtagagggcgttgattgggaccgagtacagggcccgcgcatgcgtggattgtcgtcttctgtccaagttggtcgcttccctgcgccaaaggtaagcgggccgttatccatttgtgttgttcgccagctaggcctggcctcgtcccgcttcgctcggtcggtctcgcgcgcccccatagccttgctagagggttagcgttagccttaagtgtgcgaatccgaggagcagcgacagactcgagaccacgctccttcctcgggaaggaggcggcacctcgcgtttgaggcccgcctgcgtttgaggcccgcctgcgcttgcggcccgcctgcgcttgaggcctgtctgcgtttgagatctcattgggcgtgattgaggaatttggggaggtttttgggcggtattgaggacgagggggtccgttagtcagcatagaatcctggagcgggaatccctcaccgtctaaatggcgtcgggggcgggacctccgggatctggcttccgcgggccgccgccggccctgaaacgtgagggatagctgagatgaggcagctactgggatggcccccatgcgcatttacatgcagtccgactgccgagctttcgaggcagcaggatttaccgtccacattcctcactactaaccaagcttttagaacagatctcacaagaacctagaggtcggtattttttcgatttaaatttgcctgttactgacgttaacgtctttcgcctagtgagcagtagccaacatgtcagggtgggagtcatattacaaaaccgagggcgatgaagaagcagaggaagaacaagaagagaaccttgaagcaagtggtaagtgacttcagcatgtagtgccattcggtgtgtggaagaaagaccttccctgcctatctctgctggatggactttgctgtttgatggcctgcccttctcctcccagataattctgaaattcttttcttcctttgaacttcgcagagctaccctaggctcttatatgcagatcttactctagtgtgccctaagttttttttggacactggtagtttgacatcttttggtccctgataaatggccatgaccataggtattttttgtcatcttaagtggttcaggtgagacccttctcatccaggaaagtagtgttaccattccaggacctcagtgtaaaaatgcccccaccctgcaataactacaccaaccaaagaataaacgcaagcaacacagttacaggaaagtgattgattccctcactatagcctccacgtttgggagtgtatgtgcaggcaacacagtaacacataaaacaaaggaagagaaataggggtacatgtaatcttcatactggttaatttaactcctgagcagaaaaattttgaatatttttattaaaaatgagaaacggccaggcgcggtgtctcaagcctgtaatcccagcactttgggaggccgaggcgggcggatcacgatgtcaggagatcaagaccatcctggttaacacggtgaaaccccgtctgtactaaaaaaaaaatacaaaaaattagccgggcgtggtggcggtcgcctgtagtcccagctgctcgggaggctgaggcaggagaatggtgcgaacctgggaggtggagcttgcagtgagccgagatggcgccactgcattccagcctgggtgacagaatgagactctctcaggaaaaaaaaaaaagtgagaaacataggaaatacaaaaaagaaaaaaatttgctataatctaccactctaacacaaccactaccagcattttgacatttttgtatttttctttca

SEQ ID NO: 1562698 - DNA, 4001 bp, Homo sapiens
acagttcagcaggctttcccctctccgccacccacagggtcctcatacagggtggcgggggctcccgggacatcttgcccaaggcagagccaaacttgatggcaatctggcgcatccgttccaagtctccattctcctcggcttccaggtactccttctgtgcctggagcttctccacatcaggaaagaaatccctttggatgaccgtctggaggccctgcaaggagagatcagaatgaaagtcagaggccaggcgcggtggctcacacctgtaatcccaacactttgggaggccaagggaggtggatcatgaggtcagaagttcaagaccagcctggccaacatggtgaaacccagtctctactagaaatacaaaaattagccgggcgtggtggcaggcacctgtaattccagctacgtgggaggctgaagcagaagaatcgcttaaactcgggaggcggaggttgcagtgagccaagatcacacccctgcactccagcctgggcgacagagcgagaccgtctcaaaaaaaaaaaaaaaaaagaaaaaagaaagtcggagctgcagtctgggtgctcctgcctcacaggtccactgctgtacatgctaaggaacttgctgaacctccttcaaattctacttccccaatgactggggctggattgagggagcttgagggcactttctagtggggttgagcatcccatatggtagccatgctgcaacctctaacattactaaacactcttctgaagtccgtgaaacccttctctctcgcccttgctaactggtcattctcattctccattgctggctccccacaagccagaccaatgtgggtgttgtcactttcattccacacatgactttctatttccaatctaaacctttctcctggcggggcatggtagctcacgcctgtaatcccagcactttgagaggccaaggcgggcggatcacctgaggtcaggagttcgagaccagcctggccaacatggtgaaaccccaccactactaaaaatacaaaaattagccgggcgtggtggcgggcacctgtagtcacagctactcggcaggctgaggcaggagaatggcttgaacccaggaggcagaggttggttacagtaagccgagatcgcgccactgcactccagcctggacgacgagcgagactccgtctcaaaaaataaaataaaaataaacctttttcctgagtaacttcagccagtcactaccacaagttgagattcccaagtctgcacctccagccagaccttgctcccgagctgcatatctgggcacccaaccgtccgttaaagccatccatctacatatcccaaaaggtgtcccgaattaaacaggtctaaaaccaaactgacttccgccaatccccgtttcagctcctccttctgtgtgcgtgtggtggggcgacgcaggtccactcactcgagatgctgtcacaactgcggtctctttccaggaaccccagcattcacacttgctgccaccgctctttagaaagccctctttgccaccatccttccagtttgtcaaactcctactcacactttaacagaaaatcttctttccctgacccccgtcccatacaaagagagccgctctctcttttccctgacaacactactacagcctcttccaccacagacgtcttcctctgccctgtttacttgactcgtgggaccgtccacacccggctcctccacttccacgaggagacggagtgtcaacacccgagagagggaacctgagaggagcttgaagcagaggatgggcccagaagtcgccggcgtccgcaccgaggtcgtacctcgatatactcttcctcgtccaggacccgctgcttgctcgtcgcagccccagcctctcccgcctcgcgcttcctcgggggcctggacgcggcgggaagcaacaaggacgacgctgatgcgcccggcgtctccatcgctatcccaggaaaaagctcgggcccagcaggcgcgtcacagggtggagggggcgggactgcaccatttgcgcaggcgcctccaatagttggccaatggaaaagctgtggctctagaaagccagcccgcgctccgttctgacgtcactataaatgctagactttattggaaatgtagtccttgtcctgccccgcgctattcatgcttgtcaatgctgtgaacacgagggggtgctgtggaggtggcggggaggatgctatagggcgtgttcttcacgcgagaaattctggctttgcagcgtccaaaggccttagaattctaatttcccacaaataagaactatgtatgcttcgagattattctacaaaaatacaaaccaggaaatttacttatataggagtttcaagctttatgcaagaaaagggccttaaaacaattttttttttgagacggagtttcggtcttgttgcccaggctggagtgcaatggcatgatctcggctcaccggagttcccgggttcaagggattctcctgcctcagcctcccgagtagctgggattacaggcatgggccaccacgcccggctaattttgcatttttagtagagacagggtttctctatgttggtcaggctggtctctggattacaggcgtgagccaccgcacccggccaaaacaatcttttttttttttttatagttatctaacaaaaggtgaaagaacaagacagtggttcgattaagaaatgtctaaagattattctgtaatcccagaactttgagaggccaagacaggcggatcacctgaggtcaggagttctagaccagcctggccaacaagatgaaaccccatctctactaaaaacacacaaaaaaattagctgggcatggtggtggacgcctgtaatcccagctactcggaaggctgaggctggagaattgcttgaacccaggaggcggaggttgcagtgagctgagattgcaccattgcactccagcctgggtaacaagagcaaaactctgtcaaaaaaaaaaaaaagattattgggcccccaaatgccagagtgggcttcccagaagagggatcattctcattcaagaccaggcacggtggctcacgcctgtaacctcagcactttgggagacccaggcaggtggatcacttgaagtcaggagattgagaccagcctggccaacatggtgaaaccccaactctactaaaaaaaaaaaaaaatacaaagtggtggtaggtgcctgtagtcccagctacttgggaggctgaggcaggaaaatcactcaaacccaggaggtggaaactgcagtgagcagagattgtgccactgcactacagcctgggtgacagagtgaaactctgtcaagaaaaaaaaaaattaatattcaagtgaaccagaaaattgcctcggcatttttaaggaatttcttcccaaacgaaagatgtgaattgtgttggacaaataaattccgccctggaacaatttaatacaattttgcttttgcaacatacagggataccttcattcactgaagtgcagcgtgctgctgctgcccttgtagaagtgacagtgcaatggggaagacagagacacttgttagatcatcacacaaacaggtgtaaaattgcagctgtgtccgtgcaagaaaagagtttgtacttggggaatcttgacctagttcgggaggtcagagaagcttccccaggcagaaagtgattgcagattcaaaagacgaacaaaccggcaacagtcaggtggaaagagcatgtgcaaaggcctagtggtgggagggagcaaggcaagttctaaagaagtcctttggaaatgcagagtgcagtgaggtgtgagatgatgccagagaggcagggccaggctgcacagggccttgtagggtatggtgaggtggtttgtcttcattctgaattgaaggggcaggccaggcacagtggctcatgcctataatcccagcactttggaaggcctaggccggcggatagtttgaggtcagaagtttgagaccagc

SEQ ID NO: 1562699 - DNA, 4001 bp, Homo sapiens
gggcttgttcttgtcacttggattccctagggatgggcagggggcaagcacccacaggcactttctcagttgctgctggccagttggcaggctatgtgaaaaggctggcaaggaaaaaggagtcggggacgtcagtcacctctatcacccaggcaggagatgctgggcctggaaccagaggcaccccaaagaagccaggcataatatggcctcacctgagcccggtgacctcatctgcaaaactgggactcaagaatcagaaaacggtgaccttctacctctctacacgtacatatatgttttctaaagaagttaatcacaagaatccacaaacccattggttctgacctccaagagcctatatgataccctcctccacaggtagcccttttcctggcttctgttcttaccaaggccaccccacaactagtcatcccgctgcccagagagcagccaaaagcagtgagcaactagctctacatggggagaccagagaagcatcactgaatctgtccaggttgagcaccggtcagggccttggccaccaggcaggcactagggaggaggcagacattccacatagatgacacaagcgcagagccaagaggtgcggtgtatctgggctgggagcctggctagggcacaggagagggccacacaccccgtgctcccacacccaggtcatcagagaagatggccctggcacttctgccttcatgggacctttcctccattaagaaatattaagagtcatgctttttcactgtattagtataaagatgactgtattaatatacatacgaaaacattttatttgacctaaaagttcattttttttctgctgactttaaaaaaaaataaaataacattcgaaggctactaaaagtaccgtgggcaagtgataccaggattcctgtgcctgatggatacatcggccctgcatttagggagtttgattttttggtgcagttcaaggggaggtacaccgaaataggtagaaaagggtctcctggttgccacggttctgattccccaccacagacttaagaacacactagctccgaggggagttccaaagcacggactcattcatcacatacacgcagcacggctaagggccccgcacagtggcgaggtctctgctcccgggacgctcgcgccggccacacaacgctaggctgactcctggtgcctcctctaggcccggtgggacctgaggacttccttagcgcaacgtctcactgaatgacagccacaaccaccgctgtccaggcgaggagtttccaggactgagaggctggcactaggccactgctgggaggacgtctgtgaaaccaggtgcccctgagagccactgtccccagcccgactccgacgctggactggcgagagggtgcgcccgtggcgtagctcctggccgccgccgctcccgggaagggcccagaggcaacatcctggacagcagagctgcacgaagtccgaggcgccgcgagcccaggtaagctccagcaggcgtccgcagagagtgccaggcggcccgcgagccaggccccgcccgcccctgccccaggcgcggcccctgcaggagggcgccgcgggtgaaaggaggtcccggggcgaccccggccccgctcgccgcccagcccccacaccgcccccatcgcgcggcgcacctggccgcagcggctcggtgacagtgagcacgagcaggaagagcagcaggaaggcgccgctgtctgccttgggcaccatttatcctccgttcatcgtccccggggcggctggaaggccggaccaggccggactgagggtcaggggaccgtgccaagcggagggtcaggcggagctgaacctgggcgaggcgcggagaggcggcgggaaagagcttcggctgggccgcgggctggcgcacactctcggctgcaacctcaggcaccgactccagctgcgcgcaagatggcggccgtcctgctcggctccgcgccgcgccgccccgccccgcctcccgcccgcgacgcaggcgcgggccaatgaccgtcaagatggggggcggggccagagccaaagccctccgaagagggtgaggcctaaggtcgcgacggcggagggcggggacctaagggcggggactgaggggcgggctctaagggaagggcgggaccatacggagtgaggcgtgccattggttaagcagagaggcagggccggggccggggcctgagcggcggggccaccgaagggagtagggtctctggacgccggttagggacggcgggcgcgggacggcaaggatggacatcgaaaggcgcggggcatggggcggggcgccgaggggtcgcgcgggtggggagcggagagaacgaagtgggaacctggctgggactccaagggtcttcacacctgcaagctcaggtcccgtgagcagcccaaaagtgcgccccaaaggggtctttttaaggccgaaccgctgtggaggagggagggcctgccggttctgagggtggggaaagaggaacaggaatggcctaagagagtgtcaggcaaagagagaccgggaaggccaggtcctggagactgcagcgaagccggctccctggaggacctgcctacacaatggctaggggaaggccacatgtgcaggaaagaaagctaggcagagaggaggctcagcgcccctgcgaacagtgctccaagtgccacttctcccgtcatcaccaacagggtgaaccttggagggcagtgtcggcgaagagtccaactctgtaaaatatttgaagacatttcttctgagccaatatgtgaccaatagcctgggacacagccccaggagatcctgacaagtgcccaagggggtagggccacagcttggttttatacattttagggagacaagacatcaatcagcacatgtaagatatacattggttcagtcggaaaaggcgggacaacttgaaagtggggggtggaggggggcttctaggtcatgcggattggcagttggttcaaagagtttatctaaagacctggaatcaataaaagggactgtctacattaaggggttgtggagaccaagtttcttaggcaaatgaagcctccaggtatcaggcttcacagagaaaagactgttaatgtttcttattaaaaagtgccagactctgccgggtgtggtggctcacgcctgtcatcccagcactttgggaggccaaggcgggcggatcacctgaggtcaggagttcaagatcagcctggccaacatggtgaaaccacatctctactaaaaatacaaaagttacccaggcgtggtggcacacgcctgtaatcccagctactcaggaggctgatggcaggagaatcgcttgaaccggggaggcagaggttgcagtgagccaagatcatgccactgcactccagcctgggcaacagagtaagactctgtctcaaaaaaaaaaaaaaaaaaaaggaaaaaaaaaaggaaaaataaataaaaggtgccagactctagttaattctctcaggagaaaagaccttgaaagggatagggattctctacagaatgtagattttccccacaaaaaacagctttgcagagcgacttcaaaatatgtgaaagaaacctgttttgcagtaaaatatgtgtttccttccgggcctgctgtcatgctggtatcttactgccacagagtctgttgtcagtcttcaagtctctgtgtcgatgttacactgcttagctgtgcctgaaacctgaagggaggagggataatgaggcctgactcccacttcctatcacggcctgaaatagtttttcaggttaagtttggaatgcccttggtggagaggaggggtccattcagatggctggggggttagagttttatttttggtttccaggagacagtagttggggtgtccccagcgggaaggagaaggaggctgtctggaaggaggagaaccaagaatgcacaaaggcctggcagtgggcagtcagcgttagggaagaaggt

SEQ ID NO: 1562700 - DNA, 4001 bp, Homo sapiens
accacgtgatcatctcaagagctgccaaaaaggaaactgccaaaatccaacatccattcttgatagaaacacaccaatcctggagcagatggacactgcctgccttctggggaagggggccttgccccgctaggaggaatttttgccacattaaacctgcctctaatcaggctcctaccaggagtccagtgtacagtaaacccagagagtggagaagcaggttaaatgcacgaggaagcatttcctctgatagatccagagcagggcattctaattatagaattagactctataaaaagtcaatgccacaataaatgttggggactgttccagaagcaaagagaccaaagtaaccaattgtagtacatgaacttggactggatccttacttataaagcaacaatttgccacaagttaggtaccatgatgtggccatgcactgaaagtcaggagacacctggaacagttaatttctcagggggctaccctctgcagctgtgtaggagaccgctcttgttctagagcacttgctcccaatccaaggccaaggttgaccccaccacccaggttgtctggaggcattcttggttttcacgactagggagggtacccctgccatcctgcaatgcgcaagacagcatctcaccataaagacttacccagccacaaatgtcagcatggctgggttgaaaatcctggtctccaggaatgctgaagactcttggtgaattctatgctgtcacatgtatgtattttgggatgtcaagaactagagcaaaatgttaactactgaactttcggtggagagcacaagcgtatgcactacactgtcttttcagtttttccaaatgtttgaacttttaaaataagaagtttgggaaaaataaaacagcaaaggtggaaatctgatggtgcagggggacctgccctatataatttgcaggaaagggctccgaagcccaggaagcatgcggctcaagtgggaagctcttctggtttgggagggcgccacaggagacagtgcttaggaatttgatgtgcaactagaatgaggccctgcaggcctgagagggaactgaccctgaagggcgcgcacagctgtcaacagacctccaactacccaagggcgctgctcacctgtcaacagaactccaattaccggagggcaacgcagtcagatctaccaccagagtcagcctgccggccaaccaagcacggaggcctagggccatcaggcctggaagggggtggggcacagggaagcccgaacagggagtttctgctaagaaggtgggtgctgcgcaactgaaaacaaaactcgttggacacattggtcaccaaaaaggcgctgtctcagtctctgcgcccttgattttgttaatcttagggacctcttccgaacactcccaaggaaggagccgagctgcacagataccaagagctgccgggaggcgccgaccccgaggaggcggcacctcctcccgctgcccccgcgcacctcgatgctcgttctgtaggcgcaggcgctggttgtacaggctcttttcggtgaggtgctggatctccagtagcccctgcacgatttcgaacacggtgccgtcgagaagcgccagggccaggtcgctcagcgtggtgtaggacaagcgctgctggaatgagctgcggggtagaggagcgcggtgagccccggcgggacacgatgcggcctcggcaggccgccgcccgccccgcccgcgtacctgggcaactccttcaccaggctctgtaacgccgacagcagctggtagtgtcgctcctgctgccgggcaccgtccgccacctcctccaaggcgcccgcgtagcgctccatggcgcggacgcccgctagccgccggctgcagcgacgagcgcccccagctcacgtcatcccgaccgcggcgcgtcccgccccttttatgacagtccctagcgcagcgcgccccgcccgtcttaggacagtccccgatcgcggcgcgcctcgcgccttccccgccccaccacgcgccccgccccttgcgtcattcagaaggagacgcgccccgtccctccgtggtggctgcaaggagggtttcgctcagctgaggctcataccttcctgctccccgggccactttagaggcgagactccgtcgcctggatatcgcaggaccatgtagaatcccaccggcccttgctgagtcattgcgggctgaggtccgggctccgcgccggcgcgcctgcgaggtggactgtcccggtcaccggccttcccagagggaggggtctcgggccagagcccacaggacctgggtctaaggcaccatcgcggccgagcagtggtgttggggtctgtctgcgtcctctctgcccccggagtgagacagacaagaccaccctagagcctctgggccaggagagttggaaccggagtccccatctgggcctgccgtggtcgccccggggtgcccagcccccagccggaaccgcgagcccagactgccctctccccgctccccagaccagctgctgggccggggctggggagcttctggtggctggtgtgggcggcaagccacccaggcgctgaggcaagagaccgaggacacgagctgttccagtataataaaatataaaacaagaatagttataccagatatagatcttagatatgattatatatgaatatcaataatcattagttggtagcaattactctttattccagtattataataatcctcactctataatcataacctaggaaaaaccaggccatacagagataggagctaaggggacacagtgaggggtgaccagaagacaagagtgcgagccttctgttatgcccagacagggccaccagaagggctccttggtctagcggtgacgccagcgtctgggaagatgcccgttgccaggtgggccgtggtctagcggtagtgaaaagtgtcaaggaacaacacctgctacttagcagaccgggaaagggaggctccttttccccgggggagtttagagaagactccgctcctccacctcttgtggagggcctgacatgagtcaggcttgcctgcagttatccggaggcctaaccatctccctgtgatgctgtgcttcagtggtcccgctcctagtctgcctttattatgcctagtcatcctgtacacctggctctgccttctagctagcagtagtcaattagtgaaagtactaaaagtctctgatatgcagaaataatggcataagctatctttctctctgtctcctctccctctctgcctcggctgccaggcagggaagggccccctgtccagtggacacgtgacccacgtgaccttgcctatcattggagatgactcacactctttaccctgccccttttgctttgtatccaataaataacagcgcagccagacattcggggccactaccggtctccgcgctttggtggtagtggtcccccgggcccagctgtcttttatctctttgtcttgtgtctttatttctacactctctcgttgcggcacacggggagagacccaccgaccatgtggggctggtccctacaggctggggctgaaccggctaggaacacgttttaataggaggggttcgggtggaggaatggctcctgcaaaggccctgccagagtcaggtcaggtggatgggcgagaggaccagtgtggccaggctgcggaagccagcacaggagacaagggcgggtgctgtgcattacagaggctgctgggggcttgtccaaagagcagcagggggcacggaagggcttggggacgcagacacgatcagacttgcatttcaccaggcattctttagctgcctgcggtgctaaagaatgggtggctgggctgtgtgagatgaccctgctttgaccaggttaggaattatgactggtttccagagagaacattggttagcagttggctatgggggagaggggggcattgagccaactggggtccccctgaagtgccagcaaagtctct

SEQ ID NO: 1562701 - DNA, 4001 bp, Homo sapiens
cgacccagtaggatggaattcaagtgactgtaattcactgtagtaatagaaaatgattcaccacgtgatcatctcaagagctgccgaaaagggaactgccaaaatccaacatccattcttgataaaaacacaccaatcctggagcagatggacactgcctgccttctggggaagggggccttgcactgctaggagaaatttttgccacattaaacctgcttctaatcaggcttctaccagcagtccagtgtacaggaaacccagagagtggagaagcaggttaaatgcaagaggaagcatttcgtctgatagatcaagagcagggcattctataaaattagaatgccctggactctacaaaaaagtcaatgccacaataaatgttggggactgtttcagaagcaaagagaccaaagtaaccaattgtagtacatgaacttggactggatccttacttataaagcaacaatttgccacaagttaggtaccatgatgtggccgtgcactgaaagtcaggagacacccggaacagttaatttctcagggggctaccttctgcagctgtgtaggagaccagttttgttctagagcacttgctcccaatccaaggccaaggttgaccccaccacccaggttgtctggaggcattcttggttttcaggactagggagggtacccctgccatcctgcaatgcgcaagacagcatctcaccaaaaagacttacccagccacaaatgtcagcatggctgggttgaaaatcctggtctccaggaatgctgaagactcttggtgaatgctatgctgtcacatgtatatattttgggatgtcaagaactagagcaaaacgttaactattgaactttagtgaagagcacaagcgtatgcactatactatcttttcagcttttctaaatgttttaacttctaaaataagaagtttgggaaaaataacaaaggtggaaactgatggtgcagggggacctgccctatataatttgcaggaaagggctcccaagcccaccaagcaggcctggctcaagtgggaagctcttcgggtttgggagggcgccacaggagacagtgcttaggaatttgatgtgcaactggaatgaggccctgcgaggcctgagagggaactgaccctgaaagacgcttgctgcacaactgtcaacagacttccaactactgaggggcaatgctgctgcagtcagcgccaccaccagagtctgcctgcaggccaatcaggcaccgaggcctagggccatcctgtctggaagcgcgtggggcacagggaagcccgaacagggagtttctgctaagaaggtgggtgctgcgcaactgaaaacaaaactggttggacccactgatcaccaaaaaggcgctgtctcagtctctgcgcccgttgattttgtcaatcttagagacctcttccgaacacttccaaggaaggagctgatctgcacagataccaagagctgcccggaggcgccgacccggaggaggcggcacctcatcccgctgcccccgcgcacctcggtgctcgttctgtaggcgcaggcgctggttgtacaggctcttttcggtgaggtgctggatctccagtagcccctgcacgatttcgaacacggtgccgtcgagaagcgccagggccaggtcgctgagcgtggtgtaggacaggcgctgctggaaagagctgcgggtaggggggcgcggtgagccccggcgggaaacgaagccgcctccgcaggcctccgcccgccccgcctgcgtacctgggcaactccttcaccaggctctgtagcgccgacagcaactggtagtgtcgctcctgctgccgggcaccgtccgccacctcctccaaggcggccgcgtagcgctccatggcgcggacgcccgctagccgccggcggcggcgacgagctcccccagcttcacgacatcccgagcgcggcgcgtcccgccccttttacgattgtcccacgcgcggcgcgctccgcccccttttacgacagtcccgagagggcctggccgcctgccccgccctgccccgcgccccgccgcctgcttattcaggaggcgcgccccgctcctctgcggagactccaaggagggttttgctcagcccaggctcgcacctgcctgctccccgcgcgacattaaaggcgagactccgccgtctggatatcgcaggaccacggagaatcccaccggcccttgctgagtcattgcgggccgaggtccgggctccgcgccggcgcgcctgcgaggtggactgtcccggtcaccggcctccccagaggcaggggtctcgggccagagcccacaggacctgggtctaaggcaccatccgcggccgagcagtggcgctggggtctgtctgcgtcctccccgcccccggggtgagacagacaggaccgccctagagcctctgggtcaggacagtcggagccagagtccccatctgggcctccgtggcccccagcccgtgagcccagactgcgctctccccgctccacaggccagctgctgggccggggctggggggcttctggtggctggggctgaaccgtctaggaacaggctttaataggaggggctcgggtggaggaatggctcctgcaaaggccctgccagagtcaggtcaggtgggtgggcgagaggaccagtgtggccaggctgcggaagccagcacaggagacaagggcgggtgctgtgcattacagaggctgctgggggcttgtccatagagcagcagggggcacggaagggcttggggacgcagacacgatcagacttgcatttcatcaggcactctttagctgcctgctgggtggctgggctgtgtgagatgaccctgctttgaccaggttaggaattatgactggtttccagagagaacattggttagtaattggctatggggaagagggggcgttgagccaaccaactggggtccccctgaagtgccagcaaagtgtctggttttctccaggatctgtttcctcagtccctggcaggattggctcccctgcacgccatgtccttgtggtcccttccagacagaaaccaggcatgaataaagtgaataatgacaagcgctcaggccactgccgtggagggcggtccacaacccagagctggtcatgcgccgggcaccctggcctccaggtccctcagaatggcaggagctggaggtgggactcgagattgtgggagctgagtctgtagtgagtgaccaggagccagctggggctgggcttggtcactgtcacctcccccggaggtggtgagtgggatgattagctgggtgaagacgcctgcctgtttcaccagtgtccctgccctcagtcccccagtccatgaagagtgtctgtgtggagactgggaggatatagggcagccccacgtgatgatatgtctgtggccagctgggcaacactgtcgccagctccggggtctgccaggtggggtgggggctgtgagccacagcaggagcaggccaggcctgggtttggacacctgctcctctgccttgtccgggtgctgatgcaggaaggccccttctccaacccttggtgcaacgtctgacctgaaccagcttccccagcccagcaacactgctcccctaatgtggatgtcaacctaaagaaacaaactgaaccacagttcatatagagagtttgtctgggccaaggctgagagagctgcccaggacacaccaagttgccctgggagtgcttcattcagccttattacaagcaagtttttaaagactgaaggggacaaggagtgggctgatatgaagtcagcaggaattctgactgctttccagagagaacccttagtgactggctataaggtgttggactactgggtaagagttatggtgtccagcgtatggctttttatgcctacttggtgtcagtctggaacccacagagcaattggcttcaagaggtcgttagctcaagtaggagtgggatgtgactgctgtttcatt

SEQ ID NO: 1562702 - DNA, 4001 bp, Homo sapiens
caaaaatcagccgggcgtggtggtggtggacgcctgcagtcccagctacttgggaggctgaggcaggagaatcgcttgaacccgggaggcagaagttgcagtgagctgagatcacgccactgcactccagtctgggcgacagagcgagattctgtctcaaaaaaacaaaaaaaaaaaaaaagaaagaaagaagaatcactctgtgtccagaaaaactatagatggtggatggggagtgaggacctaaggtgacagtaaagagaattagaggctcaccaggtaggctgggccaggatgttaacttgaaggtggtgagaaatggtctgtgcttagaaataggtgagctgacggggcctccttaggactgcatgaaggtgtaagaaagagaggaatcaaagggactttagataggccaaggaatgttttggcatgggtgaagatttgagtttggtttggatatggctacttggcgccaaagtaacacatggagatatggaagaggtggccagaaacaccaggctggaaatcagaagagaggccagggctggagctgtgaagatgtcaaggaaagctggcattaaagtcaggaggctgggtgacatcacaaaggagagggctacaacaagagagtctaagactgggcaagccagccagaagcacatttcctaccccaaggtcacggtgagactacaaaacaacccctgggaagtgctccacacagcgcctggccgcaaagggctcaaaggggagctctctgcccgtaggcctccccactgctccagctgaccaaacaccgcatgcaaaccctgccttgccaacaggactatcggacaggaacgggctcacggcaagctcccctggacccttggcacggggagaaaacccgtacacttggacagcacccttcctcctagcccacttgctgtgttggctaacagaggcactggctgtgacgggccagcaccagtgccagcgccatggaggctgccttttggtcaagtctctcccgctgcagcctcccgcccaacccagcggcagtatgacctcatccgttccttttgtcatcctccaacaggcctcatatcccgcacttagaggcaacactgggtaccccgggctggccattcactcccttttgtgagtgaaggcctgcagcagggtttgggccactcccacagctgggagtctagtctggccaggaaacagtggatcctcgcctggtggttggcctcgaacagtcgacagccaaagacaggactgccgtgcaggaacaaggtacatgcaagcatgcaaaaaggcaaatcagactcctgccacaagaaacccaagtccatcggttgacaccagacaggcatcactgtcaacaggttgccaccttccatttatttccgccatgctcattgttacaataaaaccgtatcccaattatctacgtgacactcaacccgtgagcattctgtggacaaaaagacttaggcgacttcttggatttcccaaactgtgttaaagccggcagggtcccaggcgagcactggccctgtccacacctttcccgcctgaaggcgatgctaggcttcgggccctccgggagaggagcctctttacccgggcggacagcgacgagagtcggcaacgcctgggcccggggcccgccccccagccccggaggcgtccccaccccgcgctctccaccgcccgcggccatgttgcctcacaaaggccgggctccgcgcccccgccccgcccgcggcctcggtcccggagggaggcgggagggaagggcgcgccctcgcgcaggccgcggcgcccgcccaaccgcccgcgggcgcccctcgcgccccgcacctacctgaggcgcccgcgggctgcccaagccgcccgcagccaaaccacagccgggaaagcctcaccgaccgaccgccgcagccatctggaaagcctgtccaggctctccggtcgccggcacccgcctgccgcgccgggcgagcggagggcgggccttcgcggcgtgcggccaatccccgcgcgcggccgccccgcattgggggagccgcagagcgcgctgcggaggccgccaatcggcggcgcgtagcgcgtgtgtccgccgcgcgcggcccaatagcgcggccgcgcgggagggaccaggcgcccaggccgcggtcgcgctaacagtcgctgcccaggcggggctcgctggactgagggcggcggccgcgaggagcgccgggaacgggaagcaccgggaatgccgggagcaggggagcgcgggaagctcggggagcgcggggaatgccgggaacagggagcgcggagtacgccgggagcggacacgcagacgggccaccttcggtggacactgcagaagagaccgtgcacacacaggcgttacacaaccctgttaaaagcatcactgtatcagacatcatcatttataaagaacgcgtgtgctcaactgtctggcgctgtcccctttgctaatacaggatttccaaaacagggagggttcggccgggcacggtggttcggccgggcacggtggcttgcgcctgtaatcccagagttttgggaggtcgagtcaggaggattacttgagcccaggagttcgagaccagcctggctaacatagtgagagcccagtatctacaaattttctttctttttttttttttttttgaggcggtgtctcgctttgtctcccaggctggggtgcagtggcgcgatctcagctcactgcaacctttgcctcccggattcaagcgattctcctggctcacccacccgagtaactgggattacaggcgcccaccaccacgcccggctaatttttatatttttggtagagacggggtttcaccatgttggccaggctggtatcaaactcctggcctcaattgatctgcccgcctcggcctcccaaagtgctgggattacaggcatgagccaccgcgccgggcccaaaattatttttaattagccgcgtggtggcgggcgcctgtggtccgagctactcgggaggctgaggtggaaggatcacctgagtccaggagttccaggctgcagtgatccgagatagcaccactttcactctagcctgggcggcagagtgagactccgtctcaaaaaaaaaaaaaaaaaaaaggaaaacgagggtctgagtaagtgagggtacagctcttccttagactagctttcctgtcaataaatgtggaaggaatagtggaaatagaaaaattttccactgggtagccaccccaataatagctgctgtagacgaaaatcttgagtgataaaaatagtgggccgggccctgtggctcacgcctgtaaccccagtactttgggaggccgaagcaggcggatcacctgagctcaagagttccacaccagcttgggcaacgtggcgaaaccttatctctactgaaaatacaaaaagtagccaggcgtggtagcaggcacctgtaatcccagctactcgggaggctgaggcaggagaatcgcttgaacccgggaggtggaggttgcaatgatctgagatcgggccactgcactccaacctgggtgacagaacgagaccgtctccagaaaaaatagtgagcaaggccaggcacagtggctcatgcgtgtaatcccagcactttgggaggccgaggcgggcggatcacttgaggttaggagttcgagaccagcctgaccaacatggtgaaaccctgtctctactataaatacaaaaaaaaatagcagggcttggtggcaggtgcctgttgtcccagctacggaggctgaagctggagaattgcttgaacctgggaggcaggagttgcagtgagccaagatccagccactgcactccagcatgggcaacagaacgagactcggtccccggcccccaaccccctacaaaaaaattaggccaggcacagtggcttacgcctgtaatcccagcactttgggaggccgaggcgggtgggtcacgaggtcaagagatcaagaccatcctggcca

SEQ ID NO: 1562703 - DNA, 4001 bp, Homo sapiens
ttcagaaatcaattgctgttgctttgaaactgaagtgataaaaagttaacatggggagtataatatactgtgatctacaggaactcagttcccacaataatttctagttttcatgagaaagcctataaagattcacaaggccctgccaagctaaaacagcaaagaatggattttgcttacaattagtttgttcgctgcctctttaatcttgtctactttggcttctgagagtcctttgacattgcatagagctcttcttgttgtcatctgtatacctttgatggtacagattcctactgatttcagtttcttaatgtcagccacgttctgtaaattaaagaatgggcacagcagactgataagatgccagcctgcaaggctcccatactatgtcatgtgtttctgtgtccatctccttccaccatgatgccaattttatacaagctgccaggtggaacccacccaccatgtagccaaatgttctggaaatatctgagtagaacatactcagcaggctgccaaatgttctgactgtgccctgatttcccaagaatgttagtgagaccatggcaatgtaacaaggaattcaaaagaaaagcctgttggtggaaaagctaacaaatttatcacacattcaccccctcagttcagctccttccttctacagaacttcattaccaacatgttcttttaaatttgtaaagattttttttttcctctgcccctggagaatgcaaataactacatcaccaaaggaccaggattttctcttgcttctattttctaaaaccactgaaagagattaaatgttagggctacaacagataatgtcagcacagttttactatcaactgattgctgttgaaatccacccaggtcattattcaaaggctggatttctgccaacatcatttattccagtcgcctgacatatagaacttaattttgtcctctggatacacttgacaatgtctggagacattttgattgtcacagctgcaggggtgctactgacatgcagtgagtgagtagaggccaaggatgttgcaaacaccctacaatgcacaggacgtccccttgcaacaaagaattatccaggcccaaatgtccataaggttgatgctgagaaatcctgaatcagacaatttaacacagcattgaaaaactacttacaattccatgtttctgtaacaggtcaatatcttgaaacaaagattcctaaaggagatgaaacagaaaaaatgaagttttgattcttcatatccagctatttcacatcttttaaagaggtaattcaatactatgagtcactccaaaatgcctcaaattccgcttctctagagattgaggaaggatcaataccgtttttcaaacacagaagaagcaccaacattgaaagggctgggaagccagttacctttgtcatgtcctccctaaaattttaaaacctttacccaaaggactggaacaacatttgaactattttaaatatgttttctcaaccctcttcccctccagatcctaaactccttcctctaggaccaggctgctattcggtacccgtgtgtgtaggtaccagtatggccataccagctgttaagtcattaaaatactttcataccagttgctaagtagctaatcttagcatccttgccaaacaagttgttacatatttgcaatatataactatgtgttatttctactttcagcttctaaaaatagtagctaacagggaaggaacttgatttttgcggaatgatcgaatgtctatatatctttcaacattttagtcatacctcttcatcttggaatcctggttcttccgccacaacttgatcctccttcatattgaaaagtgggcaacagaaaaataatcacttctgggaaaataagaaatattatgtaagaagtagtcctttgtccaggggcctctgatttcatttcaaagtcaacaaggactagaaggacagtaagagaagcatttagcttggaaagatgaggccagcctatcttctttctgcgagacatgtgacattatttcttgtgtgtgtgtgtgtgtgtgtgcatgtgtgtgtgtgtccccacatgcacacagatgcctgaggggcaaattggggggtgcttatttagtttcttctctttccccaacagtgatcacttatcatctggtttccattgcacagctaatcatgactttattactgccttgaatgttatttagaattgcatattgcttttaacctttcttgtttatgtttaacaacaatactctaggaaccttgacattatatcattcttccttgtgtcctccctgacacctccaactttgtcctcaataaatggattctatttttctcatctatgatgaatgccttcctgcctgctgattatgaatgggtactcctgtaacatccacctttttgtttcatagaacattagctatactttctttcacagtatttactagtttcatgatttttttaagatttaaaaatatggtggtccgggtgtggaggctcatgcctgtaatcccagcactttgggaggccgagacaggcagatcacgaggtcaggagttcgagaccagcctggccaatccccgtctctactaaaaatacaaaaaaattagccgggcgtggtggtgggcgcccgtaatcccacctacttgggaggctgaggcaggagaatcgcttgaacctgggaggcggaggttgcactgagccgagatcatgccactgcactccagcctgggcgacagtgcgagactcagtctcaaaaaaaaaaaaaaaaattggtggatcataatattatattaaggctgataagcagttaaagtttttaacattgtagactcaaaaagaaatctcaggaatccacaaggcgtgattgtgtttatttattacaataaaatgcggtccaaatcatcatttttcttggtcgattccatttcctcatttgataccaaagtcaggggttggaccctagaacaaagggaacgaaccattaatactaaggcaggagcagggtcctaccacccagcacctcaaacggcaaaggatggaaggcaaccgagaccgttcggatgggatcttcggggacactgtccttcagatggctagctatgagtaccccaattccacatttactgtccccatcgaagagaaaaacagcattcatttcttctccccgtgatgaaatgaaaagattgtcccccatctctcaaggagccgttgatagactgaaccgttggattgaaagtagggctccccaatcccccggtttaagacgacccagctgtcccctctggtgggggcagcagcgcggtcgggtcgccctcgacgcctccctcagcaggaggcctgggcagaccccctgcggccgccggacattttcctgacaccggattccctggtcaggaggatgaggcgggctctcctagactcaggtccgattcgattgaaaatgaggttggaaatccctcaagatcactaaaattcctccccaaaggtcggagcggaacgctcaaagtcactagcccagggaccccaaaaaaggagcgagaaagggaagcgcgccttctcaaaacgagcgtcccctcagagtcttcgcacgctgttcgtttttgccacttacccccctcgtacccacagtctccccgagattttcaaggtgaagcccctctgccccgcccgacctcctcagctgacaggattctaactcgggcctagaacacggagcctggagacccgcgcgccgttgaccacagggtttggcgccaaacgaggagggcggggcgaggaccaaggggccggggcggggcgcagggtgagggtggaagggcggggagggagcaggcctacagagggcgacgaggggcggggagcaatgggggcggggcgaagaccgaagggcggggaacgagcgggctcacaggtggggggaccagagggcgtggcctggagggggctcagggcgagggggcggggcgagggctgaggcgc

SEQ ID NO: 1562704 - DNA, 4001 bp, Homo sapiens
tagtcatacctcttcatcttggaatcctggttcttccgccacaacttgatcctccttcatattgaaaagtgggcaacagaaaaataatcacttctgggaaaataagaaatattatgtaagaagtagtcctttgtccaggggcctctgatttcatttcaaagtcaacaaggactagaaggacagtaagagaagcatttagcttggaaagatgaggccagcctatcttctttctgcgagacatgtgacattatttcttgtgtgtgtgtgtgtgtgtgtgcatgtgtgtgtgtgtccccacatgcacacagatgcctgaggggcaaattggggggtgcttatttagtttcttctctttccccaacagtgatcacttatcatctggtttccattgcacagctaatcatgactttattactgccttgaatgttatttagaattgcatattgcttttaacctttcttgtttatgtttaacaacaatactctaggaaccttgacattatatcattcttccttgtgtcctccctgacacctccaactttgtcctcaataaatggattctatttttctcatctatgatgaatgccttcctgcctgctgattatgaatgggtactcctgtaacatccacctttttgtttcatagaacattagctatactttctttcacagtatttactagtttcatgatttttttaagatttaaaaatatggtggtccgggtgtggaggctcatgcctgtaatcccagcactttgggaggccgagacaggcagatcacgaggtcaggagttcgagaccagcctggccaatccccgtctctactaaaaatacaaaaaaattagccgggcgtggtggtgggcgcccgtaatcccacctacttgggaggctgaggcaggagaatcgcttgaacctgggaggcggaggttgcactgagccgagatcatgccactgcactccagcctgggcgacagtgcgagactcagtctcaaaaaaaaaaaaaaaaattggtggatcataatattatattaaggctgataagcagttaaagtttttaacattgtagactcaaaaagaaatctcaggaatccacaaggcgtgattgtgtttatttattacaataaaatgcggtccaaatcatcatttttcttggtcgattccatttcctcatttgataccaaagtcaggggttggaccctagaacaaagggaacgaaccattaatactaaggcaggagcagggtcctaccacccagcacctcaaacggcaaaggatggaaggcaaccgagaccgttcggatgggatcttcggggacactgtccttcagatggctagctatgagtaccccaattccacatttactgtccccatcgaagagaaaaacagcattcatttcttctccccgtgatgaaatgaaaagattgtcccccatctctcaaggagccgttgatagactgaaccgttggattgaaagtagggctccccaatcccccggtttaagacgacccagctgtcccctctggtgggggcagcagcgcggtcgggtcgccctcgacgcctccctcagcaggaggcctgggcagaccccctgcggccgccggacattttcctgacaccggattccctggtcaggaggatgaggcgggctctcctagactcaggtccgattcgattgaaaatgaggttggaaatccctcaagatcactaaaattcctccccaaaggtcggagcggaacgctcaaagtcactagcccagggaccccaaaaaaggagcgagaaagggaagcgcgccttctcaaaacgagcgtcccctcagagtcttcgcacgctgttcgtttttgccacttacccccctcgtacccacagtctccccgagattttcaaggtgaagcccctctgccccgcccgacctcctcagctgacaggattctaactcgggcctagaacacggagcctggagacccgcgcgccgttgaccacagggtttggcgccaaacgaggagggcggggcgaggaccaaggggccggggcggggcgcagggtgagggtggaagggcggggagggagcaggcctacagagggcgacgaggggcggggagcaatgggggcggggcgaagaccgaagggcggggaacgagcgggctcacaggtggggggaccagagggcgtggcctggagggggctcagggcgagggggcggggcgagggctgaggcgcggaaaacgaagaggagccccagcgggtggcgagctgggatgacggagggagggagggaggggcgctgtggaaggagcgcgctgaggagcggggccttgaagggagaccgttgagctggggcgtccctcgagctgagcacctcgctaaagtccgggagaagaccctgaggcggggttctgaggaggtagccttgagtcgggggaggggcgatgagcagaggtggctgactttggcgataggtcttggtcgcgagggttgcagatggagccttggcttagaaggtcgaatccgggcccgtttccccccgcccccgctgcccatggcttctcttttcacctccaggttttcatgctggcttcagagtttggccgtgctccctcagcgttcctaatttcccactttctgactctcaccatttgccactcttgtctgtgattgagacacccgaggcccattcaggatggagagtaattttttctctgtcttaacttgaagttttaaatagaccacagacgccaagtatattttggttcagcttttaaatagaagtcgcaggccagccttcgtgccagcagcgccatcgctggcagcatcctcctcctcccctcacgcggagactgacttggggagagtcaggaaacatttgagagagcagctgccgaggtggaggctgtgatgtatcttggatgaatctctgtgcaaacagttctttgggttcaagacctagtacagggcgatcctttttgttttttctgtctgaatcattttggtggaataaatagcaaaacattcccacaatagcagttggcattttgtgtaggacgcacccccccaacaggtggattgttttaagagccaacaaataactgccattgtgcttccaaatctgttattttcccccaaacacagtcgtccttgttatatggagatgaatgcccatttgggggaggaactggatagtggtgaaaggctttcgctctgaggcctcacctaaataattatgggaacttttgagcaactcgttaggtgaagacatcaacagtctacagaagagctgcaaagagcacagcaagatgatttagggaaatataacatatgtagtttggtgtagtgacagctgggagagagaaatgttcataatatttgaaggttgtgtgcagtacacttaaaaaaactaaaatgagctgggtaatgacaaattcatgaagggaggagaaaaatcttatctgggtatcatatcgatggttagagacaacttttaagatatttaaaacaacaacaaactctaggacagttaaaaagtgcacatgaagactttccactaaaatcggaaccaaaaaaattgtctttcgtatcatacaaaaactctgaatatcatgaaggtggcatttcacatcagtggagaaatgatgaattcagtgaatagtgttagaacaactaggtaaccatctggaagaaaaataaaattggaaccacactttacacattataccaaaataaattccagacagatcaaaaaattaaatctgaacaataaaataataaaagtactagaagaaaatatgggatatttaaaattactttgtaataagaaacatctttttaagtatgctacaaaactcagaagccatgaaagattgttaagtatgcttatatttaaaaaaatatatcctgcatggcaaaatggtactttcctatccacaatatagaacatggcaaaccagagcttttgtgtcaattattaactggataatatagcttgcctaatttttcaaatccttcaggaa

SEQ ID NO: 1562705 - DNA, 4001 bp, Homo sapiens
agtgcaatggcaagatcatagctccctacaacctcaaactcctgggctcaagcaatcctcccacctcagcctcctaagtagctaggcctacaggcacgtaccaccacacccagctaaatttttaaaaaagttttttcatagaggacaggtctcattatgttacccggactgtcgtgaaattctgacttcaaccctcctgcctgggcctcccaagatgctaggattacaggtgtgagccactgcacccagctaagtctatttctaacttaaaatactttatactttaatttttaatttgtagtacctttaagttataatgcatcaaatgctgttcctccattggaaaacagccatttcatgaataattgtgtagtctgaacctgtgtgtcttgatacattcttgtcttctaatgctatgcatgtttcgtaagtttgtatagtggttttaattagaaaaaagaaaaataggctataaactctactaaagaaaaattcaaaagtaaaaaactcattgcagttttccaaattccttttttttttttttaagacagggtcttactttgtcacccaagctggagtgcagtggcgtgatcccattacactgcaacctatgtcttccaggctcaagcagtctttctaccagcttcccgagtagctgggactacaggtgcacaccaccacacttggctaatttttaaattttttgtagagaaaagatctcactatactgcccaggcaaattcttattagcaccaactgtcaccacaaactcatccttttctgacatacccattcaaaaaaactactaaccaaatgtccacaatcctgctaaaagtgttgaaaagctcttagtatagtattaagtgttatctacaaaatttgtgattaaccaaaacacacacaattgtgttcaaatgttatatatttgaagagtcaatttaacaattccttttggtagacttcttttgcacctctttacgcttcttttttttcctcttaccaccctctttgactcctgctgagaaaatagggggatctctgttgctggtaacccaagatatacctccctcatcattgtccacgaaagtatattgagatacatgtttggagctgtgagaatttggtgaatagttgttgaatgactgtgttctccagctgcattcttttgcaaagccctcttcattggccacactatttacaagaaaaaatgtcaactctccattatcttcagcttctctttcttgatcactttcaataattttctttgtattaatatttctgccattaacgattttgtctgaagttgtaacagatatgtagttgtccatcccactattatcaaaagccagggaagagaaagaagtaaggccttcatgccccaatgaaccctgtgatgtatatcctgtatcatatgaagaaaatttctcaaaaattggatattcactggcagtggagaaaaagtatcctgcatctctgtttctgtttccataggagcttcctggacgatttaacaggtcctcaagcgagtcttcaaagaagtgaaaagaaaatggatccctttcatgaaaaatttctttaaaaacatcatctggcttatggaatgtgaagccgtactcacattcatcatcaaaatgacttccacctccgtttaatccttctgtgccatatttatcataaatgtcccgtttctcatcatttgataatacctcgtatgcctcagctacttctttgaattttctctctgcttcttctttattttctggatttttatcagggtgccatttaagtgccactttatgataagcttttttaatgtcctcaggtgaagcatatctttgcagtcctagaacttcatagtaatccaccatgttttaacagatagttggaagtgggtgtgctgggtattgagaaccgtggtttcctcagctcaggctctgctggtggtggtgatagaggtagtgactgcaaataggtacacttttatgttaaagacaatgttattaccatgtgctaagagatgaggatactgattatgtggcaagcagagttacaaatatgtcagagagggctgcattatggtgtcattctggggtcagtgtagggactggaccttccaaatagagctagtccagagtcgtaccagaccatcctgaatcctctggactgtttcccctgtatgtttccctggaagcttcaggcagtgcctcataagccaatggaatctgttgctaatagccacagcatatcccttgcataatatgacctctagattactgcgccttaattgcttcccagctcttctatgctttggtttagaaaaatgaagtactgacttacgggtgaagaaagtattcaaacagttgacatatttatttcagtcaagaaacagttcagagggagatacaaacaagtaacttagttacaatataatagttatgatgagaggaagtactggatgctaaacaattatatgagagacagctcaggctgggggtgtcaatgaaagcctcttggaggaagtagcctgatatgttaactttctgcatgccagtggtaagtcatttgagattatagtatctttgtccacccaaggtttactgctgtaaaacatgtaattaaagatttggaaagttgtgtgtttatgtattcactgtataattattgattgtctactttgtgccaggcaccgttttagccactggtgatagcagtattgaacaaaagacaccagttttcctggtgcttgcattataatagaatacaaataggagaacaaataaaataatttaagataatgcgatatgtgctccaaaaaaaatagcaatgtgctgggggcagagcgctactttagattggttttagaaggcttctgaggagatgacattattgctgagacctatatgacagtcagccacatagtgatctaatatggtagccactggccatgttgatggacattttggttgttgccagttggggctgttggacataaagctagcacttatttcaagtacagtgggaagcctttgtggggagtggggaatatgcaagtttaatgatgtgatttacatttgtaatggatcagtggctactatttggaaattcagtcatgtatgggaaagtagaattcgagagccaaattagaaacagaccaaaggtgattttctttggggataaactaccagtagtctagacccgaatttaaaggtcttatattctatacctggctcattttattgtctgagaaaattccctgtaatctttgtttttcctcctctatgttgtgtttattttattttccatcacatttataacccctcagttaaatgatacgctaatgaaatctaaaactgtagtgtatgcttctagtctttcaagaccatttgtcaggtctgaatatttttttgctttgcatttttatatatactcattttttagaggtattgtgaaatgcttaaaactcaatttaaattctctccagtgtatgtgcttacatgtacttatgtgtggcttacccatgattataatttgcctaccactggaaataataaccaataatgtcgaaaattatttgagtaccctctgagtcacactgtagcaagtgctcatttaactgacacagcactctagcaaaataaatattttatgcccataagaaaacagacgttctgagagagaaagtaatttgtctaaggctacatagcttgttagtgaaaaatctgatttttaaacttgagtctaatttcaagttctcattccactctactgcatttctcggactaggacttaaagagtttaggttctaggcattccacaaacagatactgagaacctgctgttaccggaaaggggtcccaatccagaccccaagagatggttcttggatctcgtgcaagaaagaatttcagtggaatccacagagtaaagtaaaagcaagtttattaagaaagtaaaggaataaagaatggctactccataggcagagcagccccaagggctgc

SEQ ID NO: 1562706 - DNA, 4001 bp, Homo sapiens
tttgactctttcgtagtaacacttagcttaaaacacaaacacattgtacagctatacaaaaatattttctttctttatatctttattctataagcttttttctacttataaattttctatttcttttttacttttttttttttgagacaaagttttactcttgttgcccaggcttgagcgcaatggcgctatctcggcgcactgaaacctccacctcccgggttcacgccattctcctgtctcagcctcctgagtagctgggattacaggtgcccgctaccacgtctggctaattttttgtatttttagtagggacaggttttaccatgttggccaggctagtctcaaactcttgacctcaggtgatctgcctgtgtcggcctcccgaagtgctgggattaataggcgtgagccaccgctcctggcctttattttttatttttaacatttttaacttttttgttaaaactcagacacagatacactagcctaagcctacacagggtcaggatgcttagtgtcactatcttccactaccacatcttgtcccgctggacggtcttcagggcaataacacgcatggagctgtcatctcctatgataacaaagccttttgcttgaatacctcctgaaggacctatctaagactgtttacggttaaattttattttcttataagtaggaggagtgtacactgtaaaataacaataaaagtgtaggatagtaaacacataaacaagtaacagtcatttattaccattatcaagtatgatgtcctgtacacaattgtatgtgctatattttatatgactggcagcactgtaggtttgcttacaccagcatcaccacacacgtgagtcatgcattttgctttgacattacgatagctatgtaactaggtgatagaaatttgtcagctccattataaccttagggcaccaccgtggtatctgtggtctttcttgaccaaaacgttgttatatggtacatgactgtatttcaatctccatctgtcccctccccacccctaagtaaccctaaccatggaagcccaggaggaagatcagagagggtcaactggagaaatgacagttcatgctgaccgggttgataacatttcccagagagggaaaatgtggtgaagagacaaaggaaagaaactaacaaatactgaatctatactggactggactctgtacttcatattagcctcagaattaccaaaggagatgcaccgacgtatactgattttacatatgcactgattaaaagcgcagggagggtaggtcttgagactgggaatccaaattaggtttgccaagttattttcacaatacacgatacctcccattggggagcacatcctctcggaagcctaaagttgggtcaaagaacaacgacatcctagaacgtcagagtggaagaggccttagagatcactcaactcaacttctcatttacagatggggaaactgaggcccaaacaggggaaatgaccagcccagaatcccagtaagtcgccaactctccaagccaagagcggtctgacctagttgatggcgaccccgcgggagagggaattactccgcgaaaggtcgagggatcaaggtgctgggggaagtcggctaaagggggacgcgggaccacgaagctgggcaggccttgggtgggtggggaagagcagccggcagagtcgcgatggcaaacctgtcacgacagagctcgcaggtcccgaagtgggggtgagggtgggggttgaggatgggaagacctggggcaggggaacagcaggcaggagaccgaggtggggcctcggcggcgggcgaggcctcttccgccctgcgttgcctcccgccctccctccgggccggccctccccgcctggctgcccgccgcgccccggggcctcacctgctcctgcgggggccggagccggggccgcagccagcgaacccccgccagggttgtcaaggagcgaaacaagagtgtcttagcaaccagcaaggaagtcctgccccctcaccggacgttgacgagaatttcacttattattggtggataaaagtatcaatcagagtgaaaggcccttataagtcaggcgtttgcaaggacaggggcgtggtttagaggccagggaggcgggacttcacttatagttgtcttaagcgtgcccgaggagcaggggacacattgaagttctttttctagggaaacaaacttcgaaaagcagtactgccttgggaggttcttttagtcacttgaaataacaaatgcaacttgttggtgtcgtgacacttagccactactttattgggatctgaaaagcctgataataactagcatttttgtagggctgtacaattaatatctcacttgattctcattacagtacttttaggtgataatattcgtcatcccatctgaactaaagttcagagaggttaagtaacttggtaaaggatggaggtaatctccctggagaaggaacccaggggctccttcctctgtgccacacccttgtatggtcacctagctctagtcactaggagacatttgtaccacctaatttcagacacagttgcccagagcctgccttttcttccccttgggagggaaaattaatccgaaagtacggagaaggaaaaggggaaaggggaagaactggcggattctattatttgattggtagatcaaagggtcagttgggtacttcgtagtttaaacctttattattgtgatgagtacttggggtgaaaccccactgccacatttactagcattgaagctgtctttgccaaaattataactgaggaaattatgacagtgaaagagatcagacctaacccactccatcttgcctttctagcctttaagctgtctttgttcattcctaggcataggctgaacgaaccttgggaaggaatttagtttatagttttactctgaaacaaaattgacaatagccctttcccaaaaaggctcccttcctgccttgggaccagtctgcctttgtaggactaacaaattagctacaacattagaaattatggtttaggggtcacacagcagcctctggctgcaagagtctgaaccttcccaaattgctcctggggataacatcactattgtaaaacctaagatcagcgcttgagatattttgcagaccctgcgctcgatggatcagctgacaccacccagaccagtaatgtggctcaaacagttctgtgatcccacccaggaacagaagacagcaagaaaacctcacttcgaccccctcagtattccatcttcgacttaatcaatcaacactcctcgcttgccaagcccctacccacaaaattatctttaaaacctctgatccctgaatgcttgggtagcatattcaactgcctcctagccatgtgcaccagaatgttccacaagcccttcaaactcagtgtgtcccaaactgaattgatcatctccctccaatctgctcttcctgcattccccattccagtaaatggcaccacccccgacccagttgcctccatcagaaaacaggggggagtccttcacccttcccactacaacagcccacttccagtcacaagcatgccaatttcgactcctcactatttcctgatacagcctttctggccacgttcatggcaccctccatgtgcacaacaccacaatcccatctacctgagtgcaatctcctggtgggactccctggctgcagtcttgcacctctctaatttatcctctgtaccatagtcaacatgaccctgccaaaacccaaatctcaccgctgcattcctctgtttgagtaatttgagtaataataaaactcccctctcccgcacagctggctctgtttgaattacctttctccattgcaatccccctgtcttgatacatcggctctgtctaggcagtgggcaaggtgaacccattgggcagttacagcatctactgggagctcagccctcgtcaggtgctagtgattcagagaggag

SEQ ID NO: 1562707 - DNA, 4001 bp, Homo sapiens
ggagtgcagtggtacaatctcactcactgctacctctgcctcctgggtcccgattcaagcaattctcctgcctcagcctctcaaatagctgggattacaggcatgcgccaccatgcccagctaatttttgtatttttagtagagatggggtttcaccatgctggccaagctggtcttgaactcctgatctcgtgatccacgccttggcctcccaaagtgctaggattacaggcgtgagccaccgcacccagcctttttttttttttggtacatcttctttcatacctatggggacccctcatttctaagcccatagagacagggctttgctggttccgaactcctggcctcaagcaatcctcccgcctcagcctcccaaagtgctggaattacaagggtgagccactgcacccagcgcatgtaaatctattttgtatcagtgcaggatataaataaaactacagtacacttagacaatattcatttgcctctgaaaccggcagaataaaaataaacacagttcaagaattcatgcttagaaaatataaatctactttagtagaacatctttagttatttttctgtttttaaaaaacttttttttttttttgagatgggggtctatgttgatcaggctggtcttgaactcctggcctcaagtgatcctcctatctcagcctcccagcatgctaggattgcaggcgttgagccactgcactgggccatctttagttatttttaaaccacatgtatgtactattttgacaaaaattatacctaaaaatatatatattgaagaagaacacaaaccttctcctggacctccaccaccaccaccctttggagtaatgagttctcgacgaagcttagcaagacgagccttaagcagccctaagtggtgtgctgtggccttgttcttttgagtccgagccatctaaaagggaggaatcacagccataaattagaagcagtgaacgcttcccccagctttgagaggataatttttttccccaagtcctactaatgttagcacacccagtttacaggctttaaaagagtaaaagtccattatctcctccatccagctcatttccctcactacaaagcaaagcaaagcccaaagaggaaagacgattaaggtcattccaattagtgcccccagactagactgaaacccgtctgcgggttccttttctactatttgcagctgtttggatccatctaacactgggacaccactttcctaattgtaaagcgctctcagggccgcacgcaatggaatcacacactatccaggcggaataaactgctcccacacagatgtcattttacttccagatccgattaccgggagcaaatactctgaatcagggggtcattagggtagacactgggaaaagggggaataagggggacgcagcgaaggatgatgaggaaagatcctgaactatctgaccaagtcagagatggaataagggacaggattcagtgtttctcagagcaaaacggaaagaaacaacatcagaacaggagccaaacactgggagggggaacggactaagggcctaaggtgcaggggtgcggaacgcgggcccgggcaaaggggagtccgagagcgtagacgcgggacgaggggaaagggggccctgactgaggagagtcggggactcctaatcgtggcagagggcagtcggaacacgggcctcgctgagagaagtcgcggaatctaggcccggtcctgacgcggctcaaaggagaacaggaaggagcgacgccaccaaagaaggaatgctcagactaagagtgaaccgccagctgcgtccattacctctgcttctatctccgcgatcttagctaaggtgctgctcatcgtggcgagtaccctgtggcctccacactgtctcccttcacacacccgcgggcaaactgccaccgccaccaggcgctactgcagcacgcaggcgcggtacttcgaattaccgcgagagagttccgcgtaggggtcaccgcgagtcgcaaagcgtggggctgtctcctccccctcacccgaccccgccccgtcccgcgagccagtgcggtgtcatagagcccgcgggagcggaggccagagaggccacccctgtctgggcctccccgagcgcgccgagggtcgcgcgcagctcggccccgcccagcgggacccgctcccagctgctctgcatggtactgaacgcttcagtgctggagaccccagggcgtggtgcaaagccgactcatgctccgcacccctgttcctcgccagcatctgcgggtcctgggtccctttttcacagctggggtgacaccccgacgccctccatggtcttggagggagtagagacccatcttcagcctgcctcacccccttggataaagaaaatgccccctttctatcattcaaaattatttttaggtcggttttgtttactccgaaccccgagtagagcacatggggagcccaaaataagtgcatacttgaatggataattcccagagaactgctgcttgcaacatagtttgtaataccaaaaaattgaaatctatattaacacccatcagtaggaaaatggataaatgaataatgcctctatcctgtttttgaaatatgattacagccgttaaaacgtagatctgtggtctgactggctacccaggacatgttaaatgggaaaacaactagcagaagggcacctacgtagtgataccatttatgttatttttaaaattaaatgtacatttatataggtgtacgtgtatgaacgtgcagtttaaaggcctaaacagaaaaatacatcagaagctcttaactgtgggatgggatgcaaagaaaaggcctttcacattttattccacagaattttgaagttaaatttttacaagacgaatgtatccatgtattacttgtgtaataataaaatttaaaatttcaaaagactcctcttccccaagtgtcatgaggaagccaggacgtccaggaactatgtggtggttttgaaagcggtttgcctcaggatcaatgggttgttttgatagattgattattccagcgggagtcgacaggccaggcttaacccacagtcgacaggccaggcttaacccacagggctggcctccacccagccctgggagggaagtttaatttagttaaatttgtaaacaagaactattctaacttcccagagacaaaaaagggaggttttcttgtgcataaagagggagaaacagaagggaaagcttttacagaaggtccccaaagggccaaagagagtttcttctttcttttctttaacctcagcctttttcataaataaattaagggatgatgaggtaattagatcccacactattagcaatggaggagggaagatgaggaggtccagctggaatgggacatgatcaaagatcaatcttaaaagacagataaaatcaaatcagcaggcctatcctaacttgaagtacttaaggaattaattggctgacaatatcaagggcatcactgctctgtgagtaggtgctccttagcaaatctattatatgaggcctgcagataagttaacacttactgctcaaagacaccctgggacccaccttggggccctgaactgtcaataggcaccaaagagtaatactcattttcccgagtcctgggtggccatcctgttcatgcaatcgttatttacagagctccaactgctgcctggcactgtgacaacactggggacagagtagagagtgaatcagatatgttcctgcacataacaagtatttaggccgggcgcggtggctcatgcctgtaatcccagcactttgggaggccgaggtgggtggcagatcacgaggtcaggagatcgagaccatcctggctaatacggtgaaacccggtgtctactaaaaatacaaaaaattagccaggcatgatggcatgcacctgtagtcccagctactcaggaagctgaggcaggaaaatcccttgaacccgggag

SEQ ID NO: 1562708 - DNA, 4001 bp, Homo sapiens
aatgcagaccatcaacatcgggacccatttctgggttcacttttgcctcttccattcaggaggtcaaaatctgggttcattcctttccacactctctctctctctaagaagtagggatattaaactgaccttcaggtacactgtgttgagtgaaaaagaggtcatttatgtaaagtgtatggtggtgctgaagtttttcttcctttttattagaagaatgacatgacttgggaggctgaggtgagaggaccaccataggccaggaattcaagaaaactgacacttgcacttgtgctgggcatgcgggtccacatttttgggggaaaacacacatttacaaacactacacattaattcacccctggctatctcccaaccctcatgcacacaaacccacatcatctaaatgacacggctgtttccagggactctagtggatgatgacagttcttcactgagccatctgtttctcacactgcactccaggtcctcactcctatcaggaacctgaagccaggcaggctctccagacagaagcagggaagagagtcccctgcgaaccatcacttagatttgtcatcagcaaaggagtggtcttagaatacgtacggtgttagacagggaatgatacacactggggcctgtcagggggcaggggaagggagagaatatggataaacagttaatgcatgcagggcttcatacctaggtgatgggttgacaggtgcagcaaaccaccatggcacacttttacctacgtaacaaacctgtacatcctgcacatgtacctcggaacttaaaaaaaattaaattaggagccgggcgcgatgcctcatgcctgtaatcacagcactttgggaggccgaggcgggcagatcaccaggtcaggagatcgagaccattctggctaacacagtgaaatcccgtctctactaaaaatacaaaaaattagccgggcgtggtagtgggcacctgtagtccctactcaggaggctgatgctagagaatcgcttgaacccaggaggcagaggttgcagtgagctgagatcccgccactgcactccagcctgggcaacagagcaagactccatctaaaataaataaataaataaataaataaataataaataaaatttacaaaaaataagctaccttaagagatggaagaaaaacaatctgacccttagctggttccttcatttaggtaccaaaccggccagataggtgaggctagagaatgggatggggactccaaaattggggtatttgaattttcattgagaaaagggctctcccttttctagatcaaaaagtctcaacgacaaagacaggaggcagagtcagcctttgtcccccatgcccagacctgggaaagctggctatggacaggagggagctggaagctgaggatgtctctggggatgagggtaagggaagggggtgggggtggccagaggtgtgccagagggtaaacggcacccgtggcttttttacctgtgggcatcttttggttgctgatgtgctgcaggtcttggccctccgtggctcccacatccagcttgccaggctctacagtagtggattctgatgttgcagcagccacagtctcataaatatcagtatcagattcataacagggtgcgtccttccccctgggccagccacagtgggagttgatacaacaggtcagtatattccccatggggcctctccatgcctctccactcctgcctcagccttcagcgaaattgtaactgtgctgccctagcagccacactactgagggtggccctgcacttttagaagcagcctgaccccaggcagatctgggtcctcagcccttattctgccgccacctcccaaactagctggtctatgaggtcagggacctgctgtcttctttgaaaaataaacgaacatgacaagcacccaaaggtgcaaaaactgccatcaaagagcacagttggagctcctcctccctccactgcgagctactgactgagggctgctggccctggctgatgcttataacccacaaagcttcctatgtcacctggttaccaggaaacagccaggtcaggctagtgactcacaatgtccagccccacagccccccccaatgcctcataatgcctgtccctgctgctgcccaccttgtggcccccctgcccctctgtggggactgcactactcaggcttttattcaccctatgctgcctgagctttccagtcctgagctaagtgcagggggagttgttattgcgagtcacccttggcaagaaactcaatagaaaaccctggtatggccgggagtggtggctcacgcctgtaatcctagcactttgggaggctgagcggggggggtggatcacttgaggtcaggagttcaagaccagcctggccaacatggtgaaaacttgtctctactaaaaatacaaaatattagctcggcctggtggcgggcacctgcaatcctagctactcaggaggctgaggcaggagaatcgcttgaatccaggaggcggaggttgcacagtgagccaagatcacaccattgcactccagcctgggtgacaaaggtgcaactgtctttaaaaaaaaaaaaaaaaaagaaacaaaagaaagaaaaccccagttactaaagtcagttccaccagcagttctgtttttctgagtctgacagctttcatttgctcaccaaatgtagttatacacaaattttttactgcttttctaattaaatgcttctctcctgtcttacaagtgttagttcttgtctgcaacttgaccatagctacccccagggccctggtcccactctcaatagagagttatggctgtgtatcctcagtgaaaccctgggacacatcacacttccctcctcgtctataaaatagggactgaacacatccttcccagttctgtaatgctacgacctaccaactcccttttctcgctctgtttcttctttccatggcaggggtattcagatatttcttttatttacttatttatttattttttgagatggactattgctctgtcgaccaggctggagtgcagtggcacgatctcggctcactgtaacctccacctcccaggttcaagcgattctccagcctcagcctcctgagtagcctggactacaggcacacgccaccgcatctggctaatttttgtatttctagtagagacgagggtttcaccatgttggtcaggctggtcttgaactcatctcaggtgatccacccgcctcgtcctcccaaagtgctgggattacaggcatgaaccaccatgcccagcctcaggtatttcttttactaacaaatcataaaacattattttcttatacaaaattgagaaccccacagtggggtaccattgtcctcataggacaaagacaaatagtcaatatctggcaagcattatgtgcctgacagtgttccaactgtggcatactaatttaaccctcagaaatagtcccattttacacatcttacagcgtaaatctagagggaaaagtcaagtaacttccccaaggtcccacaactgctcagtgagttcaggcagatgagcaaacaaaggcttagagttcagttgtctgaggctacactgcaaaacagtggatgaacctggaatacaaaggctcattcactgtccagcagtagagttgaagtagagtttaagttttattctggaaacatgagagtcacggaaccacacagaggtgaggagtctctatcagatgtgtttgcagtgaggtctctctgcacaatagagaaggactcatggaaccagtgggaccaattaagagacatgatgttgggaggccaaggtgagtggatcatttgaggtcaggagttcgagaccagcctggccaacatggtgaaaccccatgtctactaaaaatacaaaaattagcctggcatgatggcgggtacctgtagtcccatctacccaaggggctgaggcaggagaatcgcttgaacccaggaggtgga

SEQ ID NO: 1562709 - DNA, 4001 bp, Homo sapiens
ctggaaagaatgagttctctggcagcgtgtctccagaattccagggaggggctgggtggggatgggggtggttctgaggctactaaagagaaagaccaaaggttgtataggcaaatcctacctgccaatgccccagactcaaatgcatcaggctcattcccggaaggacagagagggctggcttgctacagaggtgatatgaagggcaaagaaaaagcctcctgaacccagatggaagtctaaatgctaaggaatgttctggatcctcgtcatcagaaaatccatagagaagtgaactgatgtccccccaaaccagtgcccagtgggtaacgggaatagaggaatgtgctgttcattatagccactaaaagtctgcagaagtgacaatgctcttgcaggtgagggtagtgatgcgaggagtcattttcatgctagttaagaaatatctatcagggctgggcacggtggcttaagcctataatcccagcactttggaaggccgaggcgggcagatcacctgaggtcaggagttcaagaccagcctgaccaacatggtgaaacccccgtctctactaaaaatacaaaaattagccaggcgtggtggcatgggcctgtagtcccagctactcaggaggctgagacgggagaattgcttgaacccgggaggcggaggctgcagtgagccaagatcgtgccactgcactccagcctgggagacagcgtgagactccatctcaaaaaaaaaaaaaaaaaaaaaaaaagcaatctctatcaggcactgtattaggtgttggagatactgaaatgtacaagacaggcatggccccttttctcagggagctcaaagactagtgggagaaacagatagtaaacaggcaattacaggcagacagagcttgaaaataggataacagtacctaccttaaaaggatgttgtgaaattaaacgagataatccacgtaaagagttttctcagggcttggcatagagtaagccctctcaaaatgataactatttttctcgcttctgatagggaagttaaaatgcagggctctgtgaaagggaagtgtaaaaaagatttcttccaggtcggagcctagggagtcgcaaagaccacctgaagaaatcacaaaagatctaaagaacgtttagcttgagagggaggaggagaaaaaaatagcaactcggtagcagttcagcttcaccactttacagcctatgaagtatttggcttccctcatctggttcgatcttcaaagcaacctaatcagaccggcgtctagagttaatatttccattttacaaaagaggaaagtgagacacagcgcggaaaaggacttgttcagaacgagtcataaagcaaagaagccgacctttatggtccattatgtgtgggaaaaatgaacaaacaccgcggggcgttcgtgaaatactaagttataaacatggaacaaagtccaagagttaacgagagcgaagcatcacttctaggggtgggccgggtaggtttcctaggggagctggcattggaataggcttcttcgcctgcttagtgtcaggacccccagggttttacctctctccttcaggcgggtgggcgggttcgctcaggaagtagccgcttggggaagccttaggcaaggttcttcgggagagagacccgtcatgatcccgcagcctcaatccccgctggcctaacgctttggtttccatagcaatgggctcgtcgcagaaaggaatagcctgtgccgggtcttcagagaaatcctggcctcggctccacgcccctgagcagccccaccctggctcaacctgttacccgccctgccggcaagccggggtcactgcagtccccgtggcgaagcagggtcagctcagctcaccgcaccccactccatccagccctgcccatctctacggcaacgggccgggtcgcaccagggctgcagccgagagacagtctcaccgcttccgtagccgcccgggctctgtgcgcatgtgcgacactccctccccggccccgcccccttatgcgtctcccaggcaacgcgccgcgcggggctccaggttccgcccagggactaactccaggtctgcgcgcgtccaacgagcacggctctcaaccggcctcctggcgcccaacgaccatggcttccaaccggcctccgtgcgcccaacgaccatgactcccaaccggcctccagtttccaactgtttctcgaacagggaagccgccatgacacagctgactacgcccttggtcacaggggacctgagatcctccacgatttacgggaccggcgccacctcgggctcgaaccaccctctcgatagggccgccgctaagtaatcggcgtaggggttcagccgcacatctccttcccgcgccgcggaccgagcagtcgttggtgctcttcaggtgcggcctgggtgcccagagccttcgttagactctcggacccgcaagggagcccgaactctttcagactcgctctccctcagccggacctcggccctttttcacaccccaggggagtctggatttctcatagtcctgggcaccagccccttcccagtctagctcttgggactccctgaagccggaactccctcgcctggactcccgggagaacctggaatccccatctccagtccacattttctcagaatctgtcctagcccttcagtctcccaggcatgacatcgtgtggtcccagcgccctaggtggtgagctgtgactctccttagagcctggcgaggccgaggtcctccccagctcgaacccatcccacactccccttctcagcctctgtgttccccagtggtcctggaaaagcccccagttccctctgcctggccccaatcctcacaaacccaattacccacgctcctttccattccataacccccatcactgcatcctccaggctcccatccatggaggacttgaggtggaaagcaatttggttcaaaataaccattatttattacttgaaagggaatatttccagtcgttgccagcctcctccccttctagtattggtaaattttttgcaccactgagtgggtgaagagttttatgcgtctttaaatgttttaaggatttttttaaaaaaacaaaaaactctcaggatttgggggacttttgtgtttgagcatcttgatctctaaaccagctttttccatcacctcacacctaggctatgcatagaggtcagaaaaatgtaaatgagagattgagaagttggattgttcatactagtttgtaaatatgaaaacattcacaacactccagttccaaataggctgaaaatgcattagaaaaactagtccttcaatattttttatccttctacagttgtcttttttgacccaattataaaagtagtgtacacttatagaaaaatgaggacaggcatggtggctcacgcttgtattcccaccacttcactttgaaacgctgaggcagttggatcacctgagctcaggagttcgagaccagcctgggcaacagggtgaaaccccatctctaccaaaaatacaaaaaattagccgggcttggtggctcacctgtggtcccagttactcaggaggctgaggtgggaggatcacttgagcctgggatgtggaggttgcagtgagctgagattgtgccactactctccaacctgggggacagagtgagaccccgtctcgaagaaataaaaagaagacaagacaggccagcagcataagtggctagggacaatcactgttaacattttggtgtattttgatcagaatccattcatatatatatatatatatatatatatatatgttacaacatgcttatacttaaaaaagatacatcacaaaagttcactttttagtaacctgcttttttctcccatctaatataccacccgtctatgtttcatacacaattacatgtattttattttatgacataccaaaatttattcaattgcttccatactgtagattttgtttccgcatt

SEQ ID NO: 1562710 - DNA, 4001 bp, Homo sapiens
ggaaagaaaaagtaacaaatggtacctgaaacaaagtaaacaaaatagcagtgaaagatcaaaaccaaaagtagaaaatgaagcttttaatactgaaagggtatcatattcatgttatctctattcacagttttctcaaacctgtctcagttgttaacaactgccttgttaacaaccagtggcctctcaccagattcctgatctgggcaggcaccaggctactaaacatcctcatggagctggttctgtctccaggtgccagtcagctgcagagatcagagcatgggtgctatagagatctctgtacaaggggaagaggtagatagctggaacagggcagtttttccctggagagcgaaatttacagtctcaggtaagcacttcttgataaatatctatgatcacctatcatgaaccaagcattaaaataagcatagaggaaaaagggaaagcacagataactaaaataaaatcctcatcctcaaaggatcttgcaataagactggataggaggcaaatatcttcacatataatcaaaggggccatttctgactcactttcatatccccagaacttagccaagtaaacgtttgctgaattgaaggcaatggataaaagacatgaactgtagtgtatgaaagtagaattgatttacagcatttctgttaaggccacccatttaggaacacatattaaattaggccaaggcgggcggatggatcacttgaggtcaggagtttgaaaccaacctggccaacatggtgaaatcccgtctgtactaaaaatacaaaaattagctgggcgtggtggcaggcgcctgtaatcccagctacttgggacaccgaggcacgagaatcgcttgaacccgggaggtggaggttgcagtgagctgggatcgctgcactccagcctgggtgacagaggaagactccatcaggaaagaaaaggagaggcgaggggagggaaggggaggggagcggaggggaaggggaggggaggagagaggaggggaggaagggaagaaaggggaagggaagggaggggaggggagggagaaaagaaaagaaaagaaaaaagaaaagaaaagaagagtcctcttaacaggggcaagacatcctgaaaggcaaagatttggagagaaaggaagggagtagagagaggggtgatttggacaaccttcaagtaagccctatacagatgtatacctcacaaagtgcttccaaacaaaatttctgagggaggcaggggtaattatgtgcaggctgtgggagaagagtgtaaaagagcagagattttgccgtgatacagaaatgagtttgaattctggctcagaaacttcctaagatagttgtgtgactttggaaaagccccttcaccccacaggtttcaagtcctcgtctgtctacaggagggagtcaatcatgacattcacaagactgctgtgggcacaaatgaaatcaggggcatgagacatgttgtaaactggagagatttagggcgtttccacacacatttcccagctgattctcacagagaggcagggaagaagacgtcaccaccgtcagcgttgtttatcgttcttctccacatatcaggtaagctacgggaacaggggccctactgttccccacagggccccagggcctacaacatgcctggcacaagcagacgcgccatgaacacctgaataaacgaatcaccaccccttcgtccctgggggtgggcagcagcgccggccttctcagggcagtgagacccacggagctgcccgcccgcccggcccctcctcggcctgtcgcacgcgcgtggccaccccgaatacagccttaccgggaacccctcctcgattctccgcctagctgggccggcacccgcgtgcgcggaccccaagccgcggggtctcagaggggctgcccattcggcgtctctaggacgctgttgcccgagagacgacggcagtcgctgactggagaatgagcctacgcgcctggcaagaagctgagctgtgattggtcaattggagataaacgaggagggggcggggccaggtcagtcccgcgcctccgctcccggaagaaatttccgccggaagtcccgttctctggggagcgggaaccctggcgacccgtgtcatgggagcgggtttctgttacgtgggctttagcgcgagctgggcggtcggcccggtcccaccgaactgcatagggccgtgtagccgggggaagtcagccccctgctctgagaagcagactctgcatctgtaaaaggctaagcgtgcccactggggcctgtggtcaggattggctgcagtgaggtccgcaaagcccctaccgcatcctgcgccttcgttagggtgagcagtcatggggactcgcattgtgccaccacgtagcgggtctcactgggtccgcttgtctgctcgaggagacagccggtgaggacgggagctggcctgctttgcccaggctgtaacctcagcctccgcccatacccacagtaagcatccattccattgatattcgctaaatgagtgaattattactaagacagagggccgagtggaagcgccataaatcacgtgagtgaatgtaattgttgtcgctgaccctatggagcacttcccttgccaggcactcacccatcctaggtatgtactttacatgtaattgtcatcttcatttgtcttcacaacaaccctgtgaggtgggtgctgtggttactcccattttacagataggtaactgaggcacacagagcattttgttcaaggacacactgccagtcaggggtaggagcagaatgagaacctatggagcttgctcttaggcaccctgccacactgctcactgtgggagagaagcagccaggcagacgtgtgcagcttggaattccttgcacacatggctgcggcaggtcaattaggtgccctggtgtgtgctgcaaagatggatactatgcggtccctgctgggcactctgactacttcactgggcagctagttttcctgttcaccaagagaattctttcccatggcttgtctcagacctcccgcactcactacttcctcaccggactcaatgaccatgggtcttatcccattgagaaaatgtaatgcataagaatggaatgcactccttcacaatcactttggcattcatcgcctcttttcctcttgccccaaaagagggtctcttacagaggccagtccctctaactgtgtcctggatccctccccatttgccttctttattataggcagtgctctaagtgtggtctgggaatccctggggatcctgagaccctttcagactgtccatggggccaaaaaatactttcataacacttaagactttacttgctttttcattgtttttctctcataagtatatggggggattttccagaagctacatgatgtgtgatattgcaacaaattgaatgcaaaagaaggtaagagatccagcggtcttgtactaagccagatgttaaagagatctgcaaaaatagaaaactgcccctcttttcacttttttggaaagtgtaatttttcattagagaacgttaacatctaatgggtttattatttttaatgagttaataaattttttatcaattgtattttctaacatggtaaatattgatagatataaacataaataaaagttttttgggatcctcaatactttttaagagtgtgaatggatcctgaggccaaaaagtttggtcctgagatcaaaagggcttcagttattccctctctcatgatagccaagagtctcattctttctctttctctctttccctccttcttggaacatgctctagtatctcacatctttaaaaaaaaaatagatgatcttctggtttccaccccatttctctgctcctctttaacctgcttctcagtagagctgtctatacatgctgtctttcagttaccaaatttcacagaagcgtgactctcattgcctggtaactggcattctcacaaatacttcttc

SEQ ID NO: 1562711 - DNA, 4001 bp, Homo sapiens
tacagtcctgccaacaatcctgtgaggtaggagccaatgttatccgcactctccagataagaaaaccaaagcacagagaaatgaagaaattgcccaaagttgaaatgctagtggatgaaaaacgtgaaccaaagcagtctgaccccagagtctgcactctgcataatgctatagccctcttgggaattaaaaaaccggcgctgtatagcagatggctgcccgacacttctataaaaaaacctatgcatttatcttccgttgtaaccttctgaaaatgcttagaaggcgagttcctagaggaaaattcactacacaagtatttcttggaggccgggcgcggtggctcacgcctgtaatcccagcactttgagaggccgaggtgggcggatcacgaggtcagcagttcgagaccagcctggtcaacatggtgaaacccagtctctactaaaaatacaaaaattagctgggcgtggtggcgggcacctgtaataccagctactcaggaggcggaggttgcagtgagccaagatcctgccattacactccagcctgggcaacagagcaagactccgtctcaaaaaaacaaaaatcaaatgtttcttggaggctggagagcaatcaaaagaacaggtatgctgaacttagtaaactctcctcaaagccccatgctggggagattgaggcttccttcagagatgacatttgggtgacagcaacacaggatgaacctagaagtttcatctttctaatagaaactataggaagaggacagaagaaaaagggtggtggtctcagaacaatttgtattaaataaatattgctgagctcctacgtgttaggccctataccagataatttaacaccattgaccacccccccacccctactttagaggcaaaaatttgaagctcagcctactcaagcagctgacctcatcatttcaaaacagatttgatttccagggttgcctgctgtcagtccagccttctttccattatattacagctgggcagcagcccgcaaagatcaggggtttgagaccgtacatcataataccaagacaacgagtctcaaaacacactttaaaaaatcgggttctgtcagaagctcaagaagggaagaggcccgaggctcgacctgcatcacctccctggaaagccagggatgagataccctggctttaataaatgtttttttttttaagagcagagcggaaccaggaggagaaactgagccgctcagcaaaaacgaagtaacagctgtactagtcacaggggcaggatagggaggttccaagagggcactcagaaggggctctgtggttggcaggccactacagatcataagccgtccatcgctgaacagggggtggggtagatttaagatcagagatcaaatctacttctctatcctagcctccagtttcacaaaaaaggaaagataacctatgcactgtgaattcctaagaacaggggccaaacaccgctcagcctggtacccctaagacctcactcaaaaagtcagggagttttcggccacttcagaaagactttgttgttacccctccgtcttaacccaggtgagttaagtgacaatcaaattcacccagctcatgggcactgagcagggccgagggccaaggacctcacccacaaggtcgtgtcccgcgttcagtagcgtgcgggacgcggggcccccgaaagtggattcctgccccgcccagcggagggacggcaacagcaggaagggactaagagaggtctcttccgggaggccccccgaaggctggacctagtccgaaccggctccggagggccgcaggaacctatgaaacacgccgctcacctgcaatggcctcggccggccgggatggcaacagatggtgcgtgccggggaccgcgttagcagcagcactcttgagaaaccaggaaaagaggaaacatgcgcgcgcagcgggcgccgccgtaaacacgaccggcgctgtcgtaaactgctctcccgcttcctctgggttgggcggaagaactcacgagccgtaaagcgaaggtccacccggaaatccgttactgcgtttcgccaggcgtcctcattagcctccgaggcgccgagacgcgagaggtgtgattggcactacgtcaggcggtatccggggacgcccaaagagggcgttcatcactgaaacttggcggccgcgcaatcgaagctcgaggcggggagcgactggcgcccttctgtgtcccacaatgcttcgcggcgcgcctcagcccccatgtatcccaccgtcacccgcgactccccgcctgttctacctgcctgcttaatgtgaaactcagcgcaggggaggtccgtcggtgtcttaggcggtccttattgttactcctccgcctttatagttgtggaaactgaggctcagaagtgccaagtgacctgcctagatcagactgttagtttagggttctaaccgccagagttcaaaccatacttccgcagttctcaaacttaattgtaggacagggatttctggaacagtgtttttatttatttttatttattttttgagacagggtttcgctctgtcgcccaggctgaaatgtagtggcaggatcacggcttattgcaccctcgacttctcaggtacaagcgatcctcccagttcagcctcccgagtcgttggtgtacacaggcacgcacaaccacgcctgcctaatttttgtatttttggtagagatggggttttgctatgttgctcaggctggtctcaaactcctgagctcaacagtccacccactggggctagggttacaggcatgagtcaccgtacccggccagctaatgatttttaaaaattttgtagagacagcgtctcactatgttgcccgggctggtctttaactcctggtctaaagtggtcctctcgcctcagcgtgcggagcagctgaggctacaggtgcatgccaccatgcctggctaatttttttttttagacggagtcttgctctgtcttccaggctggagtggagtgcagtggcgctatctcagttcactgcaacctccgcatcccaggttcaggtgattctcctgcttcagtctcccgagtagctgggattgcaggcgtgtaccaacatgcccggctaattttccttttagtagagacggggtttcaccttgctgaccaggctggtctcgaactcctgacctcaggtgatctacccacctcggcctcccaaagtgctaggattacaggcgtgagccactgcgtccggctgcctggctaattaaaaaaaaaaaaaaaaacttctgtggagacgaagtctcatcatgttgccaaggctagtctcaaactcctgggctcaagcagtcctcctgtctcggtctcccaaagtgctgggattacgggcgtgagccaccacacctgaccaggatagtatttttaaaaattcagattctgggtctcattttgatagattatacggatatgtttatgctggagcccaagagctccgcattagctgtgattctgaagtgacgactcaggaactgctttactacagtagataacagtgctgtcctctcagcaactcccaggctatggagttcctcctggtgtctttctttcggaattttaaaacaatgaaagataatctgagggcatgactttattcaaacctcagatcctttctacctgacataggtttccttagccgcctagtatgtctcctttattagaaaatatacctgaagtctaggctctgccacattcttttttttttcttttcttttctttttttttttttgagacggagtgtcgctctgttgccaggcgggagtgcagtggcgcgatctcagctcactgcaacgtccacctcctgggttcaagtgattctcctgtctcagcctcctgagtagctgggaatacaggcatgcgccaccatgcccagctaatttttatatttttagtagagacagggtttcaccatgttggctgggatggtctcaatccc

SEQ ID NO: 1562712 - DNA, 4001 bp, Homo sapiens
aatactggatgaagtttttgatcacctcagggatcacctgataggtttgctgttcatactgacgttcataagcaaggtcctgctttggatctcctggaggttggatacaacaaatacagagtatgctcaaacccacatatatgatagaacgaaatggcaagaccaccccagaaactaaactcaggtctgcgtaaaattcccttttgaatactcagagatacaaacatctcaagtcactcccaatctcgttgtccctgtttcttcaaaaatattaccatgacttaaagttatttttcacttattatctgttttgcacccttctcccaagtctaggaagtcaggaatctcgtctgtcttgtactcagacataccctcagggcctagaaaagtgtgcgttggaggggagagaggcaagactgttggaaagtaagtggtaacaggtacttaatatttcttgaatgaataactgtcaccttttaaatatatgactgtgccaagttactactaataaacctctctgctatattttctattctttaggagacattaacatacagaactgctgtaaggattaaacaaaatatttcatacaaagtacttagaacaatggataacactgactactaagtcaagtcactataacgtttcaggaaacctcagacacctcctaaaaagatttcattcgggcttggtttgaattacttaaatttttcacatcaagattttcttccttggggcaggcgcggtggctcacgcctgtaatcccagcactttgggaggttggggcgggtggatcacctgaggtcaggagttcaagaccagcctggacaacacggcgaaacctcgtctctattaaaaaaatttaaaaattagctgggaatggtggtgggcgcctgtaatcccagctactcaggaggctgagacaagagaactactgcttgaacgagggacgcggaggttgcagtgagccgagatcgcaccactgcactccagcctgggggacagagggaaactccatctcaaaaacaaaaacaaaaacaaaaacaaaaaagcttttcttatttggctaatagtttacacaagaaaaccatagccaggtaagtaatccttctcttccaagactgaggtggactatgataaaaagcctggtttattaggctttataaaacccctcgcactggcagctaatgactgactccaaacctggaccatcaaagagcaatttttgatgcctgtcagagctggttctaagacattccaaaggaactgatccctacgagtactcagccagcctaacccgtggtctcacctgtgtgcatatcatagtcgctgggataagcgtaggggtcataagccgcctagaaggaaagagacacagtcaaggacagccgccaagtcgtgaattcaaaacgctcatcctagagtctagatgccaagcagagagctaaggatacagaggcgaataagacactgtgcctgcctttgaggaactcacacgccttagagaaaagggacagtaaacagacaatgacaatacaacattacgggtgcaatgaggtggagcaaaggacaagaggctgtgggaatcagcgagatttgaccagacggagcctagaccaaaaaaactcaggtgcagaaacacagaaacgtctaacaggccttagtctccggtcttagaaaggggaaggacaagccaatcgaacacgcgaagtgggcgggcagagccagggttgtctagggaccgggaactgtgggagcagcctgagggccgggcgggaggtcggccggagctggccgcgacccggaagctgcctcgcgccgggacccacatccagtggtcccagagatcaccccgtcgtggagcccaccgcgcccttacggccaccttacctcagactcataatcatcagcgggataagacatggctgcctcgcttgcgagcaccgccggaaagagcgaaatgagcggcccgcgcctgcgtcctgaggccggaagttcagccccactcgggcctgccgggaaaccggaagcctttccgaggcctctggccatctgagacagccatatccagaaggaagaggagccgcgttccgtggctcacacctgtaaccccaccagtttgggaggccgaggcgggcggatcacctgaggctgaggccgggggtttgagaccagcctgaccaatatggagaaaccccgtctctactaaaaatacaaaattagccgggagtggtggcgcatgcctgtaattccagctactcgggaggctgaggcaggagagtcgcttgaacccgggaggcggaggttgcggtgagccgagatcgcgccattgcactctagcctgggcaacaagagggaaaactccgtctaaaaagaataagagggttacaagtagcctgaattttcctctcttcaaatagggacttctcaaagaaggtgaatctataatagtggtgtagattcagatataaggacacgtatttggcgtaaaggagaggcaaagttagaggaaccagaaagaatgctacacaaaagatggccggcttctcgcgtgaaggaagattcggatacgggggcctgatggatttagttgtaggcggtttgcctgcagcgagtaaattattcaaacgttcggacttcacaagactaaacttactggggataaaaattgagatttggccgggcgcgatggctcacgcctgtaatccctacactttgggaggccgaggcgggtggatgatctgagatcaggagttcgagaccagcctggccgaaatggcgaaaccccgtctctattaaaaatacaaaaattagccgggagtggtagcgtccgcctgtaatcccagctactcaggaggctgaagcaggagaatcggtggaacctgagaggcagaggctgtagtgagccgagatcgcgccactgcactccagcctgggcgacagagcaagactccgtctaaaaaaaaaaagaaaaaaaaaaattgagatttggtcccatgcagtaagagggaatggagaacaggagccacccaactttggacattaaagttggagcaggcaaagatgaggccagctgtgtcgcgaagcctgggacatgggcagctcttgagtacaccgggttcgaggccaggggaaaccctcaaggtagagatggggttataaagcaaaccaataaaaaccggtgtatgagtcaaggagaggccttagtttagccatctgcccatacacaacacctagtggaaatccgagttccagtccctactccgccactgatttgctgtgtgaccaggactctctgggtccctttgtcacgccgccctccttgcttttcccactgaggcacgctccacctctgggattttgcactcactgttatccaagtctagaatcgaatgcagtggcacccccactcccattcccttccccatcggtatctgcatggcaccttcaggtgtctgctctgatgccatccactcaacatcctattgagaattgcaatgcccagccccaactccctatgctgcgttcttgttttgtgtttcttccttgtgctgtcaccagaggtgacacaaatttggaaataatggagcttaagctttaccgaccctcgatttggttcaggaccttccctgaaccaaggaagagtcacagtctcttccttggttcagggagggtccccaacaatgtcctcatggtcctttgcttttgtaaaatttgtgaaatatttttattgctgaaaccacctttgcaaaaattgtaacagtgagaaaataatgacagtgaaagagatctgatctaaccaaccctcatcttccatttaatcttcagactgcccttaatcattcctggctcgaaccgagctaactttgggagacatttagtttctagtttaaataataacccttctccgaggcctggcacagtggttcacacctgtaatcccagcactttgggaggccaaggcagatggatcacctgaggtcaggagttcgagaccagcc

SEQ ID NO: 1562713 - DNA, 4001 bp, Homo sapiens
caaggtgggcggattgcttaagcccaggagtttgcctgggcaacatggcgaattcccatctctataaaaaatacaaaaattagccgagcgtactggtgcacgcctgtggtcccagctactcaggagactgagatgggaggatggcttgagcccgggaggtccaggctgcagtgagccatgattgcaccactgcattccagcctcggcgacaaagtgacgccctgtcgggtgcaaaaaaaaaaaaaaaaaaaagaaaaatccatactaaggaaatatatggatgtgtgcccaactaggatataacccttcttgtcatcagtggtcccaactgcttcaacactgttgagcaagttttatgggatccagcctgacacatttcagggacccagaaatgaatttacaatttgagtcctgtcaacctcttcaaaaacattcagtagccaacaagacatgtactgatgcaagatctttaataaatatgacttcctctctctcccaaaagcagttatctggacaagcagtttaagcatctccagtttttagctaggggaaatatgactgaagccttacttttttgagtccatatccaatttgtaatagaaaataaaaaaacaggattgaaaagccagttacccatgaaaagcacactcaagagcattcctatggggagtctgcctcttaaggaaacatcaatacagaggacactaactttgtaacgcatcctagggctttaatcctcacagtacagtatgtaaatcaataaacgtaccaattacatagctgttacagaacttacaaagtatactgatccgcaattttaaaaaaatctaagcctacattcccttcacctaaaagcctctcaaagcaaattccagcttaaacgctgggtatctacacttgcagaaaaatgttcaaagtaatgcactactaaatttagttaatatttagtccatgtagtgagtcagaatgagattaccacttaataggaatgaaatagttatacaatgttactaacttcgccacctaaaaagaaacactatttcattagtggcaaaccttacttttgtatagcgatgggggcatttggaggcaggaggcttcttcaggtcaaggaaagcatctccactttctgtttcacccatacttctcctatccatggctccttggtctacaatgctctgcacctggaagataaatcggcacaaaattgtcaccgagaacagtaagttttcagaaatcttggctgtttcttcagaagctgaaactttttaatctctcaaaacagctagtgttaaaaacaagtccccaccccaaaattatgctataaattagaacttggagatagaatcattggtactcagttctctttcctagtatcctaagcatcaacatggtaaaaagtagaaggtgcccaattcaaggtatataacctttaagcagctttaacacaagagaaaccaagattagtagctgccacccatggggatctttcaagactggtggggaagtttcccggagtgggggcaggtagaagactggttaggctgggaacccgcgaagtctgttggaaagtgcctgtcacttgccaatggacggcgccagctgccccttgttatccggcgatcagggactggggacggggcccgagcgcccctcgccaggccagccgcacctgtggccatgtcaggggcgccgatggcaaggaaagggcgagcaccggcttcagctccgaaacttggcttccccgggccgcgaccccaacccgcagcccctcacgcaggcccgggcccagcggcctccttcggaggaagggcggagaccgtactcactgaggggcggccggccgcagggaggagggaggccgaatctcccggcccgggcgcttcaagctggagctagcgcaggcccgcagccgtcctccccggcccggcggctcggtccccgccagccagcccgccggctacccgccggccgccttgcgggcctcgcgcccctgcccaccccctgcgggcgccccggcgcccgcgctcacgcacgcgaccccgggagcaatgcgcccgcgccccttctacacccgggagcaccgggcgcgcggtgccccggacccagccgccaccgccgccgacccttactcggtgcctccgccgctcggcggccctttgcctcggccgccgctcccctccccgctgcccgcaccggtcccagcgccgctccccgcagccttcgctctcgcgcccccaccccgaccggcttgggctgtctctcttcagccgccgtaactgcagcccggccctccgcccctcctcttcggccccctcccccttaataactccctccacgcaccctggccccggcgccgccttccccgccgcgcgcccggatgtgaggtggctgcagcggtgccgggcgaaaaagaagcatcgccgcgcgcttcccggacgccagcccctgcgcgggccggggggtgggaaggtggtggcggcgaggaggaggccacggtggggatagcggaaacccgctcccgtgcgcgcaggcggtcgccgtgggcagcccagaggccaccgccgccgcgttcccacgcgcgctgcagggcagagcggacggcacttgggacccgcgactcgcggcacgccactctcccggaggcggtggctagatggggctgggctggcggctagcacggcctgtggcgcgacgaccgctgtatttgcatggttcgcataggcagagaaccgtggggcttcggcagtgggaatttgagataggagattggggtcttccgagccttcccagtgcgggttcgaacctcagctgttttgcgagtggcgtgatcttaggcaaagctgacttaacctaagtttcggtcgtgtttctaaaatggcctctgtaaatctatgaggcttatgcgcgagtactggttgctgcattaaaagacaaacttgtcacgattggctttgatagcgataaaggcgactaacaaattcattgaaatgttgtttccctccggtaacctgaatctgtccttagcctgcacagaaaggggaagtgcgagtggagttggggaaatgagacggcgaatgtcaagtgcttaccacgtagtgcagactcaggctgacagggggccacagaaatgcaaatatgtgagcagtgtgggtaactgcatcctggggaggaagtcctatgtgctggaataccacaagcacccatttctgccctgtggtactgcgcagcgttggtgtgaagcgatacataggcgtgaagtcccgagaacgcaattttcctggttaaaggacagcaacgtctacatttcttccaagaggcctactttgttggaacttcacttcacttgtgaaattagggtgttgggcagtgagtgaccactaactcagctcccttcttgtgaatcttggcaacagaaaacttttcgtttgtattactgaataaagtgtgtttcttacaaactgtttttttacaggcaagaggcagagggaaacacttgcacatcaggcctgagtttgcattctcatctctgccacctcctacaagctatggagagttagtctattgattcttagttttacctgtgaaattgcgaagatgatataacctgctcatggggcagttaagattaaacaggataaggtgggtaaaaaaccatatataacccataaagctgctgagcctttttaagcctatacagagacacgttgcaggtgataatacagatgttattattttaacaatcaagctgtttttggaatccaaattcttcctaaagctgtgggaaacaggtctaatcccctttagtgtcttggagactccctggagtagtggagaaggcccgttctttgaagctgctaaatcctgaccctgccaattagtgtgaaacctgagccaggcatttcaccacctggatctccctttcctcatttttccgaaagggatcgcagtatacctactttttaggcttgcagagggaattaaagataacattaaaaaca

SEQ ID NO: 1562714 - DNA, 4001 bp, Homo sapiens
actgcttcaacactgttgagcaagttttatgggatccagcctgacacatttcagggacccagaaatgaatttacaatttgagtcctgtcaacctcttcaaaaacattcagtagccaacaagacatgtactgatgcaagatctttaataaatatgacttcctctctctcccaaaagcagttatctggacaagcagtttaagcatctccagtttttagctaggggaaatatgactgaagccttacttttttgagtccatatccaatttgtaatagaaaataaaaaaacaggattgaaaagccagttacccatgaaaagcacactcaagagcattcctatggggagtctgcctcttaaggaaacatcaatacagaggacactaactttgtaacgcatcctagggctttaatcctcacagtacagtatgtaaatcaataaacgtaccaattacatagctgttacagaacttacaaagtatactgatccgcaattttaaaaaaatctaagcctacattcccttcacctaaaagcctctcaaagcaaattccagcttaaacgctgggtatctacacttgcagaaaaatgttcaaagtaatgcactactaaatttagttaatatttagtccatgtagtgagtcagaatgagattaccacttaataggaatgaaatagttatacaatgttactaacttcgccacctaaaaagaaacactatttcattagtggcaaaccttacttttgtatagcgatgggggcatttggaggcaggaggcttcttcaggtcaaggaaagcatctccactttctgtttcacccatacttctcctatccatggctccttggtctacaatgctctgcacctggaagataaatcggcacaaaattgtcaccgagaacagtaagttttcagaaatcttggctgtttcttcagaagctgaaactttttaatctctcaaaacagctagtgttaaaaacaagtccccaccccaaaattatgctataaattagaacttggagatagaatcattggtactcagttctctttcctagtatcctaagcatcaacatggtaaaaagtagaaggtgcccaattcaaggtatataacctttaagcagctttaacacaagagaaaccaagattagtagctgccacccatggggatctttcaagactggtggggaagtttcccggagtgggggcaggtagaagactggttaggctgggaacccgcgaagtctgttggaaagtgcctgtcacttgccaatggacggcgccagctgccccttgttatccggcgatcagggactggggacggggcccgagcgcccctcgccaggccagccgcacctgtggccatgtcaggggcgccgatggcaaggaaagggcgagcaccggcttcagctccgaaacttggcttccccgggccgcgaccccaacccgcagcccctcacgcaggcccgggcccagcggcctccttcggaggaagggcggagaccgtactcactgaggggcggccggccgcagggaggagggaggccgaatctcccggcccgggcgcttcaagctggagctagcgcaggcccgcagccgtcctccccggcccggcggctcggtccccgccagccagcccgccggctacccgccggccgccttgcgggcctcgcgcccctgcccaccccctgcgggcgccccggcgcccgcgctcacgcacgcgaccccgggagcaatgcgcccgcgccccttctacacccgggagcaccgggcgcgcggtgccccggacccagccgccaccgccgccgacccttactcggtgcctccgccgctcggcggccctttgcctcggccgccgctcccctccccgctgcccgcaccggtcccagcgccgctccccgcagccttcgctctcgcgcccccaccccgaccggcttgggctgtctctcttcagccgccgtaactgcagcccggccctccgcccctcctcttcggccccctcccccttaataactccctccacgcaccctggccccggcgccgccttccccgccgcgcgcccggatgtgaggtggctgcagcggtgccgggcgaaaaagaagcatcgccgcgcgcttcccggacgccagcccctgcgcgggccggggggtgggaaggtggtggcggcgaggaggaggccacggtggggatagcggaaacccgctcccgtgcgcgcaggcggtcgccgtgggcagcccagaggccaccgccgccgcgttcccacgcgcgctgcagggcagagcggacggcacttgggacccgcgactcgcggcacgccactctcccggaggcggtggctagatggggctgggctggcggctagcacggcctgtggcgcgacgaccgctgtatttgcatggttcgcataggcagagaaccgtggggcttcggcagtgggaatttgagataggagattggggtcttccgagccttcccagtgcgggttcgaacctcagctgttttgcgagtggcgtgatcttaggcaaagctgacttaacctaagtttcggtcgtgtttctaaaatggcctctgtaaatctatgaggcttatgcgcgagtactggttgctgcattaaaagacaaacttgtcacgattggctttgatagcgataaaggcgactaacaaattcattgaaatgttgtttccctccggtaacctgaatctgtccttagcctgcacagaaaggggaagtgcgagtggagttggggaaatgagacggcgaatgtcaagtgcttaccacgtagtgcagactcaggctgacagggggccacagaaatgcaaatatgtgagcagtgtgggtaactgcatcctggggaggaagtcctatgtgctggaataccacaagcacccatttctgccctgtggtactgcgcagcgttggtgtgaagcgatacataggcgtgaagtcccgagaacgcaattttcctggttaaaggacagcaacgtctacatttcttccaagaggcctactttgttggaacttcacttcacttgtgaaattagggtgttgggcagtgagtgaccactaactcagctcccttcttgtgaatcttggcaacagaaaacttttcgtttgtattactgaataaagtgtgtttcttacaaactgtttttttacaggcaagaggcagagggaaacacttgcacatcaggcctgagtttgcattctcatctctgccacctcctacaagctatggagagttagtctattgattcttagttttacctgtgaaattgcgaagatgatataacctgctcatggggcagttaagattaaacaggataaggtgggtaaaaaaccatatataacccataaagctgctgagcctttttaagcctatacagagacacgttgcaggtgataatacagatgttattattttaacaatcaagctgtttttggaatccaaattcttcctaaagctgtgggaaacaggtctaatcccctttagtgtcttggagactccctggagtagtggagaaggcccgttctttgaagctgctaaatcctgaccctgccaattagtgtgaaacctgagccaggcatttcaccacctggatctccctttcctcatttttccgaaagggatcgcagtatacctactttttaggcttgcagagggaattaaagataacattaaaaacactgctctggttattttattttgggggtgatgaagtcttgctctgtcatccaggctggaaagcaatggcacaatcatagctcactgctccagcctcagcctcccaaatagctgggactacaggctcctgccactacagcaggctaatttttaacgattttttgcagagacgggatcttgctatgttgctcaggctggtctcaaattcctggcctcaagtgatcctcctgcctcagcctccaaaagcactgggattacaggcatgagccaccacacctgagctttcttgaaaaagaaaatactagaaacccggaaattatggatttctg

SEQ ID NO: 1562715 - DNA, 4001 bp, Homo sapiens
caagagacataaccacactcggccacacacactcccgtgacatcacatttacacactctggctggggggagcaacctccgacaaaactgtcccagtgacgtcacctgcggcctggagcttatgtcacacctgaggttctcactgacctcacatacatactttttcctgatgtccccacaattaacactctttcttcctgcctaggcgttgatggcccagaggtacccacctccccacccacacagttgcagggcccccggctcatcaggacagcacctgcctgtgcacccctctcaggggacacacatgcccacatgctttgctgatggcccagacgtgacacgtcccacaggtgtccacgggccacgagaacaggggtgtcagccatgcacatacacatacacacacacacacacacacacacacactcccagtcccatctcatgatgcaacttgcatattaaaacgcctctcggtaaccgcgccgggcagtccgcgccccacagcttccaccacattcctccaggtgctgccagcaccccactccctccagctttctgactccgacagcctggcctgctgatagcgacagccgcagcccagacacacacacacactccagcccaacacctgcgtctcagcaagggaccaaggcagtgccctccagccgcagctgctgggtgggaggagtccagggggaaggggcacagcacagagccctgagctgcagaaagtgccgagtaccacgttcctccccagctgagtgcacggtcagcaccactgtccccttctcgtctccctccttgggcacgcctgacacaccatggcctgtggcctctgttttggacacaagctccccgagtgtgcatgcacacgcgcgcgcgcgcacacacacacacacacatcagctcccttccctccaaacattccgaggaaatcctgccaggccactgacagtgtgcgtgtgtgcgcttgtgtgtatacagacagagagcagggtccaccccatgtccacacacacacgcacacaccacacacacacagcacgcacaatcctctccacatgcacacggcgccccaccagccaacacacccaccccctccccgtcccctgacagctgctggagcccacacacgcacgcacacacacacactggcacgcgctcgcacacacacacaaacacacacacacacacacacccggcagtggccccggccctgccagagctgcagtgtctgcgatttatgccgcctccctgggctgcctccctccttgtccctggccagcgcctctgaaagggtccccaccccccaattctggtcttaccaaccccaccgccgtcaagccccaccctggccccccttcccctagaaggcatccaccccgtcaacccctcttaccagctagaggatgaatgccttgacccggcagcaccccgtgaaagagaggggttagggcccccgattcgaaaagatgagggcagagaggtgcagtgtggcaccggctggcacaccgtccaccatcgagcctctgcaccacccccagaaacgctcacctcaccgaccgtcctcggtgtcctcccaccgcctccgcccaccgccaccaccaccacctccctcgcgcagggtggtcccccgggggtctcacggggatccccagacccaggagacactgggggtggctctccccgtctcatccccccttccgtgtccctctccaagccccacccccactgacggagggggtgccctccggctccagccccgactcccaccgtctccccggtcggtcggtcgcggcgctcggatccagaggaattcacttaccccagccccagccgggatccgggccaagcaccgcctccgggaagcggcggccgcggggcctgcgcgtgtgagtgtgagtgtgaatgtgagtgtgagcgcgggtgtgggtgcggggtgcgtggccgtggggtggcccgcgtgtgtctgtgtgtgtgtctgggagcgcgcgtgtgcgcgcagacgccgccgccccctcctccccgccgccgcgcctctgcccctgcctcggcggggagggcgcccgggaggggccaagcggcgcgcgtcagggaccgcggcaggctgtgtccgtctgtccgtccccgtctgtccgtccgccagcccgcccgctcccggtgccctccgcaggcctttccgcagcaagcccgctcccgcccccgagccggccgcacgctccacggacacacgcgcgctcgcagacacacgcccgcggggctggggccgcgcctggcgccgccgctgcagctgcagcgcccggggaggcgaaggcggccccacggacccgagccccggcctggcggacccctgtcccggccgcggccccctgcgctgctcaccccgcgggatccgggtccgggtccgggtccggcctccgccagcgcattcaacagctgggggcaaacttgcggcggggccgcccgaagtgcgcctggactcgccctccccctggactccgcctccgctgatgggccccctctccgccttgtacctccatgccctgccgcctgcgccctgctggttggtcccgcgttcaaccgctggcgactggggaagtgcggctgctgcgttcccattttacaggccagacaactgaggttcggagaggagtgattcccccaaggttacacagggagcctacagacagtattagactttacgctcccctaccttgtgccagggcactcactgcctttccccacccctccaggagtaggtccaagggatactgggctcatctgtagctagagaaccttcattagccttccagaggcccagttccccgccccttacgccaaagcccctgccacctgctgccacctgcaaaggggtggatgctgggaggaggaggaggaggtggaagatgcaagaagcctggcacccggggcctataacttggtgcttgggcatgcaagcacctcctcccgaggccctgcgagctgcatgtcggaggcctgctgccagcaggccctgtacttctccatcacttttataggaccgcatgcaccagcgcctgttctcaggtgttgcacagcagatgaagtccaggctgcgggaactccccgtcgggacatctcatgcaggtctggaataaggagactccccagaagaagccactgcctgagctgaatcttgatggatgagtaggagttggccagctaaagaaggaggagaagggtgtcctggactctgggaacagcatgtgcaaagaggcacagaggcatgaaacagctttgtatgtgtgtacagggaactccacggagttgggtattagtagagcagaaagaacgtctgtccagaaattcctccctcctttcaactaagaacagggaacggcccaggatggggctgggagggcagacaagcactgggtcacaggccacttgttgtcctggggtatgcagaaggactattgggcgttccccacctgcaccccaggctgcctggcacactcctacccatccttcaaggtccctcgctgcaaacccaaacaagccatgtgctgtctctgccctctaaactgagccctcctacagggcaggggcggtatccaacacatggtgtgtatccctgacaaggctgggcaagaagcagggtcccagctccaagaccttgctggaagagcccctcaggcggaacataacggcctctgcgccctctggcggatccctcgagaaattagagtgctccccaagccaacagcccccctgtggctctcaggcccagacactttctgagatgggcactggcagatgccacctaatccgctcctgcccaagaaactgagcagtgatgaccccaaagaataccagggagtcagtggcaaaacagcctcttgctgctctgtttccgagacattcccagtcatcttccagagtgcaagtcacaaccctctctgagcctgtttcctcctttgtgaaagaaatatagcaaaagcagccagtacccccagcaca

SEQ ID NO: 1562716 - DNA, 4001 bp, Homo sapiens
actcctaatcatgactgcaaacctttcctggtgcccccaagccgacaacctctttccctcttccagcaaggctgctggagagaaaaagccactggatttggaaatcgactggtctggactgaggtgccacttgtcctctgtaggcctcagcctccgtatctgtacaatgggtgcaatagtgttgcccacagggtttttgggatgctcaggctactgtgataggcttctgtcaacacatggagtgacagtccccagtgaccaccagatacctggttatagccatcatcctgttcccacccaggagaccctgggaggtgaggagcccaggctgggaagccctgccttgaactggctgcagggcggtctgggccttaagctgtcgccaccatcatcctgagcctaacagtgggatttctgagttcatagtctctgtcctcttagcatctgggatcctggcggctcacttccatgctctgggcaggtcatgttccctctctgagcctcatcttcctcctctatgaaacagaatcataaagagcatacctccaagcagctgggaggattctggagctgatgaatgcaggtaacggagccgactcaggctaactgttgtctgcacacaataggtggtggctgtaacatctgccacacgtccacccctgtctcagacaactgctcttctggcctctgatgcttcaaccacctccgtcctccagccctgcccatgtcaactgctcttgctagcccagcaggggcatgctggcccctgaccactgggaaaggagaatttctgaaaagaattaaagaattgaggccgtagggggtgggggccgcgcaggcctttgaatgggatgaaaaggcctggagaggcctggctactccacattgtctgccttggacaacggcggctggcctttaggaggggaccctcgctggggctgcagccaggacagaggccaggacaggttcaaacactgtcatcaaggatagaagggcagatttgcaacctagctcttcagtgaatagcccatgaggctaaaagatgatgccaattccctagggtctcagtttgcttaaccgttgaatggggacagttttccctacctcattcggtccttcaaggattgatgaggacactatatataataatgggccccaccatgtcaggttctgggagctcctccgtaaaggccagcagggaggaggttccccgccgctaggagagcagaaggaagactgtgctccctcttttctctgtccaaaatgccaggtccctggggtatctccgacactgacccactgggctgtgagactccaccccagtccctcctccgagggagataaatagcctgggtacaaaacaaacaaacaaaaaacaaaacaaagcaaaaaaacaggaacagggaaaaggggagagagggtccgagaagagtcggctagggggtgtcataggcctttcccaagtgcagggggaggggccctagggacaggggaacagaagggccagggcttcgccctcgttgcgccccttccccctcctctcgagctcctgggttgaaagggagggagtaggggaggcagccagctccgacacatggagtaggggaccccgcactcgcgggagcctcagccggaccgcgggatggccgtgtccctgccctcacccgggctggggactggatcgccctccaatcccagcccttcctggaggtgggggcgtgtgcgcgccgggaccctcggccagcggggtgcaaaggcgccgggagctcttacctgcgtccggagaacggagctgccccgatgctccacgcagcgccgcctcccgggagcaggagcccgaggcagagcagcgcccaagcccgcgggccgcccatgctgcaccaggcgccctccgcgcgcggcccctcgcggtcgccgcccccagcctgtcctccccgcctgcctgcccgcgccgccagccgccccggacgcgcggagcccggtttccagctccgcggccggagggcgggcaggaggcgggcgggcgggggcgggggcgcgcgctcccggcctcgcccggcccctctgcgctgccccccgccccctgcgccgccgctgccaacccggaaggagcccggaggggcccgggcggccagggcgcccccgccaggaggcccgccaggtgtccacctgagccccacgccctgcgccgcggggcccttttgggggcggggtgccagctccgaggtgtcctcccacgggctgtagactgggaaactgaggcccgggccacggtcccagacgcagccgggacccgaacccacctcacctgagcgaatgatatccgggactcatcctttttcgacacctttgcgggatccagccctccaaggaaagcttcctgagcagtgcgcgccacgtgtattgggcacctcaccgcggccacttcacatcctatctcaggtgactcttcaagccactctgctcgaactgggcacaatatccccattttacagaagagaaaactgaggcccaggcactcgcagtctccctaggaggagatctgggctgaccccataagtgcagagtctgttcttattctcattttacaggtggagaaactaagccacagaaaggagctgtcatttacctaaagcaccgtggcaggggtttggcagagccaggatttgtacccagatcgcctgacttcggagagtaacagctcttaaccacagcacttcggtctatgccttgatttcaccatatgtaacaaggtaagaattggtgttgggtggtttcatctggggtacatggatgggcttctggaggaatggctctacatcccacaaaggtatatgtaagcgtagtgtgtgtgtgcaggggtgcatgtgtgtgtcgtatgtgtgtatgatggatgtgtgtgcatgcttgatgtggatttatgtgcatgtgtgttatgtgtgtgtctgtgataggagtgtgtgtttatagggagagaccagagctctcatcagaggggacccagacccccaatctcccagggcagtctctaaccccgccttctgcctggatcgatgggcagtagttaggcctgggctggggaagcccttgcccagcttggctacttcctgttatggcttgtccagacccacggtcccttctagaaacactccccagaaaggatctgccagtcactggattgcccctcctggactcaccaggggcaggcagcataggccaccataggcaggcaggcaggcaggacgggggatccatcaccagtgtgtccacatagagaaagctgttgccctgtcccaagggacaggtagtgagagctgggttcaaaccctgcctctgctacttctgctccagttagctcaggcaagtcttgcccctctcgcagcctcagtgtttcttttgcagggaggacagttgtacattcgttacaggagtgtgggaaggattgagatatcatggtaatggcctgtcacccactctcccctacttcacatagtcccccaagggctccctctccctccagcgacatcaccatggtgccaatgttgcccccttggggagctgttgccctccttttcacgtgaaattttggcacatctcctgtgccatctctctgacctccaagaaatgcagctttgtacctctctggttagcccttgtttttgacacagctagatcagtgacttaacaccctggataattcgtcactcctgaggagccatgcccccaagaggatgccaggcctgtctgaaaccccaatcaagcggcccagataaaaacccatcaccccaggggtgctttgagctgtttaggaagctcaaacatgcagctgtttaggaaggagaagcactggataatgccttggagggactgagaggtgtctagggtgtcagatgggtgccacagaatgaggaggcactactaggtctgtttgcaacatgtctgagatgctcctgcgattaatggcatccacatttcttaaccaatgccatcaaacttgtggc

SEQ ID NO: 1562717 - DNA, 4001 bp, Homo sapiens
tgtatttttagtagagacggggtttcaccatattgaccagggtggtcttgaactcctgacctcaagtgatccgcctgcctcggcctcccagagtgctgggattacaggtgtgagccaccgtgcttggcctcaaaaaaaattttttttttagacacgagttcttattggttgcccagatggtcacaaactcctataaagcatgatattaaaaaaataaataaataaaatctagctctcataattgtcaagtaaaattctatagttttgagcaaatattttcaaatcatcaacagatatttcttgagtacctaccatttgtatagctttgtggagaaatataaaacatgaacctcacattaaaacttaccattcagttaaggagctttctctcctaaataattcccagcaaaacaaatgattacgtagaaaaggtcttttagtgttatttttagatctgcccactttcacaatgctgtttccttccccccatttcatctgaattctaacaggaaatgatttatcagctggcattaaactattggtccacgatcttttatcccaatcctttgaggccagatgatttgtggaaattctcttttgggtgcggtggtaggggtggaattttcaagagtagtgccatgtctataccatatattacatgatacccacagtaaggtgtggagctgctctgaacaattaaacacattaacatgtctgcaataaaaacatgtaaatatttggaataaagactacaaatggcctcaggccaagttttaccaccaaatgagttggaggaaaagttgatttccaaaagtttttggatttcaggattgagaataaggaacagaggagctgaactgactttatccaaagacttgggacaataatgacaatagcatctaagaggctgagtgtccagagctatctctgaaaagatgcatttaaggtggaactatgagaaaagaacagctcttgtgtttgtacaggttctgcctatagacatgagtttgactcgtaaggaaatgagctctggccaagaatgctacgggaaaatggttatagagactaccatgccattaggaggtgttactgttttgatgaaaagaatactgtcagaggcagagaatctaatcttttccagccctaagtgtgtgttcattaatttattcaactaataatcttccagagcttaccatgtggcaggctccattctaggaaatggagaaacaggtgcacaagacacagtcctcacaccctggagtaaacagctactcttcattgaacgctcacaatgtgctcacacctgggccttcacatgcctcatctctctcctttaattaggattcaaagccatgatttgaggtcctgctttgccatttcctaactaagacttaacaacttctctaagtctcagttccctcatccgcaacacaaagaataatcgccagacagggccgtgggggaggaagaaacgagatgctttggaaagaattttgaaaatggcgggtggaggctgagcaagaatcaactttctgtgggcagggcctttcctcggcatcctcgtcttcattcatacaacccccacttcagatgacgactgtgtaccagatgagccaggtgctgggcgttcggccacacagagaatcagaccagcaattaccctaggagaaccggcagtggaggggaaggctggacctcaggaaagcctctagaaggagagagggacgtgatggcgtcacgtcacgccacagggatttcacctcctgcggatggtaatggcctcgccgccctcccgcccccacctggactccgacggtgccggcaagaaacgggaggagggaaggcaaccgatgtttccagacccgccttgagccccaccaccactcccaagcagaggctgttacctgagaggaaagtcggccgctgcccaacgaccaaacttcctctccccaggatattccacctactccagccaggctcaagggcccaggccggtccccacttccgcttcctcactttctggcctggtgcagttcctgtcagggcgtcaagcaagatggttgcagatacctgagctggagggtaccaaggggaatgaaggtaagtgtcttcgtttcacaggctgccgggctgtgacactgccctaatcctcctttcaaagaataaatttttttttttttttgagatctgggaaatagtttaatcagacactagcatttattcttagctgctttcttaattaaataaaaatgagtataaattaatttactaaatgttcacaacgtaaaaacggacattaaaaaaagaaaaaaaatgccaaggtaagctgataatgtttttaaaaagtagacaataaaataatgtatgtaacttaaaatttgccatgataatttattcttaaaatggaaaatcagtaaaatactcagacttctagcataatatctctttttttttatttattattatttaagttttaaggacatggatgaaattggaaatcatcattctcagtaaactatcgcaagaacaaaaaaccaaacaccgcatattctcactcataggtgggaattgaacaatgagaacacatggacacaggaaggggaacatcacactctggggactgttgtggggtggggggaggggggagggatagcattgggagatatacctaatgctagatgacgagttagtgggtgcagcgcaccagcatggcacatgaatacatttttaaaagtgtgttactactgtcatttcaactgactagaaataccaccagcacgtgattgccacctcaaaggactgagaatgtaatagtagtctatgaagagcagtgtgtgtgatggacaatgatggggtagctccagtgactgatggcttcaggtgccactgacgggtaattgttgatgtattcaactgattttccgtgagcacccactttgtgccagacagtaaggactcggagataaaaagcagccctctgctggatacgtttacaggctagtggaggtgacaggcaccgtcagagaagattgtaacaagatatgtatggcatagtaagagagaagagatcatctaattctgccactgagtatttaagggcaggtttcacagaagagtttacatctgaattgaatcttaaaggatgacagggagttcactggatagacaaagtagaggaggacgtaagaggcaaaggacacatcatgtgtaaaggcatgaaagctgagccagcctattatcttggaaaaactacatgtactgtagttactacaactgtcacaaaggctattagtggagcagcagaggaaggttaaataacagagggaagttggatcatgaagaaccttatccatactacaaggtgattttatccagtaggcattgaaaaatgtaatcgaacctgtgttttaatggaatattgactaggatgaggggaaaagacagaggataacaaaacacttagtagacaaaagcaacatttgtttctatctcctactacttcagtcataattataataataatagcccacattattgatactgacatgtagataggtgaatccaatataaaatgataggaggtatgaaagaagttggtgagtttggaatattatttgactggctataatatagagtaatggggtgggagccagagggaaatcgaaaaggtgacctggaaaacattgttcagggccttgaatgctatgttgaggtattttgactttataaaatagtgggggacaaactacaagtattttatacattgaggtatagtttatgaagtttttttatatgtatagcttatgtaaatctcaaaggaatgctgagaagtaggcgttattatcccattgtacaggtgagaaagctgagtttgtggaatatgcatacattctacattattgagcacctgctatttgccaagcactatgctgagctatgagactagaaggaagttgtagtttaatactctaatagaggaaacaggaataaatcagcaattg

SEQ ID NO: 1562718 - DNA, 4001 bp, Homo sapiens
tttgtgtatgtgtatgaattctgaaggaaaaaaccagctaaaaaaatccctggagactacagtaccttcatagaataggtacagatcaaagttcatgcataatcaatgttacaagccttaggtagaggaactcgcaagattcctacttctcaatttttgcaggttaacttaaattcatttcacatctttcttataaaagcaacgaattcaaagcattagctctgtcttcccattttcaccctctgaaatgaagcctatttagaaacatgctctcgaagttctctacaaactcaaagggtacatttaactccattatgcactctcactggcagatggagggatgacgctgagcctgctctcagggagttaaagagatgctccgtagtaaaggggaacatcttgtggactgtcagatggccagccattcttcatcttcattatcccagcaaagaaaaggtccttacccatcaggataacaccattaaactaactgtaagaaaagaatgaagggatgatggaagaagtctccctgaacttctcctgacaaaggagctagtccacaactgaatgaactggtcgtaaagcttttaaacgaaaatcttgatctccaagtatgtttaaaagtgtaaaaagacaaagacacacacaaacaccaaacctaatgcacattttaaacttttgtacaatcagttcacgtttgtagttcatgattggaactctttcaacttctaaccttgatttccaggtacgtaactccacaaaattgtttatcttatttcccctaaaatgagaaagtgactgcaaactgcaaagaacatgcccctgttctcccaacctaaaaacccagagtttcagacattttggtctcacaccaaagaactgggagatgtgaaatgaactgcgctccatattgattcttaaagcaaataagaagaaaaaggaaaaaaaagctaagaatggtaggtaagataaaagaattgttaaacttcacctctaacctgaaatcttggacctcgcacacacaaaatcaagatttttttacaccctattcctcaacagaaaatattctgcaaaggagagaaaatttcgaagagtggaaagtagaggaaacacagtaagtacagtaaagagaaaggattcgaaattcatttgccaagaacaaaaaaaatgaaacttaaattgcataggagctcttacacacaaatgcattggcatttcccaaattaaattgcatgagagcaacaatacaggccatttctatatagcacccacttacgagctctaattccagaacacacaccgatatgacatagtgttgcaatcaatgtattaggaggcaaagaaaatggttgggctactggacgtcttcgaccagctcattcaaatacctttaaaattaattaaggggcagggaactagagagagaggaagaaaaaaaaaatggaagaataaaggcgcaccgagtagaaaagattaaagggaacgtggaaggccggggctgccgaaactaacctgtgccatcgctggcggacgccgagagggccggagatgagagtttaggccgcttggctgaaggcggccccggttccaccacattctcggccatttttaattctttcggagatacaagcgaggaaaaccagaatcctcaggaaatctcttcttcggcccggggtccccgcgccgcacccaggggtgggctggggggctccgacggcacccgagggggtgggggaagttcctttttctcttcgccgggtcgcagtggctggagagggatgcggactcgatagaaaaggtaagggcaagtgcgaggggccgggcctgggcccaagcccggaggagggcacaagagcacaaattcgccgagcgcgtccgctgcggcgaattcccgagaactcgcggctctagaggcgcagtccccggcccgccacggccggcccctgcccagccgaggtctctcggagctccgccgccgccatcaacctcttcctcctcggcgctgtcctcctccttctcatcgccacaaggaggcgggggcgaaaaggggggagaggaggaggcgacaagagacactcacctcctcccggtgccccctcccgggcctgcgcccccaccctccgaaccctcctcctgccgccgcgctccgcgccgccgccgccgcaccggcccctaatggccgcagagaactcgcccgagccgagagccaggctggcgccgccgcctcacatcgcgcggcggccggcggaggcgcggcaaggacgccgggagcggagctggccggaccagagggccgagggggccgggccgagcagcgccgcccgcacgcccgcgccgacgcggagcccaccgaggaggccccgctccggcggcggcgcaggcggcccctcctcgcgccgcgctcccctccttcgccttcctttcccgcggaaaataaataaatacggccgctgctacggcccccaccgccggcggccaggtgctgggagcgcccgccccccggggctccgttcggggccgcccgcggcggcgggagaagacgccgcggggcgcggggttatgtaatggtcccccctaggcgtcgacgccggcccggctgctggaccgcggtgggggtgtgtgcggacgggagggggctgggggtcgcctcagcccgtgcgccccgggccccctgccactgtctcggcccctgccgcctctctccgacccgactcccctccgcactctctggctcccgcagttagcactcagcccggcgtcctgcttgcccactctcgcccgctctctctcgccctctctcccccccagcctagcacacaaacaagatggcggctgttgtttcttccctctgccgaatcctccttacaggctagcggtagcggcggcggccggaaatgagccaagggggggtggaaaaggggagtggccgggcctccggaggggggcggggcctaggcccgagccgctcacacaatgggggaagtggagccgggggcggggcctgtcccaatcacgggatccgccctaggccccaacgcggttagcgcttccgcaaactcccccggcgtcaccctgtggctccctttaaaggggaggattttaagagtggggaggattttaaggggggaggggcgggggcggactcagaatctattttcagtcggtggatagttacgagggaaggttcctgcctttggtctctgcgtaagggaccagtgggaaccgggacgacggaaccccggagctgctccgaggaaggcgccaagtcgccactcaggtggccaaatgggagcgcccgtagggcggccctgctcttcggcccttgggtggcgggtcccccaaaaccccggtcgaattcaccaggcagggtgtacccactgccggctgttccgggccagatacccagtgcgtcctcacttctccattgccctcccaaagggagcagttcacatccaaaaagcacgttgattacgagttgttttcattttctctgaattttccttttcctttttatgtattatttatttatttattttacaacgagcattattactctgaccagaaaacaaaatcacagcagtggaaagatgtttcggcaccagacccaaattcatttcttgccctccacgtgtgtccatacgcccttaccaggtagcactctcaccgcagaagccttcaagtattttcctaaacatggctgggacctgaagacatttctagggtttgtcttttttttttttctcgtccgctcccaatagaacaagttagtaaaagaccacgtctagccattgccttatctaatgtaattatgggaaaaacaaaaatgtggtaaaggtaatgtaaggatggaaaaaagcaaaaatgtaatggtgagaggaaatgctggaatataaagtctagtgtgtgggactccacagttttgcagctgaggtcggagacgtgctttcaggttcctacacatcaccctgtgtttggccatgggtaaattggtactggaggag

SEQ ID NO: 1562719 - DNA, 4001 bp, Homo sapiens
accagattacttatgtgactctctgaaggcccccccagccaggcctaatgtgtttactttgtgtcaacagaaaccacaactgtaattctaatacagtacagcacatggtagttactggtgaacaaggtttgaacaaagttgactgaaaaaaggcacgtccagccacgcaaaaatgtcaacgcacacgttttgccttttcaggcttttgcagagcagaagagggtggatagggcacctaggaaaccacttcccaccgggaggttagctgtggtatttcagtcctctcttctaccggcactctttggtatccactctttggtatcccggcacgaacagccaacacttacctgtttattgaccacagatggggagaattcttaaactgtccttaagttgctggattctggactccaaaaactctggagtgcccagaacttttcctgtcttccttctcatcttctcccactgtctctaaggcctggaaccaggtggcctgagaatacccccggggcaaaaatgctccaccctgccaattttcgcgggttagtgtacccacagattgcgaactgcaggtgatggctaggcgacactcttaaacgctccttccatcaaggaccactctactcccattttggagttcccaaccggggcttgcttgcaagtgcctttaagattgcttctactggccttttttcccctctcctctgtcgacctacgaaatcaacaggcctgccggcctaacgcaggcgaataaacgtgcgaggccactgctgaaacataattcaaatgaaggctcggccttttgttcctcctaggtcagagagaccagaaatatctttctggtagcgtttctcgtctctcgacccaggctggccttattatacaacggatgtccctcggcgtttgcagaaaaagggccctgggaagccacttaattggttttgggggaggggaggacgtggattaataacgataaaaatggagaagcccaagaaagcggcaaactgggggccctggaggagggaagcacattctgtctaaagcccaggcgagcagaagttcggcttggggctggaagccacagagggggcagctcggcagcgccagacgccccagccgactgggtcttaaggatgacggggctcccgctcataggccggcacccctcggcccacaaatccacggtatctttatttgctttttcccctggtttctcaggaaaccctgaaaacggggagggaggcctcacagggacagcagcctgcgggccccccggcggtttcatagtgaccggcttgaggcctggccaaatcctccccttcacgcagggcctcgaaggccgcaggccccgcccacgtggcgggaggcccggagctcagggcgcgaggaccgccacacaatggaggccaaggcgggccccgcgcgcccccgccgcagcaagccccccgcgcgccacgggcgccggaagattccagaaccggcccgcccggttgggggaggggagaggaatgcggatccccgagctcgtcgggccgcggcgggtgcctcaaccccctctcggcaactccactcagtcttcccagccaagcccagagacgaacgacccccagtttgggcgttccggctaccgccggcgcgaccgcagttccaccatactcacccgtggacgccattttctctccttcctcctcgttctctcaacgtccgtctccctctcgctttccctctaggcgccgcactgcgcaggcgcaaatctcgcaaccccgggcgcgaccatcgggccaggccacgggggtggggtcaggagggatgaaccaccgcttactcgttcttcgcgtccgcaactcttgtcccagtcctctctaaagagcgcccgacgtgacactcgggccaaaatagcatctaaggggccagagcgggggtgagcgggtctcagcgtgaaaccggagaggctctcagcacgagactaggctgtttggaatggttccgtccgctggctctagggacggtcgctgaagagtcggccctgcagggagacggagatcggcgggagggctgggggaagggacccggactagaacaactgctgactaatccgcgggccgcggggaatgggtggcgcgccagccggtcggcaggggtcacgcggccgggtgtgcgcggaatggattcagggttctcgggtcgcgcccgggagctagagtcctgactcccagccggggtccccgaccggcctttcggggttgccgggcgcgctctgcagtgagtacccgggacgcgtggcccgggccagcggggaagggtccccaaggccggtcggctgggtgggaggcctcgaacgccgtgcctggccccgagaccctatccccggtaacggtcgaggtggagcaggccctttaatcatccctcatccgatatccttgtttctacagaaggggaaactgaggcccaaggaaattgagtatctctgcaaagtcaccagctgagttcgaaccagacagatcctgggaccccctactctatccgccaccggaagaatctccgtccttgtctttccattctgccctcccggcttcccagtaaggtaggcagggcctggtggtgcactgccccgtttcatagattgaagaaagtgaggtccagggggctcaagtcccagttccgagtgtccacgggtaagcccttcacccttgctaaggtgcccagagctggggaatggttgtgaggtgtcgatgcaggaggaggtttacggtgggtgccttggccccaaaccctgcctccaggcaaggctgaccctgcccaccttcctggacctctagccccagccccctaggtggatgcccgggtccgcgaagggcagggttcaccttcaaatccctcggcaggaccaggagccaagctagtgtccttttttcagtgaacatatataaagcactggctgtgtgctgtgaataccctggggaatgtggggttggatcagaggagccatgagctcagaccacctgcctagggagacagactggccaagctgtgctcctaaggataagatccatgatgttagggggccagaggaggggaagggatatttgagctgggcttccaagggtgaaataggagtttgcctgctggcaaaatggagggaaggacaatgcaggcagaggagctttccacatttttcctgcaggaaactggtagatgtggagaaggcgcttggcaggggagcaaattaggcagccttcttgtctctctgggatcctgcttcctgccctgaatcagctcagtgggagtcctgggaccgagaggcctgaccaggggtgaagacctacaggccctggaggacaggctggatgcaagagaacagcacgggggagaaggccttgctttggtgggcagggaaaggccatgtttgagggccaaagctgggaccagctaggctggagcagccacctccatattgaggccttctcgatgggccagttggtggctacagacgcctgccatgattagtgcggattgctatggtttatggaggaagagttgtgggccagggcctgccttagcctattcctttttatttcatcatactctgaggaaaagaatttatgaatttccattttacagatgagaaaggagaggctcatctgtaaaatgaggctcatctgtaaaaagatgaggttggaaacttgcctcaggacacagagcagaaagaggtggagcgcatactgtacccttcctgtggaaaggggagccagggccagaggggctgtgccagtaaggaagcaggaggaggcttacagtggatgggttcaccctcaaaggggatgtctcagtcgcaggtctctgagtatggctcaagatgtgggacttctgcccatctgccctaccccttaccctgtcggcttgcccattgtctggccccaccccagggtcaagggcaactgaaaccatctggagcattaaggctgggaacaggggaggggaggaaggagggaggtagtagt

SEQ ID NO: 1562720 - DNA, 4001 bp, Homo sapiens
gaactatagggtgtccagtgtacagcattttatggctacttggtgtcactctagagccacatagcaagtggcttcaagaggtaattcttgatccttttgtagttcatgagcgtgatgattgggtgttcacatgcatgtgtgagctgtgccaccctcgaaccttgttaccatgtaggcacattaccgatctgacatgaagaaaagaaaagaaaaaaaaagaaaaagagataattctttagctcaagggaggagtaagacttgacagctgttgcgtttcagtatgtctgggcctgattatttaaaggggctccaattcctcagataaaacattatttttctgtctcaatctgcagccttcagggccagatggggagctactctgtacacaagagtgtggcacaaacccagggtacagctgagaagagctaaccacagccattgaatgtgggtgcccccagcatcatgaacggcacttagtccagctgtccttactcatggaaaaccaaggcccagcgcagtgaggggaacttgcccaaggttacatggccaatgagacgcagagcttcgtctcccaaatccctcacactgtacccacttaccagcagggctcactgggggagggcagggacctcttgtctggccacacagctcagcccttcgaccacctggttcccagggaacctgcaaaacaattctcaagcccagtcagcttatcccaaagaatgagaactcctactccaccttcgaggcctaatgaaaccacagcctccaccgggaagccttccctgacccctgagaatccccccacccatccacccagccaggaacccctgagcagcttaaggggatgggtccccttgtcttgacctttactcttcagaccccagctccctgcctgagtccaggtcagagctacacatgccctcatggttcctagcttttcccttctagcacttcctggctttaactgaagtcacctaatctgggaggccttccatgatcaccatatcatctaaggtggccctgaccaccaaggtggcctgacctaaggtcacctgaccagtagacccccccatttctggtttgtttccttcatcccacgacgatgtcatatgtgtttacagcactgttcccagccccagaatgtctagggtggggctcagctaagttcccaggagaaccccaatacccagcaccgtgcagggctcagagaggccctcaggagggatctgttgaattaatggggatacatcagtggacaaatcgaagtctcccgccctcctggagcctacattcccacagggggaaacacactgtaggcaaacaaaataaatactaataaattaatgaaagaataattagtgaaataagagataacataaggaccggtaatgctaagggttatggagaaaaacaagccaggcccctggatggggagagacgccattccagtagggggggcccaggaagggggaagagatcacagatgtttgccagaggagtggcctcactgggggtcctgggcccagcactggggcacagggagggggtgggcagcccgtggggccatgacccctcccctcccccgcgtctggggaagggcgctccctcctctccaccagtaggggggccaggccaccgcacaccgggcctcccgcccgccccaccgtcttcctggattcttttgttggaggagaggcgggctgggggtgcgggaccgccgggccagtggccactgcggggagccccaacccggttgtcgccctaaacagaggtcacctcggtcagggtctccctggctgccgccttggtttccccgtcctcgcgtcggggctgttcgccgccacttccccgcggccacaccttccctggggccacctcctcccggagcccgccgggcccactctcacctcccgccgccgatcgcaccgaagcccaagagggcgatcccagctcgagatcccgcgcctccgcctgggctgcaacgtggccgcgggagccgggagaccccgcccgggaggctggagttaacgcccctccccgcccagtattcgccaggcccgggatctccgaggccgcctcgaggtctgccagggcgggaaactgaggcccgagagggcggtgaactgcccgagccacagcactggtcggtgcgggcggcctcgaacccagaggcccccctcggacggtccgcgggcctcggacccagcccaccgtccggaaaactctgtccatctcttcctctctggtccccctctccctgctcggcccactttcccggcagagccaaaccagggatgtctctgggtacctccctagggtgggctcctacacagcccgcgagggccagccaagctttgttggccacccaccgggccaccggggtcggctgatttctgcctctggaaattacccatttctgcttccctggcctgaaacccaccggcagcccccaggctctgcactagtgggtggaggaggaggcctgcggtgaaggtcgcaggaatgcacaaccaaacccaagagactggaacttctggaaggccctggaagccggaggtgtcctcaaacatctgcccatgaacctggctcccgcctcagagcctttgcccttgcagttcctgcagcctagaatggccttccttcccacccccaaccgcagctccactcctcaggacgcctctggacacagatttgagtctctgctcagtggtctcctctgggaccattgtaaagcaacctgccctgcagtctctgtcccatccctggggtgttatttccatcagagcactcactgctagagtaaactttcctatgctcatgcttttattttcttgtttattgcctgtctcccctactaaattttattcagttaatactgtacaccataataaatgtgttagaagataataagtggcatggaaaaacagaggagggtaagggagatgggaaattgtgggagtagggaggttgcaattgcaaatagagtggtcagggtaggcctcactgagaaagtaacattggacaaatacttgaaggaaatgagggagccagccatgccaattccaggcagagggaacagtcagcgcagtggccctcaggcctgttgtgcttgaggacctgcaagaaggccagtgaggctgggaggcctggggaggggcagacagtaggaggtgggggtagaaggggtgggatggggctctgtaaatctgggagggctgttactctagacagggctgtgaggagggacctgagcgatttcaaggcatactctggcttctgtggtgagaatcaatgtcagtggaggctggagaccagtgaggagcctgctgccactatccaggcgagatgtcacaaacgcggcaagagcggggagggagaggcagccagaattagaatggctgttgaaggtagagaacacaggatttgctgaggagttggatgtggggagtgagggaaagagcaggcaggactgcacagttttggcttgagcacctaggagagttgtcattatctgagatgtggaaagtggccggtgcttggtctgggttatgtttgagacacccagtggccatctgagtgaaggtgctgttggggctcagaaagcgatgcctaaaaatatggcacttgggcatgctgagtactttgaaccaaaggacactggaagagcctcagaagcaaagtatctctctgaccttctcctgccccccttctttctcctgtttttctcctgcaaggcaggccatagaaactaaaaatcctcctccctaaggtgagttatagcaactacaaatattggctgggcacagtggctcatgcctgtaatcccagcactttgggaggctgaggtgggcggatcacgaggtcaagagatcaagaccatcctggccaacatggtgaaaccccatctctactaaaaatacaaaaattagctgggcatggtggcgtgcgcctgtagtcccaactacttgggaggctgaggcaggagaatcgcttgaacc

SEQ ID NO: 1562721 - DNA, 4001 bp, Homo sapiens
ggcaaacttctcctctagctcaaccttcaagaatcagctcacctgctgcttagcatctcctccccacgactcctaagacgccctccttaacacccaccccttcccagaatcccatgcccacccagatgggttccctgccagcgacgacacagcttcctccagataaaaacgacctacttgtcttatgccccaggtccctaggccctgacagcagggaccgtctcatctctatttccagtgtcaattcctggagcctatcaggcattcaaaaacaaaatgttagttccttgaatgaaaaaattaaggaggagacaacctaaaagcgtccccatgtgccctaactcgctccctccccggttcggccgccctcggccacctcaggtctcctgctctatagactgtcctgtggggccacctgagtctcagcagaacattaaaacttaaacccggccctgcacctgcaggcgcggggaccacagcttaggaggtggtcgtcgggcgcgctgttaccgtcttaagttatcaccagacctgggaacacttccacccacgccccgcaggtccagggacctcaagttggagaaacctagccctgagatcaggtcggagagggagcctcagggtgggcggcacggggacccggggtctcgcggggctaaggacactgggaaccacggctccccacaggaagatgccccgggcctgggggcttctgaggaggttgctggaagcaagtcccaagggaacctcgagagtttccggaaccaacagttctcagggcccactagcggccggggtcctcagggggtctcggagtccagagaaaatcttggagtttcggggttcgcgggcctggaggggcagggcggatcctgagggggtctcgggggcaggggctccaggggaagagctgagagggagtcctggggtggccccggggccggggcggatcctgaggatctcggggtccccaggggctccggatgcagggaccgcgggcccgccccgccccctcacctgcggcgcctccgagacgctggtcccagctcgcgctgccacctcttcgcctccgcagccggctacgcctccggggtctctcggcggccgcgcacccctgacgctgggcggggcaaggggatggttctcggggaggggactgcgcaggcacgcgggctagaagcgagagcgagagccggagtcggagccagagcggacgccacgccgcctccaggcgcccctccgcgttagccggcagcggcgccgccgcaaacccttcccccgcgcgcccgccccagccgcgtgaacgttccgtcccgaaaccaacggccccgcggtccccggaggccccgccccggggaagggcgaagccaggacgcgcgccccgccccgccccgccgccagatcctctggcaccgcccacctcggtgaccacggtcccgcccaccggggaggccacgcccccggggtctccagcgcaggcgcggtcggatgtgcgggggagggcttgcgctggggagcgcttgggcctagagtccgcgtcctagccctacctggcccggcgagccgcgcgtcccgtttcctcatttgcagaaagggggcgggagcactttgcagggacgtggcgagcatcaagtgcgatcggaagcgctcctttgcaactgcatcctgcaccacacttaggcacagcttctgtccccaacccagacctgaggctggtctccgtcccccagcagactcctgcccgcttaaattggccagtcaccagccctaccttctttctttttcagagtacttgtcactctccgaaattaggtacgcttgtgactggctcccacttcccctgagagccggtaccttgtccgtcttgtccactgggggttcccagaagccagcacggcgctgggcacaccatggccgcccacatgtttgtgcgtgcgtgagtgtcttccccgcgctcttccctcatcaagaaatactcttccccgaggctgagaatttctcctaaaaatacaagaaatactcttccccagcttaggttcgatccggcgaggccccctgactcctcgcgcatccctgtcgcaggtgccgcgtccgtaaagggtgtgatcctagcacctaccttgtgggtattgcgaggactgagattgtgcgtgggtgggctgggcacgggccccctagcgatcttattactcctcctttgtctgccactgaagtcttttacctaaacaagacccaatccacttcctcttcccagcctgccctgcccaacctggagtcatttattacttcctgtctccttggcacctttttttcctgcctgattttaaagttggctgttaatatctccccctaccctagcccaccagaaagctctcattttgtgacagaaggtagtgttgtgttagcggcctgtgaaattttagggggggccagagcccagaaaacagtgggagcagtgactctgggatgaagagggcagcccctgggtgctctgtatgtggggtcaggcactccctgagcactttgcatgcgttccttcatggtgttcttggaacaaccctatgaggaaggcgtcttcattgttattccagtttaacaaggggaagctcaggcccaagaggttgtgtagttccatgcctcagcccacacatgtaaccaccactgcatacagctccccaacccctggaggtgcgacttaaatgcaaaaaaaggccggtggctcacgcctgtaatctcagcactttgggaggctgaggcaggtggatcacctgaagtcagcagttccagaccagcctgggcaacctggcaaaacctcatctctactgaaaatacaaaaattagccgggcgtggtggcggacacctgtaatcccagctactcgggaggctgaggcaggagaatcacttgaacccgggtggcagaggcagcagtgagctgagatcatgccacttcactccagcccgggcaacagagcgagactctgtctcaaaaaaaattttttttaatgcaaaagatatataattcagttcatgaacacctgctcctgtactgggtgctgaagcccgagacctgtgggagatgtggccccttccctcatggagctcccaggccccagcaaggattttgattaacaggaccttatgggctgggtgctgccgaggtcagtcagacccaagactctgcgcagggcatcctctgaggggtggtgggaccaaagcaatcgtaacctccagccacattcagcaccatctgagataggctgggagcctcagcccctccacccaaaaactcagccagtcagccttacaagagcaaggacagcaggaaggatgcctcaggaacaagggctccccttttccccacatctgagagaaacacagctttttctcaggttgtggaaaattactgagagacactgccccctgggcaccttgaccattctgagtagataagggggcagatatggcaggttggcaagaggtcagcgtggtgctgatgtgtgggtgtgacacatcactgggcactgtggggtgtccgtgtctgtcccagcctccacgcagccgacgtgagcacagctcacactaatgaagatgtatgtgcacagcaagccttgtcgtcaggagcccagcgaccagacctagtccatatctttcctttttaaaagttttcaaattaaaatatattttttaaatttttaattatttttcatggagacagagtctcaccatgtctccaccagtccaggctggtcttgaactcctgggctcaagtgatcctcccacctcagcctcccaaagtgctgggattacaggcatgagccaccgcatccagcccagactcaatctatttgtgtattgagggtatcttgaggggcgttggtgcatttggaatgtacatacctgtgtgtgggcatatacactactgtgaattgagcacctactgtgtgtcaggcgctattctaagctcttcataggcatacctttcctcactgtcgctgccacc

SEQ ID NO: 1562722 - DNA, 4001 bp, Homo sapiens
gtaataggacaaaaacctcacttaaagttcagaccccaggctcagacaggaaagagcgggaaccagtcttctgggcctgggctttcagaagcttagccccgttccagaaagccacagtcccccactaccaccgccttggtccaggtcacccccatctctcatagggtcttgcttcctccaaaaaagtctccccaccacagccacatggatggttcaaaaacacaccaactcccgcccctctcctcccaaagcccttcaatggccacccactccctttaagtaccaaaccctccactcagcttaaactgggcatgctttggtcctgactggctctcagaatcacaccctctttcttgtcactcccacctcaaacccagtactctgcaaaagtcccagcttctcccataccaggtctctagcgagacacttccctcacttctccccctgaccacctcccaccttccttcagctcagctggatcatttctcaggacaatggcaggtgcagtcgttcaagaaagggccaagggcacggtgggcctccgggagcaaagctgggttctccgcagttagcattcactcccacgccaccttcattaggtgtgctccagccacacctcccgccttccaacactgtgtgccgtggcagcctctctgccttttgacatactggctgtcccctgaaactctgcctggaatgaccctggcaaacttctcctctagctcaaccttcaagaatcagctcacctgctgcttagcatctcctccccacgactcctaagacgccctccttaacacccaccccttcccagaatcccatgcccacccagatgggttccctgccagcgacgacacagcttcctccagataaaaacgacctacttgtcttatgccccaggtccctaggccctgacagcagggaccgtctcatctctatttccagtgtcaattcctggagcctatcaggcattcaaaaacaaaatgttagttccttgaatgaaaaaattaaggaggagacaacctaaaagcgtccccatgtgccctaactcgctccctccccggttcggccgccctcggccacctcaggtctcctgctctatagactgtcctgtggggccacctgagtctcagcagaacattaaaacttaaacccggccctgcacctgcaggcgcggggaccacagcttaggaggtggtcgtcgggcgcgctgttaccgtcttaagttatcaccagacctgggaacacttccacccacgccccgcaggtccagggacctcaagttggagaaacctagccctgagatcaggtcggagagggagcctcagggtgggcggcacggggacccggggtctcgcggggctaaggacactgggaaccacggctccccacaggaagatgccccgggcctgggggcttctgaggaggttgctggaagcaagtcccaagggaacctcgagagtttccggaaccaacagttctcagggcccactagcggccggggtcctcagggggtctcggagtccagagaaaatcttggagtttcggggttcgcgggcctggaggggcagggcggatcctgagggggtctcgggggcaggggctccaggggaagagctgagagggagtcctggggtggccccggggccggggcggatcctgaggatctcggggtccccaggggctccggatgcagggaccgcgggcccgccccgccccctcacctgcggcgcctccgagacgctggtcccagctcgcgctgccacctcttcgcctccgcagccggctacgcctccggggtctctcggcggccgcgcacccctgacgctgggcggggcaaggggatggttctcggggaggggactgcgcaggcacgcgggctagaagcgagagcgagagccggagtcggagccagagcggacgccacgccgcctccaggcgcccctccgcgttagccggcagcggcgccgccgcaaacccttcccccgcgcgcccgccccagccgcgtgaacgttccgtcccgaaaccaacggccccgcggtccccggaggccccgccccggggaagggcgaagccaggacgcgcgccccgccccgccccgccgccagatcctctggcaccgcccacctcggtgaccacggtcccgcccaccggggaggccacgcccccggggtctccagcgcaggcgcggtcggatgtgcgggggagggcttgcgctggggagcgcttgggcctagagtccgcgtcctagccctacctggcccggcgagccgcgcgtcccgtttcctcatttgcagaaagggggcgggagcactttgcagggacgtggcgagcatcaagtgcgatcggaagcgctcctttgcaactgcatcctgcaccacacttaggcacagcttctgtccccaacccagacctgaggctggtctccgtcccccagcagactcctgcccgcttaaattggccagtcaccagccctaccttctttctttttcagagtacttgtcactctccgaaattaggtacgcttgtgactggctcccacttcccctgagagccggtaccttgtccgtcttgtccactgggggttcccagaagccagcacggcgctgggcacaccatggccgcccacatgtttgtgcgtgcgtgagtgtcttccccgcgctcttccctcatcaagaaatactcttccccgaggctgagaatttctcctaaaaatacaagaaatactcttccccagcttaggttcgatccggcgaggccccctgactcctcgcgcatccctgtcgcaggtgccgcgtccgtaaagggtgtgatcctagcacctaccttgtgggtattgcgaggactgagattgtgcgtgggtgggctgggcacgggccccctagcgatcttattactcctcctttgtctgccactgaagtcttttacctaaacaagacccaatccacttcctcttcccagcctgccctgcccaacctggagtcatttattacttcctgtctccttggcacctttttttcctgcctgattttaaagttggctgttaatatctccccctaccctagcccaccagaaagctctcattttgtgacagaaggtagtgttgtgttagcggcctgtgaaattttagggggggccagagcccagaaaacagtgggagcagtgactctgggatgaagagggcagcccctgggtgctctgtatgtggggtcaggcactccctgagcactttgcatgcgttccttcatggtgttcttggaacaaccctatgaggaaggcgtcttcattgttattccagtttaacaaggggaagctcaggcccaagaggttgtgtagttccatgcctcagcccacacatgtaaccaccactgcatacagctccccaacccctggaggtgcgacttaaatgcaaaaaaaggccggtggctcacgcctgtaatctcagcactttgggaggctgaggcaggtggatcacctgaagtcagcagttccagaccagcctgggcaacctggcaaaacctcatctctactgaaaatacaaaaattagccgggcgtggtggcggacacctgtaatcccagctactcgggaggctgaggcaggagaatcacttgaacccgggtggcagaggcagcagtgagctgagatcatgccacttcactccagcccgggcaacagagcgagactctgtctcaaaaaaaattttttttaatgcaaaagatatataattcagttcatgaacacctgctcctgtactgggtgctgaagcccgagacctgtgggagatgtggccccttccctcatggagctcccaggccccagcaaggattttgattaacaggaccttatgggctgggtgctgccgaggtcagtcagacccaagactctgcgcagggcatcctctgaggggtggtgggaccaaagcaatcgtaacctccagccacattcagcaccatctgagataggctgggagcctcagcccctccacccaaaaactcagccagt

SEQ ID NO: 1562723 - DNA, 4001 bp, Homo sapiens
cctgtagtgggctcagggcactacagcccctccccaaacactgctgaatgagccccctctccctctcctctcctctctctcctctcctctggggtgatgccaccaggaagtgcattcaaatgcctcctcttccgcacagagtttacctgccattaaccctttctacatctcctaggaagccttgcttggggatcttctagggaatccccccacatacccctgcaggccccgtgacggccgcggaaaactcgggggcaggcacaaatgtcgctcaaacccccagaccctgctccctgcaggcggccagccagtgagttcccaggggcgccggcgcacccacggtggcctcgtctgcctgggcagctcgggttgagacccccaggcttggcgacccctccccgctcggtgccacagcatttctagggaaatgcataaccgcgctgaagcaagtaggaaaattcctgctctggtccccgggtttcccttgcgatcctggcgagctgggctgtcccaggactccggaggccgatcccgcggctgcccgggtctccctgggccactgtgctctcattttggcgacagcggaaggatcagatcggactgggagcttggaggcccggggctctggaggaggtggtgtctgtggagggaggttcggtgctggccttttttttttttttttgtaaagaatccatatttttccatcacctcccgcgcccatggcaattctccatgacaggtgctccccagcacccgtcctattctcccgctgaagacaagaagcccggagctcccggagctgaagccgaccagcccgcgccatctggggccagagcctgtgcccgggacgctgagcggcccccacttaccccaccagccgcgaacgtgccccgggatgctgagcaccctccccagcgccgaggctggagtctgcacccgggactccaaccacccctcattccacccgcctggagcctcggcaggggcacaggccaccccccacccttcactccaggcaacagggagcccgcggcggtcaccccctaccccagccctcagctcacgcccgggcgcccactggcccgcaccaccccagcccgcgcccgcgccagtcccgccggtcaccagctcgggccccagacacgacccgagaaacgtccgcggccgcggcgagccccctccgggcatcccatccctcacttcgcttctctttccagaaggcgcctgacgagcccgtttcccgggaaagcggaagctccagctgctcctccgagcccaggctgggctcctgcctgaagagctcctctccgggctcggccgccgcctccccccttgtcccgggctgaggcacggggagggcgctccgcagacaccccggcagcgccgcccgccctccgcgacctgcggctgcctcctgagcgcgcatctcggccgggaagccgctggctgggctccgaccgccgggcagggacgggccgcgccacccggggcctggagcccgggccctgccggggagtcagggaagggaggctcgggccggggcgtccgaccccgaagtgctcgagcgcccggaacccgggtggaccctctcgcccgcccagcgcagcgttggaccggccgggactcgggggaccatgcgcccggcgctcgtaactccgcgccgactccgggaggcccgcggggcgcctgccggggccggaggagggggtccggggcccagagggccgtgccggggccggggccgcgcggtactcactgcagtaggcgatgagcaggctggccaggatcatgaacgcccagaaagttgaggacatgctgggcagggcggtcgcatcttgccggctgccggtcctgggcgatggcgccattgaagccgcggcgcccgcgcggggggcagcagcgcgtctcagcagccggccctgcccgcgcccccgcgccggcctccacgtgcgggccccgcgcgcgccatcctccgccgccgccgccgccgcgcccgggccccggcccaccgcgccccgcgccgcgcccgcgccgcccgcgctcgcgcccgcgcccgccgaccccgcgccggcccgccagggggacgccggccccgctctgggcgtcactgcgcgccccggctacgcgcgccccggcatccgcgagagaggcgcgcgcccgccaccgctgggggctccagccgcccgccgacccgggcctggcagaggggacgcggcgcccaagccgctcctccggatggcgacagagacggcctgacgcgcccgcagcctgggccccccacggggaggacggccgggccaggtgaagttcgcgcacttgggccttccgcgcccccatccaccgcagccagggcctggaaggctggggagggggcgggggcggcagacgcctcctaaggtgggttctgggacttggatccggagtttattccaaggagagggtgctctgggcctgttccctaggtgtgccctgttacccaaaatcgggcttgtgcagtggggtccctgagtccactgggagcacagcctcagaccccagcagagtcacccttcatcggaagcccaccaccctgagggctcctcctccacctggggcggcactgccaggcacaggcacgcactttccctcagtcctctgccccacgatcactctactcgggcacctctgccactgcctggtccttgctgagccatctcctggttcatctccctggagtccctgcaggaccggctctcagtggcgtctccgggctcccagtcccaggactggtcctatccaggtgggttttctgagcaggatgacaatgatcgcaatctattttacctgcatagtcaacgatcatctgcaagacaggttcactcctataacaagcaaaggatggggggaaaatgagccttgtaaggacacaaggacactttccccatctccaaccctcctagtcatgtcccctctgcacctccctctacagcccaggagatacgctccccagtccaggatgtccagatggccctgctgcctggagaggctctggcccctgccggtagctgccacagcaccaccccaagctctgccttcctgcaggttcgtgcacacgactaatagaacccctcctctggaactcacaagatattctccatcctgcatagggctgggggcttgagcaccccaggagattcttttggcgctggagacccttttctgaggagccagtagagggcctgcaagtcagattgagcaaccagggagaagaagcatcatcccttcatcttgaggcctggtccagggaggtgaagggatgtggactgtccccagccgtacactcacccacaactcatgcatgcaagcattcatgccccaatgcacacacagcaccacacacacacatattttccttgaatctctctctctctctctcacacacacacacacacacacacacacacacactctcccatccacacacacacaacactttaggagaaactgagcaaagaaaggcagcctctcactgcgagtcctctaacccccgtcccagtggttgttgtgcactgaagcttccttgccaggggctctgacgggattcttgtgttaatatgattgtgtccatgcttgttttctcccatcaattttgaatcctgtttaattaaaacgctgactttcctgtttagtatcttctcaactgcagcttctccccgctctctttcctggcagggaggtgattctgcagaagttggggctcctgacaactttggggtggccatgagggacgtacctcttgcctctggatgtgcagggtgggcctgggaccctggcagggaggggctccctcaatgggattctgtggagtcagccattgatgcccaggtctccacccttacaatttcattcctttcattgaagccttttttcctgctaaaaaggatgtggcttttaaaatgttacagattccaattcatcctgtccatcccgaactcctgtgccagacattccttcattcaacc

SEQ ID NO: 1562724 - DNA, 4001 bp, Homo sapiens
tcacaggccggccacatggccaggagcttctcccgttactaactcacagcttcaaagtcagtggaacttcacttcatcacagagtgtcaggatgcagctgggcacctggacctcagagaaacactgaaattttcacatacacgccctttccgcaagccaatcccccagagacttcgagatcagccagagaggcagagaacttgcagcgcgaacacaaacaggcccagcagagcagggacccctttgccaggtacctggaatgcaccaggggtggctcccacagtcctgacacgcgacaccagcagaggacagccctcgcgggcttgcctggacccaatgactcctcagcaggaaggatggcctccccagccccaagtgctactgccctatggcagaaccacccactcctgaagtgggtcagcaaggcagcaggaagaagttgggcctcccacctggggaagggtccccgcaagcccgggctggcaggccaagcccgcagcagagtcctggggtagcctactctcccttcagacctggccctcctctgtactaggtgcccacatccaaaagcaagggagggaagtggacaccaggcccgtggaggtcacagggtctcgggccgggctcctgcacctacctgcttccccaggcctccggcggctcattaattagtcaggaaagcagctgaatgttgcaagcccttcctctgcaggaacccagaactaatgagaacccagcgccttaccagccacacaggcgccctccggtgctcagccttcccagcggaccaaggggagcaccaggcggagctggcccagcctgtgtgccagagcactagtaaccatgagcaggggtgcccggggggaggccaacgcctcagttgcccccagtctgatatgacaggccaggctgatcccggggtgcaccgggagccctgcaaagggagcctggccctgaaaccaggaagtttccaggagtgtgtctggggtgcctggagccgaccgaccgcccatcaggggaggtgtggccctgcccccaacccccagtaagatgcttcccagtacaaagggcctctccagccacgagggtccaaccgttatcctgggcgcctcaatagtcccagactgccctgcagtccagcaaagaccaagagagcaggggcagaacttggcgcggggacctgcgcaccccggtgaccaagcccctgcttcccaaacctatgggtctctggaaggcggcttgggccctggggaacaggtgcgcaggccggtttcccgacgtccgcgggtcccagcccggcgcccaccctggcgggtcccagctccgctcccgccccagcccggccggccaccgtggagcgctggtgccatctaccgagggcccggcggcgtgcgggcgggcgccgctgccaccgagcccagtggggcaggggatgggaacggcagcctcggcttgggctggggatccggggcggcgccagaggcaccgagaacgcagcgcgccccgaccccgcgccctgccggtgagccccgatgggcgcggggcagcgagatccgcggggggtcgggctcctggtagggtcgcgccgccggccgctccgggcccgcagtggcgctccacgagcctcagccgagcgcggcggcagcggaacgtgctggaagccgggtcgggcgccggagccgccgcgagccgggcagagcgcggaggaccggtccgcgcgcccggggacaattaccttctttgaggaactgcgcgtggatcactaggacgaggaagcagcagagcgcggcccctgccagtgcccagagcgccttcaggagctgcatcgcggagtcccaactcggccgacgcccccgaagtcgcgcagcgaaggtccaggcgccgcatcagcgccccgccgggtgcagcctccgcggccgcccgctcgcgccctccatccgccgccaacgccgcgctccgccgcgactggaggcgccactccgggaggcgatttgtgtctttctgggcaggggggaggggagcgggcggggggaggggggcgccgcggagggggcgggcgggggcggggaggttagcagaaagtctcgggccgcggcggccgccgctccgaccactcggccaccatcgctggctgcggggcgccggggggcggccgccgcggccccatgaatcagccccgccgccgcccccggagccgcaccgccagcagggcccggacggcgggccgcggattgcgcaacggccgggcggcgcggggggggggggggtccggcgcggccccggccccctcctccgcctgtcggcccccaccgcccgctgctcggcgtcgccttcctcctcctcctcttcctccgccgccgccgcctcctccgccgcccgcgctcgctccggcccggggctcagggggccgccgcgccgccgccgccaccgccgccgcggcgggccaggctcggggccggggctgcgcgccgggcgcggggctgccgcaccatcgccgccgccggggtccgcgcggcccggccgagcccgcggcgatcgaacttgcgcggcccggggctggcgggccggtccccaccggacggtgccggcctctgcgctcccagcagcccgcgcctccgccgccgcggccgggactaggtccgggcccaccgcgcccctgggctgcccacgctgggccgccgctgccggtgtcggtgccggtgccggtggctgccgcgcctacaggtggggccggcgacgctgcgcgcctcgccgcccgcgggacgccgctgctccggcctggaggcgcgcgcccgcccgctcggctcggcgccggctcctcgggggaggcggcgggagggggagcgcggcgcagtcgctgccggcccaggtggccgggcccgcgcagcctcggactccggcccgcgcccgccgccgtctgcgctcctcccggccgcggagccgcggatgcgcactgggccgcgagggaccccggggaccccgccctgcagcgcccccgcctggcgcgccggcgggtcaggtggggccggcccagccgaaaactgcgggtcgggctccacctaggtgcgcaggggcctcactgcagagccggccctgctggcgcgggagaccggacgcggggcctcgagtggcgcccagcctccctcgcacccaaggccccaggagagacagggaaaccccaggcccaggtaccgccccagccgggcccgaccagcggctgggagggctcggaggaggctggtcccgcggcttctgaaaacggcacatctgcctggaaacacacacaaacacactcacacctgcccctactgtgtaccaccctccagccagctgccctgcacccaagagcgtgggcgcactgttaatgcccacgttccgttccagaggaaacaaacggatgcctccctgcactgcctcccttcccgcctctaggaagaaagggtctttgttttaggccacttttgctccccaaccccgctccccagagcagggggcacaggtgtcctcgtcaggggttcgccccagagcccagtaccaagaccagtgtggtgggcctcaaggtatttttgcctgaattgaatttgaaattcaatttcaaatgaccagaaaagagcagtgggcaggaatcggggcctaagcttcctgggaccctgaacctctctcctgacctgtgcagggtgggggcagtgctggtgcccgcggtgcatgtggttcacatgaaggctgtctcctccttgcaccagtattgacgtgccaggaagggaaagaggcctggccctgaagggctcttggaggtcagatagatcaaggcaatcagtatgcatctggggaaactgaggcttatagaggcatggtgactggtctaacatcaactaaaaagtcaagggcagagtcaggaccagccactaagcttgatgctgtctgcctgacctggctcgcggtgcccagcagccggccaggggagaggccatccacgaagcagttcttcacctctggctcat

SEQ ID NO: 1562725 - DNA, 4001 bp, Homo sapiens
ctcaaaaaaataaacaaaaggctgggcgcggtggctcacgcctgtaatcccagcactttgggaggccgaggcaggcggatcatgaggtcaggagatcgagaccaccctggctaacatggtgaaaccccatctctactaaaaataccaaaaaaaaaaaaaaaaaaaaaaattagctgggcttggtggcgggcgcctgtaatcccagctattcgagaggctgaggcaggacaatggcatgaacccaggaggcggagcttgcagtgagctgagattgtaccactgcacactccagcctaggcgacagtgcgagactccatctaaaataaataaataaataaataaataaataccaaaaaaaaaattagcctggcatggtggcgggcgcctgtagtcccagctacttgggaggcggaggcaggagaatggcgtgaacccaggagtcggaggttgcagtgagccaagatcatgccactgcactccagcctgggcgacagagcgagactctgtctcgaaaaaaaaaaaaagtaaaatttttttaaagtaaagcaataaaagaatggctactccatagatagaacagccaagagtaaaattttaattttaattaattcaaattttggccaggcgcagtggcccgcacctgtaataccagcactttgggaggccgagtcaagcagatcacctgaggtcaggagttcgagaccagcctggccaacatggtgaaacgccatctctactaaaaatacaaaaaattagccgggcatggtggtgggtgcctgtaattccagctacttgggaggtgaacacagcagaatcgcttgaacccgggaggccgagatcatgccactgcaatcccagcctgggcaacagagtgagactctgtcttaaaaaaaaaaaaaattaaatttttaaatggaagcagtgcaaatttagaaatactgattatatcttgaaatagtaatgttttggacatatggagtttaaaacattactcaaattaatttcacttggctttcttttttactttttaaaaaatgtggctactagaaaattccaaatcacatatgtggcctgctttatgtttctattgcacaatgctaagccagattgtgaagattttagttctaggacatggaagtctcccctcttttaatgcagggtggtgtagttggaagagaactgcgcttggagtcaaagacccctgggtcctgcccctcactggatgccctgatacacccactaggcagccggtaaactccttgaacggcctaagtttctgcacttatcagacggaaccaataacacacgcttttaggactctaggagatctggagttgattctccagtagttctctgtcccttcctcacaatgcaacctttaagtagtccctgggcctcagcttcccttgcttgtagaagccgccataacggcacggggagggggcaggctgccagaggtgggtcatggtgcgtctgtccgtccgtcttacctgaaagcatcggcggaatttgacgaacccggggccggtcccgccacgggtccctcaggggaccccgcaaagttctgggtcggcccccgacagccggtgcccccaaactcacagcaaggggtgccctttgccttgtgctgggggatgaggaggggagttggggagaggcccattttgctactctgagtccaggcgttctctaggcaacgccggcgcggtctccactttcccgtttagcataacaatggaaccttcgtgagccgccgcgttgtccgcgagatgccgtttctatggtgacagccgggccgggggcccagaccaatgtgtcagtggagagggtgaatgcaggtcctggtcctagaggcatgaaaaggaccccagaagacactgcctttgtataatccgtttgctatcccgaggtgattcacggagtttctggggattggcgcaggctggcgctgggaacccccgcgccggttacccctttcctcggtggtagaggccgggcggggcagcgcatgcgcgtggcgggcaggcggcaggaggcgggtgggtcaaggtaactctgggctacagagtccttgctgggggttcggggagcgcttggaccccggcttctgggacgcgtcaggtacgtctccgagtccggcgtcgccggccagcgctgcctgggttcactcgggggcccgagctgagtaggacgtccgggcctcgcctggagagaggcttcaggagggcctggggaaggggacggaggccgggcgaccccgggcggtggccgccctcctctgtgtgtctccgcggttgtgaattggggcggtaattcctccccgtaggtcgccgtgaagatgattgcatgagatcgtgcgtgtgaacgtttgttgacagctgttacttgagtccgacagccctgggggccgtgcatctgcgtaacatggctacctctgaactccttgggggacacgtatatctttgagaatccgatgaaaaccagagattccgcccttgttttcttagaattaaagtaagataatatattttatggcctgttgcaaacggaaaacctttacacaatgattagtgattagtatcagtatctgtggactgggaaggctctacttactcgatcctcttcccagggtcgttgtgaggatcaagtgcacagcttcctataaacactaaaacactataacatcttgtgagccaggtactattattattcctcagtgcaaagaaagaagccgaagtccaagggggataaatgctggggtcccactgtgggtgagccgcagagtgatcattggaagccaggtgctcccccttcacttcctgtgtgcggagcacgctcgccctgggagtttcactagaaagaaggttgccatgggccagtgggacagcttgtatctcaagtgcacgcggatgccccagaatcccaggatctcagctgagctgtttgtggattattagatctgacttaaaaggtagctaatccagacccttcctcatctgtaatacatggatgacagctcccagctgtagtgttatgagaattagtgcggtcatgagtaaggtgcccagttaaagcccgagaagtaaagcagctgggccaaggtctagcaggcaactgaaggggagagccaggcccctaaacttgttgtgtccagcccatgtgctcaggcccagtgcagttagcatcagtggggacttgacttatttctccttcttcaaatgtctctagattttaggcatgctgggggctgcttcttaactgtgttttgtttattttgttcataagtaatacatgaatatattctcattgtaataattcattaaatctcgagtatatttaatataattttatattgtaccatatgaaattgtcacaatttgacctttttttaacctataaaatgacaagttcattcaagtcagtcatcctattccctttttcaggtttaaccactatgaacagtttggtgtatccttccagatctctttctttcttttctattttttttttctttgagatggggtcttgttctgtcacccaggctagaaagcagtggtgcaatttcagctcactgcaacctctgcctcctgggttcaagcaattatcctgcctcagcctcctgagtatctgggacaactggcgcacaccaccacacccgactaatttttgtatttttagtagaaacagggtttcaccatgttggccaggatagtctcgatctcttgacctcgtgatctgcccaactcggcctcccaaagtgctgggattacaggcataagccaccgtacctggcctctttcttttttttaatacacacatatattactttattttattttatttttttttgagatggagtctgactctgttgcccaggctggagtgcagtggtgcgatctcggctcactgcaagctctgcctcctgggttcacaccattgtcctgcctcagccttctgagtagctgggactacgaatagatgggactacaggctcctgccac

SEQ ID NO: 1562726 - DNA, 4001 bp, Homo sapiens
atgagacttgacccctaaccccagctgcagcctgtattgccgcctacatcctttttccctcttctgtgtccaatcttgcctttttcttctgcagaacacaatatacaaagaaaactcagtcagacagggaggaattatagagagggagggtagaaatgtgcgcagtggaaagttaacccttccttctggtagccaatgtagccaactatctagatcaccccaactacctaaatcaccccttccaggaagatgagcctgagcactggtctttctagctctattttccctcctcaggcctcttcagcctcgaggggaaccaggactccaacctcactcactgagtggaatttgagtggtgaacccaagccactcctgttgtattattctgaattgggcaccaaaagctgctgctgtttcttaacaaatctcagtgtagggcagccagagttagcaaataaaagtacaaaacgttcccattcaatttgaatttcagatacacaacgaagaatttttcagtatcagtacgtctcatgtcatgtttgggataagctgatactaaaaagttatgtgttgtttattgaaagttcaaatgtagtggggcatcctacatttgatctggaagctgcccaggactcccacccaaaggcataaagattaaagtcttccacctgttccacagtggactggcctcaccagccaccctggaaacagcccctccttccaactctcaagcaggacacatatgctaagtaggagccctttcctgagctgccgagtcaggtgacctgctgtgccaaggcgcccagcacagggccaggcacacagtaggtcctcaatataccccgtcccccattcattccaggcagctggggcctagtacccggcccaggagaggctgtgactgtgagggcgccagctcagctttgactatgggaggagaggggtggtccaaggagcagcatggcagaggtgggaccgggaaggtcaccgccacccactccctgaagttgttttgacgatcacatgagaaagcggctcgggatatgttctgggcagcacgtaggttatcatcaagacctttgagtggtgcattttaaccacagggcctcggcccccagtcttccctggggaggaaggctggacagggaagtttcagaagtacagagcagagccagtgcctctgaacgctggaataccgacggctgacatctgtccagcaccttgtaatttgccaaacacgttcccagccattcgctctacaggcctcactgcagccccaggaagtaggggcgggttggggcccattttccagagggtgctcagggcggcctgccccgggccctgcctgggaggtggggcccggtccaggggactggggccgaggtcccagcggtgtgggggcgaaggcgggggcctaccttctgggcctgttggatcatctgcctgaccacctgcttgaggtgcggcgccttctcgtccttgggcgggtgggtgaagagcgtgacccggctcacgccgcggtagaaaccagtgtccgtccagcccaggtccagaggaggcacctcggtgtcggaacggtcgggccagtaggccagggactcgccggactcagccggcgccggcgcgggggccttggccttggccttgctcttgccccgggcgttggcggcggggacggcgtcctcgtaggggctccaggcggcccgcagggcctggcgctccgggctggagaggaagtcccgcagctgctcctccttgagccgctcgcggtaggcctgctcgccgccgcccagcagcgcctccagcgcggcccgccgccgctcgcagtagtagaaggcggcctgcgcctcggtcaccttctcgttcacgtgcgcctcgtccaggcagttcagctgggactcggccatggcgccccggccccggccccggccctggccccggccccgccgcggtccgaggtcccacagccgcacctggagccgccgaggggcggggcgcctcacctggccgcgagctctgccccggcccgtcccgccccgccccgccgtcggggagcggccaatccgcgcgggcgtggccgtcgggcggggaggggccgccgcctccgccgggctcgccgggacctccgggcggcctggcggacgcggtcgggcccgggcctgcagggcccaccagccggggctagagtccctgaggggacgcccccagggggcggggccgtcgcagacccacgtgcgggctccggccccgactcctccgcggggtaaaggttcgctgtccggccctcgctgccatccgcccccgccggccgcgtcgcgggtacgagttcattttccgcgcacgtggagtccggagcacgtgttctggcccagtggcctctggggccgccgagctgaccccttccccgtcgagggtccggtgttggtgggggggcctgctgcaggacgggattgtgacggctgaggagcgggcagggggtgtgcaaaagcgaaatgctaatgagagctcgagctccccacccttgcgtcccagttctgagatcagagcccttctgggctgggagtccaacaccttcactgtaaaactttcttttaaaaaatagctatccaaacagaaatgatgtaaagagcagcagtggaattccccccgcccccaccttaatttgaagtagggtgtgtggtgtctctccgtgtgtgtttgggcaagataggctgccagagacatgattactatattagtgattcaaaatgtatgtttgagctcaaggaaggaaaccgcacgtgcgtgcacaccacacacacgcacacacacagcagcggtggcagcagctctgctgtttcccatcggattaaatacaatcgtcttagtcattaacatattatgttgttcatgcactgctctacaatttgattctccacattcaaaatattttcagatcataacaactaaaggttcacatttctctcactttatagcgcagcatctcagagctggaaggagcttttcaagctcctccaaccccctcattttacagttgaagaaattgaggcctagcaacgtgtgcgttgcccaggtctcccgtgaaagaggcagagcacggggactgcaaggttttctgtcttggaggtctttcgctgacatcacggccgcctttaccctttctccttttcttgtgaaacgacaggttattggggacctggttttcaccccaggggatttgaaaaggtcacttaccatttctaggccttcctttcatgctctggaaaaaatgagagttagattttcaaatgtctgcacattattgttattattatttttttttttacaataatcagttctggcatcctgtgtcagcccaaagattgggagtggtgagcagcaaggtgtccatcacctcacttgtcctttacccctcttgggaactggaaagcttcactcctggtaatgctccactcttaagtacatatagacagattgtgtccttagatgggagagcacttagtttattacgacttgacgccctacaagatgccagactcaatagtctggagacacacaggagctcagggcagtgggagagacagacaaacacagaagaggataggagtaatgagagtggtttctttgggctttttttgtttattttgttttgttttactttgttttgtttgagacggagtctcactctgtcgaccaggttacagtgccgtggtgcaatcttggctcactgcaacctctgccccctgggttcaagcgattctcctgcctcagcctccgagtagctggggttacaggcacctgccaccgtgcccggctaatttttgtatttttagtagagttagggtttcaccatttggccaggctggtcttgaactcttgaccttgtgatccactcaccttggcctcccaaagtgctgggattacaggcatggcccaatagtgttttaataaacacagtcagaaatgctttgggagcaaatgggctcaacaaacatttactc

SEQ ID NO: 1562727 - DNA, 4001 bp, Homo sapiens
cttttatcgaagtgtgcaattaggaggcttttttaaacccttccaattacaaacttctctgtggctcagcagtgagccacactgggcccgcaagtcctggggtgttcattcagtcacacacacatagggagaaattgttcgcaaaccgcagacagaaaagaacagtgagagggaacgcagagactccggggccagggagagttttaccacgccttctctcaggccctcagcttcctcatcgacacaatcggggcctctgaggctccttccttttctaacaggagtctcggatgtcccacccacccatcacccagggcccctcggggttttccctccagctggcagccacccggcctgctgcttgctggaatgccctcttcccgcgctccccttacatcaagctccatctcttctaaagagcctccagggagcccccaggggctgcgaaggctcctggtgccaacactgagctctgcgcctccccacaccatctccaaccccacgaggtgcccaggccgtgcccagcaccgcctgaacaatcagagctccacagggctctgctgcagccagccagtcaagaaagctctgtagagctcagctcccagcctcccctccccctccagcccccttcagcccccttcctggaatcccccagtgagcattagttgggacaagcgaccttttgactaacaaaggcggtcaccagaggttaaaaggaactcaactaaaccagggattaagactcggattctgagggtggtctagggcactcccctggacctgggccactggagaaacaaagacgccaggagtgccgggcctggctagtggctctgagaagccacgggtcagcagagaggtcacaggtcatagctctgccgcccagcagctgctctgatcagaggacctcgtggcagtccccccagggaccaggccttgagggttagaggggagaaaagcgcgggctgggtgggcactgtcccggagctgtcagtcccagagttggggcctaaggtctgggccatcgatcagatctgctcttggaaaactccatcccccttgccgttggtggaagtgaccagtccccagtccccgctgagcaccgagcccggcagaaccactgccttgggccctctgtcccgggagggaggcagggaggaggtggccaggtccgcatcccctccatcctcccagctacgccccaaaaacctccaggctgctccctggctttctcatttcttcctctccagcccctatcccaggaccgctagtgtctcctggggaaaagactgcttcccaccctccaggctcaagtttcacatccgcaagctgggtacaacagctcctacctgggggtggaggcgggaagcggtgaggaaagatagccgagggcgcttccagcgtcaagtgcaaggcgccctgggctcggtaacccccagccagcgtcccccagcccagctagcgcccctgaacccccagggcccgggatgcggcccccggagccggctggatttgctaggactggggtaggacggtgtgtttgaggggtgggggaatccggttttgaaacaagtccccaggccggggaggagatgaggaccggagctggccgtgggggaggggggcgtcgccgaggcctcggcgctgacagtccgggggcgccgcgcagggcaacgcacggactccgagtccccgtggttccgaaactcgcagggagcgcgaggccgagggggtcgggaccctaagctggggcggcggacccgggacgcccctacctccggccgccagcagcgcaaggccgccgagcagcagcagcggaagcgggacccggcgcgacggcgcggcgcgctccatgggcggcgggcgacgggcggtgggcggcggcggacaaaggcgcgggcgcggtcctggggcagcggcgcgggctccacgctccggccgagcctcggcagccaacgctgggccagggccgcgccgttcaattatcccgcccgggaggagggcgcggcggaggcggggccgcgggtctcctggtcctccctccccggcgccccctgccgggaccctccctccccggaccccggctgcgaggggcgcgcgcccacggctgggggcgagggcctggatcccagacttccccggagggggcacagagggggcgccttcgggccggatgcccccagtcctatcccccaacactccgtgaaacccgatcccctcctccccccaccccctctcgaggggagggctcgggatcaaaggttatccccgcccgactccgcgcggaggagcggggacccgggcctgcagtcggaggcccggctgctggggggcactggggcaggccttaccgccaaccccgcaccctcggccgggaggctgcaggtcggtggctaaccccaggcgtgtcccgggatgggacccgactctgccctcagagacagggacagtcgggccaggccaacaaacaaccaaaatcccaacgtgtgctgggctcacccgggacaccagggccggagggagagacccgggaagtcaccgaggctgcaggggaggcagctttggcgctgggcctgcgggagcctcttgtataggaattcatagctaccggggttactgaggatgagttaggctttggaaccacaagtagatttattttccaaagaagaagaataaaatggtgcaggtgaagatgcggaggaactggatgagacgcataggaacgccactgggcagctcaaagcggtgttcctgtgagttcaccatggaccccttgagccaccgacgccccgcccagccttacactcagcagaaacgcatacaacatgtgctccaaaagacagaaagacatgtagccgcacattcataattcctccaattgggaagcctagcgtcatcaaggcagatgaatatcgtggagtattcgggcttaggagcacgacaaacggaacaggagtgaatgatccgcaactcacataacgggtaaatctcacagacgtaagtcagagtaatagagtcagccacaaaggaacactcgctgcatgattccatttacataaaaggcaagaacaggccggtggcggtggctcacacctgtaatcccagcactttgggaggatgaagtgggcggattgcctgaggtcaggagttcgaaaccagcctggccaacatggtgaaaccctgtctctactaaaaataaaaataaaaataaattagccaggcatggtggtgcacacctgtagtcccagctactcgggaggctgaggcaggagaatcgcctgaacccgggagacggaggttgcagtgagccgagatctcaccactgcactccagcctgggcggcggagtgagactccgtctcaaaaaaaaaaaaaaaaaaaaaaaaaggcaagaacagttcagaggtcaggagagtggtgatcctggagtgggagcgtgctgggctttcgggggctggttaggttcagctttcttactctgggtattggttacaaggttgggctcagtttgtgagaatttattgagctgttcatttatggtacgtgcccttttctgaatacatgttgtttctttctgtttttttgagatggtgttttgcttttgttgcccaggctggagtgcagtggcgcaatctcagcccactgcaacctccacctcccgggttcaagcgattctcctgcctcagcctcctgagtagctgggactacaggcatgcaccaccacgcctggcaaattttgtatttttagtagagacggggtttctccgtgttggtcaggctggtcttgaactcccgacatcaggtgatccacccgccttgtcctcccaaagtgctgagattacaggcgtgagtcaccgtgcccggtcacatgttaaattttaaaatgaaaaacaaaaggacaagaactcatctccccacagggtgtcttataagtttgaagtttgcagagagcccaggaaagcttaccaaggggaccagcatgctcacgcctctgaggttaag

SEQ ID NO: 1562728 - DNA, 4001 bp, Homo sapiens
attttttcttactgattgaagtgtccttggtagagaaattaaaattactgaaatagaagctattcctgtttgctagaaaacaagtggccctgcttctcttttcaaaatgctttgataaacaaaacgttgaaaatctgccatttgcccacaaaaacaccaccccaactttggcagaaaaagcaaaaacacctcaaatgaactatgtgtttatgggtcatttgtcacagcaaaaggttgctttttaaaacagtatctagtacaaggtacgttcaagtatctgtttgcagaaaaggtcatggtccgcttaataaatataccagctcttcctcccactttagaaaaagggaaaagctatttctaaagtaatatatagttttccaggattctacctctgaaattggggcgttaagaggagtatttaattccaggaaatgaaattctagaaactccagccttcttagaagtatttcatggcagctctgcctatggagtagccattcttttattcctttactttcttaataaacttgctttcacttttctcttaaaaaacaaaaacaaaacaaataaaagcatttcatgacaatcctagctccacttgctcagtaaagatatttttaaaataatatcacatggacatattttaaaactgcacctttattagaaaatgagtatactttcagaaaaaatgagtttactttcacaagctgaagcttaaattctgtccaggtaaccagcctcaactgtaaaaagaaatctgaaagagaaaccaacgtgcccttttgggcagtcatattgagtttcacgtcctttcaagactgcctaatttaaaaataataaaatatatatatacttggtaatacctttaaaaaataagtttgaagatttattcaatcttctactcgtaacctactggtaacgatgccagtatgtaaaacacacaggtttaacaacaagaaataacagtaggcatgtcacttactataatgtttaaaaggagttatgtcagtatcttatttagggttttttttttaatcaggaagaaaacaggcttactttcaatctaataatgtcttaaccaggaaaatgaaagggcgagaagttcagaataacggcctcattttacccaattccctaaaaataaggtgaaaacgtaggaaggtttgcttttgttttgaagaattcacctaaaaatccccagggaacatctttttcatttttccttagcacactcaagtttcaaattcactagctcagtatttgaagaggaccactcttaccttgccgctttactcccaaattattgtccccaaaaagtatcttttagggaaacaaagcagcttcacctgcagtcccacaaaccaataacagaatatgatcctttctcaactttactgcccccaaactgcaagctctcaagatcaacgtttgcctcagttttagcaaaaaagcaacatttcacccaagaaaatgaaatggtctgaaacacgcctacacgctgtcctttctaaaacttttcggcggcgaagtccaagcgctcaccgcggtgctcggcgcatgaacacaacagaatctaaaattgttgccgcttcacagcagcgatacaagctaccggtggcctcggattgagggcagatttttaacttctagcaatttccaaactttttcattgaaatactccaacagctgaagaaattaactcggacccctcacagtccagaaaggtttaacccaagccaagctcatcatttccaacttgaaatctaaccagttgtggaaattgtgcgttccctcctctccctggttccgtttactgcaaaaccagaagccatgactcaccgaggaggggaccagagcccccgggaggccgggccatgttctccaggagccggaccccagccgaccacccgcgcttcccgtcgcctgcaccctccggctccgcgacgcccggaagagcccgggcctcccgtgaaggcccccccggcgtccccgcacttggcctatcgcccggccacgcccgcgcctgcagcccacagatgacgccaacccgccctgcacccaccccaagcactccccactccccgcgggccgcccagccccggccccagcgtacctgtacccccaggtgcacagcagggactgcctcaggtgcgagcgcaaatgccccagcgtcggctccgtctcgggcacctccagcggccaggtccgcttcagaagccgcacccgcagcctcatgacggcggcaggcggcccgaggggcctggacccggaagcggcgacggggacggcggcggggccgagcagctcccgccccaaacggcgacgaccccggactggcgactaccggagctgaggggtagctgaggcgaaacggggaaagagccccgccacagtggccgccctgccactcggtctctggaatagagcgcccgcccctctcctgagggcgcctcctggagccgaccccgagagctggaggcgggcaggcggcctaaaggaaccgggcctctcggggtcggccgatcgatgactccgcgcgcaacggcgctgcctgagagcgcgggcacagtgcgcaggcgccgagatgcggccgctcgctggcatcccagattttccgcggcggtggctgggactcccagtacttactccctgtgtgcgtggaacaacggtagcgctgatagggatgctgcagacagacaatacagtcgccactccccaggaccaagtgtcaccccctttcttccgtggccctcagttccagcggcatctgctctgagaagccttaggttaatccttaggttggccgggcgcggtggctcacgcctgtaatcccagcactttgggaggccgaggcgggtggatcgtttgagcccaggagttcgagaccagcctgggcaacatggtgaaacccccccccccatctctacaaaaaatacaaaaaattaggtgtggtggcgcctgcctgtagtcccagctagttgggtggctgaggcgggagggtcgattgagcccggaggtcgaggcctcaatgagctgtgatcgcaccactgcacctcagcctggttccacagaacgagaccctgtctcaaaaaaaaagtagaactatttgtagccagtaatctatgtccgacagtttattagaactctgtggctgcataacaatcaccccaaagtttaacgcaataaacatttgttgtcccacaggttttagaggtaaagggatttggggatgcgtggctgggtggttctgtctccaggtctcccatgagattacaaactgtaggccagggcagcagttattgactagggctggaggatcggcctccaggatggcacagtcatgactgttggccagagacctgttttcaccacgtgaacctccccatagggctgtttgagtgtccccatgacatggcagctggcttccttcagagcaggtgatcccagagagaccaaggtataagccacaatgtcttttatgacctagctccagaggtcacatacggcttttgtcatatttacaaaccaaccctatgtgtgagaggatccagccaaaggtatgaatgccaacagacagggatcgctgcgggccatcctggaggctggctaccatagagggtctaactaatgataacttagatgagagagagtatcaagtttcgtccttgtgtgataaccatagtccaaatccttagagtcaaataaagtttctcccaataggtggcagcacttgtccacatcctgcccttgattctgcaaataaatatgtattgattgcctactttgtgacagataccccacatgctggagactcaagagaccaaaaagacatgtttctgcccatgcaaagtttacagttgagtgaatcagctctttcagtagagtgtaaaaagtctctgctttatgatagacataaatacagacctgaggaatgggattgttagaaatgtttgttttttgatgttgtaaagaaatagcacttgaatataaatttaattttt

SEQ ID NO: 1562729 - DNA, 4001 bp, Homo sapiens
cttaataaacttgctttcacttttctcttaaaaaacaaaaacaaaacaaataaaagcatttcatgacaatcctagctccacttgctcagtaaagatatttttaaaataatatcacatggacatattttaaaactgcacctttattagaaaatgagtatactttcagaaaaaatgagtttactttcacaagctgaagcttaaattctgtccaggtaaccagcctcaactgtaaaaagaaatctgaaagagaaaccaacgtgcccttttgggcagtcatattgagtttcacgtcctttcaagactgcctaatttaaaaataataaaatatatatatacttggtaatacctttaaaaaataagtttgaagatttattcaatcttctactcgtaacctactggtaacgatgccagtatgtaaaacacacaggtttaacaacaagaaataacagtaggcatgtcacttactataatgtttaaaaggagttatgtcagtatcttatttagggttttttttttaatcaggaagaaaacaggcttactttcaatctaataatgtcttaaccaggaaaatgaaagggcgagaagttcagaataacggcctcattttacccaattccctaaaaataaggtgaaaacgtaggaaggtttgcttttgttttgaagaattcacctaaaaatccccagggaacatctttttcatttttccttagcacactcaagtttcaaattcactagctcagtatttgaagaggaccactcttaccttgccgctttactcccaaattattgtccccaaaaagtatcttttagggaaacaaagcagcttcacctgcagtcccacaaaccaataacagaatatgatcctttctcaactttactgcccccaaactgcaagctctcaagatcaacgtttgcctcagttttagcaaaaaagcaacatttcacccaagaaaatgaaatggtctgaaacacgcctacacgctgtcctttctaaaacttttcggcggcgaagtccaagcgctcaccgcggtgctcggcgcatgaacacaacagaatctaaaattgttgccgcttcacagcagcgatacaagctaccggtggcctcggattgagggcagatttttaacttctagcaatttccaaactttttcattgaaatactccaacagctgaagaaattaactcggacccctcacagtccagaaaggtttaacccaagccaagctcatcatttccaacttgaaatctaaccagttgtggaaattgtgcgttccctcctctccctggttccgtttactgcaaaaccagaagccatgactcaccgaggaggggaccagagcccccgggaggccgggccatgttctccaggagccggaccccagccgaccacccgcgcttcccgtcgcctgcaccctccggctccgcgacgcccggaagagcccgggcctcccgtgaaggcccccccggcgtccccgcacttggcctatcgcccggccacgcccgcgcctgcagcccacagatgacgccaacccgccctgcacccaccccaagcactccccactccccgcgggccgcccagccccggccccagcgtacctgtacccccaggtgcacagcagggactgcctcaggtgcgagcgcaaatgccccagcgtcggctccgtctcgggcacctccagcggccaggtccgcttcagaagccgcacccgcagcctcatgacggcggcaggcggcccgaggggcctggacccggaagcggcgacggggacggcggcggggccgagcagctcccgccccaaacggcgacgaccccggactggcgactaccggagctgaggggtagctgaggcgaaacggggaaagagccccgccacagtggccgccctgccactcggtctctggaatagagcgcccgcccctctcctgagggcgcctcctggagccgaccccgagagctggaggcgggcaggcggcctaaaggaaccgggcctctcggggtcggccgatcgatgactccgcgcgcaacggcgctgcctgagagcgcgggcacagtgcgcaggcgccgagatgcggccgctcgctggcatcccagattttccgcggcggtggctgggactcccagtacttactccctgtgtgcgtggaacaacggtagcgctgatagggatgctgcagacagacaatacagtcgccactccccaggaccaagtgtcaccccctttcttccgtggccctcagttccagcggcatctgctctgagaagccttaggttaatccttaggttggccgggcgcggtggctcacgcctgtaatcccagcactttgggaggccgaggcgggtggatcgtttgagcccaggagttcgagaccagcctgggcaacatggtgaaacccccccccccatctctacaaaaaatacaaaaaattaggtgtggtggcgcctgcctgtagtcccagctagttgggtggctgaggcgggagggtcgattgagcccggaggtcgaggcctcaatgagctgtgatcgcaccactgcacctcagcctggttccacagaacgagaccctgtctcaaaaaaaaagtagaactatttgtagccagtaatctatgtccgacagtttattagaactctgtggctgcataacaatcaccccaaagtttaacgcaataaacatttgttgtcccacaggttttagaggtaaagggatttggggatgcgtggctgggtggttctgtctccaggtctcccatgagattacaaactgtaggccagggcagcagttattgactagggctggaggatcggcctccaggatggcacagtcatgactgttggccagagacctgttttcaccacgtgaacctccccatagggctgtttgagtgtccccatgacatggcagctggcttccttcagagcaggtgatcccagagagaccaaggtataagccacaatgtcttttatgacctagctccagaggtcacatacggcttttgtcatatttacaaaccaaccctatgtgtgagaggatccagccaaaggtatgaatgccaacagacagggatcgctgcgggccatcctggaggctggctaccatagagggtctaactaatgataacttagatgagagagagtatcaagtttcgtccttgtgtgataaccatagtccaaatccttagagtcaaataaagtttctcccaataggtggcagcacttgtccacatcctgcccttgattctgcaaataaatatgtattgattgcctactttgtgacagataccccacatgctggagactcaagagaccaaaaagacatgtttctgcccatgcaaagtttacagttgagtgaatcagctctttcagtagagtgtaaaaagtctctgctttatgatagacataaatacagacctgaggaatgggattgttagaaatgtttgttttttgatgttgtaaagaaatagcacttgaatataaatttaatttttttagcaaggccatttttattttttgtagaaagggtatactcgccagcagttttgtcacgagagtacaccgaacaaaggagacagggtcatatataacctgatgtgtccactttactgctgtgtctggttttttgtttgtttttgtttttttttgttgttgttgttgtttgagatggagtcgcgctctgtcgcccaggctggagtgcagtggcgtgatctcggctcactgcaagctccgcctcctgggttcacgccattctcctgcctcagcctcccgagtagctgggactacaggcacccgccaccacacctggctaatttttgtattattattattattattattattattattattattattattttattattattttagtggagatggggtttcaccgtgttagccaggatggtctcgatctcctgacctgatccgcccgcctcggcctcccaaagtgctgggattacaggcgtgagccaccgcgcctggcctgtgtctggtttttattggctg

SEQ ID NO: 1562730 - DNA, 4001 bp, Homo sapiens
gactgctggtgatgaaatgaaacctgacattctactttcccctttctgagtcctctgacagatacatctatccactgagcagtaattctgtaccaggccctgtactaagtgtatctgtgcaccatctttctgactcctccaagcaacctggaggtggtatgtggcctgctttacaggtgaggaggcacaggccctgcaggcccatggcttgagagctcctaaaagcagcagagccagagtctaaacacagataggcttgattccaaagtcctgctccttccattggtgaggatcgccatccaggggagggcagctggggacttggatcctgccggcttgcagaagaatgctttgatcacagagtggtttcaaaaatagaattgaaggccgggtgcggtggctcatacctgtaatcccagcatttggggaggctgaggtgggtggatctcctgaggtcaggagttcgagaccagcctggccaacgtcgtgaaatctcatctccaccaaaaatataaaaaaattagccgggtgtggtggtgcttgcctgtaatcccagctactggggaggctgaggcaggagaatcgcttgaactagagaggcggaggttgcagtgagctgacctcgtgccattgcactccagcctgggcgacagagtgagactccgtcttaaaaaaaaaaaaaagcgaaataccctttttcgtccattcctcccatacctactggccaatcaaggtgtgtggttcgtgtggggaaggtcccagcttccgcaggtgagctctggcaccggccttacctgcactgatgcacctggcccttctggtcagttaggatgaagtagtggccattccaggcctgtcggtccttgtccagagtgacgtgggcgatggtggtgttgtactggacacggagccccagcgtgtccgcgaagtcacccaggtagcgcaccatgtcgcgggcgtcggggaagtaggcacgcgagtagtgtctgaagagcagccgggggtcgtggctgagcagagagttccagtcgtggcggaggttgaactcggcgttagccttgcccgtgtaccgcttgttgatgctgatgagcttgcggtgccgcgggtagcgtgtgaagaagctgccgggccgcggggcccgctcgaacactgcgtagtcgcgtccagcgcgctgcaggaagtaggccatctgcaggcccgcgggcccagcgcccagcacgcagtagtcccggcgcgggggcaccgacagcgctgggtgcagggcgatggccaggagcagccccgggggaccccacaacggggccgcagcggagaggcccatcctgcagcagatcagaggggtaaggcctcgcacccggcccggcggctgggagacacgaggcccagaaagaggcggggcctgcgggaactctcactgcaatctgggtcacggccaggcccagaagccgtcctcagagctcatttgcccggactccaccgtttcaagctgggacttggggctccccggaatcccgagcccctccatcttatctccctcagggtctccttcctcaggggcaccggctccccgcttatgattgtagtaacctccaccctggggaaggagagcgtactccccaattttcccctaatttgagggtgcccaacacccctttgaaccaccctccaggttggaccttccagaggccttggcccctctccagcgaccgggtgggagcctgaagtgggtgtggcctgcgtgcgccccgccccctgccagggtccgcgcgccccaggctcttcggccacgtgacagggatgccgcgcacacctgccgcccgcccgcgtgcgcttcaggagccgccaggtccctacgcccgcagctccggcctccccgcctccgaccgaaccctgagaaacgcgcgaacctcccagccgctccggctgcaacccgtggtctaatgaggccgcgcttggctcgcttgctccgcggcggctccgcccctcgcgcccggaccaatggcagggggcggggtcacgtgcgcggcgcgcggcacgccgggaccagctggcaggctgcctgctccggcccagcgcgggagaggcgcgcgcgtgctgcgttcgctgctccgggggctggtagaggggcctggggctagcgcgcacccgcgagggtggaaggtctggagatccgggatggggaactgggtccttcgttttaaaaggtgcctctctacacggagggaggggagcacgtgatttttggagctaatcctagctctcatattccatgaatgtagccaaacgctaaaactagttggcctacccagttttgtgggactggaaaccagcgtggtggagccaggaccgataagccaattaacaagcgtttgctacagtgactcagtgtactgcttaccaagtaacatacacgactgtcctaatcttccaccaaataggagaggtgggcaaggcattgtttccgacatttggtagctgactggtcaaatggagacatagggatgaagggatatgtttacaatcacaggaagtggagcctggaattaaaactcagtggaggcaagataaatggcaggaggaagataacgtgaactggatgatgaaggttggcttcccaggggtggcaagtggcccctgcatgagatttacatggggagaaatacgaagtcagtgtaggaaccttcaaagtccagtgaaatggggctgagtgttcttgggggaagggcaggtggaaagaactgcgagcctgcagatttgcatggctggagattctttgaattaaaaatcgtagctggggactccttagaaaaattttcctgacctctcaggcctacaagtacctaccaaagaatgtcatttactttttcttttttttttttttttgagatggagtctcactctgtcgcccaggctggagtgcagtggcgtgatctcggctcactgcaagctccacctcccaggttcacgccatttttctgccccagcctccctagtagctgggactacaggtgcccgccaccacacccggctaattttttgtatttttagtagagacagggtttcactgtgttagccaggatggtctcgatctcctgacctcgtgatccgcccgcctcggcctcccaaagtgctgggattacaggcgtgagccaccgcgcctggccgaatgtcatttactttcttcagtctgtgtcaacatcagagaaaagctccctcagagcagaaattgtccagtatctgacatacggaagtttaagcatttgttgaataagcattgcaaccagagaggtcaggcagaatactttgccaaaaataaagtagggatgtcttatttcttctttttgagacagagtctcactgtcacccaggctggagtgcagtgacacaatcatggctcactgcagccctgaccttccaggctcaagcgatcctgcttcagcctcccaaagtgctagggattacaagtgtgtgccatggcccctggccaatttttcaaaaaaatttttgggggcatatgtgtatatatttatggggcatatgagatgttttgatagtcatgcaatttggggatgtctgtttcttagtggttgtgaagattatgagaatgggtgctggcaaacaagttcctaaaataattgctggtcttatgtggtgaatacagtagtgggaaattaaacagaattcgtcaagtatggtagggccctacgagtaggctgaacctagattgtaagcaacaggatgctactgggagtttctgaatgtaggattactgcagcagtcaacttggtagccccatgcaggacagataaaagcagtggacagctactcgggaggctgaggcaggagaatggcgtgaacccaggaggcggagcttacagtgcctgagattgcgccactgcactccagcctgggcaacagagcaagactccgtctcaaaaaaaaaaaaaaaaaaaaaaaaggcagtggaaactgatgcaaagtattttcagggaatgagcttg

SEQ ID NO: 1562731 - DNA, 4001 bp, Homo sapiens
gacagtatgagaaatggagaattcacctaactttgcacatagcagtcagaccaggtatgactgctggtgatgaaatgaaacctgacattctactttcccctttctgagtcctctgacagatacatctatccactgagcagtaattctgtaccaggccctgtactaagtgtatctgtgcaccatctttctgactcctccaagcaacctggaggtggtatgtggcctgctttacaggtgaggaggcacaggccctgcaggcccatggcttgagagctcctaaaagcagcagagccagagtctaaacacagataggcttgattccaaagtcctgctccttccattggtgaggatcgccatccaggggagggcagctggggacttggatcctgccggcttgcagaagaatgctttgatcacagagtggtttcaaaaatagaattgaaggccgggtgcggtggctcatacctgtaatcccagcatttggggaggctgaggtgggtggatctcctgaggtcaggagttcgagaccagcctggccaacgtcgtgaaatctcatctccaccaaaaatataaaaaaattagccgggtgtggtggtgcttgcctgtaatcccagctactggggaggctgaggcaggagaatcgcttgaactagagaggcggaggttgcagtgagctgacctcgtgccattgcactccagcctgggcgacagagtgagactccgtcttaaaaaaaaaaaaaagcgaaataccctttttcgtccattcctcccatacctactggccaatcaaggtgtgtggttcgtgtggggaaggtcccagcttccgcaggtgagctctggcaccggccttacctgcactgatgcacctggcccttctggtcagttaggatgaagtagtggccattccaggcctgtcggtccttgtccagagtgacgtgggcgatggtggtgttgtactggacacggagccccagcgtgtccgcgaagtcacccaggtagcgcaccatgtcgcgggcgtcggggaagtaggcacgcgagtagtgtctgaagagcagccgggggtcgtggctgagcagagagttccagtcgtggcggaggttgaactcggcgttagccttgcccgtgtaccgcttgttgatgctgatgagcttgcggtgccgcgggtagcgtgtgaagaagctgccgggccgcggggcccgctcgaacactgcgtagtcgcgtccagcgcgctgcaggaagtaggccatctgcaggcccgcgggcccagcgcccagcacgcagtagtcccggcgcgggggcaccgacagcgctgggtgcagggcgatggccaggagcagccccgggggaccccacaacggggccgcagcggagaggcccatcctgcagcagatcagaggggtaaggcctcgcacccggcccggcggctgggagacacgaggcccagaaagaggcggggcctgcgggaactctcactgcaatctgggtcacggccaggcccagaagccgtcctcagagctcatttgcccggactccaccgtttcaagctgggacttggggctccccggaatcccgagcccctccatcttatctccctcagggtctccttcctcaggggcaccggctccccgcttatgattgtagtaacctccaccctggggaaggagagcgtactccccaattttcccctaatttgagggtgcccaacacccctttgaaccaccctccaggttggaccttccagaggccttggcccctctccagcgaccgggtgggagcctgaagtgggtgtggcctgcgtgcgccccgccccctgccagggtccgcgcgccccaggctcttcggccacgtgacagggatgccgcgcacacctgccgcccgcccgcgtgcgcttcaggagccgccaggtccctacgcccgcagctccggcctccccgcctccgaccgaaccctgagaaacgcgcgaacctcccagccgctccggctgcaacccgtggtctaatgaggccgcgcttggctcgcttgctccgcggcggctccgcccctcgcgcccggaccaatggcagggggcggggtcacgtgcgcggcgcgcggcacgccgggaccagctggcaggctgcctgctccggcccagcgcgggagaggcgcgcgcgtgctgcgttcgctgctccgggggctggtagaggggcctggggctagcgcgcacccgcgagggtggaaggtctggagatccgggatggggaactgggtccttcgttttaaaaggtgcctctctacacggagggaggggagcacgtgatttttggagctaatcctagctctcatattccatgaatgtagccaaacgctaaaactagttggcctacccagttttgtgggactggaaaccagcgtggtggagccaggaccgataagccaattaacaagcgtttgctacagtgactcagtgtactgcttaccaagtaacatacacgactgtcctaatcttccaccaaataggagaggtgggcaaggcattgtttccgacatttggtagctgactggtcaaatggagacatagggatgaagggatatgtttacaatcacaggaagtggagcctggaattaaaactcagtggaggcaagataaatggcaggaggaagataacgtgaactggatgatgaaggttggcttcccaggggtggcaagtggcccctgcatgagatttacatggggagaaatacgaagtcagtgtaggaaccttcaaagtccagtgaaatggggctgagtgttcttgggggaagggcaggtggaaagaactgcgagcctgcagatttgcatggctggagattctttgaattaaaaatcgtagctggggactccttagaaaaattttcctgacctctcaggcctacaagtacctaccaaagaatgtcatttactttttcttttttttttttttttgagatggagtctcactctgtcgcccaggctggagtgcagtggcgtgatctcggctcactgcaagctccacctcccaggttcacgccatttttctgccccagcctccctagtagctgggactacaggtgcccgccaccacacccggctaattttttgtatttttagtagagacagggtttcactgtgttagccaggatggtctcgatctcctgacctcgtgatccgcccgcctcggcctcccaaagtgctgggattacaggcgtgagccaccgcgcctggccgaatgtcatttactttcttcagtctgtgtcaacatcagagaaaagctccctcagagcagaaattgtccagtatctgacatacggaagtttaagcatttgttgaataagcattgcaaccagagaggtcaggcagaatactttgccaaaaataaagtagggatgtcttatttcttctttttgagacagagtctcactgtcacccaggctggagtgcagtgacacaatcatggctcactgcagccctgaccttccaggctcaagcgatcctgcttcagcctcccaaagtgctagggattacaagtgtgtgccatggcccctggccaatttttcaaaaaaatttttgggggcatatgtgtatatatttatggggcatatgagatgttttgatagtcatgcaatttggggatgtctgtttcttagtggttgtgaagattatgagaatgggtgctggcaaacaagttcctaaaataattgctggtcttatgtggtgaatacagtagtgggaaattaaacagaattcgtcaagtatggtagggccctacgagtaggctgaacctagattgtaagcaacaggatgctactgggagtttctgaatgtaggattactgcagcagtcaacttggtagccccatgcaggacagataaaagcagtggacagctactcgggaggctgaggcaggagaatggcgtgaacccaggaggcggagcttacagtgcctgagattgcgccactgcactccagcctgggcaacagagcaagactccgtctcaaaaaaaaa

SEQ ID NO: 1562732 - DNA, 4001 bp, Homo sapiens
cacttaacagaagaagatatttatgtggccaacaaacatgaaaaaatgctcatcatcactggtcattagagaaatgcaacgagataccatctcacgccagttagaatggccatcattaaaaagtcaggaaacaacagatgctggagaagatgtggagaaataggaatgtttttacactgttggttggagtgtaaattagttcaactattgtcaaagacagtgtggcgactcctcaaggatcaagaactagaaataccatttgacccagccatcccattactgggtatatacccaaaggattacaaatcattctactataaagacaagtgcacccgtatgtttattgcagcactattcacgacagcaaagacttggaaccaacccaaatgcccatcaataatagactggataaagaaaatatggcacatatacactatggaatattatgcagccataaaaaagaatgagttcatgttctttacagggacatggatgaagctggaaatcatcattctcagcaaacttacactggaacagaaaaccaaacaccgccatgttctcactcataagtggcagctgaacaatgagaacatatgggcacagggacgggagcattacacaatgtggcctattggggttggggggcaagggaagggatagcattacgagaaatacctaatgtagatgatgggttgatgggtgcagcaaaccaccatgacacgtgtatatgtatgtaacaaacctccacgttctgcacatgtatcccagaacttaaagtataataaaaaattgaaaaaagaaatggagaaagacaagaacgcagaattgatcataccccatacctcagggaagcagaggaaagggaagatgactataggatcagcttattctggaatagattcttgaagggctggacctggggctaaggaacaggagagaaaagcctcttctatgtaccttggtataatcatagtgactcctaacaattaccgcttcctcagtaaaattgttgaaatttagaacaacactcttcaaattagccactaggggaaagggcaaccaatcttctttttttctaaatcgtttaaccacatgaattaatatatagaaaactacactgcagtgcacactgtccctcagcaggcgtggtggcatggaaggacgcgaacgaccccgggagtggcgggtgaggagggaaggggagcgagcgggtgcgaggtgcccgcgttttcctggggcccgggagggaaagggagagggtgtgaggtgcctgccttctcggggcttgggagggaaggtgagcaggtttaaggcgcctgccttccttggggcctgggagggaaggagagagggtgcgaggtgcccgccattctcagggcctgggagggaaggggagcgggtgcgaggttcctgccgttttgcgaggctgcggagcctgctgtgtcccctttcccgcccactctccgacctgcaggcccacggcgctcaaggtaatagggtccccagccctggaatcaactccctgggtctcggaacgcaacccacacaaacctggaccctgtctctcactggcggggagtcgccttcgcatgcagacgtggagaagtcgcctccacccgcagctcctcccgtggacccaggccgcctcccccacgcccctcccggagtccccagaccctccgtggcgctcctggtaccgcccccactgccccactcacaaagagcctcagcttcttctcggggggcgacttcctcagccagccgctgtacagcacgtggccacttctcgtgcttccgccggcggggccacttccgggccacgaagacaaaggcgcaaatgccgggtcaggtgggcacagctcccgggagggtgagggggacggcagggacatgggggctgcagctcacagtgaaggtgggggagacagggcgagagggcgttgctggaggtggggtgtgagggacggcttgcgataccctgggactgcggggtagaaagcgcagttctaggggaggtcggggtcagaggtgaagctcgtggggagggcgagacccgggcgcaggtgctcacaggcgagggcggggttcaggttccagctgggctttgagttccggttcaggcttccatctgtggttccggttccaatttgaggtggagtttgggattaaagtttagacgaggcctctcgttcagggtttgcgttggggattggggtggggatttgcaccctgggtcagcctgggtgcatctcatcgggaccaccggggcgggggacatgggccgggtggctccttgggagaagagggacagggagcgcagctggtggagaggacaagaacgaggggcgcagctcattcagagggccacaacagagtctcaggtgctgagtcccatgcgccagatgaggaaagacaatggaagagttcaggttcctgctggggtttgagttccagttcgggattcggcccatggtttaccttctgacttgagttggggtttggggtcaaggttcaggctaggacttgagttccgggttgcagtttgggggtggggttaggtttcagagtgagggtttgggcctgtttgtgttgtgtatgtttgtgaatgtattgggatgtcaccgtgtgtacttatgtcacgtgtgtgcacgcatcagtgtgtgcatgtgtgagtgttcattgagtgtggcactgacagccaacccctctcctcccatttatgccccactgtcttatcctggttggggtgggctttacaagttccttccctgggccagttggaggttctcatgttgcctggggagagaagggaaggagagaacaggtcaaagatgagggcagcttggcctcaaccagacccggtgtcacggggaccaagaagccggaggtccttgtctcctgcctctggaggagcttggtttgcttctttgttcacacattgtgtgaaagcacagttgggggcatctgatatgcacaggatctgttcttgcctctgcagatgtcttagagaacaggacagacaaggggcctcttcagtaagccatccccaatgtgcactgcatgtcagcttacaagaggggcacaggggccccatcaggtagcagggaggatgcaaggaagagtgtgtggggatgggggtgctgggtggggccaggtgagtgggtgcctggcttctcctcagagcaaaggaaagtgctgaagagtgtgaaactgtgtgacatgttatgctttatgttttgagaatggattgcaggaacaagcagacatgggggacctgatgagggccaatgggatgtccatagagataagatttggcttgagctggtgggaaaagtggagatggagccacatggaggaaattgcagagtcttgagactgaggagacatgtgggtggatgagatatgagtagtgacccgaccctgaggtggggaatggggggacagccccgaggggaggttggtgaggtgtatttggacctattgggttggagccctaggcagcatcctcatgggaggaccactgggtcctggtcaggcagacatggtgctcagggagacactggatgaggtgggagccatagaccctctgctgatggcaagaatggggttcctggaggtgctggctccctctgcaggctgcagtcatggcgagtcaattctaaactcaccatcacagctcacactgtaaaggacacataccttagtataaatcagttagccaacgaggccacagggtacccagttggatcctgccctgagatgagagtaggtttggatggggtgagacgggagagaggcagtggcaggaatgaggcagataaggtcttcctggatggaagggagctcagcccctgcagtgacctcgtaccgactggggcctcagcaggagccccgacctgggtccccgtgggcctctgactgtcttctcctggcctcagggtggaaagaaccctcttccagaatatgtcctctccagcaacattcttccagccccctacagt

SEQ ID NO: 1562733 - DNA, 4001 bp, Homo sapiens
gcagatcacgaggtcaggagttcaagaccagcctggccaacatgctgaaacaccgtctctactaaagatacaaaaaattagccgggtgtggtggtgcgcacctgtaatcccagctacttgggaggctgaggcaggagaattgcttgaacctgggagacagaggttgcagtgagctgagattgcgccattgcactccagcctgggtgacagagagagactctttctcaaaaataaataaatggattaaaaaataataaaaataaaaattgaaatctgaaatgtccctaaatccaaaactttttgaatgcctacatgacaccacaaatggaaaattccatacctgacctcacgtgacaggtctcagtcaaagcgcaggtttatttagcatcctgaagggaaaaataaaactaccttgaggctatgtgtataagaaacatacatgaagatggggtgtggtggctcatgcctgtaattccagcactttgaaagacagacacaggaggatcacttgagctcaggagtttgaggccagcctgaccaacatggcaagacctcatctctacaaaaaatacaaaaattagccaggcatggtggtgcatgcctgtagtcccagctactggggaggctgaggcggaagtatcacctgaacctgggaggtcgaggctgcagtgagccatgatcgtgccactaaactccagcctgggctacagagcaagaccctatctcaaaaaaattaaaattaggctgggcacagtggctcatgcctgtaatcccagctctttgggaggccgaggtgagtggatcatgaggtcagaagatcgagaccatcctggctaacacagtgaaaccccatctctactaaaaatacaaaaaaaaattagccaggcttggtggcaggcacctgtagtcccagctactcaggaggctgaggcaggagaacggcgtgaacccaggaggcggagcttgcagcgagccgagatcactccactgcactccagcctgggcgacagagcgagaccccgtctcaaaaaaaaaaaaaagcttaaacaataaaatcaataagaaagaaagaaacataaattctttctaaacttaaatgtttagacttgggttccatctccaagatatctcattacatatatgcatatatttcaaaatctgaaaaatctgaaatccgaaacacttctggtcccaagcatttcggataagggatactcaacctgtaccagctgaccctccatcacagggtgctgtgcagatcctctgcattccacagggaaagcacccagcccgaggctggtgcagagcagacagtcactcagcagggcctgccatcattgttatcatcattatcatcattacgttcccagggtcccagccacaaccccatcaaagtgtgtgcccactggcccacgatggaggcttgcaggcagccaagtccagggatgatctcaatgtagccagagactcctagcctcagggtcagaagacaaagaggcagggaggctcagactcagagagggcaaggatacctttggggtaacacagcccagcagcagcagagacaggactagaacctgggtctcccacctcctccacccacagtagtgacaactgcaggcactcaggatggacggtccccccgtcaccagcccactccatctattcctgcccttctagattacgcccatcacattggcctgcatcagtgcaggcagctggcagcaggccaggcccagccatcctcctgtttagctgaactgatgccctccagggaatgaaggagaaacaggacttattcccccacatcatgcacaaagggaaactcagcccaggatggtaaaccttctggcttagagcatcaccaccagtcaggtctcagggtatcctactttccctgtaacccctgtggtggagcaaaagagacacactcacctcgggctgtggctggctgcccctttctacccactgcctgagccacgtccaactcccaggctgcctctgcgatcactgggagacaggaatgctccaatgacacccagcagcaagctggctggctccctcccactccagtggtgtgaatattcatgagtttgcttcctggggatagcaggtggcacaccccagtaccctgcaggtgttgcccaggccttctgcctccactggacagctctggccagtcctcacctctctttggaccccaacaagcaagcagctctttcatccaagggcacagaaagattccaggtatccttgggccaaggacacagcaaccgcagacgcctgcagagagcccagaacaggctctaaggctgagtgagggacagagaggtgcaggtgggctggggtgccagagggctaattgccccacctattgcatttcatttaagtctcacagctgatgcatcaagcacccctgttagtctaccctcctggtaaagaaaccaaagctcagagaggtaacgtcacctgcccaaggtcacgcagctagtagagggcagacagagctggagtacatacgcagacttgccaaactccagggcttaaagatgctgagacacaaccagggaccaaggtttatctaaaatctgtgggaacccagaagaatgaacaactaactcagcctggaaggcttccaggaggcagagcatctgaccagggctcagaagatgagtctggcaagatttcacttcctgagctctaaatctttcatcagagagggtgtcctgcctctatccctgggtgaggaatggtgatacccagacactcgaccagctctgcaggatttgggctgattggagatgcagatcttccccaaggccttggcagaagaggcagttctaggtgccctggccctaagccccaggaaccctaggactcagttcaggcacttgaatcttaggttcaggtcagttgtctcagctttgcccatgggcagagggtctccttgtgcccagaaatgcctcctccatcctcccttcagcactgctgcctagaaccccatcatggaccaggcaggtgtcaccatttagggacccaggtgccaccatcaattaataatgatcattattgtgacagtcattcatcccacactaagcactttcataggctaagcagctgccagcctctcccagggaacagcaggcatcctcacttgctctgagtccccctttccctcaaagcctcaccagtctgggagcagcccccaagcacccacgaaacaccagagcttaaactgccacaaggcagaccagagtcgccttctctctaggtactggaaccaggtttgggacatggtatggagttgttttatccagcctaacatcccattgaccttctgccttttgagctgagctagaatgaagacagctttctgacggtgagtcagggcggagctggcatcaaaccgcaggggctgtagtttattagcgtggactctgaacccaacacggtccacttctgtgcttgggacctgtcatgcatcatgcagcctcatagtcctctctggggagctcttgttatcacctccattttatagaggagtgagaacttcatctaggtgagagtgaagtgcaggcttttgaacaagaagtgagatcgtggctgaggaggtgagcaactagccaagggaagcaaagatttccagagtagggagcactgatggtagacctgtgcttccagccctgccagaggggtctctttccagagtattgatgataacatctttttttttttcttgagacagagtctcgctctgtcgcctaggctggagtgcagtggcgccatctcagctcactgcaaactccacctcccaggttcatgttattctcctgcctcagcctcctgagtagctgggactacaggcaccctccaccatgctcggctaattttttgtatttttagtagagacggggtttcaccgtgttagccaggatggtctcgatctcctgacctcatgatctgcccaccttagcctcccaaagtgctgggattacaggcgt

SEQ ID NO: 1562734 - DNA, 4001 bp, Homo sapiens
ctaggccgggcgtctccggggcagccgggtgggcccgaggacgcggggcggacgcgacgcaaggcgcggcgggcacggtggcggcgtcggcggccgcacggccacaggcggcggaagcgcgcgcggaagtggcgcgaggcgagcgcgtagacgagcgggttgaggcaggagttggcgtaggccaggcagtgtgaggccaggcggcaggcgtaggtggccgggctgaaggcgaagcggccgtaccagaagcacaggatgagcgcgtggtgcggaccccagcagagcgcgtagagcgcggccaccgccagcatggcgcgccccgcgcggcccgtcgccctccgccgcgcctcggccgccgccgcgcccgcgggacccacggcggcccacaggaagcgcagcgtgcgcccgtaggccaggctcaccacagccacgggcagcaggtagccggcagcgaaggtggccacgtccagggcgcggcggcgcgcgtcctcccaggcgggcacgcagagctccagcgcgccgtagcgcacggtgccgtagtagctgaggtagggcgccgagaagagcgccgccagcagccacaccagccccactgcggcgcgggcgttacgcggcgtgcgcagggcgcgcgagcgcagcgggtgccgcacggccaggtacctgcggagggcgcctggtcagcggggcgggcaggtgccctcccgcaggggcccgcgccacgtcccgcgcccgggccctgcggcccagtgcgcctcctgtgaaccgtgggggacgtggcggggattaagggtgtgaacgcgcaaggtgcttaggcccttgcacctagcaagggcccgatcccggtgacttgttatttctaggattattttatggatgcgtcagatgaggtccagagagaagtgacttgcccagggtcatcagctggagtgagcctggatttgaccccaagtttcaagctgtggaagcagatgtgtgcacagcttggccaggtgtgggcagttagaaaatagctgggctgggcgcggtggctcacgcctgtaatcccagcacttgggaggccgaggcgggcggatcacttgaggtcaggggttcgagaccagcctgtccaacatggcaaaaccccgtttctactaaaaatacaaaaaattagccaggtgtggtggcctgtaatcccagctactcaggaggctgtggcaggagaatcgctggaacccaggaggcagaggttgcagtgagccaagatccaaaaaaaaaaaacaacaaaacaaaacaaaacaaaaaaactgatgaacgcattcgtgagcttcttttgcgattcatttcgcgcttacagagcacttactatgtgccagaccctgtgctgccacttgagactcagaggcgtcctctggaagttcacagtggaggaggggaagggcaggacagtcccctcaagcacgccctgcaggtgcccagaggctgcttgcgaggggtcagggagcttttgtttcctcccacccacctccctttctggtcccccactctctccttcctaaggccagtgaggatctgttcaggactcctcccccaacccccgcccccacagccctgcccagccaggccccaggcacagcgcacctgtccacggagacagcagccagcgtaaagctgctggcgtacatggtgaggtagatgagcaggtgcacggccttgcagacgagggccccaaagagccaggcatccagcgtgtagatggtggcctggaagggcacgcagcacaggatgaagcagaggtcagccaccgccaggttgaggatgaacaggtccgtggtgctgccaggctcctgccaggcactcgggccaggctgcaggagcactgccagcaccagcccattgcccactgtgcccagcaggaagattagggcaaagaccacaggcactgccacggcccccacactccctgggctgtccagtgaaatgttctgggcatcagccatctccccatcagacgggcacctgggaagagaagctggaatcctcaggcaagagcccccagttctggttgcttgaccccgggatctaactcccccgacctgggtctggccaggtgttctgggctggaagctcgtgggagatggaggaggggagagcagagccaaagtcatcgctgagtgtcactgtgtgagcaagctcgtggtgttcaaggggtgagagttcctcagtttcctaaggaacacccctggagtcctgcctggaggactacctaggtatttgagggacactttcaacccacgaggctggggaaggcacaagcgaagtaggatgaagatatggcgatggggggaggggccaaacccagaaactggtatgttttccttctcaatggggatctgaagctcaggggagaccctgggacatgggtttagggctttctctggctacaagctgtagccttagcaaaacacgggtaacatccctgagtcattggagggtccagtatagtgagatcatcacaatggcaaaactgggaagaccgtgtaggtcactgcttcctctctgcacatagggaaattgaggcccagagaggggacatgggaggataatatcacactcgaaatggcagctctggggctgttgccaccctggtatcctgcctcttaagctagagtgctcatctgagagcttgtaacaggtggtgcctctgacaacttgtgtgtgtgcacaccgcacccatgctcacccccatcccactctacagcccatgtctcctactgcctgtggatctccttgcaggcttgagaccactggggtggtgggacaaagtaggggaaaggggggtcaggcagggagtagggaagaaaggcaatgtctgcccccatcccagcacccagcatgcagtaggtccccaaagcccaggatgggcaacacccacctccgccttgggcagtgggcttgatcctgggtggaatggccgggctgggtgggcctcctgattcagcggctgccccttggtgcctccctgcaggtactggtctgccttctacttctccccctttgcctttaaggcccctcctctcctctgccccctctgctgagccggagttgggcactccctctggagtagccactggccacttcctcctcagtccctgatttcccccaggtggcaggctcttctgcctggctcttctctgcctctctgcgttgctgctgccttttcctctctctgcagccagtaacccattgatctcgctctctgtgatttgctttgtagttaacccctctgtgcccagggcccagccagtctctggcactcccacctcctgtggcccagcctgatgtgactccatcccctatccctgcaccttcttgctccaatccatgtttagaaaaggttcctaggccgggcatggtggctcacgtctgtaatcccagcactttgggaggctgaggcaggcagatcacttgaggccaggaattcgagaccagcctggccaatgtggcgaaaccttgtctctactaaaaatacaaaaattaactgagcgtcgtggcgggcgcctgtaatcccagctactctggaggctgaggcaggagaatcgcttgaacctgggaggtggaggttgcaatgagccgagatgacgccactgcactccagcccaggtgatggagtgagacattgtctcaaaaaaaaaaaaaaaaaaaaaaagaagaggctgggcgcggtggctcatgcctgtaatcccagcactttgggaggccaagacaggtggatcatgaggtcaggagttcaagaccagcctggccaagatgatgaaaccccatgtctactaaaaatacaaaaattagctgggtgtggtggcgggcacctgtaatcccagctgctcgggaggctgaggcagagaattgcttgaagccaggggttggaggttgcagtgagccaagatcgtgccactgcactccagcctgggcgacagagcgagattccgtctcaaaaaaaaaaaaaaaaaaaaaaaaaaaaagga

SEQ ID NO: 1562735 - DNA, 4001 bp, Homo sapiens
ggaagatcgtgccaggagcccgcatcctgtcccaggcccggctgggctgcgtcatctccccggcacctccctctctgtgggctacccatttccttggggtcaggtatacattcctcggtttggtgctcaacatgtgcactctttttgtggggcagactgttctgcagatagcagggtggaccctgggaggttcagggacagattgcaggcactggctgtgctgtcgggtccctggcacctggtgctgggggactcaccagctcgtcgaggttgcgcaggtcgctgggtgtcatgcgggggccgcgggcaggagtccctggtgcgggggcggtttcagtggtgtcctccccagcggcaggggcgttgggggctgggggtgcagcacgcagctcccgctcaatctcctgctcaaactgcacgaggcgtggggccagcaggcccaggcgtgccccacgccgcgccacctccagcaggcacagcaccacgctcttctcgttcttgcgcagcaccaggtcctcagtctcaaacatgagcacctccggcacacccagctccacgcggcaccagccgatgaaggtggccacgttgtcgcgcgccatgaaggagccaggcactacactgtgcgcctggaaggccacacctcgggccgggcgggcggctgccaatgcacgggcagcctcggtcacggcgttggcatgttggcacagggtcgtgcccgtggccagccctgtcaggaagccatcgccaccacccgggagacccaggccgtacaaggcattgagccactcggccaggtcctccttcatggcctccacgtaggcctcactggagcgaaatggccgcacgctcttggccgccgagcccgcgatgcccgccactgggtctgccatgcccggaccggccgagtcactgtgggcaggaacacagttcaggatcgctgtggggacccagtaagcgctcagtacaaattaagctgctggccacctgcaccagtctgtcactcaggccaaatgcctggtttacatgttggctctgggaaatgtcggtgccccaagtttcctcatctgcgaaatgggtacagtaacattccctgcctcataggactctatgggataatttttataaatttagggtccattaagtgtttgctgtgtggctttttgcggtggaaactggggcttggctggggcctccctctcaggcagggaggcgcgcccattgtgaagggctgggacctagagaagtgaagacaacggctaaggcccccagtggacacgaaaggaacccaggtcctgacctcagagtgggttatgtgcatggcttagggctggtgcccaccccatgtcctgcgggaaggtccccgtgccttccttggccccccttccataagggctgtgccgtcattaacgacatagcagcagcaatagtgtaacagcacgaccgcgctcgggctcagcgcgcggaggcattatctccattttatagatgaggaaactgaggcgcagaaagggtcgagctcgtgaaggtcgcagagctgtgggtggaggagcccggcgtccaggcggcgcagcgtggccggtctcggcgatccggggccagggccaggccccgcctcctccaagaagcctccccagcgctccaggccggtgcctgcggggccaggactcagagcggcctccgcaggccctgccggtgctggggctctgggcccagagagggtgcggggccgcccaaggtcacacagccccggggaacagaggccgaggacgccgcttcccgccccgcctccccacccccgtccatgcgcaccaggcagggagtgctgggggtctccgcgctcacctggctcatcccgcggccccggggagcattgccccagcgggggccggagccgggccgggccgccgcagggaggcgccgcccgagccgcagctctatgcgtcccgcgccgcggcctcctcctcgccgccgtctccgccccgcctccctggaattcggatcctgcccggagggggcgggcggggccgcgcgctcttaaaggggccgccccttccccgagccggcgggagctggggtggagctggggtctccccccgcccgcgatcgggccaggaatcccgggtcttcgagcgctctcgacgcagagagccccagggcccccagacaactgcgaccggcccaggcgcccaacccccacccagcctagtacccggggccccgtccaacctctttggtctcctggggaggaggttgggaccttttaatcgcccccctccccagacggtgggctccccgggctggcgcacagcacggcctgttcccaagatgaaggcaggaagcgatagcggctggaggctgcaaagtcacctcctcccgggtggacctcccctggccagataaacggcaccgccgcggggagggggaggatgcccctggcgactgagggctccttgtgctcactgaatgctcatttttgaccctgaaatgaggggaaccggttttacagatgaggatactgaagctcagagaagtaggcagatggccaaagccggagttccgcacagaacaggggacggggggcatcggaggccggccggacgcgggagggttaagccccgctgggctctttttaaactgcagaggacggaccgccgggatcagcgggaaatcctgccccctgctgctgccggctgggctgggcgggacgtcgggcgggtctgggcggcagccatgctacacgggtggggcaggcctgcagggaagccgccaaccacagccaggctcagagctccaataaatctcctactgtgtgctgccaggactgctctgcgcccttgacctgaatgaactggtgtgtcacctctgtgaaggacactcatgcccaactggggcacagtcaggagagcagctggtggagccaggatttgaacatgacgattatggggacgccctcatccacggatcagcagcattggttgagcacctgtgagccaggcctcttggtgccaggcattcacaggcatcccagagagtccttgtgaccttttcttttttattttcttcctttttttttttttttttttttttgtctcgctctgtcgctcaggctggagtacagtggctggatctgggctcattgcaacctctacctccggggttcaagcgattctcctgcctcagcctcccgagtagctgggattactgatacctgccaccacgcccggctttttgtatttttagtagagacaagttcaccatgttggccaggttggtctcgaactcctgacctaaggtgatctgcccgcctccacctcccaaagggctgggattacaggtgtgagccacttgcctggcctgtgtgaccttttcaaaggcgttttctcacctcagcgccccccatggcacttcctccagtgaggaaggcagtaactagcaatcctcaaggctgacacctgcgtggcacctactgtgtgctgggtctctttgggcactggaaatcaacagcaaaacagcagggaaccaagcagagccagctctcagggcctgttgtccaagtctggcagggaggcagccccagggcagagacagggatgaggtgcagagaagacagggatggagccgggtgagggtgtgggtgtgagggggctgcaatttaaaatccctcatcaggaaaggaagtgagggaggaaggtcggggatatctggagagggagagggaacggccagtgcaaaggccccatggtgggcatgtgtccggcgtgctcaagaagactggggaggtggctgaggctggagtgcagggaggtgggtgagggaggaggtagagagattagagagaccccagggccggttaagcagggccttgggggccgtgtctcttttgagggacatgggagccatgcagtgatttagagcaggggtggttggcttaggtcttaacattcccggccgggcgcggcggctcacgcctgtaatcccagcactttgagaggccgaggcgt

SEQ ID NO: 1562736 - DNA, 4001 bp, Homo sapiens
ttccctttctgtgccttggagggctccatcaaggtaagggcaggtctggaggctggggctcctgaagtccctatgtgtgcaaagactgagaaaggcttcaagtgctggcctggtggcattgaaacttcccacttaagatcagaggtccagattcagacagacctgggttcaaatcccagctttgttaatttgtcttatgacctggggtgggtgatttgagtctcagtttcctcatctgtaaaatgggacgacaatatctacctcactacggtgtcttctgtgggttagcagaagctttgtaccacatggcaccaccagggggcattcgcagatcaggttggctgggggattgccttccccttttgcagacccagacttctgaagtaaaaacagggaaactaaggcctgcagtggagcatggggacaggctaagctccagctagctggcctgagactccaagcctgtgaggatgggcagggccagcagcaggaggaggagctaggcgtcagctccaggccccagggagggcccaggctggcgtccagtcctgagctggggccagggcctgggtggctgctattcaccccagcacagccaggaggcctccaggaccctcccctgagatggctgcctgctcctgcattccttccctcagactcctggagtttccagaccagcaggggaggaggtgacccaaaccagagagtaagaccaggaggaaataatacccagggatttctaacagcagcacttgactggaatcataacagaggcccttctgcaggcctaagactgctgagtgcccctcagcggttttaagtttataaaggcctcatgggaccctatgtatcagaaccataactatacccattttacataagagaaaacagctcagagagggaaagtgatttgctcaagggcacacagccagggagtggtggagtaggattcgaaccccgacccatctgcttttaaggcttaagctcttgggacggatcccagcaactggtgagaaccctacagaaggggagcacgacaagcccctcccgtactcccgttccccagaccaacccccacctttaaagccctcctcgtccaccataagcgtgtaatcctcaggggtctccgtcaggctgaagaacttgcacctggttgggggtggggagcatcttcagcttggtgtggagaactaggggtcgggagtggatttctctccatctgccccgagacacccccgcgaccctgggccgggcgccttcttgccctctcggcctttaatttccaggccaatgggatgttagccccatctcgggggttgggggctactttccggcctcccgacctctccaggaaccctccacccctccactcctggagggaggagaggttcacacccgcggcgacagccccaggggcgtcggaccttggaccccctagtccagcccctctgacatgaagggaggcgtcctggaaggagctccccgcagtgaccaggtaggaatgcccccatttgacactactgagttaagcattgcccatcccaggctgtttgcgctttgcccctgggagggggcctcacggggccggataggcggcggtcccccaggccggatggcggccggacggggagagtcctccccacccgctcccgcccgcctgcctgcctgccttacggcgatcctaatcctccgaccctggcccggagcgagagcagagcccccagcccctatctgcgctcccgaacccgggcgcgcaccggctgcggcggggcaggaagagcagcttgatgagcgggtgggtgtagagccagagaccgggacgggcgacgctcagcacccgcacccggtgttctaggatgtgcagctccatcgcggctcgcgcggacccgaccccgccgccaactagacccaggccgcacgggaggcggggcggcgggggtggtgcccgagccttaaaggagccgctgcgctgccgcgtccacgccgcccgctgcgaggctgacccgcccagccaggcgcggcgtccggctccttgacggccacgccccgcgggaagagaagcctattgggtggtcacgcctcctcctaacgccagaacctcatcccgctttccagccagcccaccgagaccgccccgaacggctccgccttttttagtactggctcggggatagaccccaccccgtctgactcctccaggccccgcccctgacgcgccccctccctgggctccgccctttccgcggaaagccagctgcgcagccggtgggagcatcccggaggggacgtttctgtccttctggcacacacgtgggtttcatgattgaagtccttgagacagaagggacacgaaacaaactggagctcggctaggaccagaacgctgcccccaaatccccggagcaatgagaggcacaggtctgctgtgcagcgctgtcccccgggcgcctttcgctctcctgcctctcatggctgcagggggcagggccgccaacacaggattgcgattgatacctacccttccccgcttgcgagggggctgacaaattgaaacctggcctggtagccccacttgttcctttcatccaactttcaaaatagaaggctcctcaccaggggcacacagaggtagaatcctagccacctctgcctgagcgacatactttgggttagggggctgcaggtggccaaggcctaaggcttgaggtccctcgataccaacaaaacccggaagtgcttgagccagtaatgcccagtgctcagactttggtgggggaggcccttgcagctgaggttcagtgagtactcagacctcaagcctgaaacttgagccccaaagcctgcagcccttagctagcctgtgcacatctaaacttgcttcaggttcaaggaggcccccggcactggcagacaccccagatcttatcaggccttcacaggtctaagacccccccaaggctaagcaggcatcagcatgtccatgttggctccatgcagggctgagaatgctccaggggacccttgcctggcctgagcaccctgaggcctcagatgtgaggctttgaaccaagtagactaaagcaggcctcaggcctgattgggacccagcaggcctaagcaggccctctgcctgctctggagcccccaccataggcagatggaagccaagctaagcctcctccctggactctcgggcttgacacattcctgtgaaacactatgtagccaccacatcctggcctatcccctggaggactaggggaaggaggagcttctcaaaggctgagcccatctcatcaatggcaggtgcagacagagtgggaaaccatggggctgaggggaaggaggcaggaagtggagtggcctaccctgatagtctcttgaaacccttcacctccctaggcctcagtatccccagctgtaccaggacaggatgttccaggcccaggcgaaggctgaaagctcccagggaggctctgctcctccctctcctgccccctcccgctatggcctggcctggcccagcttggtcatctgccaggaatagcgctattgtttgactggaaaagctgcttcctcagcagaaggggggcctctcccagggacaccctgtccttgccctcaccagtcatcaggttgtgaccgcagtgcctgcctgggccctcaagggcagagtcaggtctcctggagccctggtcaggagaggaagctgagtgaggggctcttggtgcaaatccggctgaggctttcccattcagctcctgtttcctcgtctgttaaatggggctaatggagcctacttgaccagtccagcctggcacttggcagtaaatcgaaggcggcattttatcaaagaaccacaattcgcccccctccctgagggcctgggctgagcctgtgaggacattcgtggtgctccactccgggccccgtccctgaccccaacccagaatcagctctcagaaacttactggagcctgaggtagcatccaggccaggac

SEQ ID NO: 1562737 - DNA, 4001 bp, Homo sapiens
tgaggaggcaccaaattcaacagctacagaaggagcgtcagtgctacacatcttgaagagcaagaagtttaaacttttttttttttgagacagggtctagctctgtcgcccaggttggagtacagtggtgcaatcatggttcactgtagccccaacctcccaggctcaagcaatcctcccacttaacctcctgagtagctgggactacaggtgcgtgccaccatgcccgattaaatttttttattttttgtagagatggggtctcattatgttgtccgtgctggtctcgaactcctagcctcaagcaatcctcctgccttggcctcccaaagtgctacgatttcaggcacaagccactgtgcccagcctaaactctggctttgaatcacattctacccaaggaggaactcagcccttcctcacaggcttctcctgtgcctgaagaccaccactgactccttatctgaccccttggtttccttgagggttaaagaagagggctggatcagacgcctgctgcagtcctggaactccacagtttactttgctgccagaatcacacccccaaaggtaggtgcctgagataccagtccccgaattctaaagcccagagtgaacacagctgaccttaggagcaaacagccagaggggaaagttcacacagcctgggaaaggcaaaaacaggatgagaacttgggtctcctaatttcccatcttttgaccggctctaagcttcccctgagggagagaagggattacctgggacctctgttttacaaatgagtgcaacagcaccaagggttctatgcctatttcctgggcagaaggcagctttgggagcttgttgatgattaccactcacctgaggcctgacacgaataagtcaggtgtaaccactggttagagtgaaatgagggagggctgggagtggtggctcacgcctgtaatcccaacactttgggaggctgaggcgggaggatcacttgaggtcaggagttcgagaccagcctggccaacatggtgaaacccagtctccactaaaaatacaaaaattagccgggtgtgctggcacgtgcctgtagtcccagctacttgggaggctgaggcatgaaaatcgcttgaacccgggaggcagaggttgcagtgaaccgagatctcgccactgcactccagcctgggcgacagagcaagacgagactccatctcagaaaaaaaaaaggaaagaaagaaatgagggagacctggcagggccaactcatcatgtgatttctgtggcagccctgggaccccttgcttgctatgagtttacccagcaagctgtcctctctggccagtcaggcaatgttccagctccaatattccagcgctgcctgcagctagctgggggcttttgggcaagccatttcacatctgtggatttcagcctcttcgtttgtaaagtggaattagtcattcctgcgtctagaagttagcaggagttcacgtgcagcaacaattggtagagaccttcacaaaggagccgctcaagaaatgcgggttttcttgctgggcaaatcgcctccctccgtcaaaagggtttaaccaggcaagagtcaatattaggaagccataaagtcgccctgagagatgcgaaggggaacagtagctaagagtgtaggagccgcccacccccacctccaggacctccattccagcgcaagctcgggaaaggtcttggaacgactcccggaacggagcgttacctccggagacgccgtccacgcggatgtgcggcccctgacgggacgtgatgacccgctcactcttccaagtgccagctccgcggatgccttccagctccccctccagaatgccacgcagctgggccagcgctgactgtgcgcggcggccgcggggcacccagaagagtgcggcgcgccaggcgttcccaggccacatcgctcctacctcgcccgagcgcgcctgcctgcctgggagccgtgcgcatcgcggacgcagcctggtcgcgtggccgggggccgggctccagcagccaatcggagctaggggggctcgcttaaaaaggcggggaggcgggcctaggacgggtgggcggggcctggcgggatccgccagggaccgagaggcttgacttgtaagttgagactgccgaagtccggatggcagaggggagggaagggggcggaggaagtcgcgtcagggccaagcccaccagactccccaccgcattcccacgtactcacctctcggccggaaatggggtaccctctggaccccaaaggcagaagcctagaagccggctaaggcacgttccgcagcctccgggactaaggattcctggcttctgtccagctcctgaaccctcccccgccattctcaggtgcaaacgccccagatgtccccactgcctgcccgcctaaccgctccgcattcattctccagtcttcaaagtgaggaaaaatacaccgctcagtttctcccttttccaatttattttaaagttttaaaattacaaagacagcaaaattttcccggcacaagtaacacttgtttaaaaaagggggtgggggggggacgcgcaagtgcgcgatttttctattttattaaaaataagagaaagacaactgtacaggttttttctcccagctcccgggtgtgaaactaagtactagccctagatatgtatatatacacaaacacacacatgcacacagatctagctctgtaaaactacttagcaaatcccaaatcgactgcagtaagtcttactatccactgcccgcccactccccctccccctcccgcagctacaactacttataataaaggactcaaaaagagatcgggaggttttaagtggccgcagccccaccaaaccaagcaaagacacctcttgtacaggaggaacaaaaatccagaggaaaagaaaagtcttcctaggacacaatccatcgattgcgtggaaaaacctaagtttcaacagggcacactgaggcacttggctgactccccacccttcccctgaagttttcactccggtttaacaagagaatttgctgaagccacaaagatcccccaatggctacatcctagctgactgggagaaactatggcttctcccatccagctgtcacttggaccccactccccttccctaagaaaatagggaggccgaaagcgcaaactaacaaaaatgagaaggaaactgggtttgggcccccactgctcaccactgggaggtggaagtcagcccggtggcggtttttttccccctccttcctttgccggctggctgctccctaccacctctctcctgctggccaaaggttctgaaactctcacaacgggtgcccaactcaaagaaaactcactcaccctaaagatattcctgctaacctcacaattcctgggttccctctcatctagccagaacaaactgccttgtgtcttctccccacccacatctaccttcatggcaaacaagccaacaaaacacacaagccccccccgcaaatccctaaccccgtaagtaggttaatagcaaaacaaaatataagtacattctcatcattagattggttgttgctgtccttgcacaactggttaaggaaaaatgaattattctgtaatttctgaagaatccaaatcctgtctcttataaagtcagaacagaagggggcaaaaggtggtggtgagcatcaagagagaaaaaaggagaaaattatttacagaaaataggagacaggagggagtgtccgcaagaaaagacttcattgtcacttcttcttgccggccctcttggcactggactttgctttgggtttcactggtttggcctttttgggcttggatgccttgaccggcttggctttgacagtcttgggttttttggctttcttgggcgtggcagccagcttcttcttggccttcttgaccggggtggctttgggtttcttggttggggctttggaggcagccttcttgggcttggatgccttctt

SEQ ID NO: 1562738 - DNA, 4001 bp, Homo sapiens
ctactcgggaggctgagacaggagaatcacttgaacccgggaggtggaggttgcagagagctgagattgtgccactgcactccagcctgggtgacaagagtgaaaacccgtctcaaaaaaaaaaagaagaagctatcctttacctccagcctccacaagggaagaggaaagatcttacaattctgctaggacacaaagggggaaggaaaggagaaaatcccagccccagtgtgtcagggcccagccaaacccaggtatctctaacttctgcctggttttagactctctggactctcagaaaacccccactgtttctaaacctgagaatgttttgtatgacccacagctcaagacctgtgtctgagatcagttagccaggggcccacccatccccccagcccagttgctgctgagacccaggcggacacttccggcgttcacaacggtcaagggctgctgagtgccccttttccaccccctgcccctctggtggctaggatgactctgaaacatccctagaggtttggttctggggccaacctcatggttcaactctgctcaagcctggcttaaaaggggccggccatgaccccaaaccacgctagacagttgccggtgtgcccgggtccaagagggttccctgaggccctggcaacgacggggtcccaacagcagttaaagccttgggagagaaccctcactagaccagggagaagccagccacggctttcagaggcagagtccaggagcggggctgtgagagcaggggatcatcagggctgtgggttaaggagctcaggtggagggtttgcgggctaggaagcctaagcaataggaagctacgtctgaggagaaacaagaaaaaaaggggtgtagaagcctttgaaggaagttcagcaagagctgggaaaggcatcttggagactgaggggttaggctgaagggagtgacagggagcttggaattattaatacttctggagtctaagactctcccaagcctgtagggtgcgggggtttctcactatgtggctagagactaggagcggcgggaggaatcaaatggggcagtgggtcctcccttccaggacggggtaatgagcaaatgtgactacttgcgggctccaggaacgccatgcagggccagagagtggaggattcggggcctgaaaatagtagggtccctccctcccgggtgtgagatgcaaccccggggaaccgctcgcgtgctccttccccgggccgctactccgtgaagcaatgtgagccttgggggttggaggctgctctctccgtcccgggggttcccggcgcagctcactcgccgtcccaggggtcatggcccagggatccgacaggtgggcggcgcccgctcccaccgctggaccgcgccggggccggggtcctccatcgctccagggtctgaggggccgactgaggacaccgcccctcccgggccgggggcggggcgtgaggagggggcgacccgtaccccgcccccgccgggaaggggcccgcctcgtgcccccggttccggttccggtccggcccgcgcccctcccggacactcactgattcgcgcctccagagtctccggctccatcgcgggctccatccgccaccggcccccagcctcggcaccgcccccccgccccccgcagctctcgcgggacctcctgggcaccgccctctgccgattaaaggggcaacgtccgaacgggcgcgctcggcaccatagagaggccaacgagctcgcctagagcgtcacctactcgcccaaccccacccccacgcggcgtctacgtcgcagctgggaccggccgcctgcttttccgttcccggcgctcaggcgggagaggaagtggagatactgcaggctaagggcagcaccatggaaaccccaagggacgctctaactcgttctgcgtcacggagatgtctgtgaccgcctccggaagaattctctgcgggcatgttgctgaggggctctgaggccacttccggagccctgagcgggtacttccgcttagagtcgaacgtgggagagtcccttaaaagggcgataagctacatcctcatgtaccttggccgctgtgaaaatgacgaaaataaatcagtttcttgagtgcttacagtattctgggcattgtcctaagcactatttgtaattaatccatttagttctgactccttacaacaaacccaccagataattagtcggcctgaggccgcacaagtagcagagcttgaaccctgtgccgtctcctccattcatccagccaacgtttaatgaactctttgtatttgctttgctctgtgatgggcacagaaggagatagacaaggccagatatttattacagtgtgataggggaagcccacggggtagtgggaacaaaggagggggctcctcccccaaactggggtggggtgggtgggggtgttgtcaggggaggggtcgtgtcaggggaggggtcgtgtcaggggaggtttcaagagaaagtgatactgtacttcgctcaaagacagtcggatttctccacgtagagctggtgcgaaaagatattcagggagaaaaagtaggatgaaggccgaggagggcggatcacgaggtcaggagatcgaaaccatcctaacacggtgaaaccccgtctctactaaaaaaaaaaaaaaaaaaaaattatctgggcgcgcctttagtgccagctacttagaaggctgaggcagaagaatcgcttgaacccgggaggtgaaggttgcagtgagccgagattgcgtcactgcactccagcctgggcggcatagcgagactcagtctcaaaaaaaaaaaaaaaaaaaaaagtaggatgagtccagggagttggaagtatttcaatacggctcccagatatctgcaaatagatatctatttgcaggagatatcttggaattaggctggggcaagatcacccaggtcccatgttttgctgcccttttttttttttttccctgtaagcaacgttggaggtgtcgttacagttttacggatggtagcaaagtcaggcttttgttttagaagggtccagcagtgggaggaagatagcagtgggagccagactggaatcggggaggacagtacgaacagacttcctaagctcggcgccttttctcctgtatctccctccatcaaagacctccctcaccttgtggcgtcacgacctggcggcgcctggtccccgactcacctgggtccattgcactctgtcgccccctcgcggccggctgggaaaccggcccgtggcgacctctccagcggtcctgtgcctgggagggttaaagctccactgagactagggaatctggcgaatccggttctgccttggcgactgacctcgattcaccttgcggaaccgcagtaacctcatccaggagatgagggggctgtgctgggtcagtttttcccctaaactcaaccattcagcgactgggatgcttttctaaattctctcccaaaggccattgagattatacagggaagtgatatgtatgtttattgcattcctcaacaaaagctgtaacgtagtgtatacttatagctttttgtttatgtcttttactactgaaatgaattatatatatttttttattttattttatttttgagacggagtctctctctgtcgcccaggccggagtgcagtgacgcgatctcagctcaccacaacctctgcctcccgggttcaagtgattttcctccctcaccctcccgagtagctgggattaccggcgcctgccaccacgcccggctaattttttcatatttttagtagagacggggtttcaccatgttggccaggctggtctcgaactctggacctcaagtaatccacccgcctgagcctcccaaagtgctgggattacaggtatgaaccactgcgcccagcctattatatttatttttgagacagagttttactctgtcgcccaggctagagtgcagtggcacgatctcagctcactgcaa

SEQ ID NO: 1562739 - DNA, 4001 bp, Homo sapiens
gtcccttaaagtgtcaaagacacgtgagttggagtgaggtcagagaagctgattctggactgctcctgggtcagacgccagtgaagaggaagcgctggcatcatgagacatcatctttctccccctgcctctggctgaaagccagggcctccagatccaaggagatctgactgacctccttggcccatggcccctgaccctcagccctcttaattctacctgaggggagtaccctccctagcaggcagttggggagaacacctagagagggagggaggtgtttcacaacagggtaagactccaccctgccactctatagtgctgacaataacatcatttacctcactaggccgggcgcggtggctcacgcctgtaatcccaacactttgagaggccgacgtgggcggatgagtggctaacgcctgtaatcccaacactttgagaggcctatataggcggatcacctgaggtcaggagttcgagatcagcctggccaacatggtgaaagcccacctgtactaaaaatacaaaaatagctgggcgtggtggcgcacctgtaattccagctactcgggaggctgagacaggagaatcacttgaacccgggaggtggaggttgcagagagctgagattgtgccactgcactccagcctgggtgacaagagtgaaaacccgtctcaaaaaaaaaaagaagaagctatcctttacctccagcctccacaagggaagaggaaagatcttacaattctgctaggacacaaagggggaaggaaaggagaaaatcccagccccagtgtgtcagggcccagccaaacccaggtatctctaacttctgcctggttttagactctctggactctcagaaaacccccactgtttctaaacctgagaatgttttgtatgacccacagctcaagacctgtgtctgagatcagttagccaggggcccacccatccccccagcccagttgctgctgagacccaggcggacacttccggcgttcacaacggtcaagggctgctgagtgccccttttccaccccctgcccctctggtggctaggatgactctgaaacatccctagaggtttggttctggggccaacctcatggttcaactctgctcaagcctggcttaaaaggggccggccatgaccccaaaccacgctagacagttgccggtgtgcccgggtccaagagggttccctgaggccctggcaacgacggggtcccaacagcagttaaagccttgggagagaaccctcactagaccagggagaagccagccacggctttcagaggcagagtccaggagcggggctgtgagagcaggggatcatcagggctgtgggttaaggagctcaggtggagggtttgcgggctaggaagcctaagcaataggaagctacgtctgaggagaaacaagaaaaaaaggggtgtagaagcctttgaaggaagttcagcaagagctgggaaaggcatcttggagactgaggggttaggctgaagggagtgacagggagcttggaattattaatacttctggagtctaagactctcccaagcctgtagggtgcgggggtttctcactatgtggctagagactaggagcggcgggaggaatcaaatggggcagtgggtcctcccttccaggacggggtaatgagcaaatgtgactacttgcgggctccaggaacgccatgcagggccagagagtggaggattcggggcctgaaaatagtagggtccctccctcccgggtgtgagatgcaaccccggggaaccgctcgcgtgctccttccccgggccgctactccgtgaagcaatgtgagccttgggggttggaggctgctctctccgtcccgggggttcccggcgcagctcactcgccgtcccaggggtcatggcccagggatccgacaggtgggcggcgcccgctcccaccgctggaccgcgccggggccggggtcctccatcgctccagggtctgaggggccgactgaggacaccgcccctcccgggccgggggcggggcgtgaggagggggcgacccgtaccccgcccccgccgggaaggggcccgcctcgtgcccccggttccggttccggtccggcccgcgcccctcccggacactcactgattcgcgcctccagagtctccggctccatcgcgggctccatccgccaccggcccccagcctcggcaccgcccccccgccccccgcagctctcgcgggacctcctgggcaccgccctctgccgattaaaggggcaacgtccgaacgggcgcgctcggcaccatagagaggccaacgagctcgcctagagcgtcacctactcgcccaaccccacccccacgcggcgtctacgtcgcagctgggaccggccgcctgcttttccgttcccggcgctcaggcgggagaggaagtggagatactgcaggctaagggcagcaccatggaaaccccaagggacgctctaactcgttctgcgtcacggagatgtctgtgaccgcctccggaagaattctctgcgggcatgttgctgaggggctctgaggccacttccggagccctgagcgggtacttccgcttagagtcgaacgtgggagagtcccttaaaagggcgataagctacatcctcatgtaccttggccgctgtgaaaatgacgaaaataaatcagtttcttgagtgcttacagtattctgggcattgtcctaagcactatttgtaattaatccatttagttctgactccttacaacaaacccaccagataattagtcggcctgaggccgcacaagtagcagagcttgaaccctgtgccgtctcctccattcatccagccaacgtttaatgaactctttgtatttgctttgctctgtgatgggcacagaaggagatagacaaggccagatatttattacagtgtgataggggaagcccacggggtagtgggaacaaaggagggggctcctcccccaaactggggtggggtgggtgggggtgttgtcaggggaggggtcgtgtcaggggaggggtcgtgtcaggggaggtttcaagagaaagtgatactgtacttcgctcaaagacagtcggatttctccacgtagagctggtgcgaaaagatattcagggagaaaaagtaggatgaaggccgaggagggcggatcacgaggtcaggagatcgaaaccatcctaacacggtgaaaccccgtctctactaaaaaaaaaaaaaaaaaaaaattatctgggcgcgcctttagtgccagctacttagaaggctgaggcagaagaatcgcttgaacccgggaggtgaaggttgcagtgagccgagattgcgtcactgcactccagcctgggcggcatagcgagactcagtctcaaaaaaaaaaaaaaaaaaaaaagtaggatgagtccagggagttggaagtatttcaatacggctcccagatatctgcaaatagatatctatttgcaggagatatcttggaattaggctggggcaagatcacccaggtcccatgttttgctgcccttttttttttttttccctgtaagcaacgttggaggtgtcgttacagttttacggatggtagcaaagtcaggcttttgttttagaagggtccagcagtgggaggaagatagcagtgggagccagactggaatcggggaggacagtacgaacagacttcctaagctcggcgccttttctcctgtatctccctccatcaaagacctccctcaccttgtggcgtcacgacctggcggcgcctggtccccgactcacctgggtccattgcactctgtcgccccctcgcggccggctgggaaaccggcccgtggcgacctctccagcggtcctgtgcctgggagggttaaagctccactgagactagggaatctggcgaatccggttctgccttggcgactgacctcgattcaccttgcggaaccgcagtaacctcatccaggagatgagggggctgtgctgggtcagttt

SEQ ID NO: 1562740 - DNA, 4001 bp, Homo sapiens
ataatacatattatatattatataatatattacatattatataatatataatataatacatattatataatatactttatatattatatattacatataatatataatatattacatattttatatatatatatgacatacaggattcacagcagcaggtgggcagaaagaaagtctgagtgggcaaaggatggcccagatccctgcagctgaccccaaaaggaaaaccctgggctggggaaagtagggagacagagctgccttcaatggggcacagctgaagcctggcagcagctgaggattccagagaggggagacaggaggggaggcactttatcaaaggacatgttaatagaggtagggcctacagaatgaaggaggcttttcctcacatgctgagtgtgtcacattctgtcccagtcagccctctaccccctgaatgcagagagggcacctagggggaagtgggtctggggaagccatgtcacctgaggaaggactgcaggggctggcctagaagtcttctccagaccccacagctcttgtcctgggcacataaggtagtgagttccctgtcccgagaaatgtgcaagcctcactcacccagagacacagactctggtgtcagtatcacccacttccaacacacgtgcaagcacgtgcgcacacacacaactgagcctcatttaggctgagcagagcagcttcccaggatgcagcagagagaggagtatgaggaagaggtagacacggcagccagtctgaagtttcctggttaatccttcaacccagcttgatggctttgtcaccacaaccccagagccacaagggtgaaaccagagcacagccccaaccccattcacaggcaggaaactgaagcttagacaaaagggattttacgaggtcagctggccccaggaagtctgcagacctgcgggtaagcccaggacccacccaccccttaccctgccagcccccagcctggagtcgctatccctcgatatgagaatgcacagatctctggcgtcttccccaggactgcctacagccctggactggatgcttactacccagacgtggagttggaatctgtctctcacagtttccacccttgcggcacagagccgagaatcagaaaaaacaccccttcagtaagatttaataaccactacctgctggaaacctgtcgaaagaactatatatatccctatatatatagctgagaggtggcaggcgccccctggagttgggcaatgacccctcgcacaaccggccctgccccaccccaatccacagccacaaacagaacccaggagcgaggcaagcatggcccaaggacacagggtcccccaaccccatcacagctctggctctactccagagctgaccccccgcccccactcagggctgccagatcctccagggcctgtctgttcatgctgcactctttcctcttaattccaagaagccacggctctctcaagagcttcttcgcacaagtcaggtgactccccccagccctccttcacccactcgcatacctcactcaaactcacataaactcatcagccaagaaacagaggcccccagcccagacccagtcggataaagaacccagggctctgcccacctgtgggatccttctgcaggatgcgcccacacaagtcttgcccccttcaccccgaagtgcaactcactcccactgcacgggtacataaaccgaggcttggagaggaagaggaactcctctagagcgcagcaagcatatggcagagctgagaatgggactcaggcctccagacactcatgggagtgccctgacctgagcttccccacctatgatgtccaccagctcagagagggtgagcggcgcctctgggtcacacagcactggggcacagccaactgctctcacttctgggctcacccgacgcccggtctggtcatccagcagcacaccaaaaccaagctaagattccctgctgtgacccagctcctccttccctcccctagtggcctgggggcggggcggggggaggggaggctttaaaggcacaggaactgctgcaggtgggatgtgggctggctcctggtcccatccctgaggctgtgatctgggaccgctgcaggctgcaggtgtctctgagcccggtggggtctcaaaccctgaatgagagacctgaactctgaaagcctcggtggggctgaatgaggctgggtttcagcgggaggcagattagaccaaaggttccctgggagatggggccacagagctgggctgcagccagatgcccacgccaggaggggctggagatgtaagcatctgaggccccacaaggtctgaggagcctagttcacctctacaaccccagggcaggggatgcctctcctaacaggccctctccccagcttgcaggactacaggtggggctctaggagctgtcactccaaggaccctggtcacctggactgaagggagtcacataatccaggagggtccttccttgacccccaatttcaggggtctgagcaaacaggctgaccgaggaccccaggcaacggaagcagggggatgaggcccatctgtccatctcatgccctcacctgctctgccccattcaatgagatggggtgggtgcccccacagcgctggcaggccgaagcctctaagccctcagatcgaggtccacacatggtctgcagcctgccagtattgtcactcttagcaaggctcacgcttacgttccttctttcattccatcattcattctcccatcaaatcctggcccctccagattcttctctcaaggagccctgacctggctgggcatgagagtatggtcaccccagggggaagagccctagggaaggggcagacaccagaataggggccttgggaatccagcccgagctgggattggatttggggaggacctgccaggcggaaggaaccacctgagcctgaaggccaggaaatggagccttttccaggaagtgagggctgcaggggacctcttgaccaccctaggcccgtcctgagccccgaggtgtcaaagctggaaaaggaggtggccgagctaagacgttcaaggccaggccagtgtggactttgagagccctgggaggctggtgaatgtgtcaccgggcccagtaacccattaaccctggctcactcattaagaccctggtgggtgtccattagctccttggccagttacaggagctgggcagagggtaggggtcatgggaagaagggagtgctgattggggtgctaggtagaggctggctgagctggctcttttgtgtccttgttccttgaggagggttccagggccaagctggcctccagccaggggcagctgccaacacagcccggggcgggtgccgccccaccatcctagtgactttcatctccttatcacccttgtgtgctggcaccagcagcccacagtgcctcaggggccttggccagacaggaggctcaaagggccagtccagtgcctggctcagcatccagccacacagtccctctgagaaatgggcccactgtggcctccaaagcccagtctgtttcaacgggctgggatctgccccacctctgtatctgggaaaacaaggccctggtggggcaagaagggagctcctggcataggaacctgcagcctgagaggggaagggacctgcccaaagccactcggcaagagagtgacccatgacaccaggaaggctgtgcaaaccacttcctgcaactggcatctcattgcagccccacccccactgacaggtccaagaagctgacaacactgaataccagcaatcacccagaaagcctcatgccctgagtgggccatggtgagggccatggcggggtggggttggggggcgcatgggggcatgacatcccgaactgccatcatgaggctcacaatgatcgaacaatgcggatcggtccagatgcaagcggtgcctggcccatactccagaaccgctggaacaacat

SEQ ID NO: 1562741 - DNA, 4001 bp, Homo sapiens
aagaatggactcataggtggccaggtggccagccctggctagaggctcagccttccctcagtgggaggggccccagcacccacagtgtggaccccgcaataaagagtgacacccgcctctgcttttctgcatcaccaacctcagggtcactgagcaacagccctgctgctggggtggggagaaagggtggctgtgtctatccaaaagggtgggacaaaggtcacactgaccttcccccaggtgctctttgggcaagtcccccatggagtctaagatgtgggggtcctgggtccatccctgtgggctggagagttagaggaggcctccagggagcgggccctcacatctgggcagggcttgggctccttgagaaggggagctgcgaaggagcgggtcgggagccccaggaggagcaaagctctacatggagccccacagcaagctcacgtctgagcccaggctgccagcctcaccaccacagccctctgggcaggggacaaggctgcacagaccagaggcaggggccacagccgactaagtgagaggacttggtgcctgcctcccacagggtacagtgctgcttgccaccctcaggacccagccccaggcctcttgtacttggcgaggggcagctctgtggggttaggagacagcaagccagagacaaagtgcttgtgtgttccctccaggccctgggggtccccgtgtgggagtccccgtgtgggagagcatgcagcgggtggaggtgcgcatcaccagcagcagggggccttgggggcagagtagtcctagggctgcccttggcagggggaagtgtctcccttcctccccaagcaccatcagggtgggctcccagccagaagcctaatgccacagtcaccctcagccctgtgtggggagttacagttcagcccaaccagaagacaggcagggcaggcgggaaaggaatttagagatgtccggggggatactgaggcccagagtggggaagtcatgtgctaagccaggaggtaaggtctgggggcagtggggccctgctagatgaggaaagactcagcagcagaggggggctccaaggctaaggaggaggcaggggtcctcctgggcctacacaccccagccaccagctctgactttccctcacagccatggcccacagggactgtaagcggcgcatccatcccctgtggtgcatggattccagcacattcccagtctggctggatgcataacagcttctcagggcaaaaggagatggccaaggagggtgaggacaggatggtgttgggtcccaggactgggatggaggcagtgaggaaaaggattttcctcagaccccactgatctcactgctttaggcggacttcttacccaaaggctttggagagattggagatctcacagttcaggcccgctctgctcctgacttgctgtgggacctggccaggcctttccctttttgggatctctgctccctcccctctgttaaataggactttcagctctcagcactccatcctggggtccagctccctcccagctctccttgttttagggactggccctgcccagcagctcagaagccatagaagtgtttccctatgcccctactctggaacagggtgttcaggctccccagagtgaggcaaaatggggtagatggtgggaggggccagcagagaggattatgagaaagtgaaagcttaaaccaacatacatttattctgtgagcaatctattatttaaatcaaaacggtatgagagccggccctgggccaggcaagctgataaacctgtcacataagcaggcctctgagctctccctgaaactcctgttggagaaatgccaagctctccagtcccttgcgccctgctgactccctgcccaccactggccctaagccagcccacaaactctcaattgtcactgagagattcctaccaggatggtgtgcgaggacccgagctggtgttccaggcaatctctgggagaatccaggcggcagcagatagtttcagtctctctgcctcttggacagaagcacacgatgcagtagcggagccagagcctgaaacggatcaagcggagaaggttggcctcattgccatgcaggtgtttagagccttcacgaccaccagcaaggctgtcgagggcagggccaccgagctccacaagtggcagcttgtggctcatgcagcctggtgaggcagagagcactggccaggacagctccagcccaagctctaaacggaggaggaagcaggtgggccgtactcaggccggtcctcactcaggcctagtctaggaggcagacaggcctggccttggtcccagcctgtcacttgctggcgatgtggtcctctcagagcctgttccctcatcttgggaatgaggtacaccaagcctcccattatcccactggagtgagagtgaggatgacgtaagttttggaaagtgtctaccgcattgaggggaggagggcaggcactcttcaatgtcagcagggcctccacccagggctgtctgggtggcaatggcaggaactcaaacctttggggctaggccagagatgaagccatttttttattcaacaagcacttccatagcctcccttgggccaggtactgttctgatggccttatactcctttacttctcttctcatttgaaggaggtaggtgctctgttttccaggtgagtcgactgaggcagaaagaggttaaggggacttgttggccaggcggcgtggctcatgcctgtagtcccagcactttgggaggccgaggcgggtggaggtcagaagttcaagaccaggctggccaacatggcaaaaccccatctctactaaaaaaaaaaaaaaaaaattagtcaggcgtggtggtgggtgcctgtaatcccagctacttgggaggctgaggcaggagaattgcttgaacctggtgggcagaggttgcagtgagccgagattgtgccattgcactccagcctgggtgacggagcgagactgtctcaaaaaaacaaaaaataaagaaaggggattacttgtccaagttcaaagagccaggaactggaggagccagagtgtaagcccgggtggcctggtgccagtctgtgacgttaacgcctgcatgctgctccctctcctacagccatcccagggactatcactggggctgctcggccccaggattcacctaaatgagcaagccccttccaaaggggccatttgaagcaggagaaccatcatggtcctcctgtggggaacagacctcaagcctcgttgtccctggagcaaagccagtaaggacctccctggacctcagtttcctgatctgcagctacatggtggaagcagccatgatgatctgggctttgccctcccgcaggattgtaaaagactagcaaagagtgggtttggaagtacttcccagactgagcaaaacccaggcggcccaggctcaggggtgcagcatccacacccagctcttagaatctgccttcagctccctgggcctatagctcctcatgccttagcctgccttgcagggatgctgagaacatcttgcagggatgctgagaacatcaaaaggaaacacgtagaaaagatgatgtgctccacaggcccaacatgaccaagactcgggaacttcttttctgtcctaaaagggaggatatttgagcccaaataaggtgctttaggacatgagcccacaggagagatcagcctctgctgacggtcttcatctcgagaatccagagtcttgggcaactgatcctagctgctgctatcaacccagcatggaggtttttctctgggacctggaaggaaaggaaaatgcacttgttccacttagagctagttgccaatcacccatgaaatctagtattttcttttccaactatgcacaactttttttttttttttttttttttttgagacagagtctcactctgtcacccaggctggagtgcagtggcatgatcttggctcactgcaacct

SEQ ID NO: 1562742 - DNA, 4001 bp, Homo sapiens
gcccacgggtggtctctggtgcctgagactccagtctcatttgcatctttgcaacttcgagtttaagtgggtgtcgcatcctgaatgtcctcctgagcagaggaggggcacagcctggggtggcggctggcgtcaatccctcaaatcccctgagagccactggggagactaagcagtccccagccccgacttgtccctgagctgccattctcagccctgtgggaggagacagaaagacctgaagagaaaccaaaggaccaggtcaggaggggcggggggtggcatgagaaatcagggcagggaaggatggacagatgggggaatggagggaagaaggaatgaatgaaaaggtgaatgaatgaacagagagagagagcagccactcctcccttgctttaatttacaaagcactgggatcctcccaacagcctgcaagacagaacttctgggaagcagaccaggtggctggcagggaggggaggcttgccctggcttttgtgggcccagtgggaggcagggagcaggaaggggcatcctgtatgtgtcctctgcagcagcagcagcggaggcctcccttgggctgggcttcctggaagagggtcaggaaacacccgctgtggcccctctccaccacgccctcatccaggacaccaagtatcagtcactcagctcacgagacccaggccctgactcagggagagaggatgtgaggggtggggcaccgggctcctcaggactgagagacccgagatgtggccccaggctgggtgttggggcagactggctatggcagcattgtgtgtaccccagcaggccagtacccacgcagggagcctccaaaccccttcacccatgaccctgggagaagaccgcagccttggagaattggcctcactgaaggggcctgcaccggccagcagggtcaggcggggccagacaggttcccacctgggatatgcaaatgggcctcctgaatcctggagccaggcgtggactcacacaccaccattgtccccaagtccccatctgccccacgagcacaccctgccacctgttctgtgcaagggccctgaggctgcctccttgcgcccaagacctgcaggtgctgaagcccacacacacacggctcctgcttcctgggccagtgcacgtgcacacacacacacacacacacccacccacacatacacatacccacacacaatcacacacattcacacacacccacactccccacactcacactcacatacactcacacacacccacacatgcatgcaatcacacatacccagacactcacacacacacccacacatacattcactcacacacacacacacacacacgccttctccaggaggggctggctgccaagggccacccagcttcctcccacgtctcactcaccgtccaatatccgagcagaccttggagtcggcggcaacagcagcgtgggcaaaggcctgggggccacatggggcctggtgtcgagagaggaccacagccagcacaatgacagccagcgccagccccagacccagcaggactaggctgaccgtggccccgtagccccgggccatggctctgcagcccaggaggagaggggcggctggtgggcagacggagggacggatgggtgggcagatgaatggacaagaagatgcacagagtcacaggtaattggacagatggacaaacaggtgggggctgaagacagacacgaagatggatcgacagataggccagatagctagacaaagaggacagtaagagaaagatggtcagatagacaatgggacagagatgggcttacagatgggcggacagacagacaggtctgaacagcgggctgccagatggacagatgggtgaatggacagatggctggcagctgtggcgagctgctgccctcaccaagtgcacactacggagtggccaaactcacgcctcaacttctggttttcagctcctgcttgttgctggcaggaggccaggcagcaaagcgtctgaggggagttttccttgcctagaggagtcagctgctgtgttaactccctcactgctagtaggtccaaaggccccacctaccgcccgccagagcccagggtcacactgtcgcaatgtgcaggagaacttggtgcctgctgcactgcggttgccaggtaggggcagggctccctggaacctccacaccattccccgggttcccggcagctctgggaaagcagagctggggccgctcaactctctcccctggatccggcaaggctgcccccctcccagagtggagccctgctccccagctcccatctctatcccctaaccctctcctcatggcccagcctagtcagcatcaaggtggagctgaacagaggcagagggagggggacacaaggtggtgtcacttaaaacttgggttcaagtccttatgcttctgcagcctggcctgggtcccacaactccccagggtggccaagggcttcccagtctgcacagaggacagggggacttgacagcatcaaatgctggtgactacaagacgcccatgtggggaatgcagacagaccatgcctctagcccttggcatccgggaccatttgtccaggacttgctgtcctggaaatgcagcatggacctccagggagggaggctgtgtggaggccacgccctgcctgtagctctttcccaccctagctgcgggtctgcttccctgaatccaaatccgctattactgtgctggcagcgcagcctctctagggacactggcctggctctgttctccccaggcctcagggtgcctaaatgggaggcagccaggagagtgaggacccactgaggggctctgttgaccaggctcagcaggggtgcaggtgatgtgggctggacttcttcccacgtggcccccacagtcctccccgcttcctccccagctgaacactgcctgctccagatgtctacacctggaagccgggcccccccatctgggcagcagagaaactgaggcacagagacagactgtgtccttacaggccacacagcctgccaggcccctatgtccagccagagcccctggtcagcctggactggaatgattgtttagaggcaggctgttcccacggctgcctctcgcggtggggggcctgtggatgcctcctcccgcccccacccgactcccaagcctcagtgacattgctcaaccaggagctgaagtgcattcctgggcttaggccagcccacccacccacccgctgcagtcctggaagctcagaggcctgggcagcaggaacagtggagacagcagcgtgggggacgtcccccctcctctccccaccatcctggtcaggcagaggccagggtgcagggaccgcctgagcaaaggcccagggaaaggaatgggtgtcattctggtcctgacccgaggcacagccaggaaggtccctgaatgtccttcctcaggaaatgatgggggaaggggcgatgagaatgaaggagaggatttaagtccctcaccccccgaggtagtcctgggctgagccccacgggacctggagaaccagggtgtaccccaccagcgtgtcgggtccaggaagcctcgtggccagctcccacttctcttcctgctgtgcaacccagagcaaggcctgcccctccagcttcagtcttctcccctgcaaatggggccacggcctttcctctcaggccgaaataaggattgaggccgggtgcagtggctcacccctgtaatcctagcactttgggagactgagatggggggactgcttgaagtcaggagtttaagtccagcctggtcaacatagtgagaccccatctctatttgtttaaataattttttaaattaaataaataaaataaggattgaggagtgactcgtacatcactcaactgggagccccagagacacagccctccagggctcagaaccggtggtactctactctgcaggcacaaaaccctgtttgtgggccctttggtatcac

SEQ ID NO: 1562743 - DNA, 4001 bp, Homo sapiens
aggaaaagaggtgatggagccaccttactggataagtgggcagtccctgggccacccgcccctggccctttcccacccaggcggcccagcagcccctactagaggttgatggtgctggtggcggacacagcactgccgtcctctgcgacgacagacaggtgagcagtgcccccatcaaccggcgtgtagaactcgggcttgtagtaggagatcgggtgagtggtgtcgtcagagatctgggcccggagctgggcagcgaagaactcagaggtcatgttgtggaccacctgccgagaccccagagctggcctgaggaggtggggagggagggtggggaggggacacaggtctcagaaggcccctgactgtggctctgaccacaaccctctggcacccacaaccttccgtggctccccaggacccaagggcaggcccaggatcttgcatgaccagtctgactccctgtctctgtcgcattccagcaactctgaatgtctgtctgcctggtcctcagcctccagacccttgctgcattcaatcactcattccttcatgcaaaaaatatttctagaatttgcactgcatgcctggaactggggaatcaacagggaacagacacttaggtcctgccctcatgccaagaaaaacaaacacacacagggaaagtgctgaaaccacaagccaggtaaggggaatcaagaggcatgaggtatgggcagagtggtcagggagggcttctcagaggaggcaacgtgtgaaaagagcctggaatgtggcctaaatggtcagtgcaaaggccctgaggcaggtggtataggctggtgagcgataggcagagagtgaatggagtggggtggggagaagaggatgaagatgcaggctggggcccatcccacaggacctcctaggtcccataacaactggcttttgctctgtgccatgcaggcttagggcagaagaatgagcaggctggggagtgttttcacagggtccctctggcagctatgacggggataaggataaagcccaaaggggaggctgtgggtatcaaccaggcaagagatgatggcctgggtgggagaaagagaagaatcaaggatggcgccgactagcgaggtaaaccctgcagaaggggcaggtttgaggatggtcaggagcttgattttggatacttcatcagacctgaagagcatgggtgcacgtataaaaaaaataaataaataagcatgggttcacgggcaagggcgggctgagagatgaacatggaggtattgacattgagtggctgctggatgccatgagcctggccaaggtccccaaggcagtggcgaggaggagatgaggaggtcaaggaggagacagaggatggacccgaaggccgaagaaaatgcctcaagggagtttcaacaccgggcgcggtggctcacgcctgtaatcccagcactttgggaggccgaggcctgtaatgccagcactttgggagggcggatcatgacgtcaggagatggagatcatcctggctaacacggtgaaaccccgtctctactaaaaatacaaaaaattagccgggtgtggtggcgggcgcctgtagtcccaactactccagaggctgaggcaggagaatggcgtgaacccggtaggcggagcttgcggtgagcccagagatcaggccactggaatccagcctgggcgacagagggagactccatctcaaaaaaaaaaaaaaaaaaaaaaaaaagagagagtctgactctgttgcccaggctggagtgcaatggtgcgatctcagctcactgcaatctccacctcagcaggagagcaggaatcttcagtgatccacgggcagatctgccgccattgtgggcacctgttcctcccgcgacctttgtgcccgcctctctccttccagtacctattgcatgaccccccacgtccgcctcccgccattgccagcaagtgcctcgcgcgggtacctggctgcgcttattaatccgttaagctcgctctgtcacgggcgccgtgatgtgctcacgcgcccgctccctcaggtttaaaaggcgcgttgcccggcaacagaagaaactgctggcttagccgttggccgagttggcggctggacgaggacgctcagagcccagctctcgagagttcaagcaaccgacggttccccactgctcccaggagcggttacctgggcactctgtgcccctccttcctgttcgggcccaggccgaggacctgccagtagggctcagttgcctggagcccgttcagcccatcccccagttcactttgcctgtgggatctccccgttgctcctgcccgtgcactgagtggcaggccatcctacaagtacccagacacttgacatcagtggtgtcaagacaactctaagaaggttttcggtgatcctgcaagcgctgcgttccttcctgggatcctgccttcaatttgattgcacaggtaccacagcaagccagtgctgtgtgctccgagttccagggcgtcctccagctcagccactgcactgagaacatggactctctgtggggcccaggagccgggagtcacccctttggggtccacaacacccggctgtccccagacttgtgtccagggaagatagtgttgagggccctcaaggagagcggggcagggatgcctgagcaggacaaggaccctagagtccaagagaatcctggtgatcagagaagggtcccggaggtcaccggggatgcaccgtctgcatttcggcccctgcgggacaatggaggcctctctccctttgtgcccgggcccgggcctctgcagacagacctccatgcccagaggtcagaaatcagatataaccagacatcccagacctcctggacgagctcctgcaccaaccgaaatgccatctccagctcctacagctccacgggaggcttgccggggctaaagcggaggagggggccagcctcatcccactgccagctgaccctcagttcctcaaagacagtgagtgaggacaggcctcaggctgtctcttcaggtcacacccagtgtgaaaaggcagcagatatagcaccagggcagacactcaccctcaggaatgactcctccacatccgaggcctctaggcccagtacacacaagtttcccctgctgccatgcaggcgaggggagcctttgatgctgccacctcccttagagctggggtaccgggtcactgttgaagaccttgaccgggagaaggaggcggcattccagcgcatcaacagtgcactgcaagttgaggacaaggccatctcggactgcagaccctcacggccttcccacactttgtcctcacttgcaacaggggcttctggtctgcctgccgtttctaaagcacccagtatggatgcacagcaggagacacacaagtcccaagactgcctgggcctactggcccccttagcatctgctgcagaggtcccctctacagctcccatgtctgggaagaagcacagaccaccaggccccctgttctcctcctcagatccccttcctgccacctcttcccattcccaggactcagcccaggtcacctcgctgattcctgcccccttcccagctgcaagcatggatgcgggcatgagaagaacaaggcgtggcacttctgctcctgcagctgccgcagcagcccctcccccctccgcattgaaccccacgttggggtcactactggagtggatggaggcccttcacatttctgggcctcagccacagctgcagcaggtgcccagaggtcagaaccagagatcgcagacctcccggaccagctcgtgccccaaatgaaatgccatctcgagcccctacagctctacgggaggcctcccggaacgaaagtggaagaggggccagcctcatcccactgccagctgaccctcagttcctcaaacacagtgagtgaggacggacctcaggctgtctcttcgggtcacacccagtgtgaaaagacggcagatacagcacca

SEQ ID NO: 1562744 - DNA, 4001 bp, Homo sapiens
ccagtccccattcctcggacctcagcttcacctccagtgtcatcggcagggtgagctggacgcctacgggtctgagaaggcgcccgggttcccagcatcagctggccaccctctgcctaagaaagtgccagggtcgtggcaccccctggtggctgatcctaggtagtgtcactgcccagccccagtaagggagggcctggccccaaagtccgagggatcagggtggaaaggggcagggcttggtgtgaaccttcccctggcccccagccatgtgcctggctctccccatgctgaagatgctgaggctagttccagtgtccgcattgtgaagatctccgaatcccacctctctgttcctccccagtcagatggctccatttcacacacaatacactgaggcccagagagtggggagacagggcagggaggccacctggagcctggcacagtggcctcatttattgtgctgctctgctgctcacaggggaagccagtcccccagagtccccttcctggtcctggtgagtatcttgtccctggattgcttgtcagccttgtcctcctggagcactcagtagccggcaggctccccgcctttcctggagtccgaggcagctgcccagccaccagccgtgcggacgatggcttgcaccacagcgatgaaggtggacgcgatctgggtgtgatggtgccgggtctccagggctgcagtcactgcctgggggtgggaggagaggggaagcctgagcagggctccagatgccacctgaaccacacctgtgtggtcacaggcctcagcccaggtggtgccatttcgggccaggtcatcaggaagagcaggttggggcctgctgggtctcactggagcagggggcttggccctcatggcacaggggctccagatggcccaggcactagagagaggacaccaacaattgtccactctgtgatgatccaggcctccagcccaggatgccctggggccccacaccgtgactcagtttctccaacccccggcccacctggtcaatgtttctctccactgtcgtgacgttgggcagaagctggttgtgcagccggggctcctccacggcccgcttcacgtcatagccgaaccagaggttgtagatgatggcctggggcatgggagtgtgatcagcatggcttgggggctgtgcagggtgggcacggccagggagaaaaggggtgacacatatcagtgcagtggctgtggtgatctgtgtgcccccagcagctcccaccaccatccggacctggccgtcctggcccaccatgatcgtcgggcacattgacgagagcggctgcttccctgtggccgatgggagaagacagggatgcccgtcagctgcctgcccaggacacccgcccctctccaccccagtcccccatccccagacctccaccccatacctggctggatgaaattggcaggtgaggggggcaccccaaactcgttggtgatgttgggagagctgaagtcatccatttcatcattgaacaggatctcgctgaccggggagcggaccttggagccaaagctaccgcccagccaggtcagacagcacctgaccttgcctggcccagcctggtccctatccacccactgaggctcaaacatactcactgagaggcccaggataagctaccaaggttgggcctcagtttcccaccaggaaaagaggtgatggagccaccttactggataagtgggcagtccctgggccacccgcccctggccctttcccacccaggcggcccagcagcccctactagaggttgatggtgctggtggcggacacagcactgccgtcctctgcgacgacagacaggtgagcagtgcccccatcaaccggcgtgtagaactcgggcttgtagtaggagatcgggtgagtggtgtcgtcagagatctgggcccggagctgggcagcgaagaactcagaggtcatgttgtggaccacctgccgagaccccagagctggcctgaggaggtggggagggagggtggggaggggacacaggtctcagaaggcccctgactgtggctctgaccacaaccctctggcacccacaaccttccgtggctccccaggacccaagggcaggcccaggatcttgcatgaccagtctgactccctgtctctgtcgcattccagcaactctgaatgtctgtctgcctggtcctcagcctccagacccttgctgcattcaatcactcattccttcatgcaaaaaatatttctagaatttgcactgcatgcctggaactggggaatcaacagggaacagacacttaggtcctgccctcatgccaagaaaaacaaacacacacagggaaagtgctgaaaccacaagccaggtaaggggaatcaagaggcatgaggtatgggcagagtggtcagggagggcttctcagaggaggcaacgtgtgaaaagagcctggaatgtggcctaaatggtcagtgcaaaggccctgaggcaggtggtataggctggtgagcgataggcagagagtgaatggagtggggtggggagaagaggatgaagatgcaggctggggcccatcccacaggacctcctaggtcccataacaactggcttttgctctgtgccatgcaggcttagggcagaagaatgagcaggctggggagtgttttcacagggtccctctggcagctatgacggggataaggataaagcccaaaggggaggctgtgggtatcaaccaggcaagagatgatggcctgggtgggagaaagagaagaatcaaggatggcgccgactagcgaggtaaaccctgcagaaggggcaggtttgaggatggtcaggagcttgattttggatacttcatcagacctgaagagcatgggtgcacgtataaaaaaaataaataaataagcatgggttcacgggcaagggcgggctgagagatgaacatggaggtattgacattgagtggctgctggatgccatgagcctggccaaggtccccaaggcagtggcgaggaggagatgaggaggtcaaggaggagacagaggatggacccgaaggccgaagaaaatgcctcaagggagtttcaacaccgggcgcggtggctcacgcctgtaatcccagcactttgggaggccgaggcctgtaatgccagcactttgggagggcggatcatgacgtcaggagatggagatcatcctggctaacacggtgaaaccccgtctctactaaaaatacaaaaaattagccgggtgtggtggcgggcgcctgtagtcccaactactccagaggctgaggcaggagaatggcgtgaacccggtaggcggagcttgcggtgagcccagagatcaggccactggaatccagcctgggcgacagagggagactccatctcaaaaaaaaaaaaaaaaaaaaaaaaaagagagagtctgactctgttgcccaggctggagtgcaatggtgcgatctcagctcactgcaatctccacctcagcaggagagcaggaatcttcagtgatccacgggcagatctgccgccattgtgggcacctgttcctcccgcgacctttgtgcccgcctctctccttccagtacctattgcatgaccccccacgtccgcctcccgccattgccagcaagtgcctcgcgcgggtacctggctgcgcttattaatccgttaagctcgctctgtcacgggcgccgtgatgtgctcacgcgcccgctccctcaggtttaaaaggcgcgttgcccggcaacagaagaaactgctggcttagccgttggccgagttggcggctggacgaggacgctcagagcccagctctcgagagttcaagcaaccgacggttccccactgctcccaggagcggttacctgggcactctgtgcccctccttcctgttcgggcccaggccgaggacctgccagtagggctcagttgcctggagcccgttcagcccatcccccagttcactttgcctgtgggatctcc

SEQ ID NO: 1562745 - DNA, 4001 bp, Homo sapiens
caatttccgagggggagaaattatgtcttattcacctcctgtctcagaaaatcaacgtcagttagaggaacacacaggaagacttttaaaccagatgccagcatctcctcattcctagagaatgaggcttgctcaaggcgcatattttatccaagcaccgccaggccatccacacccccactgcaccccgtagatggatgctcccaggctgccacgattactgctctcaaacatccacatcccagaggcacagagtcactagctaagcatcatccccgaaacaggcaactcaatcctaacaagggggttgcctgggtggttacccagtgccctggctgtgcccgagggagaagtgcctggaagcacagtctcagactgcaaggagccttccccagtctttaaagctagctcttctccaggcccaccccagctcatggggtcatggaactgcttcgcttttacagatgaggaagccgtggtctccaccatagccacagttaaccagcagtggggtcattccacttcccagctccctcagccccgtgcagcccccaccggcctttcccgccatacctcctcctactccccaggcatgctaagtgctcccatcagacctaactgcccaagtgcctcggtctattctctcctctctgcccacaatgcccagcttagctgtgcccatgtccttcaagctccagttcaaatgtcatgttgcccacgagctcacctgaccccccagcccaggacaccactctgaggtccctcccgaggcccctgcacctgcactcaagcggggttggtcgagtagagacgttttcccctatgcggtggtcaatcagtcctgggagggcaggcccagtccactcccacccggtgcaccccagcgtcaagctctgggggagtgaccactcaataaatatttgcttaattgaatttggccaaggagccttctccagagagctcaatccccagggcagggaaatcacttgggcagaaaggagccggtcaggggctcagctgtctccccaagcaagacagacctctctaccaggcgggtccctccaccccaacacggactacgcggaacgctggtctcgcttggcatcatcctcttgtctcagttaacaggagcccccattctcggcctaggccgaatcctgccatcatcacccaggaaggctcagcaccgccctaaaggcagagccccctcggatcgcccgcaggatacggagcgccagccctgaggccctcactcccctcccccaaacacccccaccgccttttaagggaaaaaatattgagccgggaacgtattacaatcgcagcaggtcgatactcatctcttcctctaaatgcctgtgaggaacctgctcgctgcaagagcagtgaccgagaactgctagctgtccgtctgcgggcccaggtcctcgggcccaggcctctggggccctctcctcggtttcaggcaaggccctgcatcggctccggccgcccctccctgatcctccccctagggagacccgcctcagcgccgctcccgcagctcgcctggcccgcccgggctccgcatcagccgctgcttgggggcgcccggcggccccgcgcggcatccccggcgccctctgtccaccctcccgggtcctcaaccgccccctcccgcggggtcatcggcttggcggcgcatccctcccccagcacctgcccgaccagaggccgccccctgcccacctcgcaggcgtccccgcccttggtgtcccccacccctgaggggcatccctgacgctgcgtcctggcggatccggggcacaaaggcctgggaagagtcccaagtgggggcaaggtggatgccccggccgtgcccccgacccctgaggctcagcggcgcgcggccggccgcgggtcggctcactcacctccgggccgcagcacagagcatctgccgagctgctccgggcagggcggggcggggcggggcggcgagcacggggccgcggcgccctcgttccgtacgacgcgggcagcggcgcccacgcggggacgtgaccggaccgcgggcggcgcacacgctccggccggcctggttccctccgcccgccctcccgcgccgcccgccgcccgccgcccgccgccagtccgcgggtccgcccgccccgcgccgcgccgccgccggcagggggcggagccgcgagcgcagcccgttgccaggccaaccgcgggcgggggggtgccgcgcgcccgccgggcaccacgcgccgggcacctccgccccgccacgagcgccggccctctgtccattgggcacaggcagctgacggacgggccagtagcccaatggggacggacaggggcggggtcgcagctccgcgcgcgccgcagtcccgcaagagctccccgcgccggcgttccaccgactccgctgcgctgaggcctggtagccgagccccaggggccacctctggcagcccgggaaaccaagcctgagcccagccatggtcctggccctctttactgcagccagtcccggctcgccttctctccactcgggttcaaacccagttcggcctcttgtgagctctacgtccttgggcaaccgactgacctctctcagcctttctgtttgcaaagtggggctagtggcacctgctttcctggattgtctcaccaatccttcagaacgtgtgaaaggcctatgcaaaccctaacgatttacaccggtgaggtttgtgcagcgatgggagggagcattagtcatctctgccgccgccccccgccgccaccgcccagtgtctaggggctctttggcgtccctggcaatcctggcacacggaagggtggccttgggagggaaggaagggagaaggaccgaggagctggcccccagcccagacaagcgtgagagagccagttcagttaaggccactgattggcgcttttgggaagctggtggaaagcatcagaccctcagcaaaacgcagctgaacccaggctgcaaaattctgttttcaatttcaaagcctatctgtggacctcagggccaggagtccctcagttccatgcttaaaagactctcaagccagagggccaagacatgaatgctcctgtctctcttctccatctttgtaaatctgaagctttgtgtatcctagagcatccctgacaaagtgcaaatgccttcccagctaacgcgttccttatcacctcacacctttgtaaggtgtggatcatgccattctttgagcagcagccctggacctgaccatggcagaggtccatggagcggtctctccatcatagctctgtggtggaggggcaggggcatgtgcctggctttgccagctggacactgtggcatctcagcatcatcccataacctccctaggaatgtttcctcttctgtgagatggagaccattgcgttacgtacctgcagggtcatgggccacctgtgagggtgctgcctcaactgtcaggaacaggacgtatatttgttatgggcatcatggaggcgaacttagtgctcactggaggtgtccagtgaggaccaagggaattcagccaatggctgaggggctagctaccctttgtgcttgccttccacaccaccaggctgtgtcaggctggacctcttgccaggaggaccacacagagaccggcagctgtgctacctggctgagcctctgtttcctcttctgtcaaaagggaatgtaacagactgtggtcagagggtggctctgagggttaatgtttataggaaatgcatattagcatgtcttgggatagccagaggctgtttccactgcagagtctgggggtcagagttgaattgtttgcagaggtaagcccacatgcaacagtgagatggccctttccagtggtccagagcagaggctagcctgcggaggggtccactggggctggctgacacctccctgacttgacctcaaagtaagagagggacatctcacctggcatcaaaccaatattgtattcatgcagcagtca

SEQ ID NO: 1562746 - DNA, 4001 bp, Homo sapiens
taaactacatttgtctgctgagtaggctctagccgccccaaaaactctgaacaacgcacagaccgcgtcgtcattaggctcttttacatcccagcaccaggcacacagcaggtcctacctgcttccccgacagagcagtgagcctgctattctctgctccctcctgaccccacatgctttccaaattcacctctcacaactgagtgccacctgcaggcaatgccacccccacccacaaacaccacctttccacagtccccatcccagccacagcagagcatcccagcccccaccattgtaaaatcctggaaccccacttgctgtctgctcccgccactccagtcacttgtgcccagggtctggggagtcccagtctgatggctggacccgcccctccttctccacgcagcagtcacctaggaggctccagagccagtagccagttctattccagtgcaaggagccctcctgtagggctcttacactctgcagcctaactctatctagccccctccccagtctctctgcaaacggaggcccactcacgacctccaggaaactctctgcttcaccccacacacaaacgccaccggctcactgggagcacaaggcctgcacacaccttcatcccacatctcctatctgctggccatcccccctcagggtgagttcctccaggtacctcccagggtggcctgcagcactagaacctgccagggccactggccctacctccaccacccaaacactctggaatccctcaggtctgacccccctctggggggggggtcttcacctgaaagcccagcccatgaccctggcttcccaccttactgcaggattatactaaggcctggacgtgagtcgagtccagtccagtccctcactgagctctaaaaaagcagtgaccccgatccagggcccagctcccaccaccagccaaggttaggtatccaggttgcccacaatgaccacaccccatgcccgggagccacagtgtgctacccagatctctgccttcccttcttcccagtcccctaccctgcccactcacctgcgcacctgtgtcccctgcagtctgggagaaggcttccctgcaccagccagccaggcctgctttgggcctgagccttcctaaccctgggccgcactctcaccattttgagaaccttagccctcccacgcctatcagtctgttggtccccctacttttctccccacactgcctggcatagaagactttcggcccttctagactggacagcactatcctaaaggggcaggtaccacggcgcatgtgtgtttgcccccacaaggccaaaggcagcacctggaacgctggagccgttctctgctctggggagacccaggagccccaagaacaaaacctgcccaaagccttaaagcaagctgagtgcagacgactgcaccgcccgccccccagcaaccgccatgcaggaaatacgagctcacaaggcccacggcaacaagaagcccacccacctgaggctacgcgaatcgcccgcgaagagggtcctgggatccgtagccacagaccgtgggacgggcctccctctgagggcgagagtccaggcgccacctagaaagtggagaacgagatcggccgccgtgaggccaggcaaggagcgggcgcggcttcccgagactgcgagaacggcccaaatgtctccaggtgcccccacaaacccccggcgcggaccgagaaactgaggcccgcagaccgaaggcactgcgacccaggctggggctccgagtgcccctctgcggatcagaagtcgggaaaagacgcaggggcgcagctccaggcccgcgtgcacggagttcaagccggccgcccgggctcccgcctccacactgaccctcttgccggagtcgggaacgcctgctcctaggagcgccgcgcagcgtccagagaccgattacatcgcgcagccacgcccccagcgtgcgcgcggccgccgtgtacgacccggcgcatgctcccggcacgctccacgcgctcctcccatccaggccgcgcctgcgctgtatgccgtgtggccgctacctcgcaggctctcccggtccctgctggcgcggcagtgccgcgcggtgggtgatgggagagcgcgcccattcccacgccgcgccaagtgccacgggatcaggtggggccgcgtgtacaggcgcgagacggtcgggccaaagctgcccctcatgatccccagcggacggtgcccggcggtccctcagatccgggaaatctgcacccggctgtggcgtagaccgaggggccgatgctgcttcagcccgccgttactgccctggcgtcagccagacactggggtgctgctgggcgtcgagagggctgctgcggggccgggctaagcctggggggctgcaggtgtcggggtggatgtgggcatagcggggctgctgggcctcgtgagcgccctggaacggcgtgcccgcggagtgcctctcatcactcattgccagtgcggggaaccttgttagggcccggttcgacgtagctgcaggctgggcgccagaggcagggggcaggcagtccgagaggaccctctacctgcatacctgggggctgcaggcagggcctctgggcctccttgttgtggatataattgtgtgcttcccgactcaggccgaggctggacccggagacgacagcgagggcaggctaccaagccctccccacagggccgtgcccagcccaagcctgccgagtcagcacccagatcctgggacaagataggtgaggatgaagtggtggtgctcttctcacttgcacaagccgtcccacgccacctctcctcggcttcacggtgcctagagaagaggtgggagagggtgcaggcgccccagctcaggatctgatgcctgtgggccaaggacctggatgcaagccaggagtccttggggccacgggcaggcagccggattcaccggaaagtgacgcttctcaaggggaacacacacgtaacacaccagctccctttctgccctggtccagtgactcctttcatgaaagctctctgaaatgttatctgcatttacacccaaactcactcactttgatccctgaaacgcgaatcaaaggtcacattgtaccttccctgggtctgtggggctttcagcagcctgggccaaaaataataaaagtggcaccgagccaggaaacgcctccttgaagtgggaatgaaatttggatttttttcggttgtatctttcctaattgacctgataatttaaacttcctccctcaagggaaaggtgggggttcccacaaattcagcttacctcagcctcaaggcagctcagtctacagctcagcgcccatcagcagagtgggcagtgggcctgtggaagaaatgaatccaactgagccagaaaaggccttttttggtccaaattttttttttctttcaggccctctcctgtgtataactgtcatgcaccgcataacaacgttttggtcaactagggaccacatatgtaactggtcatccagtaagctatagttattttattattgaagaaagaaaatttttaggccaggcgctgtggaggctcatgcttgtaatcccagcattttgggagcccaaggcgggcagctcatttgaggtcaggagtttgagaccagcctggtcaacatggtgaaaccctgtctctaccaaaaatacaaaaaattagccgggcgtggtggtatgtgcctgtaatcccagctacttgggaggctgaggcaggagaatcgcttgaacccaggaggcggaggttgcagtgagctgagattgtgctactgcactccagcctgggcaatagagtgagactccatctcaaaaaaaaaggaaaatgtttaatataagtgtgttgcagcctaagtgtacagtgtttataaagtctaaagtagtgtacaataatgtcttaggccttcacattcactcaccactcacacccacagcaacttccagtcctgcacctct

SEQ ID NO: 1562747 - DNA, 4001 bp, Homo sapiens
cgcccccacagcgtcctcaccgcgtccacagagtcctcaccgcccccacagagtcctcacggtccacagcgtcctcactgccccaacagcgtcctcaccgtccacagagtcctcaccgcccccacagagtcttcgccatccccacagcgtcctcacggtccacagcgtcctcactgcccccacagcgtcctcacagcatcctcagtgtccccacagcgttctcaccgtccacagcgtcctcaccgccccggatagcgtcctcaccatccccacagcgccttcaccgcccccacagcgtcctcaccgcccctacagcgtcctcaccgcccccacagcgccctcactgtccacagcgtcctcactgcccccagtgtcctcactccacagtgtcctcaccgcccccacagcgtcctcactgtccacagcgtcattgtccccacagcgtccgcagtgtccacagcgtcctcactgcccccagtgtccttactgtccccacagcatccccacagcatcctcactgcccccacagggtcctcagtgtccccacaacgtcctcactggcccccacgttatcacttagcatctctctcatgccttcccatgtggccttttgggagtgtgtctggaaggggagaggtcacccactgactcctgtctgcccctgaggttagggtgggcatgtgaggatgtgtttgtgtccccttgaaccgcctcctggggccttttcctgagtttggcgaggggaatttccaggtcagtcgtgcagagaagaccagatcagaagggtttattcagcaccagagtttggaagggagacgcagcagggtctggaccgcattgtgccccatggtcctcccaagcctggaagtgcgggttcgcctccctcggggtagggtgggcaggagttctgtcccacgtggtctgggcctgcaggtggggtgggtctgagagattgggcagcggaggaggcggggaccggtccaggttggcgcgagggcccctcgggcagggtcctgtcgagtttgcaggcccgtgttgcccagcgccggttctctcctcaggacgcaccggttctctcctcaggactcgtcggttccggctcgctcggccaccagcgggtcggtcagcgacagccgggctgcggcgcgagcgcgggcccgggcccgcagcctccgcaggcggcacagcagcagcaccagcagcaacgcgtgcagcagcccaaggcccagcagcgcaagctgcgccgccagcgccccccagcagagcgggccgggagcgcaagcggcgcgcagctcgtcctcggccagatagggcagcaggcggccgcgcagcgctgggggcgccacgcaacgcaggtcgcggtagggcgcacgctcggggcggccggccagccaggcgcgcagcggcacaaggcggcagtcgcagcgccaggggttggcgcccaggtgtgcggtgcgcagcgcgggcagcgcgtccagcagccccggcggcagcgccgtcaggttgttgccggtcagcaccagctcggttgtgtcgacagggaaggcggtcggcagcgaggcccaagtcagcccgcggcgcccgcagtccacgagcgtccccgcgcagctacagggcgccgggcaacctgcggccgggcggctcggcggggccagcagcaggagcagtaagctcagcgccccgcgcggccctgcaagggaagcgccgcagtaagccgagcggtcggcgggcacctgggcgacatctctgagtacccagactgccggcccggctccatccagcccctgatgcccggcgtcccggtagcccgccagcctctccaccctgaccaccccgcacgccggctggaagtcccctctaagtctgacccaagtctctcccagctgcagccaaacgaccagagctcctctcaacccgggtcggcctagggagcagccgggggcccgaccggactccagactcaccggagcccatggcgagaagacggcagcccggcttactctgcagcgggaggcgtaggcgggagagccgagcgataaggccgccccgcccctgccacgcccgcaccgaccacagtgctgcggcctggccagaaatagcccagaggccgcgcggacgcgcgctgcagcggcagatagcacactatcgccggaggccgcaggccgctcaggcttccgctcccacccgctctcaggggcacacggagcactcggacacccgctgcgacgttcaccaacattgttctcctgtcaccaggacaggacgcggcattcacaacggaagaaaacggagcatcgtgtggcgggaagggatcatgcgggtgggaacatcgggaggcctaggctcaggatcccggcacaccacagcggtgctggggagaagaggcctcgagcgagggcaggggacggcaccgagagttgccaggaggtggctcaccgcccagtgccccgggggccctccaggtcgggccgggctgtggagaaggggtgtaagcggtcacgaccccgctccttgcagcctctggcctccttatgtctggagggctcccatttgattcagcccaaccctgcccgctaggcgtctggggataagggaagactcggcccgcctcgacagaaaatggggtctcagcactcgctgggtgacccgcgggagcaggcaaaggagggctcccaagtccgttctgcagcactggggcagggaacagacccaggatcctgggaatcctcttctgcctagctttgcctgcctgccagagcagggcctgcggtttgggtgctgtgaccgtccgggggcgggggaagggcaagggaggcggatctctgaagtcccgcccaacttcgctcctgatcccccaaggtcagagagggccagctgggcgggggctacggtccaggcccctcggaaacagacacaatgacctgggagggggtggtgctgagaataaattagggtcagctgggggctgtggccccgcgtctccgggtcgggaacagtccggtctggtgtccaggggtgcgagggcgtcccggagacggacggtgtgtccgcggcgagcgtcactggtcctgcatctgctgcttcatcctctgcagcatctcctgcatgcgcctcagctgcgggcggagacaacccggcgggtgagcagcaccgcggaggagcatccctgacgcccgcctccgccgcccccgccgccccacatacttcctcatccttcatcctgataagcttctcagtctcggcgtccggggtgggcagcggcaggatcgggatggggctctccatgcggctgtcctgggtcagtttgctgcgcggggcgggggggaggatgggcggggcggcgccaccgggaggctcagcgtgggctggcgatgcctggcccatccccgccactgctgaggccctgccctccggagccctcacagccctggacttggttctagggagaccaggctctgggggagggggggggcttagggaatggtgcaaagttcaagtctgggtgggctgacaggaccggccctcagttatggagacgtgggcggggccagaggggcgaggtctggctcgcggctggggcgcgcacctggtcatctgctggatgcagtgcgcgcggtagttctcgtagtgcacgtcgcacgtcacgtccttgaggtcgtgcatatgcgtgcggatgagcatgttgcgcagcttcacgaagtcgcaatgcgcctggttctccactgcggggtgggggtgggtagtgggctggcgccggcccaggacagccttcccccaccagacctggtaccccaagactctactcaccctccacgatcccccaggggtacagtcggccccggacccgctgccccttggcctccaccaccgtgttgctgcctataacggcgaagggcgcgctctcctgggggaaggagggagaaaggctcacacccggtgagcgtaattgcacggttactgatgggaaacgggcatgtaactcccggggcacccctccagca

SEQ ID NO: 1562748 - DNA, 4001 bp, Homo sapiens
gatgttctgccccaggtgaagactcccatgatcccacagccctacctcctgctgctccaaccagaccaatacctgcaaccctggccctggccccctcactgcagccctccacctgcccctcagacaccaacgcacacactcagtccacccgcccctcagacaccacgcacacactcagtccacctgcccctcagacaccacgcacacactcagtccacctgcccctcagacaccacgcacacactcagtccacccgcccctcagacaccaacgcactcagtccacccgcccctcagacaccaacgcacacactcagtccacccgcccctcagacaccacgcacacactcagtccgtctctgaccagcatgggcaggacacgaacctgcctgagtccatgcttggcccggccacagaggacagggacgaaaccccagcccacaccaggggacaaggacaggtactcacagggtccctcaggcgggagggtccctaccgagacaacacctggagcaggacagacggatggcggagagggagctggggaaacagccccgctctggcctttgcgtggaatccccgtcacccctccctgttgaaccatgtatgtgtcgggagggagatttttgttcccgagacacccaccacatgctcagcacacagaccaccatcggagaatcgtgacccatgccctctgtgccagccccagccagaggcggatgagacacagctctccggcgaaggcaggcccctgccgttctgccacataacctgcacaagggcagacaccctaccggggtcccggtccacccccaggaccaaccacaacctttgcctggggatggccgatcccggcaggccgggcactctgtggtctgtagtgatgccccaggaagccaagcggccccacctgcctgatcgggcagtgtcgagagagcagcagcagcagtaaattattaattcctgctgaaagcaacgcacagtcactgtcctgttataaagcattagcaacgcaaggagccagggaaggccggcgctcccaggccacacctggaaagaagacctggctcaggggctggaggaggaaaccagccagacaccaaatttggtgtgtgcatgcggggaggagctagaggccatgctgggccagaggaggggccgcagggagcccaacccaccatgcttcgggccctgccccaccccccaccaaatgcaagtttctgcaaggcagggcctgctcctgcctggctcccgcctggctccccacctggctcccacccagggcccagggcctagctgaggtgctccgtgggtatttgctgtccccccagctggccacaagcccagccctgattccgcgtggctgatgagggcccagcctgggcttagccagctttgggggctggaaacgtgcaccttggcttgaatagaagacaagccaggcaccagcggcttccagacaacgcccgccctgctccatccgcatgtcaacgctcccagggccaggccgaggcttccgcgtcacatgtgcgtgagaagtctgccacccacccagaaaagccagtgaggaaaaccaatccagccgctaatcagacctgcgaacacagaaggctcggcgtggcagcaccccggccccacaaggtctgcaggggtcgggagcaggtgagacagagagtcaggcccagtccatctctgaccagcatgggcaggacacgaatctgcctgagtccacgcttggcccggccacagaggacggggacgacaccccagcccacaccgggggacgaggacaggtactcacagggtccctcagctcctcgctgtcccggggcgaggtccgcggtaccttcagggggatttcgtcgctgcattcggtgtccgaggcatttggagactccgctagatcgaggaagtcatctctcttgtgacctctgaacctgattttgtccaacctccttagcatgttcagcactgaggtcctctgcttcaccctaacatgacgctcgggttccctgcaagagaggggcgtggtcactctcccgctcgccacctccaagccccacgagccagctcccacacacagggcacagccggtccagctttccaaagaaaaccccgacccagagaccccgccctgccaccgtccctcccacacacacctccaagccccacgagccagctcccacacgcagggcacggccggtccagctttccaaagaaaaccccgacccagagacccccgccctgcacccatcaggtggggcccttggccaccccacccaggccagcctggtcagtgctgagctgcgtccttgcctcccaccaagcgaggcccccggctcccagcaggcagaaggaagccagggttctcagcctggctcggcgaggcggcgcgcaggcgcaagggaagaatgctgctctggcattgggaaggagggccagccatgccaaaaggttgcctaacaaaccgtcaagaacgtggtcaacacgacggccacatacaccaccaggacggcagccacgcctggaaaccagcagatgcgtgtgctagggatgcctcggttgattctctcctggacctaggggacctggccttgtgtcccacctgctccacctggccccggctcccaggactccgcccacactgctccctctgcctaaagcgtgttcctactcgccatgcgaccaggctcatactctgagacacattcagatcgcaccacctcccagaagccctcccagagacagcggggtcaggcacccatggccagctgggcctcctgtcccagcccccatgcctgcctcctcctccaatcaacacagaaacctggtcacactgaggtgcgagtcactgtgtgctgcatcaggacacgcgtaattcacacacaccacgtgccaaagggcggatgtgccgtggggtactgctccccacatcgctgcccgacctggccagcaacaccaaggcacccccaaaagcctggaggccaggatcagtggcccacaggaggggccagccaggcagggagaggccacccagccccagccccatcacgcagctccatggcctggatgcctctcccaaaaccccgtccccaacttgtccaagacaactgggtccccgtgggaggactgctctgtacacacctgggctgaaagcctgtcctgccactgaccagctttctgagctgacatttttgcctctgaaaatggaaagatgccagtaaggcaaaggtatccaggaattcaagaagacagggcaactgggccaggagcaaggagatggggcggggagtgatccctggcgggggtatttcccaaacttcctgcttggggcgggcagcatggcaaggaagcactgagagcaaggtcagctccagctcctacatgcctgccccgcccccaaagcctcctccgctctcctcagcatcacagttcgtggcaagaagactcattaacagtgaggaccgaagacacagaacgcactagaacccactctgagccacagaggcgcggaggttcccagcatggtgaggggaggggaggctctcctgggatgggcacttgagtattcctgatgccggccctgctgcaaaacccacaggacgctgggcgcggtggctcacgcctgtaattccagcactttgggaggccgaggcgggcggatcacaaggtcaggagattgagaccatcttggctgacacggtgaaaccccatctctactaaaaatacaaaaaattagccgggcgtggtggtgggcgcctgtagtcccagctactcaggaggctgaggcaggagaatggcatgaacccaggaggcggagcttgaagtgagctgagatcccgccactgcactccagcctgggtgacagagcgagactctgtctcaaaaaaaaaaaaaaaaaaaatcccacaggacacaggctctacggggagctgtcctgatgcccagcatcccctggaagctgggaggaccccaggagggggatgtgggtgatggggaggt

SEQ ID NO: 1562749 - DNA, 4001 bp, Homo sapiens
tcaagtggggaggaacccatagcacccaacacagtaggctcctccataaatgccagggatttaatcaattcagcttactaaacaaacagactcaaataagttgggcacgttccttaaaagcagaatcaagcaaagaaagctctgagaaatctctgtgcttcaaggagacaaaagccaacgagagaatattaagccaacttgaagggaatagtggctatccatctgcctctgccatggttcaaccaaggtgaataacccatttattagcaaagaatgagagaagtcccagtattttcatgtaagtggtaatttgttaatgggtaaacatggaatgaatttctttctcccttggagataaatgagctctggttctcaaaaaacaatatttctggcaagagatagaagacaaaaaaaaagaggtgtttcatccattaagatttggaaagcaaaggaaataagtgtatttctggaatctgggtgaaaggagtttggcctcgacaatttctgagcagccgaaggaggaaaatggtcgcagaaagaggcaggaacatgggtggtcagatgcctttagggacagtgatctctctaatgacatttctcccatctgggctccctatttatttgtggacctgcaccttcctacttacatctccacttgtggtatccatagtaccagtaagaaaatagtttttgtcaaatccaggaaggcaggcctgagagcaatttgcagctgtgaagacaaactataggatgaaggagacagaaggacagggtccccttaccctgttgtagccattgggaaggggcctcagccctcaagtggtgagacagggcagcacacgggggatggtggaaaagagccgaaatgaacttggccccggaaatggccattatcaagtagtcatgggtgagaggaaaaaaaaaagtcatgccttagatcgattgggcctggatggaccaaggttgaaatccagccatgagatcagttttgtttacctctcccgatgcgattaggccattcatatccgatcctgaccatttgtttgaggaagaaaagatgcagcctgcattttgaaatctgggcagatgcttaaaaagaccttgctctccattcagacaacaggaatgccaccagatgtgacttaaacatgtctgcttttcagctgtttaaatgtgagcaattcctcccgtcactagcccactgcaagggactgttttttcagggtctttcaatcccagggctgattcacatcacaggtattcccaaaaagctccacaaatcaacaatgaaataaacccaatgccagaccaacttgcacatgccggcgggccgagaggatgggaggtccagtcagggcactgtgcctcaccatcactttccactacagagaaggtaagtggggatagcatggccgggggggcagaattaaaacgtgatcaacgtggcatctgctttttcttctcttttcagctctcacagaagtgagcatgaaaaaaagagaagaagaggggaggaaaaatgagaagagacaagtttctctctgggagaagcaattctagtcctgaattctcaactgtgcattccacctcagaaagccagtgaccgcctctgctgagcacagggtgacaaactgggctggatccaggctggagccaggcagtgggtggcagcttctgcctcaatctttctgcagtctcccttccccattccaatcacgataaatatatttatacttacttgattatgtcagccagacaatactcccctaattggcagtgatcagggttccagaattgtttgggcgaacctgctgtctctctatcaggcaaagcgataaggggccgctaatgcagtccccattaacaatttccagtggaaaaaaaaccaatcccccgactcatgcatggcaacgaattttccaaacagctcctgagagccagcgattgaggaactcagacttaacacgaaccggtccagcatagaatgcttttatgacttttccccacccccagctagagcatgtagaaaaaaccatagccacttccttatgctcaaggttcttttgttcttttgcttttttgctcttttccttttttttttttttttcttttgttgggcttacggagctaactgtcatttttggttcttggttctttgtaaatttcagggacatctggcacacagtttatttcatttgctagctctggtatttgtagatacgcacactctctgctgcgtgtgcatgttaacacttcacatgtataatttatgcatgcataatttggagcttgagaggataggctcattttgatgtttaagtgtaactacacagcgccaattcaattataagtaattactcaataaatatttaccaaatgaatgaatataccaaaaagacaaatatgcaactgtcattcatttatcagacatttcaatacctagtgtgtaccaggcaccgtgctagatgctgagtattcaatgatgcatacccacagttcctttcctcagggagctcacagttgaaggacaggaggcagacatataaatagacaattgcaagacatcatggaggcaaagtgactgagccctatgcagggtagcatggagctccaaggaggaagcttggtccacctaagggaggggctgaggccatggagagtctcctggaggtgatgaggcctaagaggggaggtaaaggcttcagataatgaggacagcacaaccaatggcaggatgcaagaactgatagggtgttgtggaaaagaagcaaggcagagatgaagtcggggactcagggaggtaccggatctggggggcttggtgtagagtaagggagaggagcttcaactatctcaattagggcaagaaaacacaaacagctccttcattcgtccaaaatgcttctggattgcaccacaattggcacacgcacacctcaaagcagaatttggactggcctcagaagcactgctggagcacaggaagatctgaggccacatgctgaatccgtcattagggagatgagcaagagttagcttatttcttggtaagttgaggaggtggacttggagggctccaagcttttacatctatgctgcctggattctttgaggtttgtgtacaggctgcacttgggcccactccaagtccaaactggggtgctaaaggaatgaggctggttccaagcagcacacaggatcacaatatcactgtcttacagtgcagagacagtaggcacattgaggcagaatttcatatgaatctgtaagaagtattcacaggaatgtaatgtatgatggagacatcccattgtccccagcctgggtcagggtctcatgatctcaagtctgaaacatgtccaattaatttggagcactgatccctgctagatttagtttctcaaaagcactgttcagctcacatcatttctactcaaaatctcttaataattccaccttgcttgtagagtcaagtccaaagtccttagagtggcatggcattcaaagtcatcctcagtctatccccaccctgcctgccgtaacccccacctgagctttgattcacaaatgttcccaccactctgcctttactcactctagctcctgactcttcaggtccagctcaaattcaagtccatctcctttaggattactgtcttgttactcctgtcctcttctgaaccagtgcagagcttactatgttgttcattggtgactattaacttcactttgtggtttgagttttacttctccagctaccttgtaagccccagaggatgggaacccagcctcactcctctttgcagtctatggacttagcacattgtcctgctcacattaaatatttgctgatgaatgggtatcctacattgtcacttctttttttttttgagacggagtctcgttttgtcacccaggctagagtgtagtggtataatcttggctcactgcaacctccgccgcccgggttgaagtgattatcctgcctcagcctcccgagt

SEQ ID NO: 1562750 - DNA, 4001 bp, Homo sapiens
gccaaagccagggagaaaggggcttccaggagagggccagttagcagtgtcaatcccacagacatttccatagggtcattatactacacattaaggagatcactggtgaacttcaagagaatgttgcagggagggtaaaaggcagattccagagagttgtggaatgagtgggaagtgaggaagtgaagcacgcccagtgtagagaattcttcccagtattagcaacaaaggggaggaaagaaatcaggagctggattgggaagcagagttgagcaaagttttttttttttttctttcctttttccttttctgaggaatagagaaaacttaagataccaggttctctttgtaatggaagacgagggtggaagttggtacaaggatggtctccagtggatgacagtcacatgatcacagtgccccacagagaaggcaggaacttctcgctgcttggcaagtccctccaggagcttcgtaagaccccaaagcagtgacagacaggttttcctgggtcaggaggcccaactcatattttaagtttgtgaaggcctatgctttgccactatgttactagatcttgaaagttgagagcagttagaaggctacctaatgggcatgttcatattccaaaagaagccattctgtggtgttttgtgctcctcagacactttcaatgtcaccctctcacatgctgacaaggttctttgtataacaaacctaattctcggtggtgagacactaatggcctcagtgttgctgggcgtccgagaaggctcattgggactgctgaggaccagggatcaggctatctgaggaccagggatcaggctatctgaggaccagggatcaggctatctgagggtgctctgaggtcaggcagagggggtctggctccacacactcccaaatgcccttttgaagggcttatgctcttttgcaaacaaacaaaacaaaacaaaaacccaagggctaagatgcagagtctgaaagtatggtgcatgaatgtgggagaagtccaaggccacttcagctcagcaagtggccactacaactcaagtgcaggatgaggacaagctttaaaaagcccctgagtggccaggtgtgcatggcctttgttgagccatgtcctctgtggctgcctttcccaagctgtctccacccacaacctctcctcctgagttccagctctgctgagcctggcgctgctccctgcattcagcatgggcttgcacatctctgagctttagctaaaagcccaagtcaccttcagtgcattcctgacgttcacattgcacacactcctacaacccccatctttcaagatggaatcacttgttccctcacctgtgctccctgagaacttagccaagaacatctgtaacagccctttgggtggatgtgttcccctctccagactacgaacctcccaggacaaggatggtggcttatgccgactgtatttccatcacccggcctggttggtgtctggtataagggtgcacaaagggaatcaaggtgaacttctctttttaaaaggaaccacatgcagttcttaagagacaaaggcagggactgtcagattactgagtaactgaaactccctactgctcccctggggccccaggtcacctaccttcaaaacatctccagtgtgaaagctcagttcatcctcacctgaagcagtgaaatcaaacttggcaacagcttccatgctgtaacgtgaagctggaagagaaataatgtggtcattgtgcctctctgccagggggagggcagcagagccgatggtgcttcctggtaatcagcagttcctaggagagtgggcagatggatgtctccaggccggagagcaaggctcaggcacacaacaagggcttgtgtttgcaggaagagctgccggaatctataggatctaggtcctgggatcattctcggaatccccagatgccaggagcaggaaatgaaggccatccgcagcctttcccttctcctttcatcatcctggcctgacaccacttttgggggcatctctgtttgcagctgataaggagggaaggcttgctatcatctgtaacttgaggcctgaggggctggaaagactattctgtaaacactgtcccaaggctgtcccttggcagctatatttaaccaggcagtgttaattagacggatgccatttcctcttttacatctgaatcatttaagagaattagacagcattggccagtggggaactcagcttccttctgcatggtttgggagtagaaagaagttcttggtcttcgagttgggaggctcaattggtcagattacttattttatgatatattataaaccaagtacattttgggaattttgattttaacatttttgaattgagttaaaatagtggcccccttcttgtaatgcatgagacccatgtaaagataaatgagtcggcctatgtaatacatttagtatgaactagagctgtgctttaggaggcagcggggatgtaatggtaagacagctggctccaatcccagttttgttggtagatagctgtagactcttgggcaagtaattaaacccttggagtctccatttcctcatctataaaatggtgatcataatattcaattaataaagttgcaaggttaaatcaaattatagatgcaggccgggcgctgtggctcatgcctgtaatcccagcactttgggaggtcgaggcgggcagatcacctgaggtcaggagttcaagaccatcctggccaacatggcaaaaccctgtctctactaaaaatacaaaaattagctgggtgccgtggcacgtgcctgtaatcccagctacttgggaggctgaggcaggataatcgcttgaacctgggaggcagaggttgcagtgagccaagatcatgccactgtactccagcctgggtgacagagcaagactctgtctcaaaaacaaaacaaaacaaaaaaattatagatgcaaagtattacaccagataaagctaaatagtatttacgttttaaaataattttatggaatgaatttttccccagcaaaggtagcctgaccaaaatcagcacaagttttctttcctcactccatctcctatgaacttttctcattgaaatttgagaactaatctccatgactatcaaatcctgtgattctctgctaagacagcttaactgtcaggacaatcttgaaagctgttattttcttgttgatcaaaatttccctaagtttcaaaccctttagggtagaaaataaatactctccaacctaatagactttcagcgaccagtcaactgggaccacatttgtcctctcagtgggaattcctacccaagttaacaagatttgggtaaataaggaaggtggctgccagtgagagggtgaaacgccaggagatcagaggattaaagccgactgcaacagggtgatagcaaggggctcatttctctgattctccacaattgttcaatctttcgaaggtaatttatagagatgactattacccattcaaaggtagatgttaagcaaaaaatagaccaggagccaaagtaaaatgtcacagttaactctttgagtcaaaacgtactcccaaacaacaccatcacaaatatactttttgtacactttcttcaagatccatctatcgaaggcaaattaaaattgttgtgacctaggacgacccactcaacaggaaggagtattctgccctcctaagttaatgctaaatgcctttgctgatttgattcaccccatcattttaacacacaaggcttcttctaattaaggccttgcctctagtttgcagagagacatgacttctgtgggtcatcctcatggtatcaacagtagacagtggtcgcctcgtgggatcaagtgtcaggtgaatggtcctgaagaccaaggtcccatttgtatgcaaattcaccttaataagcaggatggagacaagggaagggcaaatgctaaacatattagaaagttacataaattagaaatg

SEQ ID NO: 1562751 - DNA, 4001 bp, Homo sapiens
ggagttagtattcagatgggtgactccaattcaactttcaagtggggaggaacccatagcacccaacacagtaggctcctccataaatgccagggatttaatcaattcagcttactaaacaaacagactcaaataagttgggcacgttccttaaaagcagaatcaagcaaagaaagctctgagaaatctctgtgcttcaaggagacaaaagccaacgagagaatattaagccaacttgaagggaatagtggctatccatctgcctctgccatggttcaaccaaggtgaataacccatttattagcaaagaatgagagaagtcccagtattttcatgtaagtggtaatttgttaatgggtaaacatggaatgaatttctttctcccttggagataaatgagctctggttctcaaaaaacaatatttctggcaagagatagaagacaaaaaaaaagaggtgtttcatccattaagatttggaaagcaaaggaaataagtgtatttctggaatctgggtgaaaggagtttggcctcgacaatttctgagcagccgaaggaggaaaatggtcgcagaaagaggcaggaacatgggtggtcagatgcctttagggacagtgatctctctaatgacatttctcccatctgggctccctatttatttgtggacctgcaccttcctacttacatctccacttgtggtatccatagtaccagtaagaaaatagtttttgtcaaatccaggaaggcaggcctgagagcaatttgcagctgtgaagacaaactataggatgaaggagacagaaggacagggtccccttaccctgttgtagccattgggaaggggcctcagccctcaagtggtgagacagggcagcacacgggggatggtggaaaagagccgaaatgaacttggccccggaaatggccattatcaagtagtcatgggtgagaggaaaaaaaaaagtcatgccttagatcgattgggcctggatggaccaaggttgaaatccagccatgagatcagttttgtttacctctcccgatgcgattaggccattcatatccgatcctgaccatttgtttgaggaagaaaagatgcagcctgcattttgaaatctgggcagatgcttaaaaagaccttgctctccattcagacaacaggaatgccaccagatgtgacttaaacatgtctgcttttcagctgtttaaatgtgagcaattcctcccgtcactagcccactgcaagggactgttttttcagggtctttcaatcccagggctgattcacatcacaggtattcccaaaaagctccacaaatcaacaatgaaataaacccaatgccagaccaacttgcacatgccggcgggccgagaggatgggaggtccagtcagggcactgtgcctcaccatcactttccactacagagaaggtaagtggggatagcatggccgggggggcagaattaaaacgtgatcaacgtggcatctgctttttcttctcttttcagctctcacagaagtgagcatgaaaaaaagagaagaagaggggaggaaaaatgagaagagacaagtttctctctgggagaagcaattctagtcctgaattctcaactgtgcattccacctcagaaagccagtgaccgcctctgctgagcacagggtgacaaactgggctggatccaggctggagccaggcagtgggtggcagcttctgcctcaatctttctgcagtctcccttccccattccaatcacgataaatatatttatacttacttgattatgtcagccagacaatactcccctaattggcagtgatcagggttccagaattgtttgggcgaacctgctgtctctctatcaggcaaagcgataaggggccgctaatgcagtccccattaacaatttccagtggaaaaaaaaccaatcccccgactcatgcatggcaacgaattttccaaacagctcctgagagccagcgattgaggaactcagacttaacacgaaccggtccagcatagaatgcttttatgacttttccccacccccagctagagcatgtagaaaaaaccatagccacttccttatgctcaaggttcttttgttcttttgcttttttgctcttttccttttttttttttttttcttttgttgggcttacggagctaactgtcatttttggttcttggttctttgtaaatttcagggacatctggcacacagtttatttcatttgctagctctggtatttgtagatacgcacactctctgctgcgtgtgcatgttaacacttcacatgtataatttatgcatgcataatttggagcttgagaggataggctcattttgatgtttaagtgtaactacacagcgccaattcaattataagtaattactcaataaatatttaccaaatgaatgaatataccaaaaagacaaatatgcaactgtcattcatttatcagacatttcaatacctagtgtgtaccaggcaccgtgctagatgctgagtattcaatgatgcatacccacagttcctttcctcagggagctcacagttgaaggacaggaggcagacatataaatagacaattgcaagacatcatggaggcaaagtgactgagccctatgcagggtagcatggagctccaaggaggaagcttggtccacctaagggaggggctgaggccatggagagtctcctggaggtgatgaggcctaagaggggaggtaaaggcttcagataatgaggacagcacaaccaatggcaggatgcaagaactgatagggtgttgtggaaaagaagcaaggcagagatgaagtcggggactcagggaggtaccggatctggggggcttggtgtagagtaagggagaggagcttcaactatctcaattagggcaagaaaacacaaacagctccttcattcgtccaaaatgcttctggattgcaccacaattggcacacgcacacctcaaagcagaatttggactggcctcagaagcactgctggagcacaggaagatctgaggccacatgctgaatccgtcattagggagatgagcaagagttagcttatttcttggtaagttgaggaggtggacttggagggctccaagcttttacatctatgctgcctggattctttgaggtttgtgtacaggctgcacttgggcccactccaagtccaaactggggtgctaaaggaatgaggctggttccaagcagcacacaggatcacaatatcactgtcttacagtgcagagacagtaggcacattgaggcagaatttcatatgaatctgtaagaagtattcacaggaatgtaatgtatgatggagacatcccattgtccccagcctgggtcagggtctcatgatctcaagtctgaaacatgtccaattaatttggagcactgatccctgctagatttagtttctcaaaagcactgttcagctcacatcatttctactcaaaatctcttaataattccaccttgcttgtagagtcaagtccaaagtccttagagtggcatggcattcaaagtcatcctcagtctatccccaccctgcctgccgtaacccccacctgagctttgattcacaaatgttcccaccactctgcctttactcactctagctcctgactcttcaggtccagctcaaattcaagtccatctcctttaggattactgtcttgttactcctgtcctcttctgaaccagtgcagagcttactatgttgttcattggtgactattaacttcactttgtggtttgagttttacttctccagctaccttgtaagccccagaggatgggaacccagcctcactcctctttgcagtctatggacttagcacattgtcctgctcacattaaatatttgctgatgaatgggtatcctacattgtcacttctttttttttttgagacggagtctcgttttgtcacccaggctagagtgtagtggtataatcttggctcactgcaacctccgccgcc

SEQ ID NO: 1562752 - DNA, 4001 bp, Homo sapiens
aagcttaggcatgaaccctgtcagtcatcaacaccagtgggtgttattatctgggaatcaataaatatgttggaactaggatcattttcagctcttctaggaagcaatagttctaaaagagatggcttcaggaaataagtgagagacattttgtataagaagtgggaagaaaatgatcaagagtcaaagaaacaactaatcatgatatcgccttgcatttttatagagcctttttcctaaggcacttcatatctatgttaactcatttattcttacaacatccctacgaggtagacagaacaattgaaagggattttcaccagggcctaagatgtgggagatattcaaaaggatattgtattagcaacagagatatttcttcatattgaatagattgatcatctccttctcctctgcttcagtaaagtcatttttaaaaagataaaatctattacaatttggggagaataagatttcagtttaccacatgggagacactccaagttcaatctaaaaaagcagttttattcaataatatagggccacctctcttttacaaaaaaacaaaaaagggtatgagtcagatttttttcgtatttgaaaattaaatatacttaggtggtcctctatttacacagtgttccttatttaatagcagatggttttgtaaagagaatcactataaaattattctataaagttttacataaaatactggattgttaaaggagagtaacttctgctaaatactctttccgaaaccaaaaataagaaacaaaaaggagccactaaagaactaaaccgtttatgacaaacattgctgcatagaacaaaagattctgcgacctgaagtttcccatcctcagataacataacgagaacacacgaaatttttcccattggatgtttagatctaaaacacttcccactcctagtttatctagggatgtgtatgttcaatagtgtgcaaattatgctgcatacactttattaagaaggcctaattccaggtagataaatacggtaaattttttttgacagtatacctgtcagggcaatacagtacattttaaattagtgaaacctttggttggtatgttcaatcctcacgttcaggaagagttgggacaaagaacacaaagcagctatcttcagactggacgcctaaaccagagacagtcatagggatggagcctaacggctagtacgaagagagacaatacccttccaaaatacacttcaacataaagttttcttttcgtaaaggaatgaaaactggtgtcctttgtacaggtaacaaaaatgcgaacagaactagaaattcaagcaaagagagaaatcctgacctcagagtgctagtgttcattcatcactgctcagccctctaccaccccctccaatcccttccaatttggattaaattctgaccatggtgaagtggaattttacctccatgatcccaaggtcgaaaatctttccctgagatgcttctgaagccagtttgtggagatttttgtgttatggactgggtaaggaacaagtgttctcccagttcatttgatagaagtcaaatcccatcaccacaaacattgtcacagcaaaaggtttagagaccttagctgatgggacttaaaagcaatatttagagaactagtgagattcattttaattaactcatacagaacattctgcaaattataaaactgttcaaagtttctagagtatatgtacagatgttgtataatgacataccttttggaagagaaggggttgagtttatgtcttggctttgacaccgagttattagaatcctttctggcaagaagggagacaaattcaagcatcagagttactgcatttcagagtatggatccactttgtgctgtcttccatgtaccactctgaaagagggtgcaagtttacagatccattaactgtgcctcctcctccccacctcttactccctcctccaaactaaccctagtcagccctgcagtctgtaggcaaaccacacaggaactagcacatatggggcttcggagagttgggcgtgagccttagattatgtggttttgttttcttgctgccagagttgaactaaaatgcaggaggttcactgaaacacttttgcttctttatgcttggtttcagttttaacaatatcccccctgaacacttgtgttcacataagaaaatttatagttcttgatatggtccatcagcaagctgatcttaaggaaaactcttattctcttagtataatcatgcatccagaggaacattagggcttcttgggggaacttatttaagagcaccctcgatcactcacaatgttaaaatcccaggaaagatgctttgttcatacactcagcctctaatattactcttgacaaaaaaagaagaaacattctgagctgggatgcattctcaccccaggtttgccacagtccagcatgaggtggaaccagttccttcaatttctgggacttcaatttctgttgagtcttagactgaaggctttctgggatttaagactttccattgaccttgagttttgttaccttcaacttccttagttcttacctttaaatgtaccactcacccttccccctatatcaactgcaacttgtgaaggcctcttcctttctctttgctcttgctagaaaatggattgccaacgttgcatcttttacagaaaattagagacattgctacttgctaagtggcaccattcagagtttggggactggatccaagatgaggagggaaatgttggctcactgggatgttcctagcattaatccctggaataccaagaggagagtgtcaaggagagattcaatttggggttctaaaatttaaactttttctgcaatgtgaaacggcatccttttccatctctttgcttctttatatctaaaccttgcttaaaatttactttcttaaaaccttttccttggttataattgcccaacatttttattgaaatagaaaagaagaatcagcaaagtgtcaaggtgacagaaaatgctcagtaaatatttgtcgaatgagttaaaggaagtaattttctatccataactcctttttttttttgagacggagtttcactcttcttgcccaggctggagtgcaatggcatgatcttggctcactgcaacctccgtctcccgagtacaagtgattctcttgcttcagcctcccaagtagctgggattacaggtacctgccaccatgcctggctaattttttttgtatttttagtagagatggggtttcaccatgtcggccaggctggtcttgaactcctgaactcagatgatccgcccgcctcaacctcccaaagtgctgggattacaggcatgagccaccgcacccggccctgtagctccttaataacaggctttctttttattaatgcaactttgtcaaattttcttaaatcctggttatatctgaaaaggatctctgctatttccacattataaagataaaatttaaaaataacaacatcttgctactttaaaaataataacgtctcaaccttgacctcagaattattcagccttctaaggaccttcttggatcattacactgaacagctctattgccaagtttttaaatgctgaaatcctctggctacagtccttattctttgatagctcccaagtcgatggttttgaaatggttaaaggagtccctaaaattctatggttggggagtgggagcgaagggaaaatgttgaatggtgttacatggaaagtatcatggtgttttcagcttgtaccctaatgaggaagctaattttgcaccaggcactactccccagggagcagaatataatccttccccttacaagcatgggacagattgcagaacagaaaaatctcaaaggcaagttattttggtagtaagtactgattgacagacatgttatgtagagcatagtgggagggaagcaaggccacttgagtggtttatttcataacagctctgtaact

SEQ ID NO: 1562753 - DNA, 4001 bp, Homo sapiens
taaataccccctcgctgggaaggaagaagaagggacagctccttgttgggtgtgggagtggagccaaggtggacttgagactctgggcggcttctgtggtatttgaagttgctagtttctcagtatcagcgcgaggctcgaaggtgaagggactgtggaggggctcctggaatcgctcctgcgaccttcttattctacaggtccagataccaagacccagcccagggcctgggaagcctgcaacgccaggactgcacagacacgaaccccatcccctctcccgctgggggaggacgagccaggtcaagttaggtcaatgtccacattgagaagagggtggccagcatgtcccagggtgcggagagacgctccactgcgtaggattctgggtcccgtgttgatacggggtggttcccctcctgcggtggagttagtgtctctcggggggtagggagctgaggaaactgctctatgccccagcccacccccaagggactcgccactcccactgccgtggaacaccaagcaccgggggcccgtccccagcgccacggcagcacgagctgcaggaggcaagggctgtggagacgggtggaggcggccggtgtactctcccagctccttttcgggtagacctgtcttctctcagcgccaactccaaagatcccaaaaagggtggccgagcccaggggcagctcctagagtcatcagcagctccccttcggggacttcttgacgccgggcaggagcctcgcggaagccgacgcgcgcttctggtgtcgccatttggcccggcggttcttgaaccagacctggggatggggggaatgctcagccctagccccaggtcctgcgtcccaccggctcccgagggtcccacagggaccgagaggggagcttcgcaacagggatgtgggcggacggcgctgtagagccgacacccgggccgcggctgcgcgccacctgcccttattcgctgcggacagactcggtgggtctggacgcgagatgggaacccccttagtacccgccccagcctccagctggcggcgaccaggacgccccttcttgggttgcgggctcttctgaatttcccaaattctggacgtgaacgcgggcctctttcgtcaccagaggaaagtgtaaaacaaaagaaaagaaaagtagccctccggttcctttcccgcggcacctccctgctctcacccgctcctcatacccccggacgcccagcgccgtccagggacctcctccctccggcgcgccagggcggggcttgggccgaggccgtctttgcaaagggcgcccgcccgccaggaccccagtccagtgtagccgcggcccgcgcgctccggggaaaggctgggcggggcactcacctccacgcgctcctcgcgaaggcggatgcggccggccaggcgctcgcgcgtactcacgtcaggatactggttctgcacgaaaagcgcctcgagcgcctgcagctgctcttcgctgaagatggtgcggtggcgcctcgtgcgccgctgcgaacccgggccgaccgcgcccgggagcgccccggaacctccggctggcgcacccagagacaagggcaccgccggtcccagcctcagcggccacgccagacgagcgcctgcggagcgagggcgcggtgaggcgcggggctggggccaagctcggcacccactgcgccgcgccccgggctccgccgggccccgcgccccgctccgcgcccactcacccagcccggcggccgcctctgggggcccgcagggcgccgcgcgggggccgcagcagcagcagcaggcgcagggcgcagcctcgggcgccccgggctcctctggcttcgcggggctctggcgaccggcgggctgcggtgggcaggcggcccgggccgggaggctccgctcgggcaggctggagaggatgtgctcgatggagaaggggcagggccgcccggcaccccggcggctcgccgcgcccccagccgctgccgccatgcccggcccggccggggcgccgccgccgcgggaatatatacgtcggggagggagcgcgcagtaatccccgggccgggcgtccagtccacgcgggttaatcccgcagcgccggccgcgaacgcgctaatcctcgactgcggcggccctgcctccgcgcgcgggggccgggggcgctgcagagagggccccctgtgccccccaccccgccccgcgtcctcctgccccacccgcgcccgccgctcaagctggcagggcgacctgcggggaaggggcggagggccgcctcgccgccgcccgcggggcctggcagccgctcggagggcgccccgaccctggcagctccccagagcgcggcggtgcctcccggcccagcctctggtggctccccctcgttcggctgggcctaattcctcgtcccctctggggccctactgcggcggctcagcacgcctgcagaagctcggcctagccgcccacccgaaactcctggaccgcagcctccatggggcccagcaccaccggcaaccgcacgatcccgccgcgctcgggtcccgaacctgcccgccacctcggagccagggtctcatggccctggagggcgtgagagcgcggcaggaagcctgggctgccgggtgcccccagttctccgtctcctcacctgtgtcaaggagacctccccgccccttccgaggcccctcctcggtgcttcagagccgcctgtcctccagctttcccactggtcccagaatccccgcgaaaacatccaacactgcacctcgcccttccccgcactgtcactgccccccagaagctgtgggctccccctcctcgctctccgcccaggccagtcctctggccacaccgtcctcggtcccttctgccacagcgcaggtgacccgcacttggctacattgtttcaccctcagtgaagcggctcctggcagcgggaccgtcacttcagcttaagaccctttcctcttgacctttgaaaatacagtatgggactcatagcacagagaaacagacggcctggctcatactccgttgtcaatttctggccgtgtgacctccataggcgtcttcagcctctgggcttggctttcccaatctgtaaagtgtagtgactaggtgtgagacggttagaacctggccgcctccccagggcaatgcgtattcctgcgctcctcccgccgccagcccctctgcaagactctgccatccccactctgctatcagtgaaagtgctgtggacatcactgtgaccgaacctgctgatttaatttctgtcacaagagctcccacataggtttcccaggggtagtctggaggctcagtgatgagctgccacctccatgagtggctctgtcaacccctcctccacccacctcttggtggtagaatggctgccacagccccacacttttcatctcctcccatggccctttggatggccatggatccctcctccctcagcagacctccctcacagaactgcatctggaccatcctccaaaatcagagtgctgctatgatgggggaggcagggtcattggtcaggagagccagcccaacatttgctgagccctcttcctcctagccctggccattccttcatcctttcccattctcaccctcaatacctattccagccttggagctccagacaccatctttgtgacagtgactcacaagtgcacctccagcctggcctctctctctgctccacgctcttgtttctggagcctgctccacatctccatctccactaccaataaagttctcccagtcaccatgccagaaaggaactcaaggtcttctcaaaatccctttcttaccctatgttctccacttttacaaatgggccactgcccacctgtccatctctagtgctcattctcttctacctatttgcctctgcgtgtgccctgcctctttaccagtccaccttggtaaatggcccactgtggcactttttcaaaaagtttattttctattttgcat

SEQ ID NO: 1562754 - DNA, 4001 bp, Homo sapiens
ctgggtagattgggtagtctgcaacaagtcactagaggctcttttcagctagcatttgttgaacaaatgcgcaacagtggaaaaatgttcccttgtcttctcttctaatacccttcagtctgggagtggagaggccctgcggctcagaaaaggctggaagatgagaggtggggggacatgttctgtcagcccctgctcatcccggtcacaccccaagctgtaccttctccccagatacctctcctttctttctttcctttttttttgagacggagtctccctctgtcgcccaggctggagtgggctccctctgtcacccaggctggagtgcagtggtgctatctctgctcattgcaagctccgcctcctgggttcacgccattctcctgcctcagcctccccagtagctgggactacaggcggccgccaccacgccctgctaatgttttgtatttttagtagagacagggtttcaccgtgttacccaggatggtctcgatctcctgacctcgtgatccgcccacctcggcctcccaaagtgctgggattacaggcgtaaaccaccgcgcccggcctttttgagacggagtctagctctgtcgcccaggctggagtgcagtggcgcgatctcagcacactgcaagctccgcttcctgggttcacaccattctcctgcctcagcctccagagtagctgggactacagacgcccgccaccacgcccggttaattttttttccatttttagtagagacggtgtttcacggtgttagccaggatggtctcggtctcctgacctcgtgatccgcccgccttggcctcccgaagtgccgggatgacaggcgtgagccaccgcgcccggccagatccctcgcctttcccctccctcgctgccccatggggtatgggagggccactggggcccggggccagtggggagagccaaggtcacatgggctccggatgcggtgaggggtgagggaaggagggcacctttcggtcaagatgaaatcaccatccttgagcgtcggcagtttccccaggctgttgatctgcaagaactccttgctcttgtgctgccctgaagaggaagaagtcagaaaaggtcttcagaataaaaacgctgcacctctacaccctccctcctcctccccaagcggagccccacagccctgagaaacagcaaggtctgggactagaggcctggatcagcctcactccctggctgggcctccctgccctgccacattccggggcagctggggggctttggtgggtggggccaggtgcagcaggtggataaagagaagttttctagccggactctggtgggccaggggaggggaggcaaactggggtggctcatctcttcccatctcttaattctcacaacagcatgtccttcttcccaaggtcttctgggctttgtgaatttatatgcgtgcattccacgcaagaactctgtcaactccattcagtattttctttccatccctacagagcagaaggtaacattatcctccttttcagaaggcaagctaaggttcagagaggctgtgatccctccaaggccactcagtccacagcattctctggtggcagacgctgcaggaggaggtgagggggctgtgcgggcggcgagacgctcagggcagagcagggcgggggcctgggggtgcactgggtttgtggacacgcggggaaacgggctgggcccacctttgaccaaatccacggtgcgcagctctaaggggatgccattcttcttggcgaagatgtagacggcgcggctgggctgggacaccaggtcaagaaacagctctaggcccatggcgggggcggcaaggacagcggggatggcagtgaaggcgctgagcgcggtgtgggcagcagctgtggcaggatcccggcgcgccgggaaataggggatcaggccccaccccctggggacagcacccaattggagcgcaccacccccggacccgcctcgccccttcggttcctgtccagtcctgccggccaagactccaccaccagatccgtgcgtccctacagggagggcggtcgctatgaacgcacagctgggagggtggagttggagctggggaccctcgactggcagggaggacgcggatgcagggggccgactgcaaggggaaggggaaccggctggacagggagaagcaggtctgcttttcgggatcccggtgccagggaccctgcccagttccaggcgtcgccctgacccagaaacgactgggcgccgccgtcctggaaaggccccagcgcacggacatctgagggttcgttcagagctctgtttctcggcgctgcatggtggcggaagggagggagcgaatgggatcccctaaaagggatcttagagtttcacccagtgggatgtgacacttgcaggtgtcccaaactggtgggaaccttgactggaaggctggggttaaggatgaactttctgccgtccagactgtcccctgcagagcagctgctgccagacagcgggagctgccagacagcgggagctcccacttcgtgcacaggatgggggcagggagcccgcagccgcgggaggcaggaatgactgtccgggaacctcctttcttctccctgaatcccagccctggcatctcaccagggggcacagtgatggtccagggctgggcccgggactctagctgaatctttcagagtatcccatccctctggccagtggcccaagcgagtgaaccagaatgcttccttgggagttttgaaactggaactggagagaggagctccctatggggaggtaaacgggagctggggccacctgtagtgacatttcctgagttcgaggagtagacgagactgagagagaaaagctgactcagagaaagggagtgataacagggcatgctggcccacacctgcaatcccagttactctcacgggatctgtttctctgatgtctgggtatgaaaggactttctaagcctcagaacagtgggagaactcaacaaagaaaaaaccaatacatatacaaggttactttgtggaggaaaaaatggattaaccttaagcaaaaaactgggaaggatctcggtaaaagatacgtcagaaggaagtaatgtcctttaagatgttcttagaaacccatcagacaggtagggtgtggtggttcacgcctgtaatccctgtactttgggaggcagagatgggcggatcagttgaggtcaggagtttgagaccagcctgggcaacacggtgaagccccgtctctactaaaaatacaaaaattagctgggtgcggtggcacactcgggaggctgagacaggagaatcacttgaaccttggaggcagaggtttcagtgagctgagatcataccactgcactccagccgggccactgagcgagactgtctcaaaacaaacaaacgaacaaacaaaaagaagagaaactcatcagacgaagacacaggaaaaaaatgagcgaaggaaatcagcagaggtttcattgaaggacaaagagaaatggtcaatacatggatgaaaacatgtttaacttcagtaataatcaaggaagcacacaccaacacaacatgcacatactgtttttatttatcaaaggcacacatatttttgaaatgagtactcctaattaatatgtacagagcacttacccagtgcccagcacaggggtggcaccctgtgtgtgagacagcatgaaacaggtagacacgcgccctgctgaaagtaagggaccgcctctctggaggatccatcgggcaataaggaggtttccacaccttaactgtgtctgccttgacctctggggcctgggagcagagccccctccagctggtggggaaggaagcgtggtgtgtttgaggacagaatggagagaagttgagtagagcaagtgtagactcttcctatccaaagtgtggtcaatggactgggagtatcagcatcaccagggagcttgttggaaatgcagaggctcaggc

SEQ ID NO: 1562755 - DNA, 4001 bp, Homo sapiens
cctgggtagattgggtagtctgcgacaagtcactagaggctcttttcagctagcatttgttgaacaaatgcgcaacagtggaaaaatgttcccttgtcttctcttctaatacccttcagtctgggagtggagaggccctgcggctcagaaaaggctgaagatgagaggtggggggacatgttctgtcagcccctgctcatcccggacacaccccaagctgtaccttctccccagatacctctcctttctttctttcctttttttttgagacggagtctccctctgtcgcccaggctggagtgggctccctctgtcacccaggctggagtgcagtggcgcgacctctgctcattgcaagctccgcctcctgagttcacgccattctcctgcctcagcctccccagtagctgggactacaggcggccgccaccacgccctgctaatgttttgtatttttagtagagacagggtttcaccgtgttagccaggatggtctcgatctcctgacctcgtgatccgcccacctcggcctcccaaagtgctgggattacaggcgtaaaccaccgcgcccggcctttttgagacggagtctagctctgtcgcccaggctggagtgcagtggcgcgatctcagcacactgcaagctccgcctcctgggttcacaccattctcctgcctcagcctccagagtagctgggactacagacgcccgccaccacgcccggttaatttttttttccatttttagtagagacggtgtttcacggtgttagccaggatggtctcggtctcctgacctcgtgatccgcccgccttggcctcccgaagtgccgggatgacaggcgtgagccaccgcgcccggccagatccctcgcctttcccctccctcgctgccccatggggtatgggagggccattggggcccggggccagtggggagagccaaggtcacatgggctccggatgcggtgaggggtgagggaaggagggcatctttcggtcaagatgaaatcaccatccttgagcgtcggcagtttccccaggctgttgatctgcaagaactccttgctcttgtgctgccctgaagaagaagaagtcagaaaaggtcttcagagtaaaaacgctgcacctctacaccctccctcctcctccccaagcggagccccacagccctgagaaacagcaaggtctgggactagaggcctggatcagcctcactccctggctgggcctccctgccctgccacattccggggcagctggggggttttggtgggtggggccaggtgcagcaggtggataaagagaagttttctagccggactctggtgggccaggggaggggaggcaaactggggtggctcatctcttcccatctcttaattctcacaacagtatgtccttcttcccgaggtcttctgggctttgtgaatttatatgcgtgcattccacgcaagaactctgtcaactccattcagtattttctttccatccctacagagcagaaggtaacattatcctccttttcagaaggcaagctaaggttcagagaggctgtgatcccttcaaggccactcagtccacagcattctctggtggcagacgctgcaggaggaggtgagggggctgtgcgggcggcgagacgctcagggcagagcagggcgggggcctgggggtgcactgggtttgtggacacgcggggaaacgggctgggcccacctttgaccaaatccacggtgcgcagctctaaggggatgccattcttcttggcgaagatgtagacggcgcggctgggctgggacaccaggtcaagaaacagctctaggcccatggcgggggcggcaaggacagcggggatggcagtgaaggcgctgagcgcggtgtgggcagcagctgtggcaggatcccggcgcgccgggaaataggggatcaggccccaccccctggggacagcacccaattggagcgcaccacccccggacccgcctcgccccttcggttcctgtccagtcctgccggccaagactccaccaccagatccgtgcgtccctacagggagggcggtcgctatgaacgcacagctgggagggtggagttggagctggggaccctcgactggcagggaggacgcggatgcagggggccgactgcaaggggaaggggaaccggctggacagggagaagcaggtctgcttttcgggatcccggtgccagggaccctgcccagttccaggcgtcgccctgacccagaaacgactgggcgccgccgtcctggaaaggccccagcgcacggacatctgagggttcgttcagagctctgtttctcggcgctgcatggtggcggaagggagggagcgaatgggatcccctaaaagggatcttagagtttcacccagtgggatgtgacacttgcaggtgtcccaaactggtgggaaccttgactggaaggctggggttaaggatgaactttctgccgtccagactgtcccctgcagagcagctgctgccagacagcgggagctgccagacagcgggagctcccacttcgtgcacaggatgggggcagggagcccgcagccgcgggaggcaggaatgactgtccgggaacctcctttcttctccctgaatcccagccctggcatctcaccagggggcacagtgatggtccagggctgggcccgggactctagctgaatctttcagagtatcccatccctctggccagtggcccaagcgagtgaaccagaatgcttccttgggagttttgaaactggaactggagagaggagctccctatggggaggtaaacgggagctggggccacctgtagtgacatttcctgagttcgaggagtagacgagactgagagagaaaagctgactcagagaaagggagtgataacagggcatgctggcccacacctgcaatcccagttactctcacgggatctgtttctctgatgtctgggtatgaaaggactttctaagcctcagaacagtgggagaactcaacaaagaaaaaaccaatacatatacaaggttactttgtggaggaaaaaatggattaaccttaagcaaaaaactgggaaggatctcggtaaaagatacgtcagaaggaagtaatgtcctttaagatgttcttagaaacccatcagacaggtagggtgtggtggttcacgcctgtaatccctgtactttgggaggcagagatgggcggatcagttgaggtcaggagtttgagaccagcctgggcaacacggtgaagccccgtctctactaaaaatacaaaaattagctgggtgcggtggcacactcgggaggctgagacaggagaatcacttgaaccttggaggcagaggtttcagtgagctgagatcataccactgcactccagccgggccactgagcgagactgtctcaaaacaaacaaacgaacaaacaaaaagaagagaaactcatcagacgaagacacaggaaaaaaatgagcgaaggaaatcagcagaggtttcattgaaggacaaagagaaatggtcaatacatggatgaaaacatgtttaacttcagtaataatcaaggaagcacacaccaacacaacatgcacatactgtttttatttatcaaaggcacacatatttttgaaatgagtactcctaattaatatgtacagagcacttacccagtgcccagcacaggggtggcaccctgtgtgtgagacagcatgaaacaggtagacacgcgccctgctgaaagtaagggaccgcctctctggaggatccatcgggcaataaggaggtttccacaccttaactgtgtctgccttgacctctggggcctgggagcagagccccctccagctggtggggaaggaagcgtggtgtgtttgaggacagaatggagagaagttgagtagagcaagtgtagactcttcctatccaaagtgtggtcaatggactgggagtatcagcatcaccagggagcttgttggaaatgcagaggctcagg

SEQ ID NO: 1562756 - DNA, 4001 bp, Homo sapiens
ctgacaggcccccagccatcacttctgcagccacctgacctcttgtccttttcctgcccagcagctggacctcaccatgagctgtgcccttgggccatggcattggcctctaggcccggcctgggtagattgggtagtctgcaacaagtcactagaggctcttttcagctagcatttgttgaacaaatgcgcaacagtggaaaaatgttcccttgtcttctcttctaatacccttcagtctgggagtggagaggccctgcggctcagaaaaggctggaagatgagaggtggggggacatgttctgtcagcccctgctcatcccggtcacaccccaagctgtaccttctccccagatacctctcctttctttctttcctttttttttgagacggagtctccctctgtcgcccaggctggagtgggctccctctgtcacccaggctggagtgcagtggtgctatctctgctcattgcaagctccgcctcctgggttcacgccattctcctgcctcagcctccccagtagctgggactacaggcggccgccaccacgccctgctaatgttttgtatttttagtagagacagggtttcaccgtgttacccaggatggtctcgatctcctgacctcgtgatccgcccacctcggcctcccaaagtgctgggattacaggcgtaaaccaccgcgcccggcctttttgagacggagtctagctctgtcgcccaggctggagtgcagtggcgcgatctcagcacactgcaagctccgcttcctgggttcacaccattctcctgcctcagcctccagagtagctgggactacagacgcccgccaccacgcccggttaattttttttccatttttagtagagacggtgtttcacggtgttagccaggatggtctcggtctcctgacctcgtgatccgcccgccttggcctcccgaagtgccgggatgacaggcgtgagccaccgcgcccggccagatccctcgcctttcccctccctcgctgccccatggggtatgggagggccactggggcccggggccagtggggagagccaaggtcacatgggctccggatgcggtgaggggtgagggaaggagggcacctttcggtcaagatgaaatcaccatccttgagcgtcggcagtttccccaggctgttgatctgcaagaactccttgctcttgtgctgccctgaagaggaagaagtcagaaaaggtcttcagaataaaaacgctgcacctctacaccctccctcctcctccccaagcggagccccacagccctgagaaacagcaaggtctgggactagaggcctggatcagcctcactccctggctgggcctccctgccctgccacattccggggcagctggggggctttggtgggtggggccaggtgcagcaggtggataaagagaagttttctagccggactctggtgggccaggggaggggaggcaaactggggtggctcatctcttcccatctcttaattctcacaacagcatgtccttcttcccaaggtcttctgggctttgtgaatttatatgcgtgcattccacgcaagaactctgtcaactccattcagtattttctttccatccctacagagcagaaggtaacattatcctccttttcagaaggcaagctaaggttcagagaggctgtgatccctccaaggccactcagtccacagcattctctggtggcagacgctgcaggaggaggtgagggggctgtgcgggcggcgagacgctcagggcagagcagggcgggggcctgggggtgcactgggtttgtggacacgcggggaaacgggctgggcccacctttgaccaaatccacggtgcgcagctctaaggggatgccattcttcttggcgaagatgtagacggcgcggctgggctgggacaccaggtcaagaaacagctctaggcccatggcgggggcggcaaggacagcggggatggcagtgaaggcgctgagcgcggtgtgggcagcagctgtggcaggatcccggcgcgccgggaaataggggatcaggccccaccccctggggacagcacccaattggagcgcaccacccccggacccgcctcgccccttcggttcctgtccagtcctgccggccaagactccaccaccagatccgtgcgtccctacagggagggcggtcgctatgaacgcacagctgggagggtggagttggagctggggaccctcgactggcagggaggacgcggatgcagggggccgactgcaaggggaaggggaaccggctggacagggagaagcaggtctgcttttcgggatcccggtgccagggaccctgcccagttccaggcgtcgccctgacccagaaacgactgggcgccgccgtcctggaaaggccccagcgcacggacatctgagggttcgttcagagctctgtttctcggcgctgcatggtggcggaagggagggagcgaatgggatcccctaaaagggatcttagagtttcacccagtgggatgtgacacttgcaggtgtcccaaactggtgggaaccttgactggaaggctggggttaaggatgaactttctgccgtccagactgtcccctgcagagcagctgctgccagacagcgggagctgccagacagcgggagctcccacttcgtgcacaggatgggggcagggagcccgcagccgcgggaggcaggaatgactgtccgggaacctcctttcttctccctgaatcccagccctggcatctcaccagggggcacagtgatggtccagggctgggcccgggactctagctgaatctttcagagtatcccatccctctggccagtggcccaagcgagtgaaccagaatgcttccttgggagttttgaaactggaactggagagaggagctccctatggggaggtaaacgggagctggggccacctgtagtgacatttcctgagttcgaggagtagacgagactgagagagaaaagctgactcagagaaagggagtgataacagggcatgctggcccacacctgcaatcccagttactctcacgggatctgtttctctgatgtctgggtatgaaaggactttctaagcctcagaacagtgggagaactcaacaaagaaaaaaccaatacatatacaaggttactttgtggaggaaaaaatggattaaccttaagcaaaaaactgggaaggatctcggtaaaagatacgtcagaaggaagtaatgtcctttaagatgttcttagaaacccatcagacaggtagggtgtggtggttcacgcctgtaatccctgtactttgggaggcagagatgggcggatcagttgaggtcaggagtttgagaccagcctgggcaacacggtgaagccccgtctctactaaaaatacaaaaattagctgggtgcggtggcacactcgggaggctgagacaggagaatcacttgaaccttggaggcagaggtttcagtgagctgagatcataccactgcactccagccgggccactgagcgagactgtctcaaaacaaacaaacgaacaaacaaaaagaagagaaactcatcagacgaagacacaggaaaaaaatgagcgaaggaaatcagcagaggtttcattgaaggacaaagagaaatggtcaatacatggatgaaaacatgtttaacttcagtaataatcaaggaagcacacaccaacacaacatgcacatactgtttttatttatcaaaggcacacatatttttgaaatgagtactcctaattaatatgtacagagcacttacccagtgcccagcacaggggtggcaccctgtgtgtgagacagcatgaaacaggtagacacgcgccctgctgaaagtaagggaccgcctctctggaggatccatcgggcaataaggaggtttccacaccttaactgtgtctgccttgacctctggggcctgggagcagagccccctccagctggtggggaaggaagcgtggtgtgtttg

SEQ ID NO: 1562757 - DNA, 4001 bp, Homo sapiens
tctgacaggcccccagccatcacctctgcagccacctgacctcttgtccttttcctgcccagcagctggacctcaccatgagctgtgcccttgggccatggcattggcctctaggcccggcctgggtagattgggtagtctgcgacaagtcactagaggctcttttcagctagcatttgttgaacaaatgcgcaacagtggaaaaatgttcccttgtcttctcttctaatacccttcagtctgggagtggagaggccctgcggctcagaaaaggctgaagatgagaggtggggggacatgttctgtcagcccctgctcatcccggacacaccccaagctgtaccttctccccagatacctctcctttctttctttcctttttttttgagacggagtctccctctgtcgcccaggctggagtgggctccctctgtcacccaggctggagtgcagtggcgcgacctctgctcattgcaagctccgcctcctgagttcacgccattctcctgcctcagcctccccagtagctgggactacaggcggccgccaccacgccctgctaatgttttgtatttttagtagagacagggtttcaccgtgttagccaggatggtctcgatctcctgacctcgtgatccgcccacctcggcctcccaaagtgctgggattacaggcgtaaaccaccgcgcccggcctttttgagacggagtctagctctgtcgcccaggctggagtgcagtggcgcgatctcagcacactgcaagctccgcctcctgggttcacaccattctcctgcctcagcctccagagtagctgggactacagacgcccgccaccacgcccggttaatttttttttccatttttagtagagacggtgtttcacggtgttagccaggatggtctcggtctcctgacctcgtgatccgcccgccttggcctcccgaagtgccgggatgacaggcgtgagccaccgcgcccggccagatccctcgcctttcccctccctcgctgccccatggggtatgggagggccattggggcccggggccagtggggagagccaaggtcacatgggctccggatgcggtgaggggtgagggaaggagggcatctttcggtcaagatgaaatcaccatccttgagcgtcggcagtttccccaggctgttgatctgcaagaactccttgctcttgtgctgccctgaagaagaagaagtcagaaaaggtcttcagagtaaaaacgctgcacctctacaccctccctcctcctccccaagcggagccccacagccctgagaaacagcaaggtctgggactagaggcctggatcagcctcactccctggctgggcctccctgccctgccacattccggggcagctggggggttttggtgggtggggccaggtgcagcaggtggataaagagaagttttctagccggactctggtgggccaggggaggggaggcaaactggggtggctcatctcttcccatctcttaattctcacaacagtatgtccttcttcccgaggtcttctgggctttgtgaatttatatgcgtgcattccacgcaagaactctgtcaactccattcagtattttctttccatccctacagagcagaaggtaacattatcctccttttcagaaggcaagctaaggttcagagaggctgtgatcccttcaaggccactcagtccacagcattctctggtggcagacgctgcaggaggaggtgagggggctgtgcgggcggcgagacgctcagggcagagcagggcgggggcctgggggtgcactgggtttgtggacacgcggggaaacgggctgggcccacctttgaccaaatccacggtgcgcagctctaaggggatgccattcttcttggcgaagatgtagacggcgcggctgggctgggacaccaggtcaagaaacagctctaggcccatggcgggggcggcaaggacagcggggatggcagtgaaggcgctgagcgcggtgtgggcagcagctgtggcaggatcccggcgcgccgggaaataggggatcaggccccaccccctggggacagcacccaattggagcgcaccacccccggacccgcctcgccccttcggttcctgtccagtcctgccggccaagactccaccaccagatccgtgcgtccctacagggagggcggtcgctatgaacgcacagctgggagggtggagttggagctggggaccctcgactggcagggaggacgcggatgcagggggccgactgcaaggggaaggggaaccggctggacagggagaagcaggtctgcttttcgggatcccggtgccagggaccctgcccagttccaggcgtcgccctgacccagaaacgactgggcgccgccgtcctggaaaggccccagcgcacggacatctgagggttcgttcagagctctgtttctcggcgctgcatggtggcggaagggagggagcgaatgggatcccctaaaagggatcttagagtttcacccagtgggatgtgacacttgcaggtgtcccaaactggtgggaaccttgactggaaggctggggttaaggatgaactttctgccgtccagactgtcccctgcagagcagctgctgccagacagcgggagctgccagacagcgggagctcccacttcgtgcacaggatgggggcagggagcccgcagccgcgggaggcaggaatgactgtccgggaacctcctttcttctccctgaatcccagccctggcatctcaccagggggcacagtgatggtccagggctgggcccgggactctagctgaatctttcagagtatcccatccctctggccagtggcccaagcgagtgaaccagaatgcttccttgggagttttgaaactggaactggagagaggagctccctatggggaggtaaacgggagctggggccacctgtagtgacatttcctgagttcgaggagtagacgagactgagagagaaaagctgactcagagaaagggagtgataacagggcatgctggcccacacctgcaatcccagttactctcacgggatctgtttctctgatgtctgggtatgaaaggactttctaagcctcagaacagtgggagaactcaacaaagaaaaaaccaatacatatacaaggttactttgtggaggaaaaaatggattaaccttaagcaaaaaactgggaaggatctcggtaaaagatacgtcagaaggaagtaatgtcctttaagatgttcttagaaacccatcagacaggtagggtgtggtggttcacgcctgtaatccctgtactttgggaggcagagatgggcggatcagttgaggtcaggagtttgagaccagcctgggcaacacggtgaagccccgtctctactaaaaatacaaaaattagctgggtgcggtggcacactcgggaggctgagacaggagaatcacttgaaccttggaggcagaggtttcagtgagctgagatcataccactgcactccagccgggccactgagcgagactgtctcaaaacaaacaaacgaacaaacaaaaagaagagaaactcatcagacgaagacacaggaaaaaaatgagcgaaggaaatcagcagaggtttcattgaaggacaaagagaaatggtcaatacatggatgaaaacatgtttaacttcagtaataatcaaggaagcacacaccaacacaacatgcacatactgtttttatttatcaaaggcacacatatttttgaaatgagtactcctaattaatatgtacagagcacttacccagtgcccagcacaggggtggcaccctgtgtgtgagacagcatgaaacaggtagacacgcgccctgctgaaagtaagggaccgcctctctggaggatccatcgggcaataaggaggtttccacaccttaactgtgtctgccttgacctctggggcctgggagcagagccccctccagctggtggggaaggaagcgtggtgtgttt

SEQ ID NO: 1562758 - DNA, 4001 bp, Homo sapiens
atattaatatacatatgattttttttaattgtaaggaggacttccccagctatgtgatgaaataacacttctaggaatattaaatgagctggtcaagaaatgaaggtactaccgtctttgcaactctgccctgcaatttcctatcatgtttcttcagcaccttgaccatgtgttgacatccagtttgtttgctcttgagtcaggtccataatcttgtaacttcctgagttgactcatcagagcttgtaattgtaacctggatgtttcctgggtcttttacatcgtcctggccatccctctctctaagtttggccatcctcattatggccttacaggcacaagacaggaccaactttgacaggctagctggcttccaagtgctcacctgagactacaatggcaaagagcagttgaaaataacttgcttaggttgcagggaaagttcctccccagtttaggaccaagtttcatgcaaatttgccgccataaactataaaaagtcacaaacattttcaaagctggataaaatgtctatcgtaactatcctacaaatgtaagtggtggtattggtgttctatctttcacccactgctatttaatctgcacaggaaattaggaactatctcgttcacttcaaacatttactgagtctctagtatgcatcaggcactattaggtgtcttcttaaatatttctaatttttacaacccatctgtactttcttaagatgaggtggttggagaactgaaaggttaagaaactttcccaacgtcacagagcctttcgatggtagggcaggaaagggaacccagccctgtctgactcccaagttggcattctttccctaaggaacgttaagcaccttcaaaacaccagtcacatcttgtatttacttttctattcttcacaatgtcaagccgttggcgaggccttaattcctgcctaccttctcgacagctcaaaaaacacggttttaaacgtccttcactgctccactcatacaagatgagcttccactcacaggatagcgagactaaggagcctgaccatctttccattttgtttcgggtggcctcgaaaagtagacattctcggacatgctcctccccagctgagcgactactttctgtttcctttcccgagtctgggaagagacgcggcggccaccctgccctggcctccgactacctgtcttcatgagcgtctcggccccctgcccgggccccctcgcccctctgctgtcccgcgcggtccagggagaggagactctcggtctccgaatcccctcaagtggggacccgaagaacggggaggggcactgagcggggacagggaacgcgcggagcgcagctggcatcgggcgcccccgttccacgtggcagagccgaggggttacgatctcggcgggagacgggagggcgggaggctgggttggcgacgcgggggagccaaggtgggtgcggggaccatggggacggcccctcgcgccgcgaacccccgcacgtcccggagactagcaggtgggcgggctcggccccttcttcccgttccgcgctccccgcggacagggcggccgctggccccgccgtcgcccgggagactgctcggccagccgcccgctcccctcagcgcccgccgccgccgcccgggcctaccttgctggtgaggtccagctctggctcgccgttgagcgcctcgccgtcctcgctgcagtccgagtcaaagccgccgtggagtcgggcggcggccgccgcggccctggccgcccccggggagctgggctcgggggcgaacatagaggccgggaccggcgagtccatcgcggagcgactgcgctccgtcgccatctttaataacttaggctaattcgtagccggcttccctccctcccaggctcatttgactaatctatgcacagagccccgccccgctccttatcggaataatttatgcaaaactccagccgcgtactgggtgacacgtacctctagctaagaaacagtcgactaggcctctcagccaccaatccctgcagagctttcaagtacctaatgaataattaatgaggcccaaatcccaacaacaaatgtctgagacgtcacgcgccctgctcccagcttgggagggggcagtaccgagtccccgctacccgcctgaagccttcccgccaacggaagcagagaagtgtctgactgacacagcagccatccaatgaggagagaaatacaaacaacgttactcgtcaacgccccttcactctccttgtttccagaggcggtactaagcctgcaaatcttactgcaaaacagtaggcgctgtaagccttccgatgacggacaagggcaggacccaatcgagtcatagaacaggtcccgcgcctggacctgctcatggagatagtaaactgcaaaatgagcctcccactcgattcagtgactgaggcagttgctggaacgccgatgtccaacgtgctggcatgctccaggcaactttaatagtaggatcgatgctgtaagttccaagagttgtaatactatagcagccagagtgaggcaataattaaatgctgaccttagggagaattctccattcactgcctttgcggaggcaatcacacgaactaaaaacagaggcaagcagctaaaattaaaagccaaaaaacacctcaccacttttgtggtgaactgctaaaccgaaatctagggtctcataaggtagtttcctatggattatttttccagtgtcatcagttgtgaaaagccccaacccaaaatgccatcaacacacgttttagtgtcttgaattcctgtttcaaaagccggaaaagcctaggccgtcattgtttggcgaaattagggattaaccaacgtctatgaatgtcggccttggccactcgaaccaggcatcaagcaaacaagagcatgtttgagaagataaggaatccaagacttagggtttggacctaaaccctaaatctttagtgagcaagtggcaggattgaaaatggctttcagttttggggatctacctgagaagaaagagacagtctcttcttgtccctgttttccactactatcaagtcttatttgcacaaacacagctgggaatcttggacaggaagtcatctgattccaatggtcttgatactgttcttatgtgctttttaatttcttccttgccaaattgctcacctccatcctatatgggccgggagcaatggctcacacttgtaatcccagcactttgggaggctgagacgggtagatcacctgaggttagtagtttgagaccagcctggccaacatggtgaaacgctgtctctaccaaaaattagctgggcgtggtggcatgtgcctgtaatcccagctactctggaggctgaggcaggagaagcccttgaacccggggggggggggggggggcggaggttgcagtgagccaagatcacaccactgcactcaagcttgggcaacagagcgagactcccactcacaaaaaaacaaaaaaacaaaaaaacaaaaaaaaaaaacaacgaagtactggaggcctgaactcataactggcttctaaaggaggggcacagttttgtgggactgagcccttaatcagtgggatctgacagtatctccaggtagacagtgtgagacgaattgaattgaactagaggacatccagctggcgtcccctgcagcactgatgggttgctggtggggataaatccacacattttggtgaccagaggtgttgtgttgtattgagagtagaacattttaaaaaacagattttggcttttcctttatggcccagattgatagcatctcaccaactggctcttccaaagagttcaagtcggccggatgcggtggctcacgcctgtaatcccagcattttgggaggctaaggtgggcagatcacctgaggtcgggagttcgagaccagcctgaccaacatggagaaaccccgtctctactacaaatacaaaactagctgggtgtggtggt

SEQ ID NO: 1562759 - DNA, 4001 bp, Homo sapiens
tttgaaaggaaggacatgacaggaaggaggagaggggtgcagaggcaagcgccttgctagatatgaagatgcaacattgatttgtaaagtctccaggacagttcctgcaaaatggaggcattgaggatgcttggggccaggcgcggtggttcacacctgtaatcccagtactttgggaggcctaggcaggtggatcacctgaggtcaggagtttgagaccagcctggccaacatggtaaaaccccatctctactaaaaatacaaaaatcagccaggtgtggtggcgggtgcctgtaatcccagctactcgggaggctgaggcaggagaatcgcttgaacccgaaaggcagaggttgcagtgagccaagatcatgccactgcactccagcctgggagacagagtgagacttggtctcaaaaagaaaggatccttgggtagtgtgagaaaactacccaagggatgtcaaaatgctttgtgaggctgggtgaggtggctcacacctataatcctagcactttgggaggccgaggcaggcagattgcctgagctcaggagttcgagaccagcctgggcaacatggcaaaaccccgtctctgttaaaaatacaaaaatgagccaggtgtggcagcgggtgcctgtaatcccagttactagggaggctgaggcaggagaatcccttcaactcaggagagagaggttgcagtgagtacagatcacgcctttgcactccagcctgggtgagagagcgagactccgtcaataaataaataaataaataaataaaaacgctttgagagaaaaagagggtgtggcctgtaactcattctgtgaagctgtaccctcaccttgatacccaaaccagtcaaagacacaagaagaaaggggtttggggccaggcttactcattaacatggtctcaaagatcctaaataagtcttagcaaacagaaaccagcgacaaacaaaaaagaaaacatcgaattcaatacaataaatatttgagagcccacaaagtgttaggtgctgttcagggcatgggagcactgcggtaaataaaacggatgagaatcctggctgtgatgaaacttaaaatggggaggaggtgaaagaaaaccagaaaacgaaggcagatgtcatgtgtttcacaggtgcagagtacaagtcgagcacttgagaaagaatttctcagggaaacattaaatcaccctccatctctactgaacatcctgaacaacaacagcgccgcagcagcaaggacttgccttccttcttagggtcatccatgttcacgtcccctgcccggcaggctgaaggctcatcgcggccgccgcctccttccatggagagagctgtcagaagtcactgcagggtggaacggggccagaaagtgagtacgtgtcagggcccagggctccggcttccttcagccctcggctcacagaggcagagagagctgaaggccgcggccaggtctgggagaggcggcgcgggggccgctctgaaatgatcgcatcccaggggaccccagggcccgagtgccgccaggccgggagtcagcccgaacgccatcagacgagataacggaattctcggcttctgggccagagtgttgggggctctgtttgcctggggggcagccctagacctcccggcatccccgaccacggcgcgaggggcctcagtgacccctgctcgagcccaggcccggctcctggcggggcgcggcccctccccgtcccgaaaacggcgggcaccgcgccgcaccgggcccaccgggcaagcctcgcccccgaccctgaccccaccttacccaaagcggcagacgatgcaggacgcgcctccggcacggatttaaacgcggcgccgggagacgcgggttgccgattggtcggtttgaaaagggctccgagaggcggcgggctgggtgcgtcctgggtattgtagtcaggacgctggtaagaagcgtccagtgcgcatgcgcactgcttcagcgcagcgaatggctccgcacagcgccagggatcacccacccggaagtctgcccggcctggccgccaagtgtcactaggtatccgcgtcaagccggaaccatgtatagcagctccttgtgtgtagggagaaagttaaaactgccatctaagggtgtcgatgggaagactaaaagtaggctcacccacctgctgtgaagcagcgcgcgcgagctgttactaacagtagtgaaaagccgggatccctgcccccgaggcacgcactggggcgccggctgacccagagacctgagggagactcattgccggagctgcacagcctgtggggctggaggggaaccgtcgcccttggcgggcttccccaaccgccaaggcctgaggaccgccgagggcgtggcgggagcctgtcctcggttttacaggccggctggggagctgcgttggaggagagagccaggggctggggcccggtgatggagcctgccttggggagtgcatgtgttggagagaggtgggaagcagataggataaccctgacctgagccatggagacgcaaggacaggactggtagacgggtcagtgggcagcaacttaagactgacctcgcttgagcctttgcctgcgaacgaggtataatacccacctcgggggcttgaggatcaaatgaggggctccacccacggcaaagtgtcactaagcgggatggaggaggatgcaggaagaggagtctgggaggacccgctctgaaaaggatggaactcgagagcaccattttcagggacgaagataagctgtttatttggggcaggctgtggggagagctgtgcagcaaacagccacccggggcccagggcagaggccttccaggctggctcgggcacttctgggtcccatgtccctggttttgcatcatccataccaatcactccatgttgctatgttccttcaccagaagactgggggctcaaaaagggcagggcagccctcactcaccagtctccccagcctcacccagctcagcacagggcaccaggcaggggctgagagtgctggggtaggtgggtgtggtcaaacagcttggaaagagtttggcctgctcattgcattcccctcagctcatcctggggatgtctgctcatgggagaatggcagagggatccccaacagtcattcctgatactcctctccctgtatcatgtcagcacatagtaggtgtggcctatgtatggcagattcatttctgcccccaataggatttgctgtagtttggatgtgtgtcccctcaaaatctcatgttgaaatgtgatcccaatgttggaagtggggcctggtgggaagtaattgggtcgtgagggcagatcccttatgaatggttcagcaccatccccttggtgatgagttcttgcttagttcacacaagatctggttatttaagagtctaagacctccccttctctcttactcctgctctcactatgtgatatactggctccccatcaccttatgtcatgatcttaagcttcctgaggttgcaccagaagcagatgccagcaccatacttcctgaaaagcctgcagaactgtgagccaattaaacctctttataaattacctagcgtcaggtatttcttcatagcaatgcaagaaggcctaatacagagtttgacttcatttatttatgccttcattcaccaactttcactgacagctactcagtgcaggccatgtgccaggtgatgctggggacagatgctgtccctgacctggagaggtcatggcaggggtgcaagagcaagggcaagtgccaagggctgaggggcacagaggcagcaccctcaccagcctgcagtgggggttggcgggtagaaggcttcctggaggagggaccagggttcccaattgcacagccaagtcatgtcttcttgcttggaaccaggagaggggaaggaggctccccttaggatgtgtccctagttcttgggtagagaaggcgcctctctggaaatactacta

SEQ ID NO: 1562760 - DNA, 4001 bp, Homo sapiens
agacgttgctgcctggagccaaagggctgcctggaaggccctggcctgagctcagttagtggctgtcactaaggaaggcaagcagtgcactagcctttaatacttaacccatctcagactcagtctgctcagctgcaaaagtgcaaatcacagtgggcacctacttcactggttcgttatgaggattaatgaggcactgcatgtaaacaactgcacgcagcgcgcgcctgcctcatagaacactccctgtgaatgtaagccattcctcctctgaggctcaggaaaggcaagtatcttgtctcagaccacagggctagacaactggaggaggagggttgtaaatcccccaccaactccacacagcagacacaaaagggaacactccctgggagtgacacctgaaggtcagggtcccacatgctgttgacctcttccacagttggcacttcacttcagagtttactagctagaactccgtttgtcatcaaccccgcgccttcagcaggacaggaatcacgtcttccccctcccctacgtcttgggcaagcaaactaacggccaagacattgaataccagtccgggtctccgccccaaaggggctcaggctaccgcgtggcagagagaacgaaagtgaagaacaagagcaagacaaaacgccgagtctcggaggccagggcactggcccttccattgctcggtgctctcggccagtttcctgcccttcccagcctcagtcctccacggtttcccaaggcatgggagctcccaaggcggctccagcaggacttttcgcttctggggaaggtggtgcccctgctacccggaccttcccaccatgctgacaagggtcgcaatcctgcgagtgtcaggaaacccccactgactggaaccaggcgggtgtgggggcgaggcgggagtcggcccaaggtcgcgcgactggaccctgccccgcgctagggaggggtccctttcgttcctagggtgaagactgggcccacagagaggcactgaccgggctcgagcggcggccccgctgcctccgcctccgtcctcatgacccgggcggcgcggggcgcccatggccccggcccagagcgggctacagcttccgcttcggctggggcgggagggcggtcggtgcgtgtcgagttccttctccgccaccgccgccgctgcggaggagagaacgggaggcggcggctgggccgccccaagcgccgccccagcccttccaggtctcgaatctggaggccccgccccctccttaggccccgccccaaactttgatcttagaggtccccagcctcttgatttaagtctgctccggccattcgccgcctcagcgttgagtggccccaccctctcgcccaatcctcgcgcagacgcgcagctcaccaggacgcgggccccggaagccccgcccctttctttgagccccgccccaaagctcgtgcatttcctgaatagaggctcgtcccttcggcaagccccgcctctgccgggtcccgctcttttgccagtcctaggtgtaagccctgatcccgcccagtgcatccccgaggccccaagcaactctcctccaactgtctttagggataaccctgagcgggcagccgctctactctatacctaactttatccgtaccagatacctagcctcactcagggccccccttacctggcggtgccgggatcaacaaatgaaattgtgacgggaagtcctggcccttggcccaacctcctgctgtccccggtctgagggcccaagccccgcgtctccgccttgccgtccagcctgtccttggtgtggggtgcttggaagtgtgagcaccctctctggctctttgccggccccaagggtcgttgcggcggcccccgggcccagtcatcagccctcttttccggtgccggaactatcgtactggtgccctagtttcccagccggcaggcggagtgaggaggaagcggaggcgagaccgcgctcaacactggggaaaggaaggaggcgggccctgcgcgcagcattttgggaaagagtggaattctgggtgttaggcccgccattcgcttgactcacgccttcgccgtagcatctttcgcagcggaccgaagagaagaaaagtaggccagagccggtgaggctggggacgggcgaggggaggtcgaggcgcctgtgaggggccaggggctggagaaagacttgctgcatggaactctgcggggctcggggagggaagaaagcgggaagcttgggccacccaaacatcagcgtcgcctcactagctcctggaagtaagttcattagctttcccctcaacgtgcatgcttctcacattctgtatctctccaggtgagtgtttttcaaagcttccaggcagtaatctcgaagtcatttctgattgactatctccttcccccaaatcctatgagtttttttttgtttttttttttttaagtagagacggggtttcaccatgttgccctggctggtctcgaactcctgggctcaagggatccaccggcctcggccttccaaagtgctgggattacaggcgtgagccaccgcgcccagccggtcattttttaaaaagttctttgtatctctgccccagtcccctttcaggcaatggtcccctcatgctttccacactgttgcagcagttttaactgttgcagaagttttaacaagtttctctgcttctaaaccttacgttctatccattttgtaaataaatgctgctatcttttcattgcgtcattctttacatataattctgcagtggttctccactaccttcagcataaaatctagactcctaaggctgaaagccagggatcctcaccaaaggagcctgtcctttcaacctcatgttctcctgtcttaggtacgcttaagttgaaacttagagttgttgctcatctcaataaaaagttcactgcttgatgcttttgattaggtcaagtcaggtgctttccctgattttcctccatgacaagcatttcctgcatatagcacgttgtcactttgatattttctcaatatccttgatagtaaaataagtgaagggttaaagggctgaattaaaagtacagcctgctctcctagatgtgcatggtcctttggtctgtatctgcaccttccatagggtagccactagctacatgtggccgttgaggacttggaatatggccactgggattgagggactgggtttttttattttaattctattgtgttttagttaagtttaatttaaatagctacgtgtgtacatgagctgctgtattggacagctcgggcctgtattattctcaaaacgtaatcatctacaattaagggttaacaaataacagtgcaacaaattaacattccagtccccctcccctgacacacacagtattggctaatggtcctttagctgaagattaagggacatagggtagcggggacacatgacccatgggagatgctctcttttcattcctagttttacttctgtccatcccatcattcctcctcaccccacatcttgcacatatttgccagatagtttcctccaaaccaggagctgagcttttttttttttccttggtagaaaatgcagctttggtgtttttgctaagttttatggagtgccaggccttaaaggaagcatgatgtgtgccacatgccttttcagactctgaaagatgaactgactgttgtctctctcattgtagaactctcttcctgccaagatgtctattggtgtgccgattaaagtactgcatgaggccgagggccacattgtgacatgtgagacgaacaccggtgaggtatatcgggggaagctcattgaagcagaggacaacatgaactgccaggtattctgctttgcatgtgaggctgtgtgggaggaatggccctgtgtcttgaaggacagaaaagtgtgtgttgagggtctctggaaattgttctcattcagcagtgatttcctaagtgcctaatgcataccagtca

SEQ ID NO: 1562761 - DNA, 4001 bp, Homo sapiens
gatgagccttagtctgaaatgttaatgttgtctccatgctctaatccctctcactctcagggcccctcaatatggagtccttaaagaggcaatgagaattcttcagtggcagatggggatgaggttgcatttgcctccttccaaccctcagcccagagtaggcacttagatatgcttggggaatggaaggcgttttccaaaaagacctcataccttgagatgcccaggcctacttgtcacttccctgctctgcacccctcctcccccaggcttccagactacagccctctgtgtgaggctccctccttactctgtggcttgggctgtgacactgactagctgggctatcttctgccaggctatgactgtccatgcctttccatgtccagctataaaatgtggcacaagacagcagctctctctcagagactcagctgcgcctcctcctcttgccctgcgctctagaactccttgatcctgaggcctggcaggccccacagggccatctccagcctcggcaagggcggatcggacctagaggtgctcatgttgggggtgataaggttaggcgaggccttggcatctgtccccataacagctttagccttctaaacacaaagccacagccagacgttgctgcctggagccaaagggctgcctggaaggccctggcctgagctcagttagtggctgtcactaaggaaggcaagcagtgcactagcctttaatacttaacccatctcagactcagtctgctcagctgcaaaagtgcaaatcacagtgggcacctacttcactggttcgttatgaggattaatgaggcactgcatgtaaacaactgcacgcagcgcgcgcctgcctcatagaacactccctgtgaatgtaagccattcctcctctgaggctcaggaaaggcaagtatcttgtctcagaccacagggctagacaactggaggaggagggttgtaaatcccccaccaactccacacagcagacacaaaagggaacactccctgggagtgacacctgaaggtcagggtcccacatgctgttgacctcttccacagttggcacttcacttcagagtttactagctagaactccgtttgtcatcaaccccgcgccttcagcaggacaggaatcacgtcttccccctcccctacgtcttgggcaagcaaactaacggccaagacattgaataccagtccgggtctccgccccaaaggggctcaggctaccgcgtggcagagagaacgaaagtgaagaacaagagcaagacaaaacgccgagtctcggaggccagggcactggcccttccattgctcggtgctctcggccagtttcctgcccttcccagcctcagtcctccacggtttcccaaggcatgggagctcccaaggcggctccagcaggacttttcgcttctggggaaggtggtgcccctgctacccggaccttcccaccatgctgacaagggtcgcaatcctgcgagtgtcaggaaacccccactgactggaaccaggcgggtgtgggggcgaggcgggagtcggcccaaggtcgcgcgactggaccctgccccgcgctagggaggggtccctttcgttcctagggtgaagactgggcccacagagaggcactgaccgggctcgagcggcggccccgctgcctccgcctccgtcctcatgacccgggcggcgcggggcgcccatggccccggcccagagcgggctacagcttccgcttcggctggggcgggagggcggtcggtgcgtgtcgagttccttctccgccaccgccgccgctgcggaggagagaacgggaggcggcggctgggccgccccaagcgccgccccagcccttccaggtctcgaatctggaggccccgccccctccttaggccccgccccaaactttgatcttagaggtccccagcctcttgatttaagtctgctccggccattcgccgcctcagcgttgagtggccccaccctctcgcccaatcctcgcgcagacgcgcagctcaccaggacgcgggccccggaagccccgcccctttctttgagccccgccccaaagctcgtgcatttcctgaatagaggctcgtcccttcggcaagccccgcctctgccgggtcccgctcttttgccagtcctaggtgtaagccctgatcccgcccagtgcatccccgaggccccaagcaactctcctccaactgtctttagggataaccctgagcgggcagccgctctactctatacctaactttatccgtaccagatacctagcctcactcagggccccccttacctggcggtgccgggatcaacaaatgaaattgtgacgggaagtcctggcccttggcccaacctcctgctgtccccggtctgagggcccaagccccgcgtctccgccttgccgtccagcctgtccttggtgtggggtgcttggaagtgtgagcaccctctctggctctttgccggccccaagggtcgttgcggcggcccccgggcccagtcatcagccctcttttccggtgccggaactatcgtactggtgccctagtttcccagccggcaggcggagtgaggaggaagcggaggcgagaccgcgctcaacactggggaaaggaaggaggcgggccctgcgcgcagcattttgggaaagagtggaattctgggtgttaggcccgccattcgcttgactcacgccttcgccgtagcatctttcgcagcggaccgaagagaagaaaagtaggccagagccggtgaggctggggacgggcgaggggaggtcgaggcgcctgtgaggggccaggggctggagaaagacttgctgcatggaactctgcggggctcggggagggaagaaagcgggaagcttgggccacccaaacatcagcgtcgcctcactagctcctggaagtaagttcattagctttcccctcaacgtgcatgcttctcacattctgtatctctccaggtgagtgtttttcaaagcttccaggcagtaatctcgaagtcatttctgattgactatctccttcccccaaatcctatgagtttttttttgtttttttttttttaagtagagacggggtttcaccatgttgccctggctggtctcgaactcctgggctcaagggatccaccggcctcggccttccaaagtgctgggattacaggcgtgagccaccgcgcccagccggtcattttttaaaaagttctttgtatctctgccccagtcccctttcaggcaatggtcccctcatgctttccacactgttgcagcagttttaactgttgcagaagttttaacaagtttctctgcttctaaaccttacgttctatccattttgtaaataaatgctgctatcttttcattgcgtcattctttacatataattctgcagtggttctccactaccttcagcataaaatctagactcctaaggctgaaagccagggatcctcaccaaaggagcctgtcctttcaacctcatgttctcctgtcttaggtacgcttaagttgaaacttagagttgttgctcatctcaataaaaagttcactgcttgatgcttttgattaggtcaagtcaggtgctttccctgattttcctccatgacaagcatttcctgcatatagcacgttgtcactttgatattttctcaatatccttgatagtaaaataagtgaagggttaaagggctgaattaaaagtacagcctgctctcctagatgtgcatggtcctttggtctgtatctgcaccttccatagggtagccactagctacatgtggccgttgaggacttggaatatggccactgggattgagggactgggtttttttattttaattctattgtgttttagttaagtttaatttaaatagctacgtgtgtacatgagctgctgtattggacagctcgggcctgtattattctcaaaacgtaatcatctacaattaagggttaacaaataacagtgcaacaaattaacattc

SEQ ID NO: 1562762 - DNA, 4001 bp, Homo sapiens
ctcccgcagctacaactacttataataaaggactcaaaaagagatcgggaggttttaagtggccgcagccccaccaaaccaagcaaagacacctcttgtacaggaggaacaaaaatccagaggaaaagaaaagtcttcctaggacacaatccatcgattgcgtggaaaaacctaagtttcaacagggcacactgaggcacttggctgactccccacccttcccctgaagttttcactccggtttaacaagagaatttgctgaagccacaaagatcccccaatggctacatcctagctgactgggagaaactatggcttctcccatccagctgtcacttggaccccactccccttccctaagaaaatagggaggccgaaagcgcaaactaacaaaaatgagaaggaaactgggtttgggcccccactgctcaccactgggaggtggaagtcagcccggtggcggtttttttccccctccttcctttgccggctggctgctccctaccacctctctcctgctggccaaaggttctgaaactctcacaacgggtgcccaactcaaagaaaactcactcaccctaaagatattcctgctaacctcacaattcctgggttccctctcatctagccagaacaaactgccttgtgtcttctccccacccacatctaccttcatggcaaacaagccaacaaaacacacaagccccccccgcaaatccctaaccccgtaagtaggttaatagcaaaacaaaatataagtacattctcatcattagattggttgttgctgtccttgcacaactggttaaggaaaaatgaattattctgtaatttctgaagaatccaaatcctgtctcttataaagtcagaacagaagggggcaaaaggtggtggtgagcatcaagagagaaaaaaggagaaaattatttacagaaaataggagacaggagggagtgtccgcaagaaaagacttcattgtcacttcttcttgccggccctcttggcactggactttgctttgggtttcactggtttggcctttttgggcttggatgccttgaccggcttggctttgacagtcttgggttttttggctttcttgggcgtggcagccagcttcttcttggccttcttgaccggggtggctttgggtttcttggttggggctttggaggcagccttcttgggcttggatgccttctttggcgtggctaccttcttgatttccttcttggtcttcttgaaggccactgacttcttgggttcgtcgctcttggctagccggaaggaccccgaggcccccacccctttggtctgcttgaggacaccggtggtgaccaggcgcttgatggacaacttgatctgcgagtcagcgttctcacccaccttgtagtggctcttgatatacttctgaatggactggcgcgaggagccagcgcggttcttctcggcctggatggcagccacgatcatgtctgaatacttggggtggtctgtggacttcttggaggccttggcccgcttgggcttggccgcaggggcggacgtggaattctcggtcatggtggcctgtctggtccggctgttgaaggcgccttccaaagggccagccctcgtcggaggctgagcaaagcctgcctcgggatctgctcctgagcccctgactaccgggccagtctggagtgcggctcccggggatgcgagcgaggagtcgctgcttttcctccccggctcgggtgtcgggagagctcgccgagccggctttgcgaggcccagccccgccggtctgtcgcttggtctcggcaccgggctcgggctctgcctctgcctctgcctctgcctccgcctcctctgcctcccttttcccagctccgcgtctggcgcttgggcggcgcatccgggtatttagcggcggcgggcggaccgcggtgaggacagggctgctggctgcctgctcccggcccggaatggcgctgcgccgccgccatctgtgtttcttccgccgagcaaatccgacctttccccccggcccgggccttcctgctccccgccgccgccctgggccgctgcctggctccctgggcttccccgccgggcggcccgctggcccggccgccgccccccgcgcccgccacgcaccccaaacggcgccgaggaccgctggtgtgccggcacatttcccctttgcggggggctggctctgcggggctagggagcctcggtgcgggaaaccccccgtagcaaagctctcccctgaggctaccgggggctctgctcccggcccgctgcggggtcccctagcccggtggagctgccggaaagcggccccaactaacacacgcggccccgagctgggcgactcccagccgggccgagccgggacaggggggaggggtcgctcccccggggtccggtcacctctcgggggtcaccccgccaccggtccctccacacctctaccccctctgtccatggggcccccaaggaaactttccctgaaagagttggaagggtactttcaaactttgtcccttccccctcctctgccgtctctcccccagcgcgccccccgacctctgccttgaggttccctcctgaggccgaacccccagtgctgcccggaccctctgagagatgaggagggcctcccgggtggcctcttctcctcaaagacccctacatctcccatataccctaatcgggaattcatttgtgtgcttctcttagcctggaagttttggggtgtcagagacagaactcgctgccccccatccgtgaggcccagcctgggggttcagtccccgtcccaaggctccttgaaggcaatgtgggggcgggggagggcggtccacaatggagaagctgccccagaagctctaaccagggacggtccggggggcccctgtaatgaggagaggccctgagtgctttggggacttgggaaagcggggcgctagggtagaggtcgaggagggggttatgtcccttgggttgtgacctgtcctcggaaagtgtggagttgtttagagagccgtggccgcgaccaccgccattttgctgggaagatgcgatgtctttgttaaaatgcacacagattttcccgtgctgcttggcaggtgtagacgaggcggacacggggcgccactgtctgtagggagttctgaagctcgaggggctttaggggcccagaggccagcaggagagacctcagagaccctaggaccccttgtctgcggccgacctcctactcacgtgccgggtccgcttggcagcggccctgggctgagattctgcgacgtttgctccctgggcccctctcccacaaccccgcttttattccctaagcatagaggccggtcactgttcacttaaacaataccctgggagtgggagtttgttgctggtcaaaatgatgaacgcatcccggtatggtccaagagctgtttgcagacacagtgggctactggggaggggtaaaggggaggggttcgagggttttgatgttggggacgggatcgtagctgcgtgggtgtgggagggctcctactggacctgggagtctctgaagccaggacaaattaatgggtttcccccgcacgccaagggatggattaatccaaatgattaggggaggaagggggagggggagcgcaagactcggtgtcagatgccttctctctgggcttatctccgtggcacaggcggggaagggaagcaatggggggtcaggttagttcaaaaggtcaaggttcgtcttttgatggtgtcaatttctcttaagtttcgtcatttgaaaacacaacattctggtggctttgttttggttattttcaaagacaactcgggttcccattaagacctggttgggttaatacgcacccaaatagccccccctccccgtatccgagatgttccaccctgagagcccagaaccatgtcaccccatcccccgccccagatccgtgcatgtcttaaagactggatgaatccaatgacacgac

SEQ ID NO: 1562763 - DNA, 4001 bp, Homo sapiens
aggccagaagcgcccatgctcatagcggtgccaggagaagtaaaggacgctgccaacagccagccagggccagaggtcaaaggtcaggaccctcaacagctctacagctccctgtagaacgctgacccctgagcacatgtctgtatctcacccctggattttcccaggccaggctgtgcacccaaaaactggggctgcagggaagggtggtttccgcacccctgctcacctggggtcatcctcaaagagatactggatcccctggccatggtgcacatcccagtccacgacgaggatcctgggtacagacagcgctggtggcaaaggggcagggcctcccacctccaggagcccggccagggatgggaaggtgctggctgggttctctcgcctcctgcgctgccccttgctgtgtggcctgggcccacccccctgcagccagcctggcacacacctgtgtagcccgtgtttctgcttggcatgtgcagctgctatggccacgttgttgaacacacagaacccgttggcagccgccctctggccatggtgcccgggaggcctacggcgtgagagtaggatttgggtcacgtcagggtcgccctggcccctcacagggccacccacggaggagcagccaggggaaggggcagctctcacctcaccagggcaagcccattttgcacagctccagtgagcacagcgtccaccagctgcagtccagcccctgcggccagccgcgcgcagtgaaaggtactctgtgggcgcaggggcgcagatgagccccctgccttccctgctgccctttgcaggccatacccacacttgtgccaggctgcaagacaccagctgctgagcagaacaggccagccccaggctctggcagtgccagcaggcaggtgtgcagggcaatgtcatgtgtatggaccaggggacactggctggggttggcggccgtggctgtgaacgctcaaaggcacgtgcatgtgtgtctgcacaggtgagtgtgtccggggacacgcaccgggtggaagtagatggcgtcgaactgtccggacagcgcctgcagctcctccttgcctaggacctgggtctccctgaccagggatacatactctgggctgcatgcagatgggcaggcaggagaggcagggtcaccagcaggagcaggggggcgggaggcggggacctgggattcatggtgggagtggccaccctgtcacttcctcaagcctgtgagcccacccgaggtgcatagggagaggctctgtattcgaggctggcaggctcggggtaggcccaggttcttaggtttctagctgggctgcccgccccgccccccatcgtggggcctgcccccgtcctgacctgtgcaccaggcccagctcctcttccgaggcctcgcgggctgacaaccgcagacacctctgttccaggccgcgctgccgcaggcgatccagggctgcggtcaggcgctcaggacgctcgatctcgcactcggggctggggcagatgaggagctcagttcagaggtccctccccgcaccccacctcggccaggtcccacttactcgtcccagagcagccgggtggccgtcatgtcctcatggtacacaagcgcggtccccatggctgcgccgtggtcaccctgggttcccaaacgccctcgctagtggtgcctgccactgcctgtccccaccttcggccgggagcagccggaggcctgggacctgcctggggcgcaggcgggcggcgggcaccggcctgggcgggagcgcacagaacctaggcaggctccgggatcccaggcgcgcagaaggcacggagcgaggctgcagtcgaagggggaggctccccgcgcctggcttccggcttcctcgcctcggacctgggtcccgccccgcgccctgctcccggtcgctatcgcgagctccgccccggagcgaggaaccagcgggcgcggaagcctcggcgccccgagccgccagccctcggagctgcgctgcggctccgcctccccattggccccgccccgatcccctccaagaggggcggggtcccccggccttaggcgagtggtcgccgcagccccacccgaacgcccgtggccgagcctgcccatgagagccccgttctgcaccagctgggtcagggtccagcgcagccccaaggcccacccggcccgggcgcaggaagacctggggtgaaaggcgaggggggcgaggggtctgcagggcaaaggccacgaggcgggaggagcccgcggggaggcaggtggcgctgcggccggctcagggcggtggtcgtggctgcatggaggcgcagcaccgcccccgaggtttaaggagggagtgagtccggttctagctccaagaagacccctggcccaagagcagagtcaaggtcggtggaggtggggacactggaccggggttgcggtagcatggtgggggactgaggaagataggaggcacgggcacagccacggaggaagatgcccgagaggaaacctgaggccccctggagcccaggggacaccctgcccccgcgggagttcacatccagctgggtcacagaattttggggcccccagtcctcaggccacctatgggcccacactttgggcccagtgtggacagcagccatgccacaagtcagcgtggctccggaactgatggcgatcacgtcccccaggcccggatgccctggagaggcatgagggtcgctgggcagagaaggcccatctgtcgtggcagctcatcaggtccactttggctgggccagctgtgggcatgtccaccgaggacacctggcctgccctgccctgcccctcactggtctctctgctgtaacccctgccctgggacaggtttggaggtgcccatggcctgtgttccagccgccacccttggaaacaccgagtggcctgcagagggcggcctgggcacgaagataccactggagcagggtagtaggggctagaggtttgatcaagaataaaacccagccctctgcgctcaccaatccaccacaggggccagaggggtctcaacatgtccaatgtgccccgtccccccagggactggctggcgctcaccacttcaccacaggggtctcaacgtgcccagcgtgccccctccccccagggacctgctggcattggaggatgcagagagctagggtagatcctaacactcctccccatcaggccctgcccctgggtctggcttcaggatccacacacagtggcttagagtctaagccattagcaggtcaccccgtaaaaggggaggggccaagccctaacgtgggggttcgaagatcactggcacaggcctgggggaagtgggcaccagctttgtggcctgggagagatgggatgctcaggcccccctcctggctctaagggtctgagctatcaggccagcctcctctacatgcaggccaagggcccggaggtcttaaggtgggacccggcatgaggacgcacagccagaacagggagctacaaaagggtctatttccttccagccacgcgggcaccacacagctgatttacattccaggctgggggtgcaggaaggtccactgacgtcgcccaggagaggggatgtccctgagttggtgccctgcgcccaccctctgtccttcctctgcatggcccagagcaggcagggctcagaggccaaggcctgatctggagccccaccagctctgaggtttctgagagcaccgggcaagtgggccactgctccagggatcagaggccatccccaggtcggccagaggtcttgtccagaaagttcaggtgctcctccatgatgggcgcccaagagcagaggcatggccgtggggaggagggtccatggaacccgggcgtctgctctgatggatgccttgggatgcaagccccagccaaggtcaaggtggcaacgagagtcccctctcaggtggaaggtgaaggtggtcctcactgccaccccggagcccagagatcttcacag

SEQ ID NO: 1562764 - DNA, 4001 bp, Homo sapiens
tcagagccaactgaccagagaagctgggccacaggcactctactacaacctccctcccccagcccgacactggcctgccgacccacctgagagctctgacctcccaaggcaggcagctggggagcctcttcccagccttccaagtctactgctcgtcctgtgggacccagagatcttcacagtctcaatggcacaagacggaacgttcacttccaggcaacaatcctgcgccacaggactcagttcagcccccaagtatcagactcccggccctgttcttggtgttcagagcccactaaaccagcagtcttgccacacagctttgtctccagaggccagctcatctgctttttttcacactactccagcaaccctgctccaccaagcacgcacactctccttgacacagggctccagaccaaccacatggcctgtgctcctgaaaatgcctgcctgaaggcccagggagtccagacactggcagatgagaatggacgaaaagaagccaagccagaagccaggaagcaataaatgctagacccagaaaggccttaggtttgagtgacccagctccatccctccatcctggatccttggaggacagccccaagttcagcctaggagctcccaaggcccctccactacctgccagctctccgacagcacaagagacacagcaatcccacatcagtcaacaacccaccgccacaggattcctaggggcaaggctctgcccctccccccagcacatatgtcagaggggtggcttccctgggttacacccctcctgctgttgggggagtggggggtcggggaacacagctttccagatgtgcttggcaactcctactagaaaagactaggggtgcgggggacaggagaagacatggataaataactttaacaccgctccaacccatccggctcagcactgggctcccttacacaggcagtcccaggcagttctgggtggggccgttgggagcattatctggcctcattccctcctctcagcaagtcactgccccccagggagaggcattcccccccaccccccccaaccacgcacacacccaggcctgtgtgaatatgaaccatcttggaagataaacagagagtgacaagctggggcccctcagccccctccctcagccagccggtcccttccccctgaaagccgaccccctcccccaagcccatctctcttcctgccaagcggctgcctacaggagaggtctgggggcagggcagcgagcccaccagccgcagagcccggccctctgggagcggcccctccaggcccgcccctgcccctgccgtggccagtcttcccgcggggaggaggcaagaggagaggagaccgcagacggtgcaggaccgcagtcctggaaatcgcaaaatcctctagcgagggggcgaacgcgggcgcagggccgtttgcataatgggagccctcccgcctgtcaggcagcgcagctcgcccgacgctgttcggattagattgctaatgaaaaggcacaaagagccggcgcccgctcgcccgccgacccccgctccgcagacccgcgccgcctgggcctggcgcggcccggtgggctttgtgccccgggtgccccaccgcccgcgcccctccgggcatctggcccacaaagcccgggcctgccaggggtcccgcgtgcgccccagcccaggcccgccagacgctagcgcgtcccccacgcgcgcagtcccacgtcgcccgggcgcgcgcgcgtccacgcccctctccccggggacgcgcccagcccgcggccccggcccccgcccgctccccgcgccccccgccccacaaggccgcccctcacctcgtgtgcgtcggcggcggcgctccgcccgccggccggccggccctaccagcggcccttgtcctcagcgcccggctcgcgccgcacgcgcccgccccgtccgcctgccgccagcccggctcggctccccgcctagcgcgccccgagcgccgctcacagccgcccgcccagcgccatcttggaagcttgtgacgtcggcgccgcccgctcacccctgacccacatctgaatgggcgagcggcggggcggggacagggggcagctgggggcgtggcctgtgaacaggggcggggcctgcgggggcggggccgggccggacagcggtcccagcactaggcggggcgggctgccggggtccggcgccgtgggggaggggtgcgcgggaggagccggggacccagaccccggacatctaaccggactccgacctcaagcgccagggcaggaccgcgacctcgcccctgaaatacccggaccgcataccggcccccgggacagggaccctggccccccccgacaggctgacgcccaccccctcaaactctggtggacttacccccttttagccctaccctgacccctaggagccccgaattagggacctctatcggcctacgcgccccctccccgacccctttgcgacccctgctcgacgctccctgcggttgcccgaggctcaaaggcgcagccagcagtgactgcaagctcgggggtctgggctcctggggaagcccgggctggttgggtgcaaaagagaaggggcgcccctcccgtgaccccagcgcccctcgggcccccgcgggcgcacccccgcgaaccctacctgctccgagggcgcggaggacccagcacgctgcgctcagccagccccttccggtggccgcagcccctcgcaggccccaggggtcaagcgcctgcccgagccggcccaccaggacccgggctcccggccgccatgcagatagccttcccaggggctgggctggcctgagccgccactgcttctctagggagctagttaatggaccgctctctactttgaacaccaaacaaaggaacacaccactatcgaggtcgcccaagtccaagaggagcccaggtctgccttacagggaagttgtgccccagctccagtcaagatcaaaaaccagtttcaataacccttcgccaagctgatgatgcaacctttctttcctaatggatgtataggtttaatgtcatcctaacaacatttcttagacttcacaaaattctaagttcacctggaaaaataaatagccgaaaacagctatggttttccccccttgggaacaaaagcaggcatgagggtagacttgccctaacagatatcaaaacaaattgtaaagctaccgcaggcatttcagtgtggtacagaacaggaaatagaatagaaagcctagaaacatcctagaaatggtaagaacacaatagatgaaaaaggaaatatcaaacatctgtggaaaaaaaagagctatcaaacatccctgaagaagaacaagaatattccacaaatagagcctagcagaggactcactatttgaaggaacgactgaaaaaaaaagtcaaccattctactaacccaagacatataaattaaaactataggccgggcgcggtggctcacgcctgtaatcccagcactttgggaggccaaggcgggcggatcacgaggtcaggagatcgagaccatcctggctaacacggtgacaccccgtctgtactaaaaatacaaaaaattagccaggcgaggtggcgggcgcttgtagtcccagctactcgggaggctgaggcaggagaatggcgtgaaccccggggggcggagcctgcagtgagccgagatcgtgccactgcactccaacctgggcgacagcgagactccgtctcaaaaaaataaataaataaataaaataaaactataagaagctgggttttctcctaaacaaattaaaaatcagtttcaagtgataaccttcaaacacaaggtctgataggtaatcactctcatatacttttggaagcacataaatcacctcaaaattcctggacatgagtttggcggtatgagccaaaagttgtttttttggggttcttttgtctttttttgttttttggagactcggagtctcactctgttgc

SEQ ID NO: 1562765 - DNA, 4001 bp, Homo sapiens
tcttgacttacttatgtttacatagcataaaacttttggcctacaaaggagcttatcaaaaaggaacaagttatatgacagtagaagagaggctggagaagggtaggctattcacaaaaactgatttaggtaaagcattttaaaataaaaattctatcagaccttcacacagtaaactagttcataataacatttttcctttcctaatcacaagcatcataattcataattacaatatttgtccagttctccagggaaagatctgcacagtacacatcaggaaatgctcttggagatcaacaggagaaatgaaactaaaactcaaggcttcggctttcatgcacagtaaacctaacttcatcttgataaattatgaaaacctcagctttcttacctgttttagccaatatttatcacatacccatcatgtggaagaggttgttcaatgcagtagggcatacagaagggactgaggcagtccctaccctgggggcatatggaaagtaccctcacaccttccatgccaggcaaaacacacagacagtgatacagcacatctaccggggtaactcaggatgaacagtttcaaaagaaacacgtgaacctagtccctgaaaaatgggaaagatgtcacacaagatggaaggagagagaggtggcaggaggagaacacacacatgatcagttcagtttagttgtggtagtagagagcatcctgggaccaaattcaaaacgaaaaagccacatgttaaaatatctattctcgctcctaaagaaaacggtagcaccctgtagtcgcactgcaaagtagaaatgaggaacaagacagcatcagggtgaccctttgcctgtcaacagtcagacaggccagaatcaggccctgggctggaggagtctccctgggttgatttctgtgctacagtgctgtcagcagagtggggtgggggagggggaggcgcgcttttttcatctacccggggagcaaacaccaactcctgcagcagttctgccaacaaggcagaactatgacgaaactgattaccactagcctctctgtatcagagtcaagatatggggtggatgagtccgttccccaagggtgtgctttggagccactgccacagagctaagaagcccctctgctagaacacacctgtgccctatctgcccaaccctagttcaccctgatgtcccagctcagcattaatcgtggatccttcgcgggggcccggggcccccaaaccctcctatttagggaccacaattccccaactgggggcactgtccccagatccagaggggcagtaacagtccctcttgcagatttcggatcttcatcctgccactgaaaggccacaagggggatttcatcccggtttcaccttcaggaccgtctgagcacttctcgggcgatgcagaccagtggaaggcactggctggcaccaaggcccgctcctgggagccaggccgcggcccctccaaggaccacaggtgggcagcggaagactcagagcaagagccaggggcgaagatggccctcgctgcggtcaacccggagcacgtgctggggctcaccagcctctccgcgctgaggacaaagtccgctcccgccggcttcttggcttgggcaccgggtaccgggcgtcaggggcgagacaggcaggacttgcgcgcgccccgactcgactccagaccccgacccgactccgggctcggcctcccgcgacccctgcgcgcactcaccattgtggttgacccaggtcggcttcaggagcttcattgttcggccgccgccgccgccgggctgaggcgagcgccgggtccctcagcgcgcccgggccatggagccaccgccgccgcttcctcccgcgccacccgccctccggccgccgcccgccccgcgccctcagggccgccgcgccatcgccggcccgcgcccccctccgccgccacagccgccacccgcgctcggccgccgccgccgccaccacagccgcatcccctgcgccgctcctcctcaggcggctcccgggcaacgccggaagtcacggcgcgcacctgccaaatcgccccggcgggaaaccgctccccacgcggactgggccgccccggctcctccgctggcaggggcttcgggtcgggcccgggcgcgggcgccccagaaagggcggttcgcctggacggcggacagcgagcggggcctgcagttgcaacccgggccgcccgcagaggcaggcggggcccaggtggcgtggaccgcccgtcaccagctctgcctcgccagtctgagtccgacttattaactagcttccgtcattcatcaacacgcgctattgggcatcttgcgagcgccgggctccgcgccggcgccggaatgcgatccgggcttcggactcgaacgaatgcgggggacgagccaaccctggtgggggaggctggggcggacgcgtttattagaagatcggggccgtttgcctagacatgaacatttggactcggaggagcagagggacgccccctcggccgctccggctgcactgcggagccgaggcccgcgcgagggcgcagaccgaccaaccggctagggcctgactggctagactgtgcccgctgcagaggcgcgctcccagcacagggcggggacggaagggaggaccccgagccgcgtgaaacgcaaggccctcgtgtgtgcgcagctgacaccctaggcggggctgcgtcgggggcggggacaggcgcgtcccagcccacgcagccggaacgcctgagcgctgggcgcctggtctgccggacctcagcagggggcaccgcgggccggactgtggaggggcgcacgcccggaagcggcgagggtagccatgacggcctccgtgctgcgaagtatctcgctagccctgcgcccgactagcgggtgagtgcggacgctggccggatagcggagtgcccagggcgcgtgcggggtcttcgcgactgtccgccaggactcgcctgtgctccctgctcgcctcccagtccacgaatatctcagggatgagccatctggtcgtgactcttatgcatgaaaatctgagcaccctggcgagcagcggtcctgcttaagtcctctgtggtctgaacgaaagattttgaaaaaccttccacgttgaccttgctgtcatatcaagtagttagaagtgccccgggtttgggagcattgcaattttttattttcctgtgaagtgggagagaatcagatatttatttatttatttgagacagagtctcgctctgtcgcccaggctggagtgcagtggcgcgatttcggctcactgcaacctctgcctcccgggttcaagcagttctgccccggcctcccgagtagctcggattacaggcgcccaacaccacgcccggctaatttttgtatttttagtagagacggggtttcaccatgttggccaggctggtcttgaactcctgacctcgcgatccacccgcctcggcctcccaaagtgctgggattacagacgtgagcaaccgcgcctagcctggagaagcagatatttatacatactcttgtatctttcaggcttctgggaacttggcagacgcagcttagagagactcaccagcgagcgtcattgttgtctttctgggaactcattcccatgaggtaaaactcaatcgagggcctgacctctgggggtaaaggtgtcagtctatgtgtagagaacaaagcaagaatgctggatgtgtggtttgcaaaattaacagcctacaaagtttctcagttaaatttaggccgatgcttttctgtttttccaacattttccaaaccatagattgttgtttgtaatttttaaaatttgagcagtttctcaagaagtaagtattctccttgaagggattcttgtgtgttttaaaggacacagcttaagtttctgtttctccatgacccttcctcttccctgcccattcggaggccctggagagtgtggggaagatgcaagtattaaaggtat

SEQ ID NO: 1562766 - DNA, 4001 bp, Homo sapiens
gaatattaggtttgattttcacattagaaaagggaggtcataattacattaaatgttggcaaatgtgaaacaggtgttaaaacccagtctcaattcaataatttgggagtttataaaattcaatgttgtcaactccaagaggcaagaataattttgtttgtctcagtgtgctaagatatgacaacataagtaaaagttcactatttcatactgttgatacaagtaaaaaactggtaccataaaaatgtatacttatgaaatgcacaaattgttaaatagctcttcggggacttttcttcaggatatgaaaaaggagggggcagagttgctctttccctggtagataagcatacaagttatgttcaggcataggcctttgggatgaccaaagtaatcaggaggaaaaagtcctcagatatagcactttgtcattttgaaacttcaaattacagttaaaaaacaggtttcagactttttttgaggtaacttgagctcctgcaatcaacaaccttcttcaccccataatgtaaatgagtatcgaaaaaaaggaaacaaagtaagccccgtcacacggacagtaagagaaattctgaactccaggtctgttccaggatgagagccatgtccaagattctgcattctcttcttccaaccactcctttcaagaactcaaaatgccagtcagtgcaggtaaaggaagatgcacatccgccggttgccaatttctgaaattttcttgttacttctacgatacagacaagtgatgccttctcaacttcgtccaggtttcttccaatctccgaacacggtgactccgaatcctcttgccactcccttctccagggacctacctaggcagcactcccagcccctgccagctctggaagctgcagagatcccgacagtcggggatggggattgaatcctctcattgcagtgcaattaagcggaaccacgaccaccgcacagattggctgacaacacacattccataagaccagcaatcgaattttgagaagccttgtccaatcaacaggctttatttgggattcagttttttactttgttctattaggaggaaatataatcagccaccagcttagccctccaaaagaggggacagagatgtttctccgcttttgcacgctataaagtgaatctacaagtagtagttggtggagggaaaatgggcctgcatggagaaggcgcccaccacgaaggcacggccaagccgggttgcacgcaagaaacacacaaaataccaggtgatttacacaaacagcccccaggaccaccatttttgtggtccccaaggcaaaccagtgggattctcccggcagttttgcggcaacagctagctcaacaaagctctgtgaagaggaaaagaagaaagctcctcgtactttctcctgccagccgcagccccagccctcccgtggccgcggccacgagccctttccccctgacagcccgagggacccccgcatcgcgggttccgagccgcacagctcgacctgaacccgggttcccgcgtctccggcggcctcacggcgcccccgagggcggagacggcccgggcagggggaggggcggcccgggtccgcaggcccccggggcggccgcacgccccctcccggccccgcagctttcccgccttccccgtttgaacagctcccgcccgccctcctccttctgcccgctccagccccttcctgggggcggctgcggccgctactccagtccccggctcggcccctgggctaggccgcgaagggcctggggcaccccagaggtgatgtcgcgggcccagggcggcgggtggcgacggggcggggctgctgccgcctcagggtgggggcccagcccggtctcctggggtctccgctcgccgctaccttcactcggctcgcccggatcccgcctcaacgccgccgatcgccgccatcttggagaaggagagaaaagcgcgagcggccagggagcctcagtcgagcccagagcgcagactcgggctccggagggggaatcccgctcgaccaagagcgccgagcgcatcgaataaaactcggagcctgctgagcgcgggagctggcacttatttattgagaatttgctatgtcccagccttgccctagaagcttacaaacattatttcacttaatcctcactgtattcctgtcgcattttgcagaagagaaccaggctgagagaagttaagtgacgtgcccaaggatacacaggtagttggaatgtgagaccgagtattactccaagtcttctgattctgaatgcagtgctttccccaaaatactatgctgtttctttcaagatattgttatacagcagttctcctctttgcaacacctagatctatgcagattaatagcagtgtgcttatttggacttcagcatctacatttgaacatttggcatattaggggtgaggtgaagaacttatctttgtaacaatgtacagtaaaataatttgcatggcgaatcatctacattttttagttagaaacagtcttcagagagagagaggaagagatgtcatatacaggcgagaacacaatttttctgatttgccattgagaacttcgaccaatgagtagaaattacagtgtatagaacttggtttgatatgaagaagaacgccaggggcggtggctcacgcctgtaatcccagcactttgggaggctgaggtgggtggatcacctgaggtcaggagttcgagaccagcctgaccaatgtggtgaaaccccgtctctactaaaaatacaaaaaattagccaggcgtggtggcgcgtgcctgtaatcccagctacttaggaggctgaggcaggagaatcgcttgaacccgggaggcggagattgcagtgagccgagattgcgccactgcactccagcctgggggacagagtgagactccatctcaaaaaatatatatatatatgaagaataacttatttttctagtacagttcagtagtacaatgggcttccttgtgagtagtgagctccctcccactggaggagcgctcaagcagaagctggtgttactgtaaagcagagaagttagagatgtagattggcttctagagttgtgaaccccatgcaacgtaaaatcatgtgtgcagtgtgtgttttcctagggcccaggccccataaaaaattaagaacctctgtcctagtgtattttccattgcagagttgggtgagtgcttgaagacgaggtagtcatgagaccaataaaagcaaggtgatttgtctgagaccacactctaatcagtgatcagataaagatgaaaagccagattgttagactctggttcagtgctctttttgctatatcatgctctctccccctctgcactgagtagaagattgattctgtttcttacaactgtgagatgctgagatgttaaaacacctgagataaagttgctgaaatcatttgcaaaatgtaactgcaaatacttaataaaagtagcatggcctttttctccgcagctcccatcctactcaccaaaaagacaggcaatgagtttcaccaaaaggtgttagattgcatttctgggacaccctgcctgacgttaggcttccctttgaggcatttaagagccctaatgatgtatttcctttttgttcttcagagccctaaatccattggtcaggatgatttcagttgtgacagaaacccatttccatgtgtttccccagaagaggggaatttattggctcacatgattgaaatttccagtacctgcagacatggtcacttccagggaggtaactcaagctggtcctttgacgtgtctgtggtgctctcctctgttagctttattctcagattcaggtgatgactccagcagctccaagcttcatcatctttcctgctagcagtgtccctgtggagggaggttttgtttgtttgttttgagacagggtctttctctgtcacccaggctggagtgcagtggcacgatcacagctcactgcag

SEQ ID NO: 1562767 - DNA, 4001 bp, Homo sapiens
gggggtggggtccttcccaactgctgagcctcccacctgtgggcaggccttcaagagactcccatcctcattcaggccacgttctcaatcgctttaagatgcagccttgtggctgggcacggtggctcacgcctgtaatcccagcgctttgggaggccaaggcaggtggatcacctgaggtcaggagttcgagaccagcctggcaaacatggtgaaaccccgtctctactaaaaatacaaaaattagccgggcatggtggcaggtgcctgtaatcccagcaattatgcctgtaattgcttgaatcccggaggcagaggttgcagtgagctgagatcacaccactgcactccagacttggtgacagagagactccatctcaaaaaaagaaaaaaaaagaaaaaaagggccaggcatggtggctcacgcctgtaatcctagcactttgggaggctgaggcgggcagatcacctgaggccaggagtttgagcccagcctggccaacatggtgaaaccctatctctactaaaaatacaaaaaaaaaaaaaaaaatagccgggcatggtagtgggcgcctgtaatcccaactacttgggaggctgaggcaggagaatcgcttgaacccaggaggcagaggttgcagtgagccgagatcgcgccactgcactccagcctgggcaacagagcaacactccatctcaaaaaaagaaaagcaaaaaagcaaaaaaacaaaaaaacaaaaaacaaaaaacaaattcaggctgggcatggtggctctcgcagctttgtaaacactcttcagtcattaaaacactaaataatacagtcccccaaaccaagggggaaatcctggtacaggtagttcgcagtggagaggaggaggaggtacagcataacccaggaagaagcagcagccccatgaaccggcatctccaagtttgtaattgctttgattggcttttagacccaatatttaattcagttattttgttaaagttccagatgcaaatctcatgaccccctatcatgttatgctcatcatgaaggcgtcagggttaaaaagcctgagaaagtctgctttagtcaaagaaaaagtctttctgggagtatttctgtcatgggtccgtatccctgcctccccacagaattgtcatttttcccttttctcctgccctgcttccctgttctacaacacagctggtcaaagtctcaggagaaatggcacatgtctgtaagtcccagctactctggaggctgaggtgggaggatgcttaagcccaggagttaaaaaaaaaaatactaacaaattattgaaagaagggaatgagtgagacctggaggtgggcagaccaaggttcaaggcccagttctgacaccagctaactgagcactcttgggcatgtcgcctccctgaactgggctatctgtgagacatggaacaccgcagccagggtgatgtctggctcaggtcctccgtagctagtgagggacagatgccaccaagagaaccaagcatgctcccccaggctggcagagccccagagatctagattcagcagagagcaactccaaacacacctcgaaagtaggattaaaaaaaaaattggctacctcaaagactggatactctagggacactcccatcttggtcaccaaccgcataccagggtgccaggcatgtaaattaccgttcctccctccaactaccctacgggcacaggcaggatcagaaccccgcacctcctgactccagagcccaagtttctggctcctgggctctgtcgctgtgtggcagtgtcccggggtggggctaggacgcaagcagggttgggagagaaaggcgcccgtcccgcgtcccgcgccccgcgcttgcctgtcgggttgcggacgctccatccggccggtgctgggctcgttcgtgctggctccgcgggcggcggctgcgctgaggacgctcgagaggaggcaggcgttgactgccggagccgcggccggtcacatttatgctcggcgggtcacgtgggccaggcggaacagctgatgcccactttctggccgggcgttgcaacacccgcaggggcccgcgcccagcccgccccgggccagtgtggggtggagaggagcagtcatatgacccttgggaaacaaagtctggccataggacttttagagaaaacacacacacacacacacacacacacacatacacacacacacacacacacacacacacacaaaacctttaaggaaatctgagaagctgcaggctctgggtgtgattttgctccttccagagcccccccttctgctccctgtccccttgggacttgatgcaccccaggcgtcccagaaggttccagaaagctgggaggcagcgctgctcagagcaatagcctggtgggcaacatcaggaacttagcaaccccaggctctgctgtctccagctccctaaaatgtcacctgctggaatcctctgctgactgcttgcctcctcacaccctctttaaatgtacatttaggatctgttttttgagttcctgtcaaaaaacagagactctagtattttcatggttcatccctacaactgacctgtgagggtagatcgcttctattttacagatggggaaaccgaggctcagaggggtgcagtggtgtcacacataaagcaggatgccagtgtccaaacccagggaggagactaagtccccgcctgcctcctccacactctggcagcacctggtatccgcctggactgggacacctgtcatacaaactgcttccctgctggaatgcgtgggacactcttccaggcacattcaggtctgacttatactcagtgcctgctcagggcccagagcagagctggcccttgctgatcgcctattgaatcaattctgcatgaggtggactccttagaactcgggggaaatagggtcactgggtgaacccagaggacaaaacgaatggaccagatgattcatacagtcctttcccaatactgtgattctcattctaagattttttttttaagatggctttcaggcctggcatggtagctcacacctgtagtcccagtactttgggaggttgaggtgggaagagcgctttgagcccagtcgaggtgggaagattgctttgagttcgagactggcctgggcaacatagggagaccctgtctctacaaaatataaaataaattagctgggcatggtggcacatgcctgtggtcccagctacttgggaggctgaggctggaggttcacttgagcctgggatgtagaggctggagtgagctgtgaccacgctactgtattctaacctgggcaacagaacaagacgctgtccctcaaaaaaaaaaaaaaacaaaaaaaaaaaaaaaaaacttcctggaattcagcctagggccactacagcccagaggcacttctgagattgtattggaaaggatcatcctcccaagggtgagctaaggggccttgaaaaaaattccccttcttcctctgaaggttccccgaaaaccaaccgacaaaagtcaggttaagaggagaaaagacatacaaaaatgtattgtaatggggtaatcacggaagaatggtgaccctgtaacccagtggagtacagaggctacccagccttttttataggggagaagggagatagggaatgcagacaattcttttgaaagacagtaaatcattagcaagaaggaatggccctggaggtgaaaggccgactttaagggaaggtggaggtggagccgcacagggacaaaggttgtcctaggcagataaagtcccccaggtaatctcttggcactgtcctcagaagaacaggtaaatctgtctgggtctggtgatgactcccagtctctttctctctccagtggttgatctttcctggatatttgatgagattactagaaaaagggcttaacactggccgggcgcggtggctcacacctgtaatcccagcactttgggaggctgaggcaggagaatcgctt

SEQ ID NO: 1562768 - DNA, 4001 bp, Homo sapiens
tacccctactatgtgtgagtccaagattcacataaagattagccagctgctgtttagtttactaaggcctaaaccacttttttaaccattccaagtgaagcaaaagccaaagttttattacattttcccaaatataatcatagttgatttatgaaggctctctacccatctttctcaatcttcaaaaaccgttttttacaagaaaatcccttttctatcaggtgaacactatccaatagctggattctgaaatgtaactatattaccttccttacacatgcatgttgttaagaatggctttactcaaaagaagtgtacgttaacataaatgggttcaatagattcctaaagctggaagggagcacagacatcttccaacccctttgatttaaagaagatccaattctgtggaggaagaatctttttttcagcaaatgatgctgaaacaaaaggacatctggagggtggggggaagaacagagaattaaaagaaacttaacctaaatctcacactgtatacaaatattaatgcaaaatggatcatggatttaaacctaaacataaaactataaagaaaaggggccaggtgcagtggctcacacctgtaatcccagcactctgggaggccgaggtgggaggatcacgaggtcaagagatcgagactatcctggccaacatggtgaaaccctgtctctactaaaaataaaaaaaaataaaaaaatttagctgggcgtggtggtgcacacctgtagtcccagctacatgggaggctgaggcaggggaatcgcttgaacccgagaggtggaggttgcagtgagctgagattgcgtcactgcactccagcctggcacagagctcgactccatctcacaaaaaaaaaagaaaaaagaaaaggaaagtgaggctaagcaagggaacttggtttgccaaagttcgcccaattacttagaccttccaacagagcttgcttcaataaattattcaccattttaacaaattccatttggccctggtaattcccctacctgtgctcattcagagaaaatggcttccactatattaattgagtatttgttcatgctcttttgactttttaatatctttttcatgctatttcaattattcattcattcaacatctacgaggcaactacaatgtgccaggcaacaacatgcaggattacgagatgtaaaatactgttcctacctcaacagattgatggtccaatggaggagaaattagattatgatcctgctgagattaaaaacccctttaggggccagaaccacccctcatttctaccagctgagtacacgatgtactgcacagcctgtccagtgccctgcgtactcggacacattttggcgattggctaatcctgaggttcaagactctctccctctgtttagggaactaaagtccatagggattaattggcaaatcctcactaaagtgaaaggggagctgaggtcaaggggggcggggtgtcttgtccccacctctctcacctcttggcctgtaccaggcatcgatcctggcagaaaacctcaatggctggggagaatctgacccaggtaagataaacttccccaaagctccaccacacacggccccctccaatgtcgggcacagacatcgtctgccctgccagcctcatcatggctcattatggctgctgcttgctcagcaagtttgatttcatgtccagaaaaatctgaatttcaaaactacctgggtgctctctgtccagttctgggggaaatcgcctcccttttgccttcctcctcagccccctgccctcccgattctcttcacagtactttaggccctcacgaaatatgatactttcaaatccaacttaaagccttaagtaataagaaaagaaaaaaaaattgttttttgacataaagacagaactaacaacgcccgagtgccctctctgggccgagacctcgcgtctcaacagccctcacctcagctcgtcgacgcttccctcccaccgggggtcaacggccttttccggcccaaacccgctcctcggctcatgaatagtcaacgaggcctttctgggcgggaccagaggtttcctcatgaataattcatgacccgtccacggctagcctgggcgaccggcctcgctagacttcatgaatatgcaaagcaggggcgaacggcggctagccggcccctagcccgcccggcccctcagcagccgcctctcagccacgggctgcacactgacccgacgcgaccttcggtcaggggccgccagcctgggccacctatacaacgacagcctgctccggggcttcctgaggaggtgcctgccccgccgaggttaggacccgagggaccgtggggctcgggcgggccaggacgccaggccggcgggtcccagagaggtctgaggcgggcgcggggcggcgtaggggagggaagcgagagcctggggggcccagggacccgagttagaagaaggcccgagaagtgcggcgcggtggctccacctgggatcccagcactctgggaggctgaggcgggcgcgtcacttgaggtcaggaattcgagaccagcctggccaacatgttgaaaacccgtctctacaaaaaatacaaaaattagctgggcgtggtggcgcgcgcctgtagtcccagctacttgggaagctgaggcacgagaatcgcttgagcccaggaggctgaggttgcagtgagccgagattccgccattgcactccagcctgggcgacagagcgagactccgtctcaaaaaaattttaaaaagtacaaaaattagctgggccacctgacgtgcgcctgtagtcccagctgctcgggaggctgaggtaggaggatcgcttgagccggggagtttgaggttgcagtgagccaagatcgtaccattgcactccagcctgggcaacagagggagaccctgtctcaaaaataaaaaaaaagaaaagaaagaaaaaagacataaggccagaaggccagagctttccaatacttgagggcatctgcaacctcttcatccctaccctggacctgactttgcattctttttaacattaatttgtaattatgcaaataaaacataaatatattctcctttgtgccctacccctaatctcagttttttctgccctggtaactgtgggagcagttgggggtgtggctccttggatcgtttctcacctgtttaggtagatatttcgtatcctgtggtgctttccaaaggctcctggagtcccatgaacctccccaaggggatttcccaagagagtagatgaaagagtgagccacttgaaacctgttcttattttgtttctgcaggaaagaaaaaaaaaactattcaagttggcgagaacatgagtttagaacataatgactaaaactgaaatttgggctgaaatattcttttagtgcaagttttctcaaccttctccccacccccaccatcataacaaccaaaaatttctctagactttgccaaatgtcccatggggtgtgcaaaattgccctctgttgagaactactgcgttcaccctatactttccggaagtaactgctttttaagctccaaccacacagatggtttgtctgcaccagcccttctcagcctccgcatttaccagcctctctggctggatcactaggccctctgtgctggctgttctaattttcttctgccttcagatctgagctcagtcaactgctaccatatccaaagacttacccctctctgccctatactattggcagtctaccccaccagcaaacacagttattcgttattctgtttctttcatagaatttctctcaatctaattttttttttttttttttttttttttttttgtgagacagagtcttgctctgtcacccaggctggagtgcagtggcgtgatattggctcgctgccacctccacctcccaggctcaagtgattctcctgcctcagccacctaagtagctggggttacaggcatgcatcaccatgcc

SEQ ID NO: 1562769 - DNA, 4001 bp, Homo sapiens
atctggacgtggtaggtttcagtgttttcagtcacaactgccacttggttagttttcactcagcatggaaagttccacttcccttccttgcaggttcttcagtttcatgtatatttccatgcctcttacaactcagggagaaactataacagagaatcctagcagaaaagtcaaatccattcctctggtttcctaagtatcactgtggctgtctgcagaaccacctcttcaagctcctctccaggaaagccaaaagtgggagatgcatgctagagctggtgttctaaagaaatttctagcttgtctagttcaaacccatcctgaagactcttattaaacgttttgaagtttccagttcaaacatcagtgccttggctctgaaataaacacaaggaatagatatttcagcaactcgtgagagagcatgtgacccagcaggattaaacgaatggtatatttcaaaagagctttctgtgagggtgacaatcatgcttcaaaatcaaagagggaggcttgcagagacttcagagtaagggctttagtttctcgaacagttaagggaaacacaccacaagcttcacggaagataaaatcaaatgacagggtgaaaatgctctaggtgtggacagctatacaaataaaccagttgctgtggtaataatggaacccaaattaaggaactgtcatcttgacagtccaaaagtaacctgaacatgcagaattccagagcagggcaaatttctaaaaaatgaagagaactttatcaaatggctttcaaacttccacaagagaaagacagctcagtgtatcacggaatttcagagtcggaaggaaccctggcatcgtttactctactctcctgcactcttttccaaaaattaccttggctgtctctgctttacaccctccagagatgcgtggttcactatgttacatttctccttccaacaaactaaaatctgcgttccagattttacatctgcctcccactcgctagtctggataacgctctgcaggaaaacacaaaacaaggtctaattcttccatgtgacaacctcttggtcacttcaaaactattgtctaattcttactgtcactttctccaagcttaatgctttagcaacatggtctcaaatgtttgctcaccattctgcaatctgtgggtacacaatacagtttgttaaaagtctctagagacgacccccattgaatatttgacggcctgtaaaatctctatctcttctcagctctagatattttggattgggcctccacaggaccacactcattgtattctatggagcatatttgggtgcctgtggagggggtatctctgttactggaaccaaggacagcagcctaaaactccccatcccttgttcccagaggactgggccctacactaccgaggtcctctcttatctctgaaaggtccagaagagaccaataatggccctggagtaggaagagacgtcggaacatgagcagaaaaggatctggtagcctgggaagtaatagtaacaacgcggggctggggctggtgatactgctgtgggaaggggcctcagtggggcagcagggctggaaaacggacgctaatggctggaaaagggccaggaagctgctgggcgcagcccccggggcgcaggcagcgactggtaacagcactagggctgtgcggtgtctggccccagctctacgggactgggaaatggtgggcgaacgcctaaggattaggcggggtcgggtcacgctctaagctgggggcccgcccctcggtatccccgcgctccgagcgccgcccacccaccggagtagccaggcatcccagtgctcggggttcgggactctggaccagaaatgtgggcagcagctgggtacctgcgacttctgccccgtacctgcgcgcgcggcagagaggccttaggtcacgcgccgccccgcctacctccccctccagctcctggcaagccggcgcgcggcgatgacgtgccgagtgcgccgcacgccgctgacgtcagagaccaatggctgcggccgcagctgcggcgctggaatcctggcaggcggcggctccgcggaagaggcgctccgcggctcgacggccgcggcggagggaggcggcgccccgggggagagaggcggcgccccgggggagagaggcggcgccccggggccccgaggcggagttcgagtctgacagcggagtcgtgcttcgtcgcatctgggaggctgagtgagtgcaggctcggccctgatggaatctttgcgcccatgggcaattctgagccacagtctccccatctgtagagtggagatataatgcacaccctttaaggagttattgtgaagagttaacgtaggtaacgagctcattaaagatgtggattatagtaagcgctcagttaaaggtcgtctttccttttattacggttacagctgcgtgaccttggacaatttataatctctgtgcctcagttttctcatctgtgagatggggatgaaaatagtacatacgtaggtttgttttgaggattcaatgaattagtaaacggaaaccattttctggcacgtggtaagcactgtgccagtgtttgctattaatattatgccgatgttgatattattggtggtggtgacacgagggaagcaacatgaacacgtgactgctatcatcaggcagctgctatgtgcctgacattagcttaatcattctacacactttatgttaaacattgcaggcatactaggaccctggtagctcactgattctcaaagagacaaagaaaatgtgtggaaccagatttcaaacccaggtctttgtgacaaaaaccagtgcttccagctttccattatgcttgttgcttatcccagcccagattctcacataccttgctctgtaccttagaaagtacatagagagtgcctaatacagaggaaacactcaataaatgttacttattattgttatttagtattattatctttattcgcagttttgtttaggctcaataaataacagctttagttagcacttaagatcagcatccgaagggccgtcacaaggggagaaattagattaattttgtgtgctcctctcccctagaattagggtcaagaggcagtaatgtcccagagtttacctctgaagagaaagttgctgaccatttggctcagcctgaataaaaagcacctgcgattatttttaagctctcagaggatgccagtgagagtgaatgtgcctaggggtttggaaaactcaaggcatttttcatatcccttgacactgtcacgatctcctcaactgcttcagtattccccaggagctccttgcttctcccaacacccaagtgtggtgcaatcaccatcgctctgagtagagattgagccagcattttacacgcatatctgtgtacgcatttaccagttcataaagcattcctgtgtacatcagaactctctaccctctgtgagaaacgtgcagcagcctctgggccgactttcaattctctgtactcctttctgaaccccataatcactgtctctggctgtggcttgtcagtttaaatccagttcattttaattcactgttgactttcttttgctctgggtctgtaaaaccagttgacttgaataaagaaagcccagacacttggttttgtctctttactttccccttaaaactatttataataacaaataccatttgttgagtacctgctatgtgccagacactgggctaagaatgttaacccattttatgcctctaaactcctccgtgttgggaatgatttttatccccattttagagatgaggaaactaaagctcagaaaggctaattctgagcacttaacaaccatttattgagctgcaattctatgctaggctctgttgtagactgagaatagacccagatctctctctgggaatcaaggacctcctccagcatactctctcctgcagtctctgagccccagcagtatgtgctctggctctggac

SEQ ID NO: 1562770 - DNA, 4001 bp, Homo sapiens
gaagaattcttacctagaaaactgagcttgaacctcaccaagactctagatcttactactaatgtaaaggaaatacagtggataggagacattaaatgacaccaccatgaggaacaaatcagccaaatctagagtgtgggacattctaacactctactacacatatgacctggtttcttcaataattcaatggcatagaggagggggaaaaagatgagtggctgggtgaggactgttattaaaaggacttaaaatacaaaataaccaaatagaatatgtggatgctgtttggatccttattaggaaaaagaaaaagaaatggaaggatggaagtatgggtgcatggaaggaaggaagagcagaataagtaatatccaagacaataaggcaaaatttgaatacagtctgggtatcaggtaatattaaggaattactgttactaattactgtaactttcgttaggtgtggtaatgttcaaaataatgcccttttcagttagagatgttgcttgatactggtgagatgacgcaacatctagaatttgctccaggaaaaaaaaaagagagagaagaagaggttcagataggtcacataaaattggcaaagtattgccgggcgtggtggctcacgcctgtaatccctgcactttgggaggctgaggtgggtggatcacgaggtcaggagatcgagaccatcctggctaacatggtaaaaccccgtccctactaaaaatacaaaaattagccgggcgtggtagcgggcgactgtagtcccaactactcgggaggttgaggcaggagaatggcatgaacccgggaggtggagcatgcagtgagcagagatcatgccactgcactccaccctgggtgacagagtgagcctccatcacaaaaaaaaaaaaaaaaaaatcggcaaagtattgataattgttgaagctactgatggcatatgagggttcatgatacttgcctctctgtttttgtatatgtttgaatacaaacttatttatttattttttttgagatggagtttcactcttattgcccaggctggtgtgcaatggcgcagtctctgctcactgcaactctgcctcctggattcaagcgattctcgtgcctcagcctcccaagtagctgggattacaggagcgtgccaccacgcccagctaattttgggatttttagtagagacagggtttcatcatgctggccaggctggtctcaaactcctgacctcaggtgatccatccacctcagcctgccaaagagctgggactgcaggcataaactaccgtgcccagcagaataataacttttaaaaaccaagctgatcaaaaaattgggggtagagggaggcagacaaaaatcatgatggaaatagaaagctaaagacgatgaaagtgccgagctgcctggaaattttaagaccagaacaacaagaaatagtacaactaagaataagacagtagaaatgtcattgtctggattagccaaactgtcctaatgtaaaccccatacttttgaaaagtcaccacttggaggcactgggatcctcactgaacaataaaatgctgtgtggcttacctgggaaggataaaagtaacaaatgccagctcttgttggatcgccttcttcctttaccttggaaccatcataaagaaaaaaataattccacctggcaagagaacagagtggagccatgtttcctttaatccagtgatcacggcatttaaaacacagcttcctgtttcccagcccgaggagggcttattactgtgtttgaaagccttcaggtggccccagagaataaagaaccccagtagctacaaattagataaaaccattctgtaagcgcaggaaattcaaactaaaaatatgcctctatccagccgttagaccatctgccggagaagacacgagtagctagaaaaaaaaacgaggcgcccacaatgactgctcttatttgaaacactgaaccttaactatacaaccacatggtctgatacgctgtcttttaaggctctgataacaaaataagttagggatgtattagatgcactcctcataagtgctgagcacaaagatttccagaaacagcccttctaccaggaattcatgcattcacttaaacatttactgagggcccacagtgtgctccgcggttgctgagcaaacacgcagtttcaatgcaggatagtgagtccaaaagttcgtaacagggaaaaaacaggggcctatgagaatttacagagaaactctgaactcctctctaccatgccaaacctcaccaagtatcattcaagcacacttcctcattaaccgtctcctgattccctcggcccagagatatctctttgttctgaatttccatgaccctctgttcttcctcaaagactcttacagactacactgcagtataactatattacgtaatgttattatctgattacctctttaagaccataaaacaaacacctcaaaggccaggcctcaattttgttttgtttttacagggtctcactttgtagccctgtaggctggagtgcagtggtgcgattgcggttcagtgcaaactcaatctcccaggctcaagccatcctcccgcctcagcctcccaagtagatgggactacaggagtgtgccatcatgctcggctatttttttttaaattttttatagaaacgagtctcactatattgcccaggctggtctcaaattcctggactcaaataatcctgccctggcctcccaaagtgctggaattacaggtgtgagctactgagcctggctggacctgttttacttctaagtctctgagaacacatttatgaggctatagcataaacaagcaatgggaccaatgtgtcatctgctctcttccctggatctatgccctctctgaagcctccctccatggctcccaccctgccttcctgatgaaaaagcaccaacttggctgggcacagtggctcacacctataatcccagcactttgagaggcctaggtaggaggactgcttgagcttaggagttcgagattagcctgggcaacaccgtgaaaccccatctccacaaaaaacagacaaaattagccaggcatggtggggtgtgcctctggttccagttacttgggatgctgaggtaggaggatcacttgagcctgggggattgaggctacagtgacctgagatcatgccactgcactctggcctggaggatagagcaagaccctgtctcaaaaacaaacaaacaaataaataaagcaccaacttggtctcttggcactgtcctctttcccaatacctaaggctggatgtacaactggctgcagggtaagctcagatcaaaaagcctcaaaaaagtttcaaagccaactcagaaactccatgtgcaccccatcctcccctgtccccacgttctcttgatgaaagcatccctgcttgtgcgggcacacgaaagaaaacttgggtgtcattttgaactgctccatctttttgacttccacataaataatcagtcactaaatcctgctaattctagctaaacctgcttttcaccttcatctcctctatgactgatgtttgctaaacctaattatgggaaaggattaacgcatttagggttgagaagggaactgggtttcagacagacattgagtaataccccttgatacccagtctggccagacctctcctcatgctgtaattctcaaatgcaaccatacctcatctctgcaaattgaagactacaatattcacattatcatcaaagctcgctgcatgatcaggctgtggctatcttttctacaatctcccagcaatgccagactcattcaaacattgggagaggcttgcaaggttaaaacatgttagctttggagagcgatggctcacgtgcttgattcagctgctctgaggaaaatggcatttttattgttatgttaataaaattaacacaatctggctggggattttcaattaaccccaaaactctaaccaacag

SEQ ID NO: 1562771 - DNA, 4001 bp, Homo sapiens
aatcacataaccacaaggctactgccacccagtgtgcacacatatttggggattattggggttggccaataagctacctgagacctctggctgaagaaatctgggtggacaagacgctgcagttgctggtacctgtgctggagcttcgctgtatcaactctgaaggaacggttgctggaaggaaattgggagattaaatttatacaacaaatatttaaaggtttatctaccatgagcctggttcttgctcttatggggaagatgcaataacatataagcagttaatttcaaaaagtggtaagtcctatgaagggacacagaacagagtcagagagtgtagcagatgtagtggacaaagagatgacactcagctgaaacctgaatgatgatgagtaatcaaagatcagaggaaagagacgtccaggtagaattgcaagagcaaggacctcgaggtgggagcaagatggggatgcctgaggaacttaaagatcagcgttactgtagcccctcatacatgttcagtgactggtggggaagatcccatagttaaggaaaagggacattcctaaattacacagacaaagattctttgcctggccaaactttagtcagatttctgaaccttctcctaggcccagatgtatgctttcttgtaaaatacagttttggcaaataatcttgccaagtcagtttagctagaatcctcgatcctcatatttttgatcatcctagatctctgatcagattcttcatcctctactatcccccaggtggtgtctaagcagcctggcctgtcttcagcaagaatcccgttaggtcggcttagccagaatcccgtttactctgctccttggctacaaatttccttctgcccatgccctttttggagttgagaccaatctctctccccaactgcaagaccctattgcagtggcccctctacaagatggtcttgaagaaagtctttctggtgcttgaacaagtgtgactgaatcatgttttctttaataccaccctaacttttccacggcccaggtcccttcatccctgtctctcccggtttattttaattcagcccctttcacattctactcccagagtctgtcctatttccttaccagttcagctctatccacactgccccgtctctccaagaacctcagtctcagggggaaaaaccatttattggaccctctccctccaattctcacttttccctcaggcctcgcccacaatattaagcttttcatgctttactccctaatctcggatcacacttctgcagtcctttcttaaatacatcaacccaactttaaaccttactcaccctattcattcaagtcttccagtctcccaggccctgcccctcaagtaccctttcctcaagttccgcccctcgacttctccttccctttcccgtaggtaccgcccctcaaatctccctcccctctagcctcggcccccctatttcctctaacttcagcgcccgcccctccagtcccgttcgtctcccttctccacacctcaacgttgcttccctcagtccccgcctctcaatttcctcctgagaaatcaagacacttctctcacgcctgctctctagacctccgcccccccatcagtcccgccttctcttccgccagccagatccgtcctcccctctcgcaggccagacctcgacgtgtctctcgcccgggcccgtttcccgaaaccgtcgctcgtaccagtccataaggctgaagtagtctcgagtggggtcaggtgcctgcagcgctcggcactgtgggcagaagaacctgtcctcccgcccggggccccatgggccgccgcagttccaacagcggggataattgcttcccgcctgcgacgcagcatcgcagcttagcggtctccttctgggaacccctgtcggccaaaacccccacacccggagcaaagccccggctctcccccgccacatctggccggcggcctatctagccgtggtcactcgtggggaaaagcaaagagagcgtctaaccagactaatgttgctgattggctggggagtcgagggggcgggatcacccgaggggaacccgggttctaagttccgctctcccttctaaactacaactcccaggaggcattgaggcggcgcctgacggccacatctgctgctcctcattggtccggcggcaggggagggggttttgattggctgagggtggagtttgtatctgcaggtttagcgccactctgctggctgaggctgcggagagtgtgcggctccaggtgggctcacgcggtgagtcatatggggaacttctgttgggtgtttggtggttcgaatcccatcttaagcgttttgtgcgaacggagtctcctgagcttcgctttgtctgtagttttgagctgaagggggagtgtgtgggcgactctcttccttttcagtagatcatcctcgaggtgaagttcacttcccgtattacttgcaagctgaaacaggcctgaacatacaggataagaagaacagcgttgtattcttcaatatcagagcgaagtgacttcgtaaaaattctatagatgttagaaatcgttgccattctttaggttcaatctataaaatacttatagagaagccagtcttagctactgggcgctgcagggactggaaacgcactgagctgtgtaggaggatgttctgcgtgtccctaaataagtccctaagtaaatgtatgggatagggtggccagaagtgggtaggagggcatcagtcctccttcggacttaggttttctgcttgaaaaaaatattgtgtttcacttgaaagacctctggaatttttaaaaaaaattatttatttttgatataaagtatacatatatgattaccatctgtaccttttttttttttttttttttttttgagacggagtctctctctgttgccaggctggagtgcagtggcgcgatctgggctcactgcaacttctgcctcctgggttcaagcgattctcctgcctcagcctcctaagtatctgggattataggtacccgccaccatgcccggctagtatttttagtagagacgaggtttcaccatgttggccaggctgatcccgaactcctgacctcaggtgatccacctgccttggcctcccaaagtgctgggattacaggtgtgagccaccgcgcccggcctattttcaattttttgaggaatcacaatactcttctctatagtggctatactaatttgcattcccaccagtggtgtatgtgaacagtgcaaggtcagacataaccaggtccatgcacatttgtgtctttccacaagatcagacttattgatgttttattttaattgtaaaagccacgagctatatggagttcccaaggaagcaattttccgtagtactccctgtttacttggtggtcagagccatgggcacacaggctcaagccattccacaagtcagtcagtattgtaaaccgtacacaatagtatatttatttaatatgtaaatgttatagattaaaaatcttacattaaagtaacatttaacattcggagaaaaggggatagggaaagtggttatcaaaccagtccaaggagagcaatgtggacaaagagagtgttttggctttatctggggtgtcagtgtcttgtaaggaagagtttttgatgcgggcagagcctttgatggcggatactgggtgttaatcatgagtgacagcaagatggtgtctgttaggacagccattttgacctaataaagtcctgctcttatgaccaaagaattttcttgtgaggactaataacaaaagcgtgtacatatttatatccttatctggtttagtacagtgttttttttgagacagagtctcgctttgtcaccaggctggagtgcagtggtgcgatctcggctcactgcaacctccgactccctggttcaagcgattcgcctgcctcagcctcccgagtagctgggactacaggcacgcgccaccatgcccagc

SEQ ID NO: 1562772 - DNA, 4001 bp, Homo sapiens
cctctggtgctctggaaactggagattctcctgagaaccattaatttattttgctccagtatgattcagttactactgtcagtcatctttctgtgtgacccttttattttcaaattataaaagccattaaaaatattatcatttattctcagtctggaagaggggaattttttaaaacaggaatctctttttctctatataatttctcaccacttctttcctgagctggccagggaagcctggaaaggtcacaggtttcaacagaaacacgagttaagagttttggagttggccagatctaggggctgaaatcctgcatagggccttcactaggggttgaccttggctgacatctctcagtgcctcagtaagatcagaacaatccagtacctggccgggcgcagtggctcatgcctgtaatcccagcactttgggaggccgaggtgggtggatcacctgaagtcaggagttcgagaccagtctggccaacatggtgaaaccccagctctattaaaaatacaaaaaaaaattagccgggcatggtggcttgcgcctgtaatcccagctacttgggaggctgaggcaggggaattgcttgaaccagggaggtggaggttgcagtgagccgagattgcgccactgccctccagcctgggcaacagcgtgagactccgtctcaaaaaaaaaaaaaaaaaagaaaaacaatccagtacctagcccagtgtgctatggtgagacgattacatgaaatatgtgtgcttcacatgcagtaagcactcagtaacatgcatatgtgtttcgcagtctataatccaaaatattgtttttctaaatgtgcagactgatacaaggggtacactacaaatgtgcatgccacatattcacatattcatccattctaaaagtatttattgagtacctactatgttccaggcattgttctgggtgcttgggatgtatcagtcaacaaaacaaagattcctgcctttgggagactcaacatttatgcccttcttggagtggggcagcacagtaactttgggtcttaaagacaacacacaagtgccttttgcaaactctggtcactacactcaggtcaccgttatcagagggggtgaggtcgggggaaaaatcccatagtaaagactaccaaagtcactgatgcctaactttggggtacagtatatgtttagctgaagcactcaaggtttgcttaagctttgtttgttttgttttgttttaacaagtctgcttctccagagttgtaactagtgattttttaacgagtcacctcaactggtgaaggtggtctcagagtatgtgacagggagcagggggaaatccactggagctgcgaagtgccctggaagatcattcttccacgcctaacgtaatttactgtatcagtaattgcagtaactcgcctttgggagagagaaaggaaaaggtaggcaatttaggtgaacaaaagctctggatgaattatgaaggctctggactccagagaccaccgtattcaagcgcaagttttcagactcacctgccaggatgcatttggctgccagcttcaccatggtaaccaacactcccgcgagccgtacccagaggacaagagcggctgctagagacgcgagtgggtgggcttcgggccctgggctggcctgggacgggaaggtggggaggggagggctgatctcaagggtcagtggccgcgacgggactggggatgaccgagcccggcccttctgggccgggggcggatatcgggcgctgggggcgggtgggcaggggagggctccaggtgggcccggctcgaggcctgacacggcagtctgaaaaggtgcaagcgagcggacacggcctgtgctccccgcccagcccctcagcacagccctacccagagggttcaaggaaggacgatccggctctcctccgatcacaagtaccgggccggatgcactctccaagcaaccatagcccacctgccccgcctcctcctcctcctcgctgaccctcgattggttgccgccaaaagctcccaccctcaaggtctcacaaaaatccaatgggagtagagagctgggataacagccttttcttgagatgcaattcgtagagttatcagttcttcaagttcagtctgcttgacgagtggttgtaattgacgtcaaccagctttatatcccgcccccgctgcgcctgagagtcccgagataaagaagcctccacgtcaagcagtcagaagcggtgacaagagaagctttctgattggtcagagtctggcttgacccatcttcgggaggaatagggattcgccactcccgctgtccttctagaagtgggttcgcctacaatggggcaggttgggctctaggcggtctggagcggcgcctgcgcagtgggccaggccgccgctgtagaggtcgttttgacttgctctgacttcgcgcggttctcgcggcttccccggttcccgggttctgcacagcgcggctattaaagtgcatggagaagtgcagtccttgccccgcatcccgcagggaaatctcattttaaaagctcaaagatgtaatgagcgttaaaatctaaaatatgaaggtgttttattaaagtgatgtttgtgaacaaagggagaacaaatacactttgatggggctaagcggtgagactcggaaacttgaagtcgtactttgctcttagtccatttactctctgcaaaaggagaatgcatcactaacctcgtttgcccgtcacccagggaggctctctgtacgcgtttactgggttgggggtgcctcttgcacgtggttagggggtcagagacctaaatccctggcctggacaagtcacctcatccctcagcctcaggatgggcctaggagaacccgccttgtggggtggttgtggagatggaaggagagaaacgtatgagtgcctgggagatagtaggtgcacacgtgattgtggggtggatgggagagcggaagcttatctggacagatttggtttatcatcactgtcactggttggccgaatgtaccccttgttctcactttctcagggcccctgggattctgatggctgatgctgaagggaagagcagcccctcagcaaaggtgcctgtgcgaaagttccacattccctccagacacctagaacattccacctctccgccactctgcatctcagagtggctgccagccttgtgtgggggaataaacacacacactctatgaatggctgatggtttcagccccgaatccagagtaaatgcaagttgtctgagatgttctttccttgggattcattcctggcgctacggtaaaggtctgtttctccttcatttctcgtaactgcttttcttctttggtgacatcacgtgagtctgtctcagacatccaggtctgagtgagcaaaaagcctctttctggtcttctgccttcctcttgccggctcccctccaggccaacctgttcaccatgagtgaccctgttaatcccttaaaggaccccatttggtgagtcaccctcccgaggcagctccacgtagctaagacacagacacacatcagggcagcctccgaagccttggttccttcattttgcgaggtgggtaatgacagagccggagcatagccatcttggacaagcactgccattttaaagttctccttgatcaaaaacggcctaaattcaacccaaagggcatcagcctaatggctaatgtcagaatgaccataaaccacaagtgacatctccaatcagaaacattccaaccctaagataaacccaccccccgaccagagacatgcagccccaagataacctcccctctggtcagagagatgtcagccccaacataacccaccctcagaccggagacattccaaccccacagtaaacttctcctccacacagaaacattccaagcctgtggtaagctctcttgccctaaacccttaaatactcttagtctgtaagagagagcactcctgactgaaa

SEQ ID NO: 1562773 - DNA, 4001 bp, Homo sapiens
tcgggccttccccatcccagtctctgttctgtaggcatcaccctgcatgtggctgtctcctcacccggcccccgctccttgtggacttgaattggggcaaatctagatcctctgggacctcagccccagcacagagcctgaccctgatggggactccttgctcagaagtccgtgcaggacactgacacccggtcccggcctgccaccatgctgaccccgcctccatggccgggctcctggtgtgggtcaggtcggctgccactgctggagctctcaccacagccaccccagcatcctctgggtgggtgggacgctgaaggccctcaccagtcagggcccctcagattgcagaaggggaaactcaggcccggtgtggtgtctcatgcctgtaatcccagcactttgggaggctgaggtgggtggatcacctgaggtcaggagtttgagaccagcctggccaacatggtgaaactctgtctttactaaaaaaaaatacacaaaattagccaggtgtggtggcagatgcctgtaatcccagctactccggaagctgaggcaggagaatgtcttgaacctgggagacggaggtttcaatgagccaagatctcgccattgcactccagactgggcgacaagagtgaaactctgtgaaactttatttgaaaaagaaaaaaaagagagaaaaagggaaactcaggtcccagagatgcacgtgtccgctcgatcagcttagaggatgggacaggggagagctagaggggatagcttgggccttagaatctgtgcccatgagctgagtgactcggacgggtcacctcacctctccgggctctatccccgtctgcacaaaggggatcacagcaggacctgcctatggggccaccgagagggaggttctgcccctgaaatgattatcgcctgtgggtataacatgcaccagtgaacaggctgttgtgtcccaaatgctcataaatggaccccgatgcttggtgctttgtctggggacctcccaccacacgcagagtggtggcaatggctgaggtcacacagggagttgtggcctccctagagcctctcctgggcttcttctttggaggcacttgcaccctggataagcttgtgtctcctaggggctggtttcaggaggcgatgctggctgaggtctagtgacccagggactccaggaaaggcccctcacaccttagctggagctccagggagtggcccctgcccagtgagggtgggagtggacaggtgacataggccaaggggaaaagaggaggggggggaggaggagtgggaggaggaggagggagaggcctgggcatccttcagggatagcggccaccactcctgtggacgtcctgcccctgcctccagtcctgccctaccccaaggactagggggaggtgagggagacattggccttggtgccaaatgtaagtgggggaagaaatctcaggaatcaagataaataatattttaatatgacattaagcaataaaaattaattcaaagatggacaaaatcttgacactttagttaaagtcagtgtctgtggctcccctccagggattaaccttcctcctcacccctctggctcgtctccccttggtcatcctttcccgcctctgccacccagacccccacatcccctggaatctctcaccccttacctgccccaccggctcctcaggctggaccggctgcttcctccaggggctccagggcccagggccctgctctgcgatgcagctgttgggcgcagcaggccatgggttaccacggccagacccagcagcagcaggggccagcgctgcctgaggttggggcctggctcaccaggggcctcaaggcccccctggcctgtccctggcctcatcggccctcagggtcagaggtccttgtggcctgacttgcagtgtgggctccctagagagtggtgccctggtccctctcgctggcagcagctgtcccattgcaccccagtccatgtggccccatcctcatcctctggtccctgcccccagccaggccccttccagagtccatgaccgttacccctggggttctgtcccagaggcacatctgccaactgccctgctgtggtcaggatccagggctcaactgcctcccacacctgtcagcttggccttgcccctggggccctgggtgctttgtttggggacctcccaccacaggcagagggtcagcaagagctgaggtcacacagggaggtgggatgcgccatggccccccaagaccctcccttggggctttcctttggaggcacctgcgccctggatgggcttgagtcccctcggggctggtcccaagaggtgatgcacctgacttccctccttccccacttccccgagggcgccctgggtctgtggagcatctcactggggtccagagagctgcccagcaggagtcccccagggcttgagctcaggggcctgggctgaggctcctccaaccggtcctagagggaggtgtggttagagagcaggaaacaggtttgggtttagccagaagccactcaacggttcaagtccaggaatcatgagataagaatgaaaatgctgtttaatgcaccatgttcagcacctcactgacctcacatcacacagacacacacacacacaccaaccaccccagcttcctgaaggtataattgacaaaactgtatatatatttaccacctacagtgcgatgctttgccacactgcaaaatgattaaatcaagctgacacacacgtccgtcatctcacatacttatgcttttgtagtgagaacatggaagatctaatcttagcaattttccagtatacaatacagtttttaactgtagactccatgttgtacgatacatctccagagttcattcttatagatttcactcaaaggccagtagcttcctcctgagcggtgagtgcatcatgtcatggcttctgacaggcccccggtcctctcccagcccagcatccccgaccctctcccaacatctcgcgaccctgtgctttggtgttgagggagcagtggcagtcaggagggactgagcacctgtgctgggcggccagggccaggctcttttgctggtgctgccagagacgcctcaggtcacccaagagtctcaggttcctctccttcctccagaggcggggctggaaatgctgctggctctgctcacactccagggctgggttgaggttggtgttgggagataatgcatgtcagtgttgttttcttcatctgtgaaaaagcagtaacatacacacaacctaaaatttatcatcttgaccttttttttttttttgagagtcttgctgtgtcgccaggctggagtgcagtgtggcgtgatctcagctcactgaaacctccgaatccctggttcaagcgattctcctgcctcagcctcctgagtagctgggattacaggcatgcaccaccacgacaagctaatttttgtatttttagtagagatggggttcaccatgttggccaggctggtctcgatctcctaacctcatgatccacccgcctgggcctcccaaagtgctgggatcacaggtgtgagccaccgcgcctggcccatcttgaccatttttaagtacacagttcagtggcattaactacattcacaatgtcgtgcaaccatcaccaccatccatttctagatttttcttttttcagagtcttgctctgttgcccaggctggagtgcagtggcgcaatcttagctcatggcaatctctttctcccgggttcaagcgattctcctgtctcagcctcctgagtagctgggattacaggcgcccaccaccatgccagctaatttttgtattattagtagagatggggtttcagcatgttggtcaggctggtctcaaactcctgacctcatgatccacctgcctcggcctcccaaagtgctgggtttacaggcgtgagccaccgcaactggctttttcttttttttttttgagacggagtctcact

SEQ ID NO: 1562774 - DNA, 4001 bp, Homo sapiens
taaactaataataatcctaatcaaaattagccaggtgtagtggcctgcatctgtagtcctagctactcaggaggctgaggctggaggatcttttgagccctggaggttgaggctgcagtgagctgtggccacgccactgtactccagcctgagcaacagatcaagactgtttcaaaacaaaaacaacaacagtcccccaaatacaattgtgttttttcacaccctttctggtagatatttggattttttccagttttctcccatcactaataatgctgagctaaccacccttgttataaagatttggttacagctttgattattcccccaaccaacccttaggataaattcctagaagtggaattgcccagtttagataaacacactttgttttttgactcgccgcctgttgctaaaatggttatacatttttaatgcccatagacagtccccgagcgtgtctgctcccctctgctcagccctcacttcaacttcatgctcccatttcataggaaactgggcccctgggtgctctgaatctgagtgtcctccccatccccaaggcacggcttcctccaggatccccacctaccctggacttggccatcaccccctctcctccctcctctaatcgggcgtcgcatcagcctccaatccggtgctgatttttccaaaaacacaaatctgactctgataatcaatctacctaaatccatccaaggactcgtcctggactgggaatggtgcacggaccctatggtcttcttgcctccccttcccagtcacccaggagctcccagcctcatcctgtgctctcctctcctctgacgctgctctgtcttttgggggcacccatcaccagccagtgcccctcgatctgtgagaccagcctgggcatcatcccagagggagatcccctctccctttattgctccaaacatgggccgtgggcctgttccaatgactggacagctcccctcggttcatcccaccctccctgtgtccttgagcctggccccagtaagcatttatgtgcaagttggtgaacagacagccttgggggagaccaaaccaagcccttgctgccttctccagggagtggcccctgccctcactgggcaggaggcacatgggcagagaggaggagggggaggaacaggcctgggcaccctgtggggacagtggccaccaccccctgtggatgtcctgtccctgcctctgttccttccctacccagaggactaggactaggtgattgaggcactgaccctggtgaaaatttaagtggcgccagaaaactcagaaatcaagaaaaataatatcgtaatatgatattaaaaacagtaattcaaacaaatctgtgatggacaaaatatcaacccattactaaagccagtgtcagcccaggcccctcttaggggttaaccttcctcctcactcctctggcttgtctccccttggtcaccctttcccagctctgctgcaggacccccacatcccctggaatctcttgccccttacctgccccacaggctccgcaggctggatcggctgcttccaactgaggctccagggtctgggtccccgctttgcggtgcaaccattgggcgcagcaggccatgggcgaccatggccagacccagcagcagcaggggccagcgctgcctgggaccagggcccagctcctcaggggtctcacaacccacttggcctgtcttgggtctcattggccttcaggttcaggggcacctctggcccgacttgcagcatgggctccctggaggacggtgccctggtccctctcgccagcagggctgttacagtacaccccagtccattggctctgtcctctccctggactggctctggtccctgtccctagcccaggcccttccagggtccatggctgtcacccctggggatctctcccagaggggcatctaccaactgccctgaagcggtcacaatccagggctcaactgcctcccaccacagccggctgcctggccccgcccctgggtggtgcacacctgacccacttgtcttccccacttcccaaagggcagcctgggtctgtggagcatctccctagggcctagagagctgcccagcaggagtccccaagggcttgagctcagggggttggggctggggctggagctgtggcttcttttctgatcagtcttccaggctgggtgcctgtacactgcactccagccagttgggaccagccctttcttggctgggttggttaagcctggctggctatcctgtggccctttcctgagtcaggcaagagccctgcagggagtgattctatatccttcaggcaaggaagagtggtgaagtcataaatgtggagtctatctagacctaggttacctctgggcctcagtttccttatctgtaaaatggggagagttcctctgcagcatgaagcttatgagagttaaagaaaccatgtgtttgctaagcactcagtgggtgttgaataaattctggttctttttttgttcttctcttactttgggattcacaactacttgtggggtgtccttggggccagtgtctctgttttacaggtgagaaaattaccatccagagaagatgaatgcagggtccaatatcattccttaagtagggagcaagctgcgctaggatctaggaaggggctcgtcccctgtatttctattcgtctgtccacctggaatactcgtgcctggctccattcggcagtggtggaggaggagagggctggcaggtgctttaagttggggtcctttttgactataatatgggaatatgatgcataatacaataataatgcattacattattattgctttacaagcactaatcctgggagctaagatcatctactgtcctccacatttgaagatgaggaaatgctgctcaggctgattccctactcttttaatgtcacagggccaagaggcagtaggtctggagtcggaatctgaggcctggtccttgcatgacactagggcgtgctttgctgatgatgacatggctctctgggtctaggtggtaacacactgcttggtgcatgggaaaacccagagcttggcacaaaggagtggctcaattaaacatggactaaatctggttgaataaacctcttttgcttcatgtgaccccttgtgtcatttgcactcctttacgccccattcatcgctcccatcttttctgttgccctgagagcctagtataaaaatgtttgaggagatcttcaggaccccatactctggtgagaaaggcccctgctctgcccccttacattacagaactgcaatgagggtctgccctcttgctttccagtttctttttctgccacaaaatctttaaaaatatctgctcaagttcagatctgcagccctctaggactctcaatgttttgttttagcaactctcagaggagcctcctaggacttcctaaagtgaatttcctgggaggctcctttgagaattgcttggttcacattttgtgtcagatactccttaacttccttgatacatttggtgacaatcaagccagacatttttgtgggctatggtaacagacaaatagcctgagacttcatttcattgataaagttgatggttgttgggagacagtggtctactatggatctctgcatttctgcatgtctctcgggcaaaggcactgattgtggattatcttttcaagagtgtttgtggagtgaacaacctcggaaggtacagagaatgcctctctttggagcaaaacacagatatatgcttactgtcaagtatgaaatatttgggatccctgagctctggcatgcagatgtcacctggccctctttgcatcaccttgtggaactggtgcaagacaatgctgataccttggcaactgctattgctgtgaaaaacagattattcgttgtctctgacccaggagtcttgtatcttctgccagcatccatggcactgtggcaggcttactttttagtctgcaa

SEQ ID NO: 1562775 - DNA, 4001 bp, Homo sapiens
cttcactgtgcagtgaaagtcagagcttggctcccacgccacgcacagcagagtcccatccccgcttctggcatcttttctcactgtcctattacacagaccctccattccggccacacaccgtaccctgtcccacttaaggaccttggctcaggccctttccaccacctggaatgctcctgctacccccacagggctgcccaaatgccttttccatgaaggacaccccaactggaagcaatttttctttttcctggaattccgtacacttagcagttgtgcaagcagctttgctagacagttccctaacttcaagccttgttcctcccgtagatgggttaggtctctggatattagggtccccagagtatttatttatagttccagttcccagtatggcgccctgtactctgcaggcacctgaccaatggctgtcaacccaggcgcaccaaccctccatatcagaacgcttcatacacagcctgcaggagggactagcagggcagagggacctgctttgcccaatagtggaagtcacaggacatttctcaacatcattcacgataaaaacatctttttttttttttctgcgacatagtcactcaccctccaccttctttcggtaaatcctccataaaactacataaggagaaatatccctttgttttacatcctctgactcagatactgagcattattccttggggtcagcggtggaggtggaggtggaggtggaggggaggaaagatcccctcggggatgcggggaagaggagagtatattgtggaggggcacggcgttttgctctttttttgtttttttccttaagatggtcctggctcacagaaaggccactacccggcaggcgggtgggtcacttcctgtgggcgcagcggggctacgacttgacagctacaaacgttcgaccctccgactgcgctctcaccgggttcccagacccaggtggtggtagtcgggggtgggagtggcgggaagggcgccgtcttaagaaccatctgcccatcctcagggcttcgcgcctctggggaggtggccctcagccgccctcggcagagctctccccgaaacatggtgccgcgtctcagcgctccggcccccgcgtggctctacgacagcggggtccctctgggggccgcgggtgagggactccaccttccgcacggacgacgtgggctcgcccggctccgtcggcggcatgaagggcacggcttgagggaagctcccgagggcgcgatgggcctcccgagggccgaccgtgccccgccggggtacgtgaggggcgcaaggcgtggagctgggtccagacccgtcctggctcctccccgggccccttctccacagcccctttctatcagccctggccgcccctccggcctggcccagcgccgcgccctccttccccgaactccgcggcccgggcggaggtgtcactcccgcctccagtcacgacggcgggccaggttgtgcaacacgcgccgcgcgatgtgccacccaccccccccgtattccacaccgcaactcccaccgctccgagggtcctccccaggcgccgcgatatctgtgcccaaggctctgagcccctctaagcccgcggcgcggacttcctgcctccccagcccgggcgcgtagtcccgaccgtccggccctccgcgaccttgccccgcgtccgcagcatcctggcggctaccgctccccacgtcgagtctcaccggctgggagcagaccagcgcccggtggtccaggagtcgcagggaggcgccacccggggccagcacgcccaggagcagcaggagcagccccagcaggggccccgggacagcggacggcgggctgcgtgcggcccccatggcccggctggcgtcgcggagggctcggccccggctggggacgcagcgaacgaacgttctgaggctttcttttccgcggtggagttcgagtcggctccactttgctcgcttccggcttccagcccgggcccaggggcgggccgggccgaggggaggagtttagtctgggacggggaggggtttagggtgagacagggccctccccccgttcctccttgcgcccctcctctcggccctacgctcagtcctccgggcgtccctacccagtccttccggcgtccctccccggccctcctccgcccgcgcgccccaggtgcgctcctcccgctgctcctgggcctggcccgtcgcgcctccagttgcacccgcgtcgggctagcgtcaactccagctggagcctcgcctgccccacatgcaccctccaccctggccgtgccgcagcaactgtcgattttaatcctccgcccccactcacttgattcttggccctgttcagacttcttgcttctcttgtgggtcactggacgtgaaatcccaacttgggatttcaggaagtccgttttcttagtctctgtcccttttatttttgttttttattttactttatttttagacagggtctccctctgtctcccaggctggagtgcagtggtgcaaccgcagctcactgcagcttcggcctcccgggctcaagcgatcctcctgcctctgcctcctgagtagatggaagcgcgggccatatcccattttattgtccccacccctttgcctggttctgctcgctctgctttccttggctttgctttctctttctcaagacaaggacagctccgggctccagggaggatgggacagcagtcacttccagcctcctggctcggactcggggacacttgagttcctggagggcaggcaacttacctggtctgtgagactgtgtcccagccgcacctaagagagtcgttacttcccagaggctcactccacggccgcggaagctgtcgccagcgaattacacatttcatgagtctccttcttagcacgcgtgcagcctgcgtcctctcctctccggaccctggaggaccctcccaagccggcccgcgctgcctctatcctaggttcctgcttcgagcccgtcctgccctagtgcatccacacgctcctgcccattcgcctctcctctcttcctcccaagaccaccaccgtccgcttttccttgcctatcaagtgcgcctctgcctggccttgacacgcacggagtctacactcaagtggcttttccctgtattttccactgccctcgagaggtgggttttttcgctgcccgaagcacccgctgacccccagcgacatctctatgagccccgcccgcagacacgacccagctgaatgaagcctgaagctcagtggccttcaaattgtctgtttctaaaagaattttggaaaactgcatcctctcatgcattttaaagatgacatctaaaattctccatcctaagtctaaatagatgtagaggatgtaactgttacttaaaaatcagcggttgtcgtaggcagcttctaagatgtgttctaggatcccaccccctgggagtcacgaccttctgaatcctcctcgcggagtgtgggatggacccagaggcttggttctaacaatagaatatgaatagaagaagacaaaaatgatgggatgtcacttacaagattaagttacaaaaagatcctgacttctgtcttgcccagcccctccctctgagctcctagctcttagggaagccatgctggggcccaagtggcagagaatgagaaaggcctctgcccagtgcaagacactgagatcttcatttcatcattgccattattagtacataattgataaaaaataatgtaaatataatacatgttaataagtaattaaacatgaattacttgaaattcattttattcctaattagttgatgtatctgtgaacaaatattgcttattcatagaacaaagcaacattcagcatttaagaaatattttatttttcttctttttttttttttctttttgagatggagtcttgctctgtcatccaggccggagtgcagtggcgtgatctcggctcactgcaagctccgcctcccgggt

SEQ ID NO: 1562776 - DNA, 4001 bp, Homo sapiens
gcgtctgctctctctcctgacttcctggactctgaagcccacccagggctggccccgtggcccgagtgtctggggctgcaggagaagccgctgtcgggggcgcggaacgtcgcgcggttctgccccgcccctgccccacggcacggggagcgggacccgggcgcgctggggggaaggtggggggagcgggggcgggggggggctgagcccgggcgctgggcgcctcccccgcacggggttttccgtcgtgcttctcggggcttcccagcggccggcgtcggggggtgtgcagggaacccccagggcggctgctcgcggccccaccccgcccaagctcccctgcatgcggcccagcctcccgccgtcacccgcgcgggtccccccccagggcgcggctgtagccccagcctcccctccctggcttccccccgcgggcaggggctcccgcgccccctcgcaaccaccgccctgtccaaggctgcccaggcagcgcccctacacccacctccagcttcccgctcctcttgtcaccccttgacccctcctgctcaaccctccccaccccatcttccatgagaccctccctcagccccgccaaacccctcctctcctctcccctccagcacttcccctccttcctggcctcttccacccgcctcagcccctgcccttgcccctgcccctttccttggagtactgagggttcaatcttggtccccacccattccccaggatcacctggccgtcctagcgtggacagcgcggtcacacctcggaccgggaggctgcctgcataccccgcagccgcctcagcaaagctttccagcttgcacttcaaggccgcctccccccatgtctcccaactcagggaccatttcctcccagaggcaaaagtcgattctgaggtctcatctctcgcttctccttccccctcctagccaggatccccaggcctgccccctccctgttttccatctccactgcagggtggcatccggtggacacccctcccacctgaacccgcccatctcccctgctgccaccggttcccacgcatcccagcctgctttcttccttgttccacgaatgccctgtggatctgagcctgcccatggcacccagcactccagcccttgctgctcccctccctgagctgagccctctgctggacccgtctcaggccctgtggagctgctggatgtccccgcaagtgtcccctgaggtgaccaggccaccaccctaaaggcacatcttgctaactgctgtccccatgccaggaacggtgcacccagcaggtcctcagtgagtcctccctttccgggacaccttctgtgccctttccatgcctgtgtccccactgtgcccggccagccttgggcaccggggccccttcctgggatgctgggtacacttcctgctgcaggtgctgatgaagcgccctctcctgtaaggctgagtgagtgggctgtgcagtgagagccctccaccccaacccagccacctccactgccaacatctcattctcagcacgttctccgagtgtttccttggcaggtgtctacacaagcccaggtgttgcgggctcccgatggctcagagcagccgagcggggtggggtgggagccccggatgggcttgcgggctgccctagattctaacacagcctccttggaggtcacaggtgggtccgaggtgggctcaccctgccttgagcttccagcaaacacttcccggagcagctcggcagggtcaggccaggtctcccatccttctttcaccagcgctgccctcggaccccccagggccctgcaacccctcacctgctgatgtgctgagagcgtcaggccagacccacctgaggagaaaccagggccttatctgccacagtgtaggggcctaggaggaggcaggagcttacctgagaacaggagaggccacattctgtaatccgggggatggccaggctctggaaagtgccccaggtcaggcccaagaacgcgagtgcttgcccagccagcatctggctgtgcagtgagagctcccactggtaagcgtggatgtgagtggggcaagtttgcaggatgccctgtggcagcggctccaggctgaccctgcagctccagccccaaagacaaacagagggtggaggctgctcttcacagctggagcgagcgagacactccccctcccggcaaaacagggctcgcttcacagacagcagcccgggagactttccaccgcctggggccagaagactgtggccagacacttgtggagtttctaggtttccaaaggaagcatccagaaaccttggggcctttggggtccgaggacaccctaatggggttccccacagggcggccactggtgcagagatggctccaggccggcgggataggctgccgccggcgtgcacctccctcaggcatgcatgaggccaggagggtagacaagggccctggaaagctggctgggctggcagaggggtggaatctgtcctgggcactcataccccagagcccctggcttcagccccagcccctaaggggagccctctcctaagacctgagattccacccaagtccctggcctccacctcccctcaagatgcaaaaggccacctcccctgtgtggtcctccctatgagcccccccccactccggagggcaccccccgaggctgggaactctggggcccagcctctgctcagggagccgttctgtgtcatcttcttatttggagcatcaaatgcataggaaagtttctgggcagaagcttactgcttcccatttgcctccagccagggcagggggttggagagaaccagggtgcagttcttgggtcctcctggctcctcccttcctggacaggcacagaggcttctgcacctgcctcaggttctgggagggcactgccccacgtgtgtgtgtgtgtgtgtgtgtgtgtgtgtgtgtgtgtgtgtgtgtgtgtctgtgtgtgtgtgggggggggatggcgggagttaatagctggggagcctgggagtgtctagctggggtgttctgcctggaatacccacaggacaccccaagtgtggagggcggcaccacccccaggctgggagaggctgtgggcctcacactgtgggctcgggtagtcaggagggagcttgagaaacaagctctggggttcggtcccaggggagggaaggcggcaggggctgctgtgaccgtgaagtcctccctccctcccaccaccccgcactgcccacctccctgcctcctgggccagcacctcgaccctgcccccgcctggcctagagccctccatgggctggaacttatgcactcactgctgggcagagtagatggggctgagcccgccccctgcagcagcgtgcctgtggccacaatgccctggagagagtggctagtgccagcctccatgccacggcatggtcagcagcaggcaggcacatttgggggtggctcaggacgggccactgtcatcccctatcccaggctggctgagctgtaagacagatactccagctgggcctcgcccctcagcctggcctccagccctccttataccaggggacgatgggggctgctgtactgtggcaggggtgtcccagacgatgtccatgggcacggccagcaggatcattgggaaaggacaaatgtccctcccccatgggcccactcacacccaaacctctctccaggcctctctgggacaggcccccaccacgacacacccgttgcctgaaggcgccatcccagcgtgccgtgacgcaggcaggggctgcaggtggccagtagtcggtgatctcgtgtagggacggcccacggggtgtggctggtgctggttccaaggcccagggaaggacagtggggccggcctctgccctctgccccaggcccccggccaccctctccagcctgaggtcagagggctccagccctgtctctgagggctgggggattggccctgctcagtatccatgaagagccaggcca

SEQ ID NO: 1562777 - DNA, 4001 bp, Homo sapiens
cgctcaatcatgccaacctggccctggggcaaggggaccatcaatgttttgtgtgggtgtcaccccaggtcgggcccagcctcaggatgaccccatgcccaggacaggaactgcagagagccccagtgtgtgaggaaggtgctgagggacaaaggggtgcaaggtcaaaggaaggttaggggtaaaccacaggcccagcctagaggcagccgggcaggaggagaaagcgccatctggagtctgcttcccgccgcctggagctcagaggtgcagcgatgctcggagagggcagagtccacgggaggatggtgtgggggtgccagaggggcacagagctgagggagcgcctggcagtcactgaggctgcaccctcattctgcaatggggaagctgtgcctcagggaggccaaggaacccacttaaggttgcacggtgaggagaagcccagcctcgggtgacagcaagtggagcccaggacctcgagtttgagcaccccctcctgggtcctcaggcacacccacacgtgccctgtcgttcatgactctgaaactggtcacacccacggatgcctacgtccccaccacagccctgcaaggtgggtcttgctgccccatttgatccatgccagaactgaagcccggagcggctgaccccagccatctgattttcagagagatgctgctggggacagggactggtgcctgctctctctctgcctacactgcctgccctgagcgctcgggggtagttcagcttttagccctccctacagccccatgaggaggctctagtatgcctcctttttgccaaatgaggagactaagaaacgggtcaacctctcacccaggcgagaagggcatagagctgggatttgaacctggtcaggtgcagttcggggcccctgctgccatcaggggtatatggtggctggggcagggtggtaaagcaggagctcgggagcccatggttcatccaacttgacctctgaactcaatggggcctatgtcccctcgtcctctctggccacctccacctgccacccccctgctcccatacacagtgcttgtctcttgctatttaacttcaggggcttctccagctgggtgcgggaccctggctgtgggggaaggaaggggacccttggggatagctcagctcctcactccacctccctcccccgaggtgctacaaacacagttaagagtgggaggcttcggcccccaggagaggagagagcatgagctccaggcagccccaaagatagggtcccatccccaatgtccggagatgcttctgacctgtccagtcatgcagccaagggagggacaaacccagactcaaacccagggctctgcctccagcctggggctcccagaggcctcgcagcaacttcacttcatagatggctctccaaggggacccttctgtccccacttactccacaagcctcctgatgagcacgcaacacagggctgcctcccccggtatatgggccccactccacagaggtcaggagggggctcccgcctgtcccaccccatatcccgtaccctctccgggcacccaggctatccacccatcccttctccacctctccgggttgggggcccagcacacagagcccagggaagcccctcatcccacagcagtccctagcctcccctgaatgggttgggaaggagagctgacctgggactggggaccgctttttcctccagccaggagccatgagagctgggcccaacccctccctaggggaattctaagacaaagttgggggatgggagttcaggcagaaactgctgggggaactgagtcagagctgaaagtcttctctgtgactttcactcccagccctctggctggtccacaggggccgggagggaggcagggggacatcacctggctgagacatggggcggtggcagcgcgcgctctccagtcctccccggtgctgggaccgtggccatctctccagggccctgctgagctctggctgctggggccgcaaagactaaaagcccagagccagcccacttcctgtgcagaggatagaggggcaaggcctggggtggagaggcggggagacgaggcttatgagaaagcctgaaactcctcaagcacccagggccagataaagatctgcctcctacgctgggggcggcacacacacacacacacacacacacacacacacacacacacacagacacacattgtcaaataggggcctagctgcacacaggagccaagggaacgcaggccctccctctctcccctcctacatcacccccacgccaactcacacaggctacccaacacctctgacgcctccatccggtcacacacatacccactaatacgtaggcttcacacaagcaggtccctctaggtgaccccagcgtctcaccctcctcccagcctgcaacacaccatctttccgagactcccatttcacccagccttccaggaagccccttactccgtttagcattcagagatgactgttttttttagtttttaattttgtgggcatgtggtaggtgtctatattcatgaggcacatgagctattttgatacaggcatacaatgtataataatcacatcagggtaaatggggtatccatcacctcaagtatttatcctttctttgtgttaaaatccaagtatactcttttagttatttttaaatgtacaataaattattgttgactaaagtcaccctgttatgctatcaaatactagatcttattcattcgatctaattctgttttcgtacccaacaacaatccccacccctccaacccccactgcccttcccatctccatcactgcccttcccatttccatgaattcaattgttttaatttttagctcccacaaataagtgagaacatgtgagctttgtctttttgtgcctggcctgtttcacttaacataatgacctccagtttcaaacatgtggttgcaaagacaggatctcattctttttcatggctgaatagtactccattgcatatatgtaccacattttctttattcattcatctgttgatgggcacttaggttgcttccaaatcctgggtattgtgaacagtgctgcaacaaatgtgggaatgcagatgtctcttccatatactgatttcctttcttctgggtatatactcagcagtgggattgctggatcatatagtagttctatttttagtgttttgaggactcttcaaactgttctttatagtggttgtactaatttacattcccaccaacagtgtacgagagttcccttttctccccaccctcaccagcattcattattgcctgccttttggataaaagtcattttaactgaggtgagataatatctcattgtagttttgacatgcatttctctgatgatcaatgatgttgagcaccttttcataaacttatatgttttcttttgagaactgtctattcagatcatttgcccaatttttgatgggatttctataatttttttccataaagatgtttgagctccttatctagtccagttattaatcccttgtcagatagtttgcaaatattttctcccattctgtgggttgtctcttcactttgctgattgcatcctttgctgtgtagaagccttttaacttgatgtgatctcatctatcatttctgctttggttgcatgtgctggtggggtattgctcaagaaatctttgcctagtcccatgtcctaaagagtttccccaatgttccttttagtagtttcatagtttgaggtctcagatttaagtctttaatccatttggatttgatttttgtatatgaagagagatgagggtctagtttcattcttctgcatatggatatccagttttcccagcaacatttattgaaaagactggcctttccccaaaggtatgtttttggcaattttgttgaaaataagttcactgtaggtgtgtggatttgtttctgggttccctattctgaccaatggttcattggt

SEQ ID NO: 1562778 - DNA, 4001 bp, Homo sapiens
caggtgccagagccaaccttggttccgagggtcctagggctgcgttcttctttgctgggagctgaaaacttgagtccaccttgtggaggacaagtcaaagattcagagtgaccctaaccagggcattgggccccaacttccatatagaccctggcagagttcatctagctaagaaaggcacatctttccaaggaagttcttcctactatctcacttcaatctattctgctgcaggtcaacttctgtcttggaggagataggacacaaaaccctaacccctcctttaagtctgaaacctctttcacagatggggaaactcagaccctgactcaaatgaggcagagtgtgaacctaaacctgaggacttgccttgccttcctggctggcacccacaccctgcccattcggggcagcttccctgggcaaccctcccactgcagtccctgaagctcccccagccacggctactgacctgacatcccaggtctgggcacactggggacagcctgtttcttttctttttctattgtcaagatacagacctacaggtgcagcttgttaaatacctctcccttccttcataatgcccagaaaccctcagttccccaccgccccctaaacatccaaatcccttggttacagccctctctgttctcttacccattcccagagctccactcaggagcaagagctgggagctgagactggctgtgtagattcaaagcccagctctgtgtgaccttaggcaagtacctctctgcccagcgcctcagtttctctgtctgtaaaatgaagggatggggtctagggttcctggccacattatattctggggaatcttcatctcccattgtctgcatttatgagcccaacatttgctagaattccatctagccccgttgaatagtccatcctcaccaagtgtgaatctagcattcagagcaagtccaggattctaagttgatcctggtgtcacatctctctgtgcccaggttgtgccctcttacatcctccactttctcccctacctgaaaggacaggcaagcaggtatcccatttatgtccggcaggtgggaggggtggggagtcacggagtcctgtagagacctatcctccttccccatctattctctctgatgtcccctgtctccagaagacaggataaagtgtccttcaccaaggagggcagaagaatgtctatacttgccccaggatggccctaggtagggtaacagggcgcagggaggccctgcctctggagacgcacttctgtttctgtcccgtatccttctcagttcagagtacctaaaactccatctccacctcccttctcaaactcagttctttgaggtggcattttaggcaccctccttggctccaagtgtcacactgtgtgccggcttccccccaactatcacaccgcctccagtactaacaacttagccatcccagatgtcacagttttagtcttcagcgacaagccccctcattttgcattggctcagagaggaaaagcaacttggccaaggtcacacagcaaaggtggagcacagctgggtcctctgatacccagtccaggactctcccaagggctcctggagatggctaacttcatctgtctccgggcatcctgtcactgcccctcagcccccagggtgctctcttcacctagcccctgctcgctgagcagaggaaagtaccagcccctcagtcaggagcaccagggagcctgcagtgtatgtggggggggtgtgtggaaccagggatcaggaaagcggggggcactgggtctcaggggtcttaccttggagggtgccccagtttgggcaacaccctggggcatgggcagggaacccaggccagcccgggtccctggcctcctgctgcccctgctgctctggccctccatgtctgcagcccccggcagcctggactcccttggctccggctccagctctaccgctcccgggaaccagtgatgtcatcagccatttcaacctgctgagaatttaaaggcacaggctcccacttcccagcctggaagaggccgaagcaaggtggctaccccctgggaatccttcaaactggctgctgaggctggaacagccatggagtggggaggggagagtgtacccatctgcctggcccaggtcccaactggcagcaggaaggaggctgtctgtctaccttcacctttctgccgtaggcctggtcagccctttgctccagggaggggcattaacacacctgccttaaggtaggacaggtggttcagaggtctgcaccctctccagggcctcagagacaactgagttcttgccctgatcctgtgaccttcctggctccctgccagctcagagcttgccccggcccccacccttgccccattttcaggtcttggtgccaccctctccactcctactgccagtcccaggctctattcttcccaacccagaaccagacactcaggctccagccactgcagtcttttcccatctcaggcctcagcaccagcccctcctcttctgcagacacctagctgccctcagatgtccccacagccaggcctaacccagcccggcttctgtcagctttcttctctccagtattcactgggtgtggtttgggaggggaacttgctcaaggtcacctggtgaactgagaaggtctcctgtgtttcagtgagaaaacttagtgacctaggatgagcacaagcccttcgagctatctgggggaagggaacttgggtggagaagggcccagcagtggggtaacagactgacaagagagttacaaacaggcctgagaattgctacagccaggacccagcccaggacatggtccccaacaggcctacgggagtgtttgttgaatgaataaatgaattagaagagtgaatgggtgatgagggtcagattgggctgggatggctgtgggatctgtttctcatggcttagagaggagtgatcccacccactttaggcagaaagtgttcagagttgtgtgtgcagagctccctgttaaccaacatggagcatctgcatgggcctgtgcagtctcctacatgaaggcagatgcctcactttcctctcctgaaggcacttcctacctctgcttgactgtcagtaggtctagtctgtattctcaggccagcatctctgctggaatttgcaggggcagagactcaggccatattagagtgttggggtagaaaggtctttggacagcgatagtggagatggtgacagtggtgacggggaaggcgactgtggtgatggatgtgatgatgtatgtaactgtgatgatggaagtagggggctagcagtggttgtggtgaaggtggtggaggtgatggtgatggcaaaggtagaggtgatgatgataccaatactgatgatggtgttgtgtcaatgaaagaggtagtgttggagttggaggtgacagtcagggaggatgtgagagtagacctggtggtgatgctcaggttaccagaaaaaggaagattcgaactcatcctgtcttatcctctgtctcctgttttacaaataagaaaatgggagcccccgggctgggggagtactggcaaagtgcgggtaatcccagcactttgggaggctgaggtgggcagatcacctgaggtcaggagttcgagaccagcctggtcaacatggcgaaaccccatctccactaaaaatataaaaatgagccgggtgtggtggtacatgcctgtagtctcagcgacttgggaggctgagacaggagaattgtttgaacctgggaggtggaggtggaggttgcaatgagccaagatcgtaccactgcactccagcctgggtgacagagagaggccctgtctcaaaaaaaaaaaaaaaaagaaagaaagaaaagaaaaaagaaaaagaaaatgggagcccccaagactacccagcttttcatgcaatcctagagggaatgatgggcagatccaggcctctgggaccagtcctaaggctcagccatct

SEQ ID NO: 1562779 - DNA, 4001 bp, Homo sapiens
cttcacccaggtgttttgctgagaataaacctgaggctgcagtggacagggacttttctgaggtcacatagcaggccaaggtagagctaagactcacatcctgggttcctgactgttagcaggtgtgtgcgtccacaccaatgccccagtgcggctttcctcccttcctcaagccagctctcgatctacctggtcactgttatctggggacatgccttggggtggccactggcttggggaaggtgatcagggtggacagacttttcccaagccaaagcttcggcccctgggcaaagcttcagcccctggaagttgtgcagactgaacttggcttatgaggaggagactgtgctgggcccagcagggatttgggggagtcagagccaggtcctgatagcggggcttctgtttaccagctgtgtaacttggggacattatcctcctcttctctttcacagatgagttttcttatctgtccagttatgataatcatgcttttctactgaaattaaaagagaatgcctatgacattgtcaatgctgaataaatggtaactagcattcttagccggggcctggttacaataacaagccccaggtccctgcattctgcaactaactgagccttggtgtctgaagctgaaaagcacagttttgggttagattgaaaggtatatcaggaaaccagcccagagccaggtcttgctctgaattttagagtcctctatccagttaatatggacggagaagctttttctctgcctgagcccagctgggtcttggagaccaggaaacagaaagaaatgatcagaagacacttaccctggggctggtcctttggaggcttttctagcccagagcctgaggccgcagcttctccggggccctcttcacctggcccttctggtctgtccatatcactcctcctggcaggcctctttaggatcgcctcaatggagaaggacaggctcagcttcttcggggcctcacagcaccccaagctatttctctccatacccctgcagagagcagggcccacctcagcacacattgaggggctcaggggtgactctgtgtaggccaaggagggtgccagtggagagtggcgtacttcctcccctgaacctcctggggtcaagagggcgcgtggaggtgaagaacagagagcctccagttagatgatccaaacaggatttcgtgtccacagggacttccatgggcaggtcacagcagaagagctggaaggagtggtatcctgtgcccacggctcagcccttaccagtttgacatcaaaggagtcaccatggctgaattggggttcaatcttccagagaagggtcttctcggacacagttgcctgcacaatcaccaggttaggccaggatccctgaggtcaccgcccagtggcgaacaaagagaagagggagaaacaataaggcacaggaaagaggaggtcagtctccagaggaggtttggaggcaggggtccacctttgccctttctctggcttctggccctttcctgtggctctagccagcctttaggaggaggttggagtgccacccttggcctcaggtggccaattcagtcctgggctttactgcagcttgaggggtcttcccagacacccgtgtttacttccttcagttctgctgcttccagactccagaacgtaccttcagcgcatcagtgctcctgctgtcctgcaggtggaggctgaggaaagggggtccctgggtgctgccaggcctgtctcttctctgtgccagggctgggctgagctgtgggtctgattcttctcaggtgcctctgggctggccctggctttttttctgttctattttccctgacgtcactttacatgcgaagccctctctccacaagcgcctgacccagggtacctctcccttccttgtggggtcctttatgctgtttctcccagtctcctgagacagactgaagaggccctttctctctgactgggagctgacagttgttgatctgtccttgcctggaattttgctccaaattactgtgtaaccaaggaggagggggcagtaaaacaggctgataagagaaaaactctccacgccccttaaggctggggatgcaggtgtcagggtagaaaagtggcaggaggcagtggggatctgaaggacaggtattggaggccccagggaggggctgtgctggggaactggccagagcaggggaagggaaggtgggagcagaatggccaggaagtgtacccaggcccaataaaacatgtttactcagccaggagagcctgtggtcatgtgtgggggaggctgggctgaggtgcagtctgctggctgtcagccttaggcattcatttgctctcagatgtgctttccatggcttgcaaatatcagatcaggaaaagcattccagggctttctgatatggggaaactgaggtccagaccaaggaggtacagaaaatgtgatggcagggcctgatcacagtactcccctggggatgtccatgatgccatgctggccacaaggagccaatttgcacaggagggatggataccctggcagagactgtgaatgtaaatttggatgttagaatctagatcttctcatagagggcaggggtgggaggtgaaggatagggaacgttggtctccactccctgagaagagtgagtcaggagagagagggactcaccctgagagagggaacaggtaaagatgccccattttaggagctgtgccccttggaagtgtcaggctgtctgatttagttagggggggaataggctctgctgtagtagcaagtaaaccctatagtcttgggagcataatagctcacccacatcacattctaatgtagtcatttagggacccagattcctttcaaacagtgatgccaccattctccaatcataggctccaagttttctggggaaagggagacagcaaaggagaattttttttttttaattttaagttctgggatacatgtgcagaatgtgcaggtttgttacataggtatacatgtgccttggtgctttgctgtacctatcaccccatcatctaggtttaagtcctgcgtgcattaggtatttgtcctaatgctctccctccccttgcccccaaccccttgactggccccagtgtgtattttccccctccctgtgtccatgtgttctcattgttcaactcccacctatgagtgagaacattcagtatttggttttctgttgaaaggagaaattttgatgagtcagaagtggaagtggttgatagaccttctgctcacattctgtggccagagggagtcacatgaccctgcttagacctatccctttcctagggctggacaggggagttttcctgccaggagacaaatgaaccagtttgttgacttttgcagtgaagaggccagagtcccctagaagtcaggcccaccattggtccatggaaggggttgttggatgagaggacaaggttccttacactcagggcagaggaagctctgatgggtacttgagatgcttggtcaagagcaaggacaggatctttgggggtggaagtggcagaggcaaaaagagagaggcgatggagccctttctctctgctggacctcgtgcctgcagctgtgtgctcaccgtttcacttaatccattcaacagcctgatcaattaggtgtcattaatgccatttaacagctgaggagacatgcccagagaagtggagtgataggacagctagccactagaagcagcaagattcaaactcaggtgagtctggctctgcacctcacatccctcccactttgctgtaatacccagagaccatctggctcagccctctcatttcacaggtgaagaactgagcagcagcgagagaaattgccagagttacacctgttgttttcagcaccttgtttgatttcctttcattttgcctctttccaaggtgtgactggcccctggacaggttaacagaacacccttctgtggtgtggacccgga

SEQ ID NO: 1562780 - DNA, 4001 bp, Homo sapiens
ccccaaataggttgcttccagctgtaattctggtccctatgtggcaacaatttcacttccaagctaagagagtaagaaaaaggtcttctggaattgctaatatgcactgcttgaagaatgcttgagcttctctgcagcgaggactgcgcgggcctaactacttctagtcggggtcatcaggcaagatcatcacctgagttgctatggactgcagccatgctgttgtgtccattaagacaccacagaactgactctcaaaacctttaataaagtaattctagaaaatcaaagcaaagagaaaaaagctgaacttctttttttgtttttccgagacccgtcacccaggctggagtgcagagtggtgcaatcttggctcactgcaacctccacttcccaagtttatgcgattctcctgcctcagcctcccgactagctgggactacaggcgtgcaccaccacaccgggctaatttttgtatttttagtagacacggggttccaccatgttggacaggctggtctcaaactcctgaactcaggtgatctgccctcctcggcctcccaaagtgctgggattacaccgtacttggccaaaacctgaacctctattaacctgtggggtggcatttgttctaagtgggtaagaaaggccatctagaataaaggagaaagaagagatctggagtcaacttcaaattatagctttgctatttagaagctatttggacatattacctgacctttctgcctatcagcataatacaggcagtgaaatgactgttgggagagcttcacaaagcaatgtacgaacagcactactgccagcacatggcctcacagaaaagctgagcattgtttatacatcttgcttgtggtacccaccacattccacctttaaagacaggtgactgaacgtgtacgtatctagtcccacttctagactgtaaactcctcggcagcagagctttacaggcattatagcatagtggtcaacagcatagatataagaattcaaccccagctccaagtcttgttatcttgggcgaggtactgaactaaatgtgtcttcatcagtaaaatggaaataacatcacatattaacacgtattccacgggactgttgaagatcactcaagaaaacacagctgaggctatgagtactttcctagcccaccgtaagtgcctgataaatggtagtgattatcttttcatgtcttgtgtcccttatacctgctaacgcaatctagctaatacctacagctttgaaggtttatgaagctgagacactgccccacccacagaaatccagaaatatcagtatcaagatgccaaggagaagggtcccctacctctggaaaatctcttgcagcgtatcccgggtgaaggcattgctgtcctggaagacgttattgagggcgtggagggcacaaagctccctgcgctgtttctcatggtagatttgtgggggtgctgcctggggcagctccaatgattcagatttggccttgtctcctttccatggcacacaactcatgttttttgttttaggttccagagatggctataaacaccccactcttccctctagaggaagaatgtaagcttctcagtcttttccggattcctgaggtccaccttattctctggtgtccatgatttatgctttgtcactgggagaaaagattggaatcaaaaggaaaaaaataaaacccacctcttctctcttctcaatagaaaaataacttttggattacttttattttgctaccactgtcaaagtgcagaatttaaaaaaacacataaaatgtaagaccttgtttccgtttccccacccttccctcccacccccctccaaaatccccacgattttcttgctgtttccctctgcaaatgccaggcctcaaagcaggaggaccgaacacaatcggtcacatcgctccttttcttccatttcttttgaaccacgacgccaatgactcgggagacaaggcctgggtgacggataaatttagcgcacgagtcgagtagctagcgcgggccggcaggcgtgggaccgcgagccgcgcgggggcctcgggggcagccctccatcccctcgggtacggtggggcccgcagggcgcggctccctcggaaggcgcggattctagccctctggccgcggccctgcggaggaggagacaactccggtcagcggcgagcgggcgcgggaagtgagcggcggggccggcccctgcccgagggaaggttccgcgcggcgaagggctggcccgcgaggggtggggccggacagtcagcctcgcgctcccgggcccgcgcccacccggctcgcagcccctacacaaacctccccgcccgtcacgtgagcgcaggcccagacgccctcccgccgcgcccccggccgcagaccccagggccgccgggactgctcgccgctggcggtcccctcaccgcagccggccgccacctggagtgcgcgccgccaactgggccgtgcgggcgggcgcgcgcacctgagcccgacgtcagcggcccccgcccggcgcgtgctccggaaacgccctcccgcgccgtcctcactcctcccagccgtggcgtcacgcctgacgtaagtctgacgtcatcggcaccggcctgggagccgcagacgccgggcgtgtaggggcgcagttcaacggttggggtgttgcaaaggccgtgggtgtggggctgcgggctgcgcacctcggcggcggccggcagggttggggtccagccgctccgctcggcgcggcccctggcggggcggcctgagggagtcctacctggacgccagcctgcccttctcccgggcgtgggcgttgtttcggggcggcagccaggccagcggctgcagtccgcggctttcagcacccctcccttctctgtgccgggcttttcggccgaacgttctcgctccttctgcgttgactgttttatgtgtggttaacgcgcggctcaccaggggggattttgaagcacctgattcggtcgggcgcaaattgccttggttagtgggcccgaccgtgccgcactgtccagggagcgtcaagggtaggtgtctcgctgggagtcacatttcaagtggaaaggagaatcctgttgcagttccttggtgtcgcatttcggttcactacacacaagccactgccttcttgcctgggggctccccgctcttctcacggtggctttcctctctgcagagacctctgcgcgaggtatacctaagcgcattgtgtgcgtcttcgggaaaaggcgaaaactactcgcagtcccacgtggatttcattttttcccctttacctactcttagggtgcgtggtaggcatcattatccaccttagctgcccttcttttgggttttctgtaaaactggaaaaacgagaagaaactgttgcacttcaaatttagttgttttgttttgttttttggagacggagtttcgctcttgttgcccagactggagtgcaatggcatgatctccgctcaccgcaacgtccgcctcccgggttcaagcaattctcctgcctcagcctcccgagtagctgggattgcaggcatgcgccaccacgcccggctaattttgtgtgtttagtagaggggtttcttcatgttggtcaggctggtctcgaactcccgacctcaggtgatccacccgccttggcctcccaaggtgttgggattacagaagtgagccaccgtgcccggcctttttttttttttttttttttaagatggagtttaacttttgtcgcccaggctgaattgcaacggggcgatctcggcttactgcaaccttcacctcctggactcaagcgattctcatgtctcagcctcccgcgtagctgggattacaggctcctgccactacgcacggctaatttttgtatttttagtagagacggggtttcaccatgttggccaggctggtctcgaactcctgagatccacccgcctcggcctcccaaagtgctgggattacaag

SEQ ID NO: 1562781 - DNA, 4001 bp, Homo sapiens
gtctctgcttgtctgtggatggagacccaggaagctggtgacattggctgctccggggagggaaagcaggtggctggggacagggtgggaggaagaactgtcactgtattcccgtttgtgtctttttaaattttagaaccgtatgaatgtattacctgtgggaaaatgcacatgaaaagttttaaaattaatgtgtacacatgcatattttccagagaaggcattcataaggttgtgtggccgggcgcggtggctcacgcctgtaatcccagcactttgggaggccgaggcgggcggatcacgaggtcaggagatcgagaccatcctggctaacatggtgaaaccccatctctattaaaattcaaaaaattagccaggcgtggtggcgggcacctgtagtcccagctactcgggaggctgaggaaggagaatggtgtgaacccggtagacggagcttgcagtgagctgagattgcaccactgcactccagcctgggtgacagagcaagactccatcaaaaaaaaaaaaaaaaaaggactgtcaccccgaaagtctgagaacacttcacctatgggctgcgtggctttgggaaaatttcttaacctctctgagtcacatctgtaaaatgggaaggaataacacccagtgaacaggcatgctgccaaggcgaacagtgtgggcaggggtttgtaaactgtaaagtgcagaagcctttctttctttttttattttttgaggcagggtctcgctgtcacccaggctggagtgcagtggcactatcacagctcactgtagccttgacttcccaggctcaagcgatcctcccaccccagcctctcgaatagctgggacttgaggtgtgtgctgccatccctggcttattttttaattttttgtagagacagggcctccctatgttacccaggctgatcttaaactcctgggctcaagtgatcctcctgtctcagcctctcacagtgttggcatgagccaccgtgcccggcctgcagcccttcttgaagggcatgacttactctccactcttcctcacctcctagtctcccctcagccccctccagagctcctctgtgcccccttccctctcagcagctctgatggaggctctggactggccctcgttttcctccttgagtcctccaggcctgagggtccctctccaggtcgccccttgctctcctgcctctggcctctccatgacccacaccgtgcagtgcccagctccgccatcccacctcccttctcttctccccagtcctgtgatctcatccagtcctgtggcttaaaataccacctagcctgcgcctccctcccaggcagctacaagcccacttggctcctgctccctgtgtctgctggacagtgaagaggcatcgcgaacccggcactgccaagcccaagccatgcccccgtcctcccctctcctgccttccccatctcagtctgtgactcctcccaggaggtcgctcaggcctgacacctaggcatcatcctccagccctccctaagcccaaccgcaataacaatgggttaataactaacatgcacttagtgttcactgagggccatgcactgactggtccacacctgcaaggcaggtgctgtcatcatcatcccacagtgggcttgggagcttgcccaaagcgggtgaacctcggggccccggacacgtcccctcacctagtcatccaccccaaagagccacatcactattgcagcccacagtctctgcccaccacctcctcccacagcctccacccacctcccgcagtccatctccacatcactccctgctcagagctctcgtctccccagggcactcgggatgaacgccccgcctcagagaggtcctgccctctctgactgcaccccctccactctccaaccacgggaagagaccttccttcccgtccctttaacgcaccaagtttattcctgtctctgggcctttgcactggctgttctttctggttgaaattctcttctccaagactccaccgcttgtgccttcctaccattcaggtcttgattcaaaggctgcctgttccaagaggccccgaggccctccctcccatccagctctcagatcttcctggcagcccttagcagtcaaaccagtctcatctgcaacatcattacaggcaggaaccttgcctccctacttcaccccgactcccagagcctggcatagagtagctgcttcataaatatctaacgactgacaaacaagataacccagcccgtcaaaattcccggaaagggtctaactgggtcatgtgacacattgtgaccaaggagaagctatttttgacacggtagtcagggagaacttcccagcggaggtggcctctgagcagtgaccaggagaccctctgtgtcactgtacatgagcacaatggccatgagcagaggggacagaggacaggatgtcagagggctcatgcctctgcctcaccctccacggagcatgggcttctcttcccaggtgtcccccaggtgtcaggggctcgggggaggatgtcctggcctcacccagggatgggtggcagggacatgtgtacaggacctagtgggagagggcatgggagacaggcctcagaaggaccagagacagcaggaggaacagtcagcccctgcccatgactcaatgctgggccacagccccaagggactgtcactgacagaacgcctgccatggggggggccacgggctgcatgcccctctttactgctgaccaccttcccactggctcctcaggccagagaatctccaactccagccgacccccatccatccatccattcattcatcaccctaaatgtcccctgagctggaacagcatctgccttcctgccaggtgccagatgtgtctcaacacagcgcagtgccttgccttggagggcggtctgtaaataattgagtgaacatttattgagcacctactgtatgctgaagggaagcaggtaagtcacaaaccggctttgctgagctccgtgcacgcatgtgtgcgtgcatgcgtgtgtgtgcgtgtgtgtgtgtgaaagggcataaagagaaggtcctaggaagatgagggcaagcaggagggcacaaggacagagcagggctgggcctgggctgagcggaaagcagggaatttggcccggcctgggatctaggccctggggagaggtggtggctctggaggagcatgggtgcctggacctgggtggtccactgagcaagggacaggcggctacttctgagggcaggacagcagcatcctggaagttgtggcacctatgtctttaggaaccaaacatccagggaaatcggaacctgagcatcagaacctctatcagggcgcctcctggatttctacacaggacagtagctttcaagttttttgaccaaaatccgtagtaaaagcaaacatcctgtttgttattttaacttactttatatttattttttagagacagagtcttgctccaatgcccaggctggagtgcagtgatgcgatcacagctcaattgcaacctcctgggttcttgccatcctcccgcctcggcctcccaacgtgctgggattacaggcgtgagccactgcacccggctatatatttaaagctgaagtaagagcgtcacaaaataatatttaccctcactacatgcatagtattttgaaattttctttttaatttcattttcggaaaacaagtagtgcaactcactaagtcaatttcccaacccactaacggggcaggacctgtgtgcaattttaaagcactggcctgagtgggggttaggagcggtgaaatgggatccggcgtgtgtcttgaagctgtgacgggcggtgcttggactccgggctttgtgacacacaaccatgtggggaattgttggatgttatgggggaatactgggaaaagtctgttagaccccccagctcacaggaccgccactctgcagcccaaataacagggactctttggggtctggtt

SEQ ID NO: 1562782 - DNA, 4001 bp, Homo sapiens
cgcacgcggctttcacagacctgacacagtctggaaactgctcaacaccctgatgaagtcagtatcatcatacctattctccagttgaagaaactgaggttcagagaggtcaagccacccacccaaggtcacccagcagaaactcaaccagctctgcctggtcacagccactccagaggattttctgagagaagagctttcttttcaaggataacccaaagggccatgaggaattgtaccccagattccccctctaatcctggacactcctccttcgtcagctatttccgccatattcccactgccccacgcccacctccacccactagctgttcatctctcttaaggtaaagtgagtctttactcccatctccccagtgctttccccagcctgtgaacagcccactgctcattgagcccagggcccgccttggaggtcactggggcagggagtgacgtccccatgccacagatgtggaagatgacggttgggaggagagtgaccagcccagggggctgctctcccagccacctgagctaatttctgggaggctgaatggaggacatatgagacccactgcccagtgtggaacaccccagaaagagtccctcctcccagtgagaatggagtggaatgttctaggctcagcccttccaactccagttgggatatgggtcagttcagtggccaacagtctctgttcccaccatgctgcacccatctcttaccccagctgccctggtccaccttttgctcccctcagcacaggccaagccagggccacagtgaggctcttgggcccctaaagtcctgctaactgcccccaaaaggcctgaagccatggaggtcatgggactggatgtgggggagaacacacacacacacggctccaacccttctctgggcctccctccctgagttccccacttcccccaaacctgctgctgaacattctactgctcttgaggccctgctctgtcagctggccaggctgccctgcctctagcccgccgctccaccccacccagcttgccacctcccaactccctgcatcctgtccatcctgaagcagggacactgggggcagaaatgtgggtagggggcagggaggctgacactggtggggggacatttggcaggttgcaggggaagttctccctgcgggaggctcattgagacctctcttgccttggggtgctccctacacacggaggaaaaagcagcctctgcctccctccccagcctgtgtctatcactgtgaacgtgcagtgcctcctctaccaatccctgcccctgcgccctggggtcgtgtggcgccaagtaggtgctcaaaacatgagaagtgagatttcgttcttcagatcacagggccatttgcaacgaggatgcagctggggaggcggaaaggcggcatcccccaccttgccacaagtcacctgccttgaagctccccggcatgacaactggggtgggtggaggcagggaaaggtcatggctggggcaggaggtcaagaccccttccacccacctctctccccctttccaggccacaacccagaccgcgacgctcccagacggacagacggacagagcccgcccgtggagcccgcccgctcccggggagtcacgggaccgcgcgcgcggcgccgggcagccgggacccggctccggatcaggtgcggagcgggcggggccggagcggcgggcccgggacacacagacacgcacgcggcgggacaaactgacggacagcgcccggggtgggcgagcgcggcttaccgctgggcggagggtccgacgagagtccgggaggcggcgagcgggcgctacatcccaaggcgcgatccggcgggcggcgtcccgggcgcggaaaggggagtcccggcgccccctgcccgcgaactcggccggccggcccgcgctcccctccccggctgccgctcggtctgcgcgtgggtcttggggtctccgcgcgtcccggccgtcccgcgccgctccccgcgggccgcccaactttcagcgctgccccgcgccgcgccctcggcgccgcctcggcgtcagcatcgtcgggcccggccgggctcacagcgcgggggtccgggggcccggggcgccccgccgcccgcgccccccacccccgctgcaggcgccctccccgccgccgtcccccgctgcgcccagctccctcgctgtcacccgctcctgctcgcgcgctctgcccccggccctgcgctccactcccggccccgctgcgctcggccccggccccgcgacccctcggcctcccggcctggggtcgccctccccgcccccgccggccgggctctgtcgccacctccccgaccgctctcgcgtctctctcctgccgccggggtctccgccgcgctcgcgtcccggtccctctcccggcctccctgcctcctgcggccccgctcgccctctgcccgcggggtctccgtctccgtcgcggtcgcccgccggcctccccccgcctccctctgcccgcgctgcctctctcccctgcgcgtctctgtccgtctccctcgcggcccctgtccttctctgtctctccccctcccactctccgtgcggccccctctgtctcggaccccggcccccgccttggccgcgtccccggctcgcccgggagcccgagctcccgccgcccgcggcgcgccgagaactcccaactcgcggcacgccgccccgctttgcgagactttcgcccctcctcacacgtgacccgcgccccactgcggaggccgcgcgccccccagcccgggagccccggctgcccgcgggaccccgccctgcccgcccctcggcctaacccggcctcaagccccctcccgcggggcccgcggcgcggagcaggggctggggcggggggctgctggccccgctcctgccctggatcctgcccgggttttcctcctcgccccaggagcgctcctcccagaacccgttcctggatccgctcccgggttttgtgccccccccccaaaagggggcaggtggagagggttcctccgagccgggaaggggggtgggtgggagctggtccctctggggtcccacggagtccgcccctctccttagcggtcctcgtactctcccaaagtaccgccggtcaaggacccgaagcacctcactctgggagtctgagggggccctattggagggaccctcgcgatcactcagtcaccactgccccattttacagatggcgagactgggtaccagagagggtcagaaactcggccaaggtcacccagagatgacaaagccaggccaaaccctagtctcttattctctgtcgctctccattaccccaagctgtcaggcctgggccccacactctggggtgtcagggaacccccagcacccacagcacctgtctagccagctacatcctgaccatcctgccacgtcactctagccctccgaggagacaggagggaaagtgctcctccttccagggtggtaggacgagagaacacctgcagttagacagccagcaaaacttccctgggagtctggccatcaccgactagccccattacagagagggagagaccgaggcaccccaaagccaggtggagaactgatgaaatctgaaatcccctctggctctcctgagcctcgaggatgtcagcataagaacagcaacacacaaaccaccacaagtgtttcccttcctcgtgggctctccctactcaaaaggattcagtcccaactcctcagtgtggtatagtcaggccccaccttatccggcatcccacatcccataaatccacaggtacaccctgattccacagattccagaacacgccacaggcctccacacctctctgcctgcacgcactgttcctcctcactaagatatccttccaccttttttgcccagagaattcctgctgttccccaagcccagcctcagtgccacttccttgagaaggcctcctgatgaccccagcagaagtcatttatcacccactca

SEQ ID NO: 1562783 - DNA, 4001 bp, Homo sapiens
ccccctctcctgcctccacccacagccagcactgtgccgcacaggctgccagacttagtgaacagtcacccgctccacccacttacaagccctcaccaggcagaatttgagatactggatcagccagagaaagagagacagagctctccccatgcctgtcaacactgcattcctgtcaccccagcctccggatgtgaccgtccacacctggcttcctaggaggccagagagaaagggcgtcacagcccacagcagaggccacagggcctcgctgacttcctctatcccctgcacatgtgtctcttcacctccctgacagtacccagggaaagcttgagcccgtccgcttggcagagccccaggctcggcacaggcagatgcttgggaatcagccccgtccgactgggaagaggcaggaaacaaccaagcaggcagatggccgtcctggttgtccaaatggcttggggcctccacagagggccctggcaggctgcataaggtccaggccagccccctggaccaactcaccctcctcagccatgtccttgtccagcaccagcttgccatgccggaggaagttcaggatgggcccgaagtaggtggggtcacggtcaatgaggtaggccccggtctcatcctatggaggtgagggatgctcggtgagagaagagtgaggcttctccccagccaaccccgcacacgcacagggagggaaggagagtggagggagagctcttccctggatggagcaggcacaaagtagcaaaaaggcactggggtcagatggacctgagttcaagccctgcttctgactcttcctgaatgtgtgaccttaggctaatgatttggcctctttgaaactcactcctctccccctaatcagggtttgctgtgagcatccggtgagaggatgtctgagtggcaactggcccagcacagggctcgaagaatgtccctctgagaggctgtcccctgaagccagccccactgtcgcccccaggtccctaggctttcaggggatgtttacaagtttccaaaggagtcactatctcactggacactcgggcgggcagggaggcagggtgggcttccatgcgactctacagagagatcggagacattgagaggtgaggcgacttgccaaaggccacagcatcggagggtcacggatgggggacaggagaccttagaggtcatcttcagaccagcccttcgtgttacagatgaggaaggaggctgagcgcagtgcagggaagggtccgactcaaggtcgcggcaggcagtgtgcagcagagtcagggtgggtgctcagaaatagtgcccgctgggccaacgctccttctagattcagcccgctcagaaggcgccccagggctcctccatccagctagctccctgcacccctccgccacccacatcccaaagagcgggagaagtagcctcgtcgactccttccccagagcaggagtcccctttgggagggaggaaaggtcccaggtctctccctgtccacagccccaaaggagaaggagaggccccgatccggggcggctggagagcttctaatggccgcggcctgcgtcgtcccgttgccacggcaatgggtacatccctcactaccagacccacctccccctcccctcctcctgccgcttcttcccgcctccagttcctcggaaatgaacccggccgggtccccagcctggcgggcgagccaggcccgacagccccgcgtcgggcgagcggaggacccaccgcccgctcgccgcccaccccgggggcctcacccggtccgactgcagctcttccccctggcacaggcggctgaggaaggacttctgctcgcggcacagcgtctgccgggtggtcaggaacaccgtgccccccacgttgagccgcacccacttgccccagccgcctgcggcgcggccgcccgcccccgccggcggcgctgcctccccggcctccatcctcatcgccggccgcggcgtctgcatcctcctcccgggcgctgggggcgggcggggaccgcacgcggggcaggccgggagctgtagtccgcgcctcctggctccgcgtgggccgcgggtagggtcccgccccgcgctgctcccgcccccggtcccgccccgcttcgcccttccccgcaggcccgcagtctggggtggtgaagatgccctctggccaaatcactgtgtatggggaaggtcgaactcccggcctctgggaaaagaatgagggcttccccaaatctgcagtcatcccatgggtccgagcattcttgtttttcctttgtgccgtctccgtcgtccaacagctgataagggaagaaactttcccctccaggaatccccatagcattgacccgcatgtgtttcgtcatattttttcatttgccctttgtgtgtataggggtgggggcggggtgggtgggagtgggttctttccctcacctgagttcttggagaacgacatagctggacttgaggttggctgagcacctgtatgccagacactttgtgtatatgtgttatgaatttaagctctcagcagccctgtgagtctggtattttgggctatacccattttacagatgaagccacagaagcgaagtgaccgccctactcacattgctggtgagtgagtacccaccaaggtctctttcctgctccctgaccatggaatgtcagggatccttgggaaagacttctaaggaggaagagtagagcacgccctggatccgagtcaggagaactgagtttccattctggcttttggcctttctcagtttttccacgtcctccctaagaaggaggagggattggttctgcgggtggctttctgagttattccccagttaactcggaggggaaccgtcattctgtggacctcaggatgggggaagggagcagttcctcatgtggtccgggaccagggagggacaagggctgacgaggaagctgtctccttagcttcctctccttactggtttcagtcctggtcctggcctatgggggagaggtctggggctcctctcactgatccaatgtcacacgcagctggcccgaacactgggcagcctggccctgtgctgggagaagtttccctgttaccacccaatgccctgctttctgcataaagcttttctccttggcagggagtggatcaaaggtgtactggaatcctgctacttaaaattcactaggtgtgtcctgagcaacttcctctctgagattggctttctctcttgccaaatgggatttacaacagttgtgaccccagagcattgctgtgaagattaagttatgaaatgtctataaacatctagcgtaggctgggtgcggtggctcacacctgtaatcccagcactttgggaggccaaggctcgcttgagcatagaagttcaagaccagcctggacagcatagtgagacccctatctctctctctctctctctctctctctctctctctctctttttcttttttgagatacagtctcactctctcacccagactggagtgcagtggcaccatctcagctcactgcaacctctgccttctgggttcaagcaattctcatgcctcagcctcctgagtagctgggatgacaggcatgcaccaccacgcctggctaatttttgtatttttagtagagatagggtttcaccacgttggccaggctggttttgaactcctgagctcaagtgatcctcctactttggcctcccaaagtgctgggattacaggtgcgagccactgcgcctggcccccatctctattttaaaaaaataaaacgatagaaaaccaaaaaacagccggtggctcacgcctgtaatcctagcattttgggaggccgaggcaggcagatcacaaggtcaggagttcgagaccagcctggccaacatggtgaaaccccttctctactaaaaatacaaaaattagccgggcatggtggctcacgcctgtagttccagctactcaggaagctaaggcaggaga

SEQ ID NO: 1562784 - DNA, 4001 bp, Homo sapiens
gaatcacctgaggtcaggcgttcaagaccagcctggccaacatggcgaaaccccgtctctactaaaaatacaaaaattagccgggtgtggtggtgcgtgcctgtaatcccagctactcaggaggctgaggcaggagaatcgcttgaacctgggaggtggaggttgcagtgagccgagatcacaccacagtacttcagcttcagggacaaagcgaaactctgttaaaaaataaaaataaaaaataaataaaagaaagtcagctccaccagggctgggcctctgctgtccgggctgtattctaggtgcccagcagtgtctggcagacagcggccaggtaccagtgtcccctcttggtcatggttgctcactccgtgcagggccttctgcaaaagtgcaggaagaggttggagctgattctcccctcaccagggcctgctgctccgggtcccccactcagcattcctggccacctcccctgaggaagaacctgaactgtctctgtacctgtctctccagagaccccaaacccaaatggcctccaggcctagaaccactccctccacaccgtactgttgctcatgtctgcaccaacccccaccctgccaggcctccccctgctctgtgccttttctctcaaagcttgcaaagcaacctgttcaggcccccttccaggccccttcccggctcccaaaccatgaagggctccccagacccaactccctggcctggcagaaaaggccctttcacatctggaccagcctccctcctggactcatctccctccagaccaccccaaatctggctgcccacccttcccgggggatgcccggtgcttggtgacctccatgcctcttcatccccggagccctccacagcacacacttcctggattgacacctgctcgtcctccgggaccagcacggagctgctccttccacagggccttcggggcccactctcagccttctcagcctcctcagccccacgaggagcctgagctcactcctgcctctgcacacccagtgccaggcacagggagggcaccacgaggatgccggtggacaaagatggctggaggaggctctggcagcctttcgtggctctggatctgttggcgaccgcgagtccagcctccaagcttctccaaacccccagcagggcagccagaatgcaaacaggggacccctccagccttccccggcttccgtttagaggcagctccatacccgcctgagcccggctggtgccctcctgccacatcacagccaccggtgccacacatgcaggcaggggagggacgagggctcactttggggggcggggtggggtctgggaaggggcagggaagagaagaccttgagaatcgtgggccgttcctgagtgcatatctgcttctccccacagtcgatggtggaaggaacaatgggtgtaactggtgggagggaggggttgtcacctcccttataaccccctcttccaaccagcagtgacactgccaacctgagggggcgtctgtgcaggaacaaacccacccgcctcccatcatctcgaggggtcctcctcctctgattttatacaactttacattgtttttggaagtggagctccgcaaagtttcaaggacccccacgccggagtccccaccctgagcagacacctggagcgccctgccctgcacgcaggggcatgaggctggccagagagggggtcccgcacctccctgccaggcgcccctcacccttgcagcacttggacctccagatcttccccagcagcaagatcatggccaggaggtggctcaggtcgccgaggattcggaacacgttcatggtccagccagtcagtcgtgcgcccgcgcccagcaaacttctaggaaactttctggcgggcagggcggctgccacgtctccggccccggtctctaggtgccccagagccctgcctgcgcctcacagctccgcgatcgcacccgcgcgccgccgcccacgcactcttggccgggcggtgacgtggccagggcggccgccggcgcagggtggggagccaggaagcggcgcggcccggagatcccgcctcccgcccatcccagcgcccggctcccggactgggcggcccggcgacgcgggggggcttctggcctgcgcccggctgccgtgtgcgccgggtgcccgccacgacccatgtcgcccatgccccaagtgccctctgccttccctccgcagaaactggaggcctgccaccaagccccaatctctgcctcagtttcctcatctgtacacaggccccataacactggtgccagcgcttggcaggagccagcacgtggaagtaccctgtggggcgattcctgctattgtcctcatcttcccggagctggagctccctccctgggagagtggggtggggcggggcgagccggaagcggagtccccacctccgtctgttaatttggttgtccacccggtcgggacccgatcttgctgcaggtggacaatggtaatggcacaccactcagcagcagaatcagactgacctcggctgcagcctgggtcggtgggccttcctctctcttggtctcaattttctcacctgtaaaatcgggttgttgtgggtaggcaggaggtcaagctggtcagggagatccagggccctcgttcgtgccttccctcttcttggtgttactaggatgttaaacagggacacacaggacaggagagacccaggagggctgagcaccaggaagggtggggagtgaagggtccctggtgggagggagtcctcccagggctgtgtggtctgagcaggtccaccaccccctctggatataagtctctgcgtctgaaagagtggaccaggtgagctgagggcccttagcctcccctccttgacctgaataagccctcctcccattcagcgccctcatctctctctaaataacggacctcctcccactcccacctcctgccacagataaccagagaggcttttccatgacaaatgtatttaaacagagatggggtctcactgtgttgcccaggctagtctcgaactcttgtgctcaggccatctgcctgcctcagccttccaaatgctgggattacaggcataagccactatggccagcctcttttctgtgataaaaatctgtcacttcagtggtcaagacccttctatggctccctatgccccctactttccctacttttcctcccagggaaaggcagtccttttttttttgagacagagtctcgctctgtggcccaggctggggtgcagtggcacaatctctgctcactgcaatctctgcctccctggttcaggcgattctcatgcctcagcctcccaagtagctgggattacaggcgcccgccaccacgccaggctaatttttgtattcttagtagagatggggtttcaccatgttggccaggctggtctcgaactcctgacctcagatgatttgcctgcctcagcctcccaaagtgcggggattacaggcgtgaaccaccgcgcccagccaaggcagtcctttgagaccccaaacgcagtccaaagaccagcagcattgctaccgcttgttgggaatgcagaatctcagcccctccccaggcattcccgggtgaatcagactccgatgtgcacacgaatcccctggggatcgtgtttaactgtaaagttccaaaggcactcatctaaacagcactgtgaggaagcagtggcctcattctcatttcacacatggggaaagcgaggcagggaggctaaataacttgcttgaggtcacacagacaccaagcagtcctgtagcccagattccaacacacggtctaccatgaaatcattcccttacactgtgggttgccatggcaggtgatgagcaccctgtcgcgagaggtgggtgagcggccggtggacgctcatttgtcagagactcagcagcaggccctcctgccctggcagggaggtggtgaccccaatagccgtcaagtactgagcatctg

SEQ ID NO: 1562785 - DNA, 4001 bp, Homo sapiens
ctggggatattcagggagtggagggcaggctctgaggtcaggctggcagagggtcagtcccggctatgctgctatgctgcttcctcattggttgtccctgggcaggctctctctctctctctctctctctctcaccctcaggctcttcatcgctgatatggagataatactgctccctggcaaagtcagcattgtgtcaggattaaatttgcagcatgagtaaagcacccggcacatagtaagtgctcagtaaatgctaggtgccattttcactgttcactgttcttctgggaatggccctgcagcctccttgcgggaggggctgcctagaagaggagagaaggtgctcacaggtaaaggtggtcagaggacaataggtgtgtgtggacaggggagtggggagggactgcttgaagctgctgagcaaacagggccaagtgacctgcagcagatggtccttcagatgcatcccagctcagatattcggtgccagctgacaggtgggcctgccacggtggcacacagtaggtgctcaatgaatgtttgcagaatgaatgaataagcacgctccaacttctgctcaaaagtaaatcttgacaccttttcagaaagaaaccattgaaaccttgtcaaccattgaagttcttgtccatttcacttcataagcaccccccaccccacccctgcatgaggaaaggctcgcctgggcaggctaggctggggcctgctcactgggaagcctcccatgctaagcctgcctcctacaaaagggattcaaatttacttcctctctccactccagcctccagggtgtggcctgctgaggggccctgaatgcctgggactgccatgtccctgcagctgtgtgaccttagggggatgcacttgttctctgggactcagtttccccaacggtgaatgaaggggtgaatctggaaggctgacattccgtactcagcaatgctgtcaccccctcagaaatccccagcctagcctgggggtggggtggggggtggctgacaatgtggtatgaagtcattccctgcacggaggagggaggggtcttttccatggagaaaatgacgaacctgagacgacaaaagagggggcttctcctgggcttcagtctgggcatgatccatcagtaatggattacctcactggctgggagaccccacccacacctgcagtcccaggcccttccaaacaatacgaggcacccccatcccacgccccccagcagatccatgacttaaagcccagaatcacaccgagaggcagcaggccctgcccctcagccaagcgggcgggttcggggggccattgcccaacaggtccctggatacagctaagggatgagaggggccggtgggtgcggaaagacaaaggcttcgggtagcaggagacagtggccagggcacgctcgcagcgaggtccacccagagcccaacgagggcccgaccctgccgcgctgggctaagggtgtacccagatcccacgcccacactccctaccgcggtgctgagggcccggggcgggcttcctggagaaggaagaagacccgcagagacacgaagaagaaggaggaagatgagacagacacccggacggactgacagggggagacgccgaatgagacccgggcacaggggtgcggggcgctcgtcggacggaaagcagagacagacccagatgcagggacggtggggggggggccatggaggaagacagggtacccaggcagacccagagaccacgacacccgcgcagagacagagatgcgcggggcgcacagaaacacggacgcgcagaggcggccccggagacgctcacctctcccggcccggcctcgcccccgggtcccactcaccgaggccgcagacctcgcggcgcaggctaagacggccgcgctcctccgctatggcacgcagcatgtgctgcagcgagcgctcctcggcctcggcgccgcccgcaggctcgggggcggcggcggcggggagggcgggcggcccggcccgcagcccgccgcgagcaccaaggaagccacagtccgcctctgtgcgcgtcgccgtcgccgccgccgccgccaccacccgccaaacacagcaccggcgagcgcacctccgcgccgccgccgcccgcgcgcccccggctccgctcgccccgccccggcccggcccggccccggtccggccccgccccttccccgccccggccccgcccctgtcccctcccgccccgcctctgaacggcccggacccaccccggctccctggccccgccccctgacctcccttgccccgcccacttccaaacggccagtctccgccaatcttcggatgcccaggacagcctccctcaaaccgctcgcggggtcccgcctccacccaaggtcctaaacgccccaccaacgggatcacgcctctgagcccctcccgccgccccttcagggcacctctcccctcccccgctgctaccccacgggatgtgtactttgtcacccgccctgtgcgttgccacctccaccaagtcccctcggctgacttctgggaacttcctccgcagaacccctcaagaggtcacctgctcccagaaggtggtctcctgggggacaccgtggcaaagcccttccggcccccctcctctgcacctggcacagtgcagagtgttgcgcctccatttcctcagctgcaccatgggggacctttccctgccttgcctccccaacatgggggagtgttgatgaagggggaggtatgaggttagctgggcgtgtcatcctgatgaagccaggtctggccagcatccctccgtgtgctagttgtggctgatacaggaagacaccggagaagcagccagtggcctccccaaacctcacgcctggtggtccatttccaagaacagggggagatggagagaccagcattgatttccaggtctctccaaagctaaatctacatcactccctgcattcacagcctgtgtgtggaccccagacccatcaaggtccccctttcccctgtctggagtcctcttctccccattcctgtgtaacttgcttcctttgtgtcccgagtgtcacatcctcaaagaaactcccctgaccgccttccctccctctctcttcccttagtctgtttctccttcacagggtgacacttacctcctcccgacacattggatacctatgggttcacttgttctcttctctaccgagggaggggcctgtctactacacagctgttgtctcagtacccagaacattgcctggcacacattagatgcccaataaatagatatgggctgcaggctgggcacagtggctcatgcctgtaatcccaacactttgggaggccgaggtaggtggattgcctgaggttaggagttccagaacagcctggctaaaatggtgaaaccccatctctactaaaaatacaaaaattagccgggcatggtagcacacatttgtaatcccagctactctggaggctgaggcaggagaattgcttgaacctgggaggcggaggctgcagtgagccgagatcccgccactgcactccaagctgggagacagagcaagaccctgtccccccccaaaaaaaaagaaaagaaaagaaaaaaaaatgtaggctgcataaacgaagaatgatggagaggtctgatggggacgcaggggtcttcctgggaggcacagcaggaaggagccgtggggttgggcagagccccagaagggagatgggatctggatcctgcttcaggcctctgccccagttttgtgccactggcccctgaactcttcagagcagagccacatctgacccctctgtgtccccagtgccaggcccaggagggctctgtagaaaggtgagcagtgagggaatgaaggaagtgcgcgaccagcctcacgtgtatttctcttctccagtgggcctgcatccctgtctgtaaagtgaggacactggcatgagggctgaggcctctggttctgcgtctggagagct

SEQ ID NO: 1562786 - DNA, 4001 bp, Homo sapiens
accccaaacatcccagcctcccaggtgtccagaatgggagggccctcacctttcggggcacctgccctgatccccttttaccccagagaggagatgacctggcagtgtcatatggtaaaccagggaaaaacaagactggccttgaaagctggtctctcgattgtacacccagacagggcgggcgtggcagcaggttctgaggagccctgagccagctccagaaggttcttactcggggatcccatcaccagtcaggcctcctcttcatccctcccagaaagcattccctgcctgcccgagtgtggctctagtccctgcacaccctgcctgcccgagtgtggctctagtccctgcacacccgccactgaaactgctgcgccaaggccgccacccctccctggtaccgaatccaatgggcccttcagacactgcaccccactggctgcacccacgtctccagacctcccctcttggggtgccctcccctctcctggctcttcccccacctctctggccagttgttcatggtctcctgctggtccctccaaagtggggctagctcagggctcggggccagcatgcaggcacccaggcccttccacttgcagaaaatccatcccgcgtgtgttcaggctcagaaaatgggcccaaggcaagaccaggctccaagtaatccctgcatgagcctctgccagcaaaccatggccccggagttacagagccaggcaggctgcaagttccagacctagctacacggccctctcatttcttgtttttgaaggaaaacaaaagcgtttccatgtctggcatatggagttgattaaacattttacgaacagcaaaagcttgtgaaaaacagagaaggaagcatgcaaaatgtattttattagctcctcccacactgcgatttagtggatgaaatacgttaggcgaatcacttcatctccgagccctccgtttcctcatctgtaaaaggggtaagaacacccaccctgtcgagttgttgggacttcacaaggaggctaagaagaagagagctcagcactgtgtctagatgatggcgagggctcagtaagtggaaggcaccgtcatcatcaccaccactgagtcaggtcaccctgccatggccaagggagggccctgggctctggagtccgacctttgctctaccatctactgactaattataagaggccagccgagttagctgtctctgatctgtttcctcaaagctacgacggtgacggcaatcactgcccttcagggtcacagtgaagatgaatgacaatgtgtacagacacccagcacatccagatttgcacatgagactgtctacacagttcctggaatacagtaggtgctcaataaatatcactcaccctctttgatatgcatgagcactgtaggaaagcccacatgtacaccgagagcagacaccacagggatgcttggggcacagacgcaggggcaggggccgggggtcactcaccttcctcccgtctgcaccgctttcgctgccggagtacgccagcttccggcgcacatagaaaagcatgtcgtcctgccggggagcccatttctccatgaagtaggtggagaacatccaagtccagaagacgatgcggtcatccttgaagcaccctgcagagggaggccagacaggagtgaggaaggacggccaccctggcccttgcagcatggccttggccaagctgcgcccatacccccacatttctggccagaaatttgcgagggctctgagatgcgccacccttccctcaccactcccgacccccacccatggagcatccagagaggctggaggacacctcccaggaggcccagttcctccactcagcagcagcctgagagcccatgctcccagccccacagctgagcctgactccagcctggggatgaatcagcagcttcggaggaaaaggaaaatcccgaggagccaggaacgccactggctggctggtgtctgggctggaagccgggaaggcttggctgggggggagcctttggagaggcagggctctcaccaacatctctcacccccacccactccccctggctgcggcagtcccagcgggaacccgacttaaagggacagccgccctccagccagccaaggctgcaagcgggaaccgcagggagacagcacccgccccacccctgccccacgtctgcgcagcttcgtgctcatctgatcctcacagggacttctccttctattacaaatggtatttctttatgataaatatttgtaatattttcctgcaaaagagaaaaagcccacaggctttggtagggaagatctgggtttccattccagcgctgccgctggtgatgggacaatgggcgggggctctgagccacaggttcctcggggcacatgcagacaaaccgagaccacgggcacacagcaggatcaacataggtgggtctgtcccctctctagacagattcaacacttcaaaatatgcagccaagctctctcttatcaactcagtagattaaaccgggtctgcttttgttttctgtcttcctcactgaccagtgcaatctagtgctggtactcgggctggaaggcactaatcccgacacttagagatggggaacgtgagggccagtggtgccagaaccctctctcgcgctcacaggcaggccagtgggctgaccaggactcggccactagctgagtcaaatgcagaacaccccagccttggttgacgtcagccacaacactaaccaaagaaccaggactcacagccagccccagccctcggccctcagccctcagccctctgccctctgccctcagccctctgcccaacagtgtgttgctcacccactcccatgccctgcctggctcctgggctctagggcagtgagagggaggaaaagagaaggaggcttcatcggtgagggtctgggtcagcgagccttgtcagcctccaggggtgagggccaggagagcccacgggactggcaagacctcccaggctcacaggacccgggggaacgaaacacgcgtgctgtctgcagagtcgctttgaaattcctgccgcgtttttgcaacaggcaaagcccaagtcacgctactacagacccttgcaaaattaagcaaagcgctgtgattattcctggataaacttcaattcttttttacttcctctttacattgcttcacttttggttccctcttagagcccaacggaataacagaataaatttggtctttaaaaaccagcccttggctgggtgtggtggctcatgcctgtcatcccagtactttgggaggctggggtgggtggatcacctgaggtcaggagttcaagaccagcctggccaatatggtgaaaccctgtatctagtaaaaacacaaaaattagccaggcatggtggcgggtgcctgtaatcccagctactcgagaggctgaggtgggaagatcacttgaacctgggaggcaagaggttgcagtgagccgagatcgcaccattgcactccagcctgggtgacagagcaagactccatctcggaaataaataaataaataagccaggcatggtggcaggcgcctgtagtcccagctactctagaggctaaggcaggagaatcacttgagcccgggaggcagaggttgcagtgaaccaagatcgtgccactgcactccagcctgggcaacagaacgagactctgtctcaacaaacaaacaaacaaacaaaacagcccttaagaaaactgccagattctcacagagttatacatatacttacaaaaccagccactagccactcctaggtacctgcccaagagaaatgaagcacatgtccacagagactggtacacaaatgttcacagcatctttattcgtaacggccacaaactggaaaccaggagaatgcacacatgtcacaataaaaacaaactagtgatccacactacactgtggataaacctcaaacttgtcctgcagagcaaaagaagtcaggcg

SEQ ID NO: 1562787 - DNA, 4001 bp, Homo sapiens
ttcaagggtgggaaattttgtgcctctgcatcgccccaccatgctttgcacacagtaggtgctgaataaatgtctgccggccatagagtaggaactccattagcactcgttggcctggtttgttttattgcaaagagcaaacttccagatgggaacagcagagatccaggcaggagatctccttcaactgagacatggcctcaacttttacggccaccaccgggagtgaccttgggccatcagccctgggtggaagtcccttattttagcctagaaacccaactccagggctccagtgggacaggtccccctaagtccaggggagctgaggtgggccggctcacaccccctgggccctcactgtctccctaccaggcgggcataccacttgctccatggggctgctctcagggtcagggccacgaggagaagcacactgccacgaagggtgctggcctgggtgctggaattgggaaggcacgcaggtgacctccaacgtggaaacctctcctatctccccagatccctccctcagtggataaccattccagtgtatccctaataaggctcttgtccctcactgacacctttccctgctgaatccaccatgccccagccagctgggctctgagtccaagttacaaactcagctgtttcaatggttcccccttttgagcccctggcctgggccagttctgcacccatcaaagttctctgcatgtgctactgtctcgaatgttggaagtaggcaccactgtgatcccattttacagatgaggaagctgaggcctggggaaagggggacttgagcgagaacacacagctgaaaggggcttagctggaaaccccaaccctgctgaaggccctagatgccccactgtcctccagggggccacactgggtcacagggcgaggggctcaggccagactcagtttcctcccctattaaagggagagcttggccgagacaatcatgggccttcttcagctcaacaaccctttgtttctctctgtcctcctgagttatttggttgcaccatggagataaaacaacccctggaaatcccagaggcatttttttcccactggagaaacacaaaaatatcacatgaagaatgaatcacttaaagtgtcagggcaggaagaggaaagacaggcatggcgctcgcctcggggtgggggtggctctgggtttctcttcagctccctcagcctccctggtccccagaaccccttcctcactggagtgaagagaagccaaagccctaagcctcagtttcccaatctgtaaatggggacaacaaacctgccttgaaggcgtattcggaggggccaatgcattcatttgttcgttcattcattcattcattcatctattcacttatttcgtaccggtgtgatgctggactgggactgcagactctgaagtgggtcgaacagacccacctcacccccgtgaagccaaccaaatgccctccaggccatgactagggcatcctgagagcactccctaggccatgccggaccctcccccgagcctttggccttctctccaacccctctctatgcaaggctcttgacacaaggacactgaggcacagagacggtcagcaacttgctcaaggtcacacagcaggtaggtagtagcaccagcatctgtgcacccccacagggctcccacccctctagatcagagcctgctccccatcttgccccactggcatagccgtcaccccggcccctcccattcttctgtgactaggagtcacttagcagccttgcctggcttctcccttagacccagtgcttagccagggcagggaccccagggtcagcgtgaaggaacagaggtgcccctgcacagtgaggacctggaaacctccacaggctgctccttacctgccgagccctgtgactgagggatcagaagccccctccgctggctgcggtctccctgcagctgctggcctcttccccggctcctggttgccaccaaccttaaaccccaataaaaggagagcaacttggtcgagccttgtataggcaaaagagtgttttccagcgcaggctggcctctgtgtgctgacaagaattcagtgtgctcctcagggcggggagtggggctagggcgctgagtcagccctgcaggagtccagctcccgcctgggcctagggccgccacctcccaggcccaggatggcagcggctgctcccgcagtccccacgcactccagcctctggtcttacagccttgtgcatcctcagagcaccagcaagagccccattttacaggtgagcaaactagagacactccctgtgagatcccacagctagaagcagcaggggcttagacccagggcaccgggctccaggtccgcacctcagcagatgcttggcacaatacatgtgggttccctcccgtggccctcagtctctgttgggcaatggaggtcagtggcaccactgcacaagcccctctggccagcatggcccggggaggggtgtgggtaaaacaaacggtccccacaccagcccggggaggaagggtagctgggacccgagagcccacagagggtgtgtggcacctgcctgactccaagctgggctgatcttcctgctgttgcccccctacccctggcctgtccccacccagcagcagagggtcctccctgccagtaggaatggggtggggatggggcaggaacagggcgggggatgcccacacctgccactgttcgaaacacatcagtggcttccatgactgtctggacacagcccaggggcctggctggcctctgcagccacacttcctgggtgccaggcacccccccagcccatggccgtctcccacccctgggccttcgtgcatcgtggtaccttggcggcgcccttggctggcttctgggtggcatttaaacgcagccataaaggaggccagccctcctctgcctcccacccatccctggaagcctgcccatcctgagccaggccagaaataaacctcctttttccattcctttcggtggacagagagcgagttcagactggtctgggtgcccctcatctaaccacggtcccaacaatggcagcccagagcgatgggtgccacgatgggaaaccagggggctatgggcgcccagagtgcctgatgcagcctgacggggtaggggccgggagtgggggtggtatttatttaatcttcatgattaggaggggctgtgattatccccaatttacagatgcggaaactgaggtacagagtttcagtaactcgtcctgggtcgcctggctggggactcagaccagggggtctggtgtggacacctgaaggatgagtcgggcggtggggcgggggtgggggtgggggagtgttcctggcagagggaacaaggcacacaaagttcctcctgcctcttgtctggggctcagcatagcagcagagaaacaaaagggctctgagcttggggtttgaacacgggttcaagtcccttgccgcttctcagctgtgtgatcctgggcatgtttctctgtctctctgagcctggactgccctgtggattttgttatagttcaaagcagacctcctgtgcaccagatctggaacacctatgacatagaaaagtatgggtccgccaatgacatttactccttgcgatccaccctacgaggcaggaattttaaaagttcacctttgacagaggttggaagcacaacaaagaccaacctgcctggcagaccggggtgagggctgcctggagggaaggtgaccccacctcagggaggccactgtgaccacatcctcttgcacagtgggtctttgcctcagcaactgtgggggaggaaaagcaccaacatcccctctcggccgaggggaccaggctctagaaagctcacagcggcgctatggaaaaacctggagacagccctggagacggcccagtggatgaataggaaaatgcatggtgttatggccaaacaccggaacactcttcagctaccca

SEQ ID NO: 1562788 - DNA, 4001 bp, Homo sapiens
tgggccactcataaaggcttaggcccaatcttaagcgttctctctctgacttcagggaagaaaggcttagctatggagacaggctgagctggaatgccatccagctcccacctccccacagtatttcacccttctgccctgcctccatgaaatgggcacataccgcccacttcactcacacactacatctgaagctgagaaaagccatgaaaattgggctccgggccccccggctggccatacccagaggagagctgcactgcctctccgcacctcacctttctcatctgagaaatggacactgccactacctcctcttgggctatgggtaaactgagggggggtgacaagtgcccagcatggagcctggttccgtcttcctcagggtgtgtgggtgggcggctgagagaggggtgtgggatgtgcctacttacaatttggtcaaatccgccgacagcggccgagcctggaacgtcctcctcctgacctcgggcttagcctctgagctctcggcagtccagcctctgatccgttcctgaacgctcacaacccctttctccggctctggtgccgccgatggggacgcaggggtggccaggggagattcagaccccactgccaaggccaaggtgctgtcctcccgaaacaggctgatgcacttcctgacactcctcctggaggcccactctccccctgccgcggcctccccatccgccactctgctcttaacctcagcaagttctaggccccttcccagcctgggtgagggggactcagcagccttctctggctctgggtccagcttggccttttcttcccagggactctggtcattgctgggggtgaccccagatgagccccccaccagggctctggggctgcccatctccggcttcgaaagcatcttctccttccgttcacggattttcttggccacctccaggaagtccaaatcaggatcatgaagaggagcctccgccttgaccaaacagtccctgtccagcttggacgctgctctgggcctctctagcccagccatatcccctgctgtgggtccacttccttcatcggccaccttcctcagcaaggcctctttgttctcaaaccgggccgtgaggtccatggacaagggcctgggcttcctcacccacgtcttctcgggaggggtgggtggcactttgcccactgtggccgctgcgccggggcctggcttctgaggctgaatggactccgtgaaaatggcagacacgggccttctcttcaggcgaggcctgggctccacaagggggcgtgccgtgtcctccacactgctggcctttgagggaggatggtcttggcctgcctcctcttggggtacaggtggttttgtgtcctgagacaggggagctgaccggggaagggtccccgcaggcttctgggtgggcagggcgggcttggcagccacctcaggccgggagccggacacacctagcttggcctcctccgccccctcactaaccgccttccccagagcggggccgcttttggtggtttcgaagagaatcatggtgctggagctgggccgcaggaacacagccttgttgaagaggggcgagctcgtcctcgggccctccccactgcccacctcctgccccaccaagccgggcatcctgttgtccagatcctttgctgctggctcctcagagagccccccagagggggaaggtccagtcgaactgggccgcagagacgggacaggagatttcacgtcctgctccttcgagaagggtttgggggcgagccttggcagagggagtaaccgggccgggctccgcagggggctcttcgcttccaagatccgggctgggggagccccagaggcttcgccggcctggaggaagtaggtcctcgtcagggtctcctccttgcccatctcacccaggcctggcacggccgtcaagggcgttatggagcccacctcgacccgcgtggccatggttatggttgtggattcatgggggttaggaacttcaagaatggagaagcaattgctaaacaaacaaaacaaacaaacaagtaaatttggaaaacagtcagtgtctgggttgaagcagaatggtttagagaaatgggacagagtcctgagccccagattccatacgacagccctctgctgacctcacccggcaggcttgggcctgcctctccccgtctctgagctctggacgaggggagtggactaaacgcccatccctgaagttcgttccagctccaagggtgtagaaaaggcatcaacactctggaggactttcccctgacagctaatctagaggccagcacttaatggcaaaaagcagtgatctctgctacacagataaggaaaccagctcagagaggccaagtaactggagtcacccaggaagcaagaggcgaagtcaggacttaaaaccaggtttgacaccaaattcacaccacacatgctcctccctgaataggcctcagtgggagcgtcctcacattccctcactcctgttaccctgttttcccactgcagagcctgcccacatcccaggtgatcctaatcacaagtgtgtgctaagcatctagcacagagaaggcaagtaacctgctgcaggtcacacagcaatgcagctcaggagtgcctgggagcacaaagctggttagtgaccttggaacccatgccctaggcaccaaccccacccaatcatccctttgtcccttttctttcccctcccccacccttccagatgccataaaaagaagccattctcatttttctcactcaacctgctttcattatttgtttgctttgtggttcttttctgttgaacacgcatattatgctgactgccttcatactcttaatagaaagagaaacgcccaacagtgaggtcttcccatgagtgagatctcgagctatgccacatgcttcttgtgttttatacatctcatcctcctcacaaccctatttagtgggtacaattaggagaccccattttgtagtagcttggggcataagcctcttgttcaccctgctatgagatctgttttcgcaaagcaggggacctcctctctcattaaccctccagcaactccaaaagtcaagaatgaaggaatgatcgttatctccctcatggagatgaagggaaagggcccagagaggtcgccagacttgcctacgatcacccagctgaaacctaacctcaagtccaccacccacttagctctgtctttttttttttttgagaccaagtttcactcttgctgcccaggctggagtgcaatggcgcgaccttggctcacagcaacttctgcctcccaggttcaagccattctcctgcctcagcttccggagtagctgggattacaggcatgtgccaccacgcccaggtaattttgtggttttagtagaggtggggtttctccatgttggccaggctggtctcgaactcctgacctcaggggatccgcccacctcagcctcccaaagtgctgagattacaggcttgagccaccacacccagcctcagctctgtctttttaaaaattattttttattcctttctggtcttaaaaagtgccaggtaagttgctgttctcgatcccccaggctctcttcatgccagtgttttcttccctgtgaaactgcccccagccagcccccacctagatggactaaaaaagtagaaggtattttagttaaacacaagcctctccacttcccttccttggggccccacactgctcccccggctctgactcactcagcagcctccaggaaagaaaggcagacagattttgatattttctcttccttacacgctcgatggtgctaacagattccatctccccaaactggagaacactgtctagacacggttagaggtagaatggagggacagatatgaagaatctgagaattggagaatttccatacacaaagatcccaaccagagttctaaggctccagaatcccacccagaatcagggccattggcctt

SEQ ID NO: 1562789 - DNA, 4001 bp, Homo sapiens
ccctgagccccggcctctcaggcccatcccaggagggtctccctggagagcagcgaagcagctttggttctctgcctgccactcagagtgaggtctgcagccggtcctcagggggcagagtcaggatgaatggactgaggaccccggtgctccccaaggggaagggctgcagctccttggcctggaactgggcagtccccccagagaccgtgaaggtggcagtgacctgggggttgaggcagtaaatggtgttgcccagggtggtgcagtgcagtggggcgggggcgggcaggggcagggaggcagccctgctccaggagccggtcactgtgttgtagcgcatcacggcggcgcccacgccccgcagcaggtcgaagcggtacaggaagccccccagtgccacgatgtcgctggaacgccggtggctggcactgtatgggcactcgtcccaagcatccttcacggggctgtacctgagcaggcggtagaagaggtgacccccggtgacgtagatgtccccacggcaggccacagcctcgtgggccacagggaaggtgcctgcggggagtggcgcgcgtggggtccaggcgtctgttcgcgggtcgtagcactccatgctgtacaggcattcgccaccgatggcatagagcagcccgtccagggccaccagcttgagctgggctcgggcctgctgcatgggccgaacctggctccagatgttggtcagagggttgtagcagaagacctcgttggagcagacggccttggcaccggagccacggatgccccccgccagaaacaggtagttgtgcatggtgcagagaccgcagccccgaagcggggcctcctcgggcacctgggtcaggggccgccaggtgttctcccgggggttgaacacatgcaggtgcgcaggtagaggcagggacacaggggccgccgcaggaggctcctcgccacgagggcccctggggagccctgagcggcccccctggtagaggctgggcagtacgaggacgcccagcaccgcccggccccggccggtccgcaggctgaggatgcgctcgcggtcggccgcgctcagccggcggtagaggcacgggtctcccagcactcgcagcaggttgtcgctcatcagcgcgtaggtctcctgcgccaggccgggctctccgtgctgctgggcaaaggccagcacgtccaggcaactgcccaggtccagccgccgccgcagggctgccgccgtggcgggctccagggcccgggagctgggcttccggggcccctccaccaccccccaacccccgggcctctgcagaaacaccatgagcttccgggcctcctcctgcttttccgtgagcgccccgctgcggccggcagggctgcccccctcccccggcgcctccccttgagggtcccccgaggcggccggcctgacctcctgctccgagctcggggcgatttcgcacctgctgcgtttccgtagctggggtaccggctgtgagcgcctcgcagaggaggaggccgcggggccaggcggcctctgcgcggggggctgtgcggggcccctgggcatcgcggcttggggcagcgggtctagacttttctccctggttccctctcctcttaggcctgggggagggtctgggctgggcgatccgttggtctcggagcttcttggctgtggctgacctccagcctcaaccaggccccctgtacctgtccctatgactgtccccactgaagaagaggggccgtgtctgtcctcagagtgtgtggaagtgctgggacccacggggctcccgggaaccgccctcgggacactcccttggggcctgtcttgcctggggaaggggtggcttctaagaaccatggcaataaggtttccccagctggctgagacctgcccctcctggtagcgcctggggagagccacactctcctgaggctttgacccgtcagctggggcaggggatgcggctggggttggggttggggctgaggtgggggctggggcaggggatgcggctggggttggggctggagttggagctgggcttagggctggggttgggactggggttagggctggggatgcggctggggttagggctggagttggagctgggcttagggctggggttgggactggggttagggctggggatgggggtgtgagggttgggactgggactggggctggggctggagttgcggctgcagctggacttggggctggggctggggttgaagttggagctgaggttggagctggggctggggctgaggtgggggatgaggttgaggtggtggctgaggttggtgctgagctgggggatgaagccagggctggggctaggactgaggctggagctgaagttaagacttgggctgaggctgaacttggggctggcgccgctctgagattttcgcccacggaaggatcctgggtaacctccaggggcaaaaagtctgaaggagaggggagagtcagggcttcaggtgggaaccccgggccgggagctgcgggcggggaggcggagcgcgggcgaggctcacggctccgggagggcgcgcggctgtggccggctgcagccggctttgcttgctccgggggccgggtgggccccaggtcagcggcaggactgttatctcgggagctgtcagccccggcctcgccggcatcgtaggcccctgtggcacccggcccttgggacgagagtgggcgaccttgaggcggactctctagccaggggcgcgtggagtctggggctgggccaaagctccgggtgcccgggacctccctgctgacccagggccagcctcctccgggggcagggacccccgaggcctccctgctccagccacccttggccccagagccttccgtctgagacccaggctgcagggcgcggggagcgggcagcgccgggagtgcgggctcctgggcgagtgggggtcctgtggggaggccgcgcgcgtgggcgtccagggcggcggccccgtccaccgcgtcccacacgctccccgcggcgcccaggcggagcgggtccagtttccgggggcggcgggctctgtctcccgagccagcgtccatccgccgccgccggccccggcctctccccatcgagcccgagggccccgcgcccgcctgccaggggccagtgtcctgttgccccgcggggcctgcggcctggcgagaggacgccctgacaccacctgtctccgcctccgcttcgctgccagggctccgaggagtgaagtggatcaggaggggggcggacatcccccctgcttcgctcctgcccaggagggcagtgcctggcctgggaggctcctttccttccgctcggggggccgcgggggtggcactgccccgttgctgtcctaatgcctctctgcgggcctcctcgacagccgtcttgagtggaagccgggccatggcggccaggcccccgcccggcgctgcagcagggacagggctctgctggccgcgtcctgggggctctggtttcccctgccctgggctctgcccctcgctgccatcactgaccttagacttcggttgcagggccagctcagctcctcctgcctgatgaggttgagccccgagggctgtggacaccggttctgccgcctcttgatcgtgcccggagccaaaccagtgtaaggccagcgctgtggcagccaccacagccagcgccaggagggccagcacagcactatcccagtcattgtcactgtcccagtcccagccccagaggggaccatctggctccaaggtgccctggatcatggttcagggctgcaatagaggcctgatggcaggctggcagtgcatgcagagcacagaggcctgggctgaggcaccggccagcgcctgccccaagggctgcccagttaaggtggaccagtcctccagggcctgggaatggtggggtctctgcttgcactcaggcctgggggtgtcagtagggcctggctgcagatatcaggagacagcgagg

SEQ ID NO: 1562790 - DNA, 4001 bp, Homo sapiens
gaagccccatctctactaaaaatacaaaaattagtggggcgtggtggcgcatgcctgttatcccagctactgggaaggctgaggaagggggaagctgaggcaggagaatcgattgaacccaggaggtggaggttgcagtgagccaagattgtgccattgcactccagcctgggcgacagagccagactttgccccccccccaaaaaaaaaagtgcaaagtaggctgggcatggtggctcatgcctgtaatcccagtgccttgggaggtccaggtaggtggagttcaagaccaccttgggcaatatagcgcgaccctttctctacaaaaaatttaaaaattaactaggcatggtggtgtacacctgtagtcctggctatctggggtgagacagcttggggttcactgcagtctcaagctcccaggttcaagtgatcctcccacctcagcttcctcagaagctggaacaacaggagctcaccactgcgcccggctaatttttcaaattttctttgtagagaagaggtttcactatatggtgtaggctagagtgcagtggtagggtcttggctcactgcagccttcatctcctgggttcaagcgattctcctacctcagcctcccgagtagctgggattacaagcacgtgtcaccacacccagctaatttttgtatttttagtagagacggggtttcaccatgttggccaggctagtctctcctgacctcaggtgatctgccagccttggcctcccaaagtgctgggattacaggcatgagccaccgcgcccgcccccagtctcatatccccaattttagtcatcacaagccaagttccccgttttgtactgttcgaagtttcagtggggagaagaaaggaagcttaatgtgccacatagctacaaactgaaggatacaagatgaatttttatgaagtgatggatggcagagtcaaaatcatttcagaggaactttcagttcggtacgattttactgagtagataccctcagccttctgtagggcccccgaacgagcagtatcccctcaaagaaactcaatccttggcagcatgaagcaaggtcggccacaaaggcaaagggggcggctgcggtagaggagagggagtgggtgctgattcccagcggggcagccttccaaagggtgcgctctggaagaatctcccagggagccgtcttggaggcactcggccccgcggagggccggagcgagggcgcccagtgaggagcccaggcggaaggtggcggtgccccgctgcccgccccagatccactcggctcggcccgcaccggatctaaaatggtcagaactggcagccgacgcttcgcgctctggtgattttgcactgacagcgcgatctccggctcctctcaggaaaccgggagagctggcaaggctgggctcctacggctgcagtccccgggcccgatcgagggaactgaggctcgtcaggccggccccaaatcgcccgcctgttgcaaggccgcccgctccagcgcggagggtcgcggccaggaaggccgcattcggacctgccgcaggcaacagggcccgcccgggtgccaggaggccggcgcgccagcagccgcgctgaggaggcctcgcaccctggcccctggccgagcgccagatcccggcccctacgcgcccgcgcccggggatcccgccggccgcgtccccgccacgtcaggccgcgggctctcctcaggtcgccgcccccgagcctccggcccgcgcccgcccccgcgcccctcggactccgcgccgctagcttgtccccggcccagcgatgcctgcttgccgcccgacccccgcgttcgctgccgcccggcccgttcggctcacgcctcgcagctgacctggtgccgccgccagccgaggccgcactcgcagctggagggaggcgggaggcgggaggcgggaggcgcgaggcgggaggctgggcgagaggagccggcggggcgggggcctgggccgtcacgtgggtgcgccgcgcaggcgccgggcgggccagacgtaggcccgggggttcccggcctggccgggtagcagcgcgggggcggccctggggcggggagacagggggcggctccactccggcgctctgcggaggacagcagcgatcgccaaggctcagtgagtccccgcactagcgcggcacctggcacttggcggggccgaaccaacgaatgagcgaatttgccgagagtcgccccgtctgaatccattgactctttccttgcctcggtcctaccctcattcctcgactcacttcctcctgcccttcctcactatctccctccccgctcatatcctccctctcctttcctcattcccttcttcactctcttctctcctctcttactccccccctctcattccctccctccttcactctctcattccttcccttcctatcttacccaccattcccttcctccctcactcattcactccctccctgtctccccctctcatcccctccctctctcattccctttccctccctccttaactctcgttctctcctccctctctcattccttccctccctgtctcatttccccccttctttccctccctccctctcctcttctcccattgcctccctccctctttgattcccttctttcctcctctcctccacttgttcccttcgtcacgcgctcattccctccctcccgcggcctgctccttccccgctccctccgcggtcggtgccgctgaccgtagcgcgccccctgcgggatatcggggagaatcgcttaacaccgccagagtgaacaggtgctagtttgtgtgcccgttcctttactgagattttgcagtaaatctaattcccagtcttaaagcctggtcccagaggtccgtgcgcgggtcttggcattcattgttctccacctcaccttcgagcaggtcccatcctccgaggcgtatccgtaatggctgcgcccagagcttggagccacagagcctcctgatgggataaggttggagtgtcccacactgtggttttgagagggactgtgaagggtggagagagtggtagggggaggatgtggctggagatggctcatggttaaaaagaaaggtggggccgggcttggtggctggcgcctgtaatcccaacactttgggaggccgagacgggcggatcacgaggtcaggagatggaaaccatcctggccaacatggtgaaaccccatctctaccaaaacacacacaaaaaaactagccggtcgtggtggcgcgcacctgtagtcccagctactcgggagcctgaggcaggagaatcgcttgaacccgggaggcagaggttgcagtgagccgagatcacgcgccactgcactccagcctggtgacagagcgagactccgtctcaaaaaaaaaaaaaaaaaaaaaaaaaaaaattggtggaaggggaatgtaaaaggaggaaaatacacggaagagaattgctgtcctggctgagtccagagagataactgagggtcccagacaaggatcaagagaacgggattggcctccagaggcagaggttccaaatgggagtgggcttcctcctagaaagactttctggaggagacccccctactgtgtaacagaggaggactttgggattaagaaaagcattccaggaagccgacagtgtcagcaaacgtggaggtgagatccttcaaagtgagtggtgtggaggtttccagaattttctgagcctgaagggaaggttggagagcagaccctgccctttggaggcttgacttagccctgagggcaccctgtagccagggtgggcagatgccaatatggtagagacgaagactgagtagggagccagccacagtgctgtggtctcaggcagggagtgaagaccagagtggagcaggctagaaacctgggaaggaagcaggttccccagtataagcccagtgatgtgtgaagaatgagcccaggagatgggtggggaagtaggcccaccctgcc

SEQ ID NO: 1562791 - DNA, 4001 bp, Homo sapiens
gtttacaacacttggagaccccagttctactaatttaaagccaagcttagccttttacagaaatgaatcagaccgaaagctcttagcattcccagggtaaatgaggtgtctagcactcgatgaactgtgaggccctataaaagtattattaaaatatgtttattgactccctcctatatgcgggtatgttacctacagtatatcatttaatcttcacaacactctgcaaagaagttatcctgtctttacagatgaggaaactgaggctcagagagctgaaggcatggcccaaagtcacccagtaagtgacaacaccaagtcctagctttttcgctaatccaagccaatgagtaaacaaagcaactctgagttttcttacaccagcaaaatcccatcctttccaacatcagtctgtgactttgggtggagaacccagaggcgggttttcctactcctgcagactggtaataaactcttcccatccctttcacaaatggcctatgctcaacacccaaacagcctgcagagaaatgcaacgccctcttgccttctcttccacttagaaaggattcggctacaaggttgcgtgtggaagttaagcaaaagccaagcttcatcctggtccagggcctcacctcgggaagacctggccttggccttggcctgggtagtgagtgacctgtctaaggtgtgggctgacccaaaacacggagctcggcgttgcaccctcaggaagagcaccctaaactcagttggggagaagtttcccatcactgcttccttttttctctcccccttctgcgccatcacctgagtcatagggaagttcaaagcggcccagcggagagagagggcacgtcccgtccgtctgggtacaaggtcgtcccaggaccctaacctgcctctagcagggcgaacaagtccatcccgttcctcgcgaggcagaagttataatgtccgccaagcgggtgcagccgaggactcgggaaaaggggctgagcgccggctcctcccgcctccgctctgctctgcgcggggaggcgccgggttccaccggtgtaggcgggaggagaggactgggggacgcgggggcgtcgcagtgaggctcagggaggggaccttggcccaggggagggatgtcgctggaggtctcggagaggggcgtatagcctcttgtagcgggggagtcgtcccggtgcaaggtgcgtcgatgaaggacttggggcgggatcccaggaggtactggggagcaggggtcgtcccggcccgggaggggtcgctggggacttggggacgggatcccaggaggtaccggggagcagggggcctcctggcccgtggggagtcgctggggattttgggacgggatcctaggaggtaccggggagcagaggacgtcccggcccgggggaagtcgctggggacttgggacgggatcccaggaggtaccggggagagggggcgtcccggcctggttggggtcgctgagggactcgggcagcgggtcccagatcccgagacagagaagatgtcccagcccggggggcgtcgcagagggtcttggaagactcaaggcggagagggcctcctgggctgaggggcgtcgctgaggagcaccgggtcctgcagccgggggacagtaccgggcccgggggcgtcgatgacgggcctgggggtagcccgggtcccaggaagggaccatcccggcctgaggggcgtcgcctaggggcgaggggaaggggcccggaaggtcctgaagcgggagggagggggctctcaggccggccggcccttgtcgcccctcgagtgggctccgctcagggcgggcggcggggggtcgctcacactcaccgggtccggggccgaggccggggctaggcgcgggccgggccgccagcgtgagcgccgcggcggagagcagggcgaggcgggcggctggcggcgccatgggccgtcagtgcggggccccggggcgcggcccggggtaaagggggcagcgcggggagccgggggcggccatgggagcaggacgcggggcccgagtgtagccccgccccggccgcccggccgccccgccccggcccgcccagctcagcgccgccaccgcccctgcagcctggggcccgcccggatccgcggagaggcccggggggcggagcccactgcgcacgcacgccccgccccggccgcgcgctgctcctgccactcacgcatcaggccccgcccatctctcgcctcacctgggccggcccagcagggccctctgtttgtcccatccaagggtaggatcagcaggtgaggggcggggcctcggcccggcctccaagtcaccaagcggtttggccgggctgaaataggccgggctcccagtgacccctgctccaccctcacttaggtcgtgacccacgcgcgagctcagctacagcggtaataattacaacagcagtttgcaaactgttttcccttgcttagctcatcgtaatggttaaaaaaagaatgctttggagagttcacatcccacttggtcacatgtaacaccttggacaggtttaaaggaaaaatagctcttacctcaatttcctcatctgttaaatggaggtgataatagctgctactcctcagagcgcttgcactaaataagaatgcctacagccgagtgcggtggctaacaactcctgtgatcccagcactttgggaggccgagacggaagaatcgcttgagcccaggattctgagaccaacctgggcaacacagcgagaccccatctctacaagaaaaaaataaataactcagtggtcccagctactcaggagactgaagcaggaggatcgcttgagccctggaggtcgggcttgcagtgagccttcttcgcaccactgcactccagcctgggtgacagagcaagaccctgtctcaaaaacaaaaacaaaaacaaaaaaaaaccaaaacgaaagcatggaagcttttacgcacgcagagtaggagttcagcaaatgttgaatttctttctccaccccaagtttgcagccacatactgacccctggttccgtatcttatcacatagccagtttcaaccagggcaactttcctgatctgtctgaggctcagccgtttgcagaataggaataataaaaggccttcagaggattcgatgagatagaagcaagtaaaacgcccaacgcaacgtccagaaatggatgagacagtactgcttatcctacagcctgggatgttagggatcagagagcgcgcggcttgcttaaactttcggccccagcgtggtaggccctttgcccgcctccccccgccccgaccccggcaaggtcttcccctgccgcacccggggtcggtcgtgggccgtcctcctcccccgccctcccgccaggcagaggggattttcctacagttcccgcctaaagcgcagcggtgacgcccggcggggcaggtccaggcggcgcgccgggcgctttcaagtccctggtcccgggcttgcaagtgcagacctgcgcccggcgcggcggcgggaacatctgcaccagtgtgcagactcgccgcacccagagcgcggctgggcgggaccggcacgccttgggtacactcgcccctgggccccctcaacccccgggcgccacccccttatccactcccagagcccgcgtacccccaaactcctttccccacccacggctgctcgcagggccgggccccaagggcgcagctacctcccacgaggcctctcgatctctgtccctctccacccacacgactcagcgctgtagcaagaagaatcttgttcagttattgttttcatgtgtcattcccgagttcaaggatcctctgggcctcttattggaacttaggggcacccaccatcccctcacccagccagcctcggtcctggggaccgccccccccacctcctgccaccggtgatccccacttttgtccagctttccccttttccacaattttgggcccttcccaccttctccaccggac

SEQ ID NO: 1562792 - DNA, 4001 bp, Homo sapiens
actgcaccactgcactccagcctgggtgacagagagcaaccctgtttcaaaaaaaaaaaaaaaaaaaaaaaaaggatttgggggagaagtaagagacgatacaggcaaagctctcagaatagtgacttgcatatagtaagtgctcaataaaggttgccaatttttactggttgaaagcataggctctgatttgcctgagtttgaatcctggctctaacatttattaactgtgtgattttgtgcgtattttatcttgctgctgtcatcattacaagagaggtaataagctttctttagagaattcttacgaagattgagataagatatgtaaaacctagttctatttccagcagtcagtaacagctctaaaagtgtgacttgctattcttattctccacatgattattctcgtttacccttgcagaaagtttgagctattccaccttatatttgcaactacacatgcaaatatgctagaaaggaagcaatttttttttttttttgagacacagtctcgctctgtcgtccaggctggagtgcagtggtgcagtggcccgatctcggctcactgcaagctccgcctcccacgttcacgccattctcccgcctcagcctcccgagtagctgggactacaggtgcctgccaccacgcccggctaatttttttgtatttttagtagagatggggtttcaccatgttagccaggatggtctcgatctcctgacctcgtgatctgcccgcctcggcctcccaaagtgctgggattacaggcgtgagccaccgcacccagcaaggaaacaattcaaatataggtacccttgtcaggcagggtgacagagaccacctatagtcccagctacttaggaggctgaggtgtaaggattgcttgagcccaagagttagaggctgcagtgcgttgtcatcacgcctgtgagtaaccactgcattccagccagggcaacataggaacaccccgtctcttaaatataaggtgcccagaaaccaaatgattaaaggatgaggcggggtgcagtggctcatgcctgtaatcccagcactttgggaggccgaggtgaagcagacagatcacctgaggtcaggagttcgagaccaatccgaccaacatggcaaaacctcgtctctactaaaaatacaaaaattagccgggtgtggtgacacatgcctgtaatcccaggaacatgggagatggagacagaattgcttgaacccgggagacggaggttgcagtgagccgagatcgcgccactgcactccagcctaggtgacagagcaagactccgtctgaaagaaaaaaaaaaaaggatgagtgggttccaggttgcagtacagtgtgaaaagcataacaggcaaagtttcagaggcggacagacttagtgccaatctccttcactttccagccggggtaacttcctggggtgtcgcaccacctctaagcctcagtggcttgaacgacaaagacgaaagaataatacatgattgctgtgagtgtactggaagataatgcacgtgaacgttacagacaaggagtgatgttcacccaactttaatctcccttcacttcccacctcatgtaacaggcctcacaagccctaaacaacacagccacgagacaagcaggataaggaagattcaggagctctcagatcctaaacctagttccctttcccccaggccagggacggctgttcctccctgaactcctcgccgaacgttggccccagcaggagaggggcaaaaagtaacgtcaattgcctctgcccctggctcagtttaactacctcagtttatccatcctcccaccctccaccctccaggcgtcgctaaaagccctaaagaagggcccacggagcgaggctctcggagttccctttcccagtcacgctaagtcctcgccttctcacctcaatactccggggcttctccatgagacctcagtttcgccaagcgtcaccaggtgcaggaagccatattggcctgccccgtcgctctccgcgagagcactcattggtcgcctccctgagccgcgggccaatcacgctgcaggaaggaggaaaagccggttccgtgcctgctcccgccattctctccctgtgggcggggaagccgcgggcggttatgggaattgtagttcgcatgtgtgcagggtgagtcgttaccatagcgacgtggaaaccaggggcgctggaaacctggtgcgcctcacgccgagtgttccaattacgccaacctcttgacttcactggatgttattcttccctaaacggttattgagcacctatgatagtcactgttccagactccaggaataacctcgtactctcccgggttagatatttaaggtgcccttttgctgggatgcatagcagagggactcatttccaactcaggcagaaactggactactccagattaaaaagaaaaaaaaaaggaagaaactggaatactctgtgtgtgtgtgtgtgtgtgtgtgtgtgtgtgtgtgtgtgtgtgtgtgtgttttcttgagacgaagtcttgccctgtcgcccaggctggagtgccgtggcgcgatctcggttcactgcaacctacgcctgccaggttcaagcgattctcctgcctcagcctcccaagtaactgggactacaggcgcccaccaccaagcccggctaatttttgtattttttagtagagacggggtttcaccaggctggtcttgaactcctgacctcgggatccacccgcctcggcctcccaaagtgctgggattacaggcgtgaaccaccgcgcccggctgaaactggaatattctttttctcaatactgtaaatgtccagcctgctcaaaatcttacaacattcctccttcaccactctctcctgggtaaaaacctcgaatctgaggctctctgcctcatcccgttagggtttcccacaacctccttagacaccctgagttctaggtgctgttgtggagctttgcaaacatcttttcaaacccttagacatcctatcaccgtttgaaagaagaggaagtggtggctcttcaccacttcaggtttaggcactttccaagatcacacaggattgggattccaaatttagtacagattccttccctatgccatgccgtgtcccagtgaattaattgagactctaaatgcaatatgtggaggctgaatacatataaaatatatgcctaaatttgaagtccgccgtggagatgtcaaactcttcctagaggtctttctttccttcaaccccttccaccctaaacccctgtatccatgctgtcaacgtgttggtttttctacctccaaaatatatcctgtatttcctccaccactaccactctaatacaagccaccggcccattgcagcagcccttcaactggtcaccctttctttctttcttttattgattgattgattgattgagatggagtctcccctgtcgcccaggctggaatgcagtgggatctccactcactgcaacctccacctcctgtggtcaccctttttaaatcttcacctttaatacacacaggtgatctttaaaactcattgacctggccgggtgcagtggatcacgcctgtaatcccagcactttgggaggccaagatggacagatcacaaggtcaggagatcgagaccagcctggccaagatgatgaaaccctatctctactaaaaatacaactattagctgggtgtgatgacgggtgcctgtaatcccagctacttgggaggctaaggcaggagaatcgcttgaacaagggagtcagaggttgcagtgagccgagattgcaccactacactccagcctgggcaacagagcaagactccatctcaaaaaataaaaataaaaataaatgttctggaataagatagtggtgaaaaaaaaagaaaaagacaggttggttcagcaagtgcaaaggccacattggtggaacagcaagtgcaaaggtcctggggccaactcaagcttggtatgcaataaa

SEQ ID NO: 1562793 - DNA, 4001 bp, Homo sapiens
gagtgagttttcttcctggtatggaattaacagggacaggctcgataaatgtgttctccacaagcaattttcactaaagtactcttgaacaataaaggtacactaagagatgtgtgaaatcttaaagctggcgtttttatttcttttatttttacccctagggaggaccaagcgtgccagtgagtaattcattcatgtcacccatttgtgagggatgggagaagaaacaaccaccacttgttcccttcttaatttagaagctttccttatcttaagtctatcaaagctgactcctgaggtgggaagacaggagaagtgagaagaaaaattaacccgaggtgactgcctccacggaatgataagcacttcaggtctccacacctgtgtcagagaagaaaggcatctgcatgtcagggaggcggacgcccccacctgccaccccctccgtttctccccttgaaggaagcaggagcctgatctccccccactccctcctctctctctctctctgggcacttacataagaccctgtaaaacttccagtgacattcacgaaaaatgtaagctgctattttgctccctcaggagatcattttaatggactgagtgacaaaattcacggattctgaattcagcagaaacctgctcaaccgaggcacatcagcacagagacgaaaaaaaaaaaaaaaaagagtccaaccccattaaacagggtcacccaagggatggattcagtgtgcaagagacaatctgttccctccgaagtgacccatttaaaatcagattgttctgggggaagctcacaggtttaataaatttcaaacaggcaaggacaggcttgtacaactgaggttccttaagaggaacatttaaaagaggataaggcaatgaacaaaataacttgaggatacacaaactttggagtcctcactccaaaacttcaaaagcagtgacatttacaagaatgtctggatagctatacactgatcactcctcacaagcagctttgactaacaggaaggacatgctggctgggcttcccccctacagatagcaatgccaaccaaccactctgtcctaaagagggactcgcaagctgtggctgctcgcccccaaattgcgcaggactgtctgcaagaaggaacaagaaaagttattcacagcatcacaccacgaaaggtagttgcgtaccgcccaacagggccctctccaaacacggcaggctccgcgaaccacaggtgctcaccgctaacaagagggccgggggtgcgggtatcggtcacatgccctcgtggtgttaaccagaaactcctcctggctcgctccctgccagcagcctgtgtgcccagaagccgagcaggccctgagggggtcctggggacttcggagactgggggcttccacctccagcctctccagggctcccggccggggcagcagagggtgtgcccggcctccccgccggcatcccgagtacagggggtaccagccacaggttcggagaacttgtccggcgctacacaccacggcgcccccgcggcgactctcgcgctccggggctcttaccttggccgtgactgccgccaggcagagggagacacggaagaacagggtggcgcggcggcgccgccgcctacgaggcgcagggggtccgggtcagggtcccggcaggcgctgccctactcggagcggcggtgccaagcacagagttcgggactgcccccggctccaaatgccgcggcgagggtccgggtcccccaagctgagcactgtcccttcttcctcttcctccggggccgctgcctggagctgctcccggcccgggggactcttccgagccaggggcgccccgcatgggcaggggcctgggtcagcctcgggttgggtccagggagcgaccgccggggccgactccacctcccgcgctccaagccgattcgtcccttcagggcagggcctgcccgcgaacagcccggcgagacgagcgcggccgcgcccccagcttcgggcgcccgggctccggcgcggcggcggggcaggagcagactggccgggccgggcgccgaacgcggcggcgcggggggggctgcaaccggccgcggcgcgctctcccccagggcctgcgccgcccgcccgcggctccgcgggaaagaagcgccggaaaaggcctcgccccggcctggggcgcggggccgggggcgcggggctaggggaggcgccccgggaaggtcacgggagcggaggcgcggcgagtggatcgcggcgcggtgggtgcggggagccgaggcgggcggcccccgccgccgggagcgctcgccggccttggccgccgccgccgcctccgagatgcgccggcttcccggagcgcccggcgctcggagctgggcggccgctgcagccgccgcgggcagccgggcgccgctggccggagccggcgcgcgatccccgcctcccgcgcccggccaggagtgggccgccgcgcgggaaccggcaggggcgggcgctggggtccgggctccgggctggccccgccgcctccgcgtgcccagagcgccggactcgctcagcagctgcagtgactgtgtgtctgtgtcatgtctgtgcagccgggggggaccgcgagccggggctgggttccgagcgggggcggggccggcgcccgcgtcggcgcccgcccccgaccccgtgaccgagcggccggccaatggcaagcgccgcagccgcgcggaccgagagttcgcccccgcacaggctccgccccccggcgagactccgccccggtgcttcttcagctcgctggctggcaggcaggcggaagcaacacccggagccgggatcccgggccgggtcgggatgaaagggtgcaagctgggagctccccgcccttcttcccccaaccccggcggctcccggccgcctcgggcttggcgtgcctcgcggaaaaagggggaagggaagcgggacgggcccgcagctgccgtggtagagaggctcgcaggcttgcaggaccatgcagcctgctccccaaattgcacaaaacagccgtcgtgagaagtaggaagtttccccgcctcgggtcgcagcttctctcggaggtgggcatgctgtggggcagccggagtctgtgaggagccccgccgaagggctctgacggcatctttctgggatcggtatccaagaatcctgtccaaggcttcctcttcctctgaggaaactacatttctttttcctccaccccaaacacacaccccatgcacgcacaacacgcccctcccctgctgattttattctcgctctttccctcttggcataagaacccggcgcgcaacatcccttgaatggacttccagcctcccagttctagggaccagggtgggggtacggagagtcctcccgagccacaggagaagtgggtgaaatgggtcggggcacaggagcgggggtgtgagaatggatggaaggaggatgccctcgagagaagacccagaggaggcgaaagcagagaggcagggagagaaagaggacgccgagagctgcacaactcggactcggagaccggagctccgggcgcgcgatccagctcccgggtttttccgcagctcggtcccagggcttctggggtccccttccccccgggtctccacctctccccagccgggcgggccgccgggtctttgccttccctctgcgcgcctctccgctctccaggactcgagcgaggcagcgggaagcccaccctagttcttggaaggggcaggggaaggatgggctggggagggggcgcgcgggaaagggccgccgagcttgggttgcccagctgaccccactcctcgaggtcgggctgggggggtggggcggcaagggcttcggaggcttggcccctgcttggctccggacctggctcccgcctcggtaaccacactctcggcctttggctttaccgagctgggacccttctcccatcccccttccctccagcctcgtgaaacaacgacccccac

SEQ ID NO: 1562794 - DNA, 4001 bp, Homo sapiens
gaagtcaggcattaacagaggtgcaacattggtccttcccagtgagagcagtggggcctcccagactgcatattcatgtgcagagtggaacctggcccccagacatggcagaactacgctccttgcagcaaccactcgaccactacagcacagatgaggccctgcccgctgcaccgggccctggcagggctgggaggcatcttgggcaggaagccagaccccctctccaggtacacccatcaagccaccagcctggccaaacgggcatctttctgtccagagctcatcaataggaactgggcaaccaggtggggagccgccaggggagcttggagagggcagagtaggagcctccatgaaccaagtcaggctggaaggggtcagccctcgtggtccgtcagcgtgcggcggagtccctgtgcctaagtagcagagcggtagtcattgaaacaggccgggatgccagcaagagggaggcgagcatgcagtgagcgataggtacaaagctagcacgtaagaggaagcacggcaaggtgggcaaccagggcgccaggaaggacggaaggaagatctcctcggggaacacgtctggagaggcaagaagggaggtcttcaaacaggggcaaagctgtcgtatgggcatttcttctacacagcaaagagcgtatgctacctgggtggctgcagacgctaccaagtgctggcggattcttaaagattccgtgctcgggcaggcagggctggcgctggactagtcccgttggaagctggatgcactgggcaaggccccgtgcccgcagaggccagctggcggcagagcatctgcctctctcgcacagccctattagaggcagaagtcttcctgatttgggcgcgccgcgcatgccggagcggagacttgtaggttctccgcaactctgccaggaacccctgatagttgttgcgcaaggggctgtcaggttgcatgtgggggatagcccacttctccgcctccccagtcagtcgagacacaaggaaggccacacgctcggcctcacccgggaagcgggaggcctggaagatcatgaatctgtccatctgcatcaggaaccccgccaaccggcctgggtccccggaaaagggctcgggcagagaggttggaggtgtggtcatgggtcgagtcccgtttgaagtaattgaggagatgggcggggtgatctgcagagcccccgggatccgcgccctggtgcgtaacaaggtcagctctgccatcacgctctccagcatgttggtgagattggccttctccgcccgcagggtggaagcctcccgcctcagcgccgagttggtgaggcgcagggaggtcagggtgtcaataacgtcatccatctgggcattcggagacgctgccaaggctgggctttcagctttggacgtctgcggctgcaccatgctggccagaggtcagccacacgctgagatccgcgggtggaccaagagggtgtggtgaccaggtgggcccctgtagaaatgggggcagtgtggggtgcacgacggcagggcgctgcgagacccccaagccgagggcccgagagaggggcacgcggtgccaggccctagggacttcggccccggtcccacgcggctcctttactgcagacttcgcggactacggagccagacgggtggctggacctgctctgggccctggaggattaagaaaagatgttttcaaggtttcagttgcgactagcgggcaggagggtgaggggcggcgtggagggcccgcgcgtgggtggcgaggctgcacaaagccccgcggcgcccgccccgcgcccgcccgggggagaacaaagggggctgctccttggcggccgcgggcctgggggccaccacagtggcggggcccggccgggcagggggccgggggcacgcgtacctggggtctcgcggttcctccgcggctctgtccgccgccggccgtgaccaagatggcccgcgcgggggacgcggccaggccgatgaatcaccgcgcggaccgccgagaactgcttcccggtcagcgcagccaagcgacggcgctggcgatggcggcgggcggcctccggcaggtgcagggaccgggccaggccggggccggggcaggggcggggccggggtcgcggcagagggcgggtcaccgcgcggcctttgtgcgggcggggccggcgcggtggcggtggcgggcgggccttaggctggccccgctggttgccatggataccgaccgctcccgcgcgtgcggagacgaccgctgccccgcccccggaagtgatgcacaaagtcccacccccccccaccccccaactcgggctgctgccaatcggggaagactgtagttgctgcggcgtcttcatcagggcgggtacctggtgttctcccagtcattcctcccaagagggcttgcaaggctctttctgtggttgtcattgggtttatttttttgatgatttactgttcttcttatttttttttttttttgagacggagtctcgctctgtcgcctaggctggagtgcagtggcgcgatcctgagtcactgcaacctccgcctcccgggttcaagcgattcttctgcctcagccacccaagtaactgggattacaggcgcgtgctaccatgcccggctaatttttgtatttttagtagagacggggtttcaccttgttggcctggccagtctccaactcctgacctcagggcatccgcctgccttggcctcccaaagttctgggattacaggcgtgagccactgcatcaggcccttattgtgatttgaatataaatttaatgtaacaaatcttgatgtaagagaagtaaaaaaaactttatactactcagactccctccacctaaagatagcaaatagtaatacatatatatgtaacgtagagatagtaatatttctgtacttccatccagtcatttttctatgatatgttctacaaaatattttttaccttatgaatattttgtaaccataacagcacattgaattttgagcattttcctattaaagatagttcagaagcatgattttcagttattgcctgtggtccatggaactcctgtaccgcaaagtatttagccatgccctttttgatagatccttatcttgtttaccatgctaaagttttataaactacacttgtatataaatccccacccttttctctgctgggttccccagagtaaataccaaggagtgaagatacctggctgatatggtttggctgtgtctccacccaaatctcatcttgagtcgtaactcccacaattcccacatcgtgggaggaacctggtggaaggtgatcgaattatgtgggcaggtcttttctgcactcttcttgtgatagtgagtgagtctcaagagatctgatggttttaaaaagggaagtttccggccgggcacaatggctcacgtctgtactcccagcactttgggaggccaaggcgggtggatcacgaggtcaggagatcgagaccatcctggctaacatggtgaaaccccgtctctactaaaaatacaaaaaattagccaggcgtggtggtgggcgcctgtagtcccagctacttgggaggctgagccaggagaatggcgtgaacccaggaggcggagcttgcagtgagcagacattgcaccactgtactccagcctgggcaacagagcaaaagtccatctcaaaaaaaaattaaaaaaaaaaaaaagggaagtttccctgcacaagttctctctttgcctgccgccatccatgtaagacctgacttgctcctccgtgcctttcaccttctgccgtcattgtgagcctccccaccacacagaactgtaagtccaataaacctctttcttttgtaaattgcccagtctcaggtatgtctttatcagcagcgtgaaaacagactaatacactggccaaagggtaagaactgtttgattccgggtctggattcccagcttgacctaggtgatccttctgcatggtc

SEQ ID NO: 1562795 - DNA, 4001 bp, Homo sapiens
cttcctccacacaaccacctccccccttgtttttctaacaaactgaggctaggtgaggttggttgactggtccaaggtcacctaactgccgagaaaataaggcagccgtctgagtgaatgagaagtgaaggaagaaggaccggactgagccagtgaatgaatgaatgaccagacgcaggaaggagggactcagggggaaggcggcggtgacgcccgccccactcctctccccgccctccccagcgacaggtcccgcccagaccggaaaggggtgggggcgggggagtcaaggtattacagatgacgaggctgcagctggtttagtttaagaggctacagcagggagggagcgggggagggggcggcaacggtgggggcgcccagaccctgcgggggaagtgagtcacccagaaaacgcagcatcggcggctggccgttaacccgctcccggccagggaggagatgtgggcttggccggccacgccctccctgctggaccaagcccgtccctgccgcccaccaccccgacttcacttctcacctcttagcgtcaggagccacctcgcctcgcactcgaaggcactctccaggtttgagattcaggttgctggcgaccagaccctgcacagacaagccccggcccagccgggttagaggacaaggcctccactgctcgaagtgtccgggggtggctgggggtgggagtggggttgttcccgcccggcatcctctgaccaagccaaggggaagcctggggaaaggattgagctgtaatttccagcctccgattgtctatgtggtcctgggaaagtccctattcccaccggggttggcttcagtctgtaacgtgaaggttctagaagacaggctctagaagattttgcagattggcttgggaattttggactcaagagtgacttgggagatggggtgctctgtcccatcgcagatggagaggatcaggctggggaggggccgacacttggcccaccgtcacactgaatggaggggccggcccctctgctggagaggaagtggctaggggcgggcgaccccactattctccttcaagcccctctctgcaaagaggcccaggggctagagaggagaccctgaaaaacacggcctctctgcattagggagaatagccctgcagtcgggctgtggctgggctggctcagggttaacaagattgagcaaactgctgggcactgctgttccctggcaccccgagtgggtgggcaagagttaactggtttgagtggtttcttctgccagaaacttgaaccctttccctggggcccgaggaagattctcacctccctgccaccccaacctcccagcttgggggtggtggaagggaatttcccccgccccccccgccaccagcctggacacaaccaccctccacccccgacctagaagggcccatcctgggcagcttgtctcgggtcctggcaacttttcagcgttctctggagcagagggtaactctgccctggcctggtgaccgggacagctgcaggggggaggggacaggaggctctttggggtggaggagggggaaagggatagtggcctgggtgtcccccagttggccacacccttcccacgctcacttctcagagagctgcagaatgtcaaccctgggcagaaataactgtgctttcagaccctggaggaatccagacaattatcaatgcagagaaggccttgagggaccatggcgcccacccccattttacagatgtggccactgaggtccagaaaagagaaggcactggttccaggccacacagctggggctagaatctgctcccgatctgcccagctctcctctggccatcagttcctgccctatcccctggaccttgggggggggtccccacactcacacaagccatgattgagtccaggaggatgttcccgggcaggcgcaccagctgtcagaagactccacccgagagagatgggcccccggacgctcccacccttttaactggaccggaccgggtgagccccgccccctgaaagttcagccaattgcaagtcaggatagggctgggggccactgggggcggagtccgtggaattttgaagccagttttggagcagaggtgaccaatcagagtggcgagctgctgccccccctcaccccgccgcccccggccagagtccaagctccacctcctattctccttcatccctctccacctccccaccaaaattgtgctgtggcagagattgggggaagccagtggaaaatagtttgatgatgagctaggcccacaagttggcgggaaggggcctgtggccagcaggctgggctcagggggtgcccagagaagatggctgaggaggtgcagggtccttcagggaatcagagctgggggagaccaggccactcccgggcagggaccagggcgtggctcctgctgcgtgcgcgtctgcagagggccactgacttaaccacaggccctggccccacccgggccttccccggaagcaaggactgcggctgctgcagcgctctctcgctggctcctcgggaaggctaaagaaaggctgggccgggcgccaagcctgaggctgcagggcttggctaaggcctcgggcttggccgcgttcaggggcaggcaggggatagtcaaagcgccctggcctgacagcctcaggcctgagagtgtcaagcttaggagatggcccagggtggtccagaccaggagggggtggggtcctggctctgtgcaccctgtcctttctcttttttatttttatttatttatatatttatttttgagatggagtctcgctctgtcgcccaggctggagtgcagtggcgtgatctcagctcactgcaacctctgcctcccaggttcaactgattctcctgcctcagcctcccgagtagctgggactacaggcccccaccaccacacccggctaatttatgtacttttagtagagacggggtttcaccacgttggccaggctggtctcaaactcctgacctcagttgatccacccgcctcagcctcccaaagtaatgggattacaggtgtgagccaccatgcctggccaccctgtctgctctcttaacatctcctctgaggcccggcacagccctcccttccctgagtgttcagcaggtattttactgagcacctactatgtacctggccctgggctctgaggattcaaagctgaacccctcccagtccccactctcaaggagcgcatagttggggtggaatctgaccacaaccacgttaagaagtagatgatgggctgggcgcagtggctcacgccggtaatcccagctctttaggaagccgaggcgggcggatcacctaaggttaggagttcgagactagcctgaccaacacggagaaaccccatctctactaaaaatacaaaattagctgggcatggtggcatatgcctgtaatccctgctactcctgaggctgaggcaggagaatcgcttgaacccaggaggcagaggttgcagtgatccgagatcagtctattgcactccagcctgggcaataagagtgaaactcagtctcaattaaaaaaaataaaaaataaaaataaaaataaaaagaagtagatgatgatggctgtaagggaagccatgagaaagtgctatggtgggctggcggctgcatgagtaaaggaggtgggtcgtgaagggtaggcggagaagtgcctggctttccaccatgggcagaagctccagaatgagaaggccagggctggagaacagtgttccgggcatgtgggggaaaaacggggatgaggctgggaagccaacaggacctggaccatggagggcctcatgggctgggcacagggcttggacattgttgtatgggaggaggctggggagccagggctagagggagggtgagtactgaggccagatttgggctctagggaagatcactgtggcagagaattgagggtgggtgggaggggtgctcaccttacactcaggaa

SEQ ID NO: 1562796 - DNA, 4001 bp, Homo sapiens
cccacaatttggtggtaatttgttattgcagccctaggcaatgaatacaccatctaatcctcagaagaggcagcctgtgatccccttccacagatgtaaggaagactggggctcagagacggtcagtgacttggccaaggccacacagtaaagctgtggcagagtctggtgtagaatcaacgaatcagagacctcagtgggaatccactcaaccccttgtgatttgcagcttgtggccttgggcaatttgctctccaagacttgggttttgtgtgtgggtatatgagacaaggtctcactctgttgcccaggctggagtacagtagtgcaattacggctcactgtagcctcgacctcctgggctcaagtgatcctcagcctcccaaggctgaggagtgtgccgctacccccactaattttttaaggcaaagcgtagtggcatgcacctgtagcagaaaaggtctcactatattgcccaagctgagatttttttttatctctataaagatcaatggaggccaggcacagtggctcacacctgtaatctcagcacttcgagaggccaaggcaggaggatcccttgaacccaggagtttgatatcagcctgagcaacatagtgagacctcatctctacgaaaaataagaaataagctgggtggggtggctcacacctgtaatcccagcactttgggaggccaaggtgggcggatcacctgaggtcaggagttcgagatcagcctgaccaacatggtgaaaccctgtctctactttaaaaatacaaaaattaggccaggagcagtggctcacacctgtaatcccagcactttgggaggccaaggcaggtggatcacctgagatcaggagttcaagaccagcctgaccaacatggagaaaccccatctctactaaaaatacaaaattaatcgggtgtggtggcccatgcctgtaatccctgctactcaggaggctgaggcaggagaatcgcttgaacctgggaggtggaagttgtggtgagccgagatcgtgccattgcactccagcctgggcaacagaaactccatctcaacaaaaaaaaaaaaattagccaggtgtggtgacacatacctgtaatcccagctacttgggaggctgagaccagagaattgcttgaacccaggcagcagaggttgcagtgagctgagatcgggccactgcactccagcctgggcaacagagcgagactccatctcaaaaaaaaaaaaaaaaagagaaagaaaagaaacaaacaaaattagccagtgtggtagtgagtgcctggggtcccagctactcaagaggctgaggtgggaggatcatttaagccaaggaggtcaagtccgtagtgagttatgattgccaccactgcactccacctggtgacagagcaagatgctgtattgttgttgttgttttgagatggagtctcactcttgttgcccaggctggagtgcaatggcacaatctcggctcaccataacctctgcctcccaggtccaagtgattctcctgcctcagcctccccattagctgggattacaggcatgtgccaccaggcctagccaattttgtatttttttagtagagacggggtttctccatgttggtcaggctggtctcaaactcccaacctcagatgatccaccagcctcggcctcccaaagtgctgggattacaagcaggagccaccacgcctggcccaagatgctgttttttaaaaaaagacctctgtccaacttctttgctgcacagatggggaaactgaggcccagagagggacagcaatggttttccctaaaagcccccacccaggcaaagacaaagatgaacagagtggggcaggcagcagggggctagtgtcctcaccgtcatggtgacagctcctggcggcagctcccagcggctcctggaggcctgtgctcagggtctcaactcgtggtcaagcttatatcctagaatattacacattaactccctcaaggtcctaggtgaggactttgccccttctaccttgtgtctccccgcctgcatctcccagtacccagcacaaacaggcagaagactcctcagccagctccaccccacccagcccggagcatcctcctggcctccctccagcccagcctccccctcctcagcgctcccagagcccgagaggggaagcagccccagctctgcccccacacaaaccgcaatgcagccgcttgacagctctcccagcctccctcacttagcccagcttccttgcctgtaaaaagagagatttgctttgcaaaaaaaaaaaaaagtctaggtttctaattttcttttttttttttttttgagacagagtctcactctgtcacccaggctggagtgcagtggcaacgatctccgctcaatgcaatctcctgggttcacaccattctgctgcctcagcctcccgagtagctggaactacaggcacccgccaccatgcccggctaattttttggtatttttagtagagacgaggtttcaccgtattagccaggatggtctcgatctcctgacctcgtgatctgcccaccttggcctcccaaagtgctgggattacaggcgtgagccattgcgcctggcctaaggttctaattttctatgatgttatgattcattgtcagagagcattatgttttcttcttccctccccatattatttatctgatcggacatgtaggtttcaaaaccaatacacggattcaaagaaaagatttcaaactatttacaacaaatggtcaaaagcagaggagagctgggcgcggttgcttaagcctgtaatcccagcactttgggaggccaaggcaggcggatcacctgaagtcaggagtttgtgaccagcccggccaacatggtgaaaccccatctctactaaaaatacaaaaattagctgggcgtggtcgcacctgtagtcacagctgctcaagaggctgaggcaggagaatcgcttgaacccgggaggtggaggttacagggagctaagatcgcgccactacactccagcctgggcgacagagtgaggctccgtctcaaataaaaaaataaaaaataaataaaagtgcagaaggagtgggagggctgagtgggggacatggaggatgaaaatgctttgctcttgacttctgttacttatgtaactggcatgcttactatagacaattagagatattaaataaaaagaaaaataatcactcataatgccaccgccacgagggaactggcttacgctgttggcacatttccttccaggcggttctccacagatttacattatagacacccctctgtctgtgcaattgtttatctctcttcatttgggaaacattaaagaccacaaatctatatttcagaaccatactttaatgcctgcgaaatagtctacctttcaacgactgaatttatttaaccaatttccttctgctgaacactcacattaattctacatttttgctattaaaaatactgctgcattaaatctatttggacataaactttggctgcatcgtgacaacttatgtagggcagattcccagaaggagaacttttctagagctcaggatttggcgagccagagcgttttccatcagagttggcggtggccactccgggcaggatgtggggaactggccttgccgagggccctcggtgccaggagtctgcaggtggctcactgcccagtgcccacataggacaccaccttcagtcccctgccagcccggagtgaggagtgacttcctcctttcacccacaaggaaattaatcctctctcggcctttctcccaaaggcatggtaaaaccccagtgagataaggaattttaaaaggctttctccctggaaactaatcaacagaaactataccttttaaaggtggcatttttctgattataataataatattatctcactataggaggttccagaaagtacacacagtaaaaggaacttaaagttcacttgttttaaaataat

SEQ ID NO: 1562797 - DNA, 4001 bp, Homo sapiens
caggtggcgttgacaggggtgatggggagggggctccccgccccatgtttccagtgcagaaccaacagcaggggcacaactcctggggacagtcaggaagaagccatgagtagaaaggcaggaaagggtggcctggggtcatggcacaccggatgggggtccaacaatggccgcatgggagaggactcctggttccccctcaccacctgcagctgtcttcctggggcctagtcttcactctgtcactgcgtgtgtttctctgtctccctttctctaccttagttctccctgctctcttctgggatgacgtaaagatgagggcaagacacaagccatttccacccaaagggtgcagggtccaggagagactcccagccatcccaccctttccctcaggaaggcaaaggtcctaaggccccctggccctctggctggaaggcaccaggccccaggcccagcaggcaccaggagaaaggagacccctctcttcccacctcccgtggtggcccaggttcctcagcagcgcttcccactcactggcccattgcagcccaaatctccgaagccaggcacccatgggggccacggggcatgggggagtggggaggagtcctcggttgaccctcatctccctcccaaacctgccacttgattctggctccctgggccaattgcccccaattctgcccccgcccccatcatcctctatctcttccttccctagtgtcccctatctcactcaagctcaccccatttctgcctggctgtccccactctccatccccaaatcatcattcaaaactctctgttcccccagctccggacagcccctgactccatgccttctcccgactcatccgctgtcccttgtcccaggggttcccctccctcctaacacacacacaccggctcagggagggagaggaaatggtgcaccaggagagagaaaaggcaaaaggtcataggcagtcgggtgggcggggaggaaggaaagtgaaaggtgacaggagagctgggagctgtcccgacatgtcctggtttgcccctcccccaggggggcctgttctcccgactccccccaggcccccttagacgcttttccagggctctgcagaagggcacctgaagatggtgggggccggggtcagcgggcgagtgaggctggagacctcccccggatcccccatgctggaacagcggggacaggggcctcctcaagttcacttctcctgggtcccctgttcgtcccagcatcccaaggcagtgctgaggccccggggtggctgcgggaggggggccacacccctatatctcacctagcgcagaccacacgcttccagacaccagcagatggaggcggcacctgctcccgtcccaggccggagtttgcaagctgctcgccgcccgcgcccctccctgggagcagcccgggaccgcggttggaaaggagaaagcggaaagaaagaaagaaaagaaaaagagagagggagagtgaatctgggagaaagcgcagagggaagagcagccagcgagtgtccggagcgaggaggaggaggaggagaaggagagggggaagaagaggaggaggaggaaggctcggcgccccctccctcgccgccaacctgccgcggggcgtgcggtgcttgggaccatgtgcccgcgctcgctccgggccgccacccagcgcctccggtggctgcgcgggcgccccaagtgttcgtgtgtctgcggcgggtgggcgtccggctcgcgctgccaagcgccccaagttgccgccgcgccccgcagcggggacgcgaagccggcgcggggcgggtgtatttacctgccgccaagaccttcattatgggctgcacttcagagggccttggaggaaacctcagatgccggcagttttcagaggttcatgctcaaatggggaatttgcctgatttatatactggagcctgtgttgtaagacagaaacagctatatttagccgggatccccagtccaggaagttgtttgaggtgcatcataggaaattatgaatggaagaaagtgagagtgaaggggggggacgagtgaggggggagggtggggagaacagactttttccctcttctaagaatttgattgataaaattataatgaagccttcgacaaaacgccctgtggttttcctgcctggcttgtcccgggagttgtctgaagatgggcatcgccaggagggggcccctggccgagtcagcaggggtcccagcagtgggcgccccagacggccctgactcacctgggtttggggaggtagcgagtctggactagcagatggagactggcccctgtgccccctggttggggggctttaggggggcagtgggaggaggagggctagggcttggctgagaaggaggctccaggaggaggggccggggccggcgtggactttagacggtcataaagtggaactgaacatgggcgctggaagccaccccagaggtagcctcctccaatctgcacattgccactgggccccaaggggctccgaggggaacacgttgcccagggccccagagggtcaggcctccagacaccaccagtgcactcgccctgctgaccactgtacctgtgaggctggggaaggggctaggaagacatgggggtaggggtgactgactcagttctgtcgggacactctgggaaggtgcttctgggaaggcggtccagcatttccattctgaagcaggactgagagaggcttggcgaaatcgtaccccagtttcctcctccgggtgctgattgatggttggggaaactgagaagtggctggtcccttccagacctgccttggaagcccctttgagcccagcctcagagaatgatggaggtccccaaaaagtgcttctagaggctctaaggcagtgtcacatgttctggcgtcttctgaggccaggcgatttgtgaatgaggaagggcagaaaggagcagtggggagccgggcaaaatgagcacagggacacctccaagaaatgcaacagaaaagtgaaaataaatacaccctatgagatgcgggaatgccggccagacagcatggccacgcgtctggggccatgccgtccctaaagctgccaggggacccccagtaccaggagatgatttagtcccctgtggccccttcccagcccttccgcctgaccctgacctgagatcaaggtgtgtgagttggttttccaaggccagggagctcttgcagcctcgcccgggcccccaccgccccctcgcccatcctccatgcccccagttcctgcctcttgccacatcccagacctgcccagccacgggttcctccttcatcgtgccaggacgagccctggtgcctgctgccgttccccaccacacacacaccctgctttatctacgctcttgccccccattctctcccagcagggcctcggatgtgaggtgataaaactgcccatcccagctggcacttcccgaactggctctccttcctccttcctgcctctcaccccacaccttgtctcttctttgagggaccatggagggccccacttggcacttactgctcctatacacttgctctggggtcagcgtacactactaggagactcacctgccctggcctggctcaggtaaccccacatcccaggacaccccagctcaacccttcttcttacacctcccccagcatctcctgcacaaggacctgaccactcagagcacgtgagctctggaccagtccccagtcccatcccacatcacccagacccctgccacctgactcagcctggctctcctgacatggaccccaaatccatgtgaccaggggctcactgtggcctccacccatcaaacccccgtcgcccggcctgagtctctcattaggctcaagagttctgcagctgcccctacatctaccattctgcccagtctcccctgcatccttccaagcggacccccaggcccttgcatgccttctggcaagccagaccccacatcag

SEQ ID NO: 1562798 - DNA, 4001 bp, Homo sapiens
cctccctggcttccctgcctctccaagggtaaaaggggtatagttcctggctcctaaaggaacaacccttctcctaagctgccttcccaggattaagagaaattaatgaggacctgaaatgtggctacttcaacacttggcatcttaattccacatgtaaaagctttctcctaaactcaagatcaatttccattggctctttagaaaacaatctcagccacaccttcaacaagtcaggcaaactatccctttttttactctctgctaggagaggaaaacaaacctgagaatttcctctccactaggagaagaaaacaaacctgcagccccctgaaggatgagagaaagtcaggaagacagaaaaagctgcccagtgaggctccatatgttaactctgttgaaactggttgcctcatctgtaaaatggggatatataatctctttaggctgttgagagattaaaggataaagtgtctagcagggcgcttggtagagtcagcattgaggaccagttcccttcccccttccccctgtccagacacttcccagcaatctaccagggtccggtcattccacaaaaccacatggtgcactgcttttctgcccagggcctggccacctgactagtatcccggcagcaagatctgggcactggacctagcttagagaagccagaagggaaaagtcgaccaggaccactggtgagggggaggcagcctttttggaacaacaggctgctcccaaagaatgaaaacaaaccccaccctagcctggaatggctccattcagaagggacccagagggccagaaaccccctggggagtttctatgggaggtggagtggggcaatgagcaaagaaagccaggttagaggtagagtttccacatctccctctgagaagccccacagagagaggctcgtggaggtacttaggcctagggactgaggaggtgtgggggctggcccagcagctcaggaacactctaaagcccattgctccagtcttagaagcactcgcccaggtctttccccagcaactacattcacctgggagctcagaagcccttcaaggccagaggcaaatgtgcctgccattaagagaacaaacgtttataaggtgcctactgtgtaccaggctacccacacccaggacttgccagtttccacagtttggcaaaacctgcccatcctgcttgttgggacaaattcctgggcaggcagcatggcccgcaggtaagacatgtgagagctggaaacagcactctatttgggctattccccccggaagcagtaacatctacaatgggcaggtcagtggcatcttttggaggctccttcaggtttgtctgggatagaaggggagctggagctccctaagaagttccttctgggtatatccctcccctcaccacttccaggacataatgggggtacctcacaaggccgattctccttgggtataacctccgctggcttctgcccggcagaaccgatggtaaaggactaagtgagaaggagatttagggagaccaccctcctctcaggaccaggggccaggagagatggagaggggaactcggagaccaactcaccgaaacaggtctctggaggtgaagtaagccgggactgacaagtaactccccatcttcttcccacaccagatagacaggctcagctgcaaatccgtctgtgactgcctcaggccggctgtagatggccaccatgacaggcccggggctcccggcacctctggctgcaggcaggctgccctgagctcacctctccctccggagcagctgcgggagcctgaggactccaggccacttggcccccagcagattcccacaggggctcatggctgggatggctcctccctagttctcagaagctcaggcggcccctctggactccgagaaaacgacctctctgtggaggctacacacacactggcattcttgagcaggggccggtgactagctaagaaagaagcgctgctgtcaagttagccttcttcttcagtcccacccctgaatgagggagggagggaggaagaggaggggctcccgcagaaccgaggtgtgtggttggagcagctgttaggaaacagaccttgcaggcaaggggtggagctgggctggatcgaggctgcaggcaggcgctgcagacaataactgggaccaattgagcgtccatcctgagctcagggaagggcaaggcaggatagagtgtgaacatatctggccccagatgtcctcaagcagaggagctgcctacaggacagtaattctgcttggaggtggaaaaaaaaaaaaagcagaggatgccaggtccaggaagagccacaccagacggggggacctctggtaggagagacaggtccagagagccatcctagctctgagctgccatctgttctgtcctggcactagggctcccattcattccctccctctgcctgtcctggggacagcctcaagagctgaccaatgggaggtgccacttccactccagggcagggctgtgttgcaaataaggaaacaaggcccagagtattaacctacacctgatgtgtctccatgtggcaaacactatatgcactcttttatttctctgagacaggaattattcccactctacagacaagaaaagtgaggtacagagagattaggtaactcactcaaggtcaaaaagggagtcagtggcagggctggaatttaaatgtaggctcatgtgactctagagctggagctctcccactaccaggcttcattctggctctttaaggagaaaaatcttttccaaagctctctgcaaataggatggagcccaggttactctcattcactcactattcactgagtgttcacatgcagaacaccatccattggcctcagtggacagtggagcttcttctacttgtcctgtgataaccatgcttttcaaactgaaaaatggggcatgagggagaaaaaggcctggggtgccaaaagggattgataagcctaggtatctggaatgggagcccacctgaacagcccccagttgtgacgatgaccaaaccagagcctaccatgtagaaagcccttgtctccctgcctgcaggattgtaaaggaaaaagcaaggctgctggaggaaaccagaacactcagatctcactactggatttggggcagtgacatcagctctcccttaccaggcacacaccgctcaccattgtaaagagccagaagtcaccgtgcagcttctatctcttactgtgaaccatggcaggaaagtctgataaagatggtagatggggttacaagggagccttttcccattccaccaactggacacagggacaacaatgcatgtgataagagcacatgggtttgaatactgttaagaagctaccatttattgagcagttaatatcttctaggccctgtgttaagtgcttagcatttattatccatcatgtttaaattgccagtaaaaggaggaaacgtcatcagcctcatttaacagattaggaaataggttctgaggggttatgtcactattctcaagacaaatagctgataagtggtgagggtgttttttttttttgtttttttttttttgagtcagggtctctctctgtcactcaggctggagtgcggtgatgccatcatggctcactacaatcttgacctcgaccttctggactcaagtgatcctctcacctcagcctccagagtagctgggactacagatgcgtgccatcacacccagctgtgaggctgagtttcaaacctggtacatatggctctagagcacaggtcaaggcactttttctgtaaagggccagagagcaaatatcttaggctctgcaggccatacagactgtcgtggccactcaattgtgtcattatagggcaaaagcagccatatataaaacataaactaagggacatggctatgttccaacagatatttacttatggaaagatttttttcttttttttttttttcttttga

SEQ ID NO: 1562799 - DNA, 4001 bp, Homo sapiens
atgaaagaaagaatgcataaactaatgcatctagaggctttatgcctctagactattgtactgtgaaacctttcacaattttctaagaaacagggttcaagacaggcaacctatattacacagctgttagaaaaagttactggaaatcggccgggtgcggtggctcacgcctgtaatcccagcactttgggaggccgaagcgggcggatcacaaggtcaggagttcaagaccagcctggccaatatggtgaaaccccatctctactaaatataccaaaaaaattagccgggcgtggtggcgggcccctgttgtcccagctactcgggaggctgaggtaggagaatcgcttgaacccgggaggcagaggttgcaatgagccaagattgtgccactgcaccccagcctgggcgacagagcaagactccatctaagaaaaaaaaaaaaaagttactggaaatcattcgagttgaaggactctgtaagcttaaaaaaaatcttttttaagagacaaggttttgtttttaagagatgaagtctcgctatattgcccaagctggtctcaaactcctggactcaagcgatcctcctgccctgccctcccaaagtgctgggattacaggcatgagccaccacgcccagcctaaaaaaatttgttttaggcatttccacccctagctctctccagaagtctgttatcaccagtgaagagaaaatcccatgctcccttgctgaggaagtgacccactggtagcccagtccttgcattcaagatgaaggaagtgactgtccacagacggaaagccaggaagcagggggcagatagccagcccccctccacctcaataccctcttgccgcctctccaaagcttctggacgctgaccctggtggacccagaggtgggccacccacacaggtggctgggaaacataggagacagaaggttcctactgctgggggaaaagatggggaaggcaggaagctgcagggtggtgtgtgaggtggcggggaggtgactgcaggtgcaactaacccaactctgaagctacccttcacccttagacaactcttccttccaggaggtgtttggccgaatccctctagtctttagtctagagaggccaagggagcttccacaggaggactcagaaccccaggtggcctactttcgccacctgtagcagagatctttgggccccaaaaagaatggtccgatctctccttacccttagtcctgtcctaaacctcaaggggctccatactcccttattttctgcaaagagctcccagccccgggggactcccagacaccaagatgcccgcgagaagccttgggtcttggcagggaagtcacatcctccatttccctcagaaaacccagaacccggggtaactctcctaattgtcctgaaccctagaggatcctgtactcctcaaattccacagagcttccactataagagaaccccatgcttttcaacttccttaaaaagggttaatttgggggtctgcggccgccaggtccctccaaaaagctggattcctggcagacccagaatctcttcctccccgggacctcaactcgcgggaagcctcccaacccgcctgcccctcggagccctctgtctccaggatgccctgcctccccattcccggagtcccaccctccaaatgcctggggagcgctgtgcccaccccgcctcccagcttttctgaggagctcggacccacgaggacccaaccagcccgaaacccccgagagacagccggtttccctcaggcgccatggaaccggacttcggagataacagcgggacagggcggagcagcccttccttacccgccagcgcggacatggtcccgggagcgcggaaatggggaggaggaggcgggggacacagcagctcccctcagttccctacaactcccctcagctcctgccgccgccgcctcaggcgcgggaagaccacagccccaggcgcgaacgggatgcaccgcctacggcgccctgggaggaccaaaccacacctggcacaggggactgcccgccgacgccccgccccgccgctctcaggcctcgctcccgagacgcggccccgccccctggctctggctcgggctctgcagcggccctggcgccccctagtgcgagcggcgtcccctcgaggtgctcccgccggtaaggttgattctgcgggggccggaagtctcaacacggatgacagtccgcacccatctagtcgccctcatttacagatagggaaagttaaggatcagaggctaagttcgactacattgaaatggcttcgctcattaggaggagagccgggatgggagcccaggcctgctaactgccagttcagagctctttccagtagtgtttggaatcaggaatattacaatggaggagccaggtctatcccacaaacagctttgaggatggacttttcttagaagcttctagctcagagaaaccacttctctgcgccactatgagtaagctgacagtaaataatctctaagtcaaagacagttggaggcgaccaaccagcattccaggagcagatcctcagccaggccaattaggtttagcgcaggacgctggagcttgtgcgccgcattggaagacgagcactcccctgcaggaacatgggcctaccattcccaggtcttccaacctttcaaaacatgccaaaaatccagatatttaggtgaaatttgccacttttaaaaaatgttgatagcatcaaaaagttcttaaaatgccatgtagaccaaatgaaacacacctggccactagatttgccctgtgggctgccagtttacaatcttctatgaggaggagggattacaggactaagagttaggacagctgactgggttatggcagctgctagctggctgagtagctttgagaaccacttccgctcattaggtttggaaggagattggggtcctctgtgtgattaagatattaatacatcatcagccaggccagctggtccctgatgacccaccctcccatcagattctctcacgctgggtctttcacaattgtcatttccttacatcagatttagatcacaggaaacatgtccaaatgaccagaaagaggatggagcccagggaaatggattctgtcccctccacccccacccctgaccaaagacaaagttcaacccagctgcctctggtcccagcagttgggtaagcaaaggcaaaggcaaagacaaaggcgagcacaattctcttccttcctgctctaattcaaaccggatgccggtcagatttttctcttctgggtgtggcaggtggctcacgatgtcctgagtgtgcacaaagtgctggggaggagggctctgtcccatttccgttaattcctgggaactcttttcagtactcagttttgtagtttctgaggaaatcattatagtaaacacaagattgtgtattgaattaaagtgacaggaatccagagactctcctgacaagctgcctcatggctagcaaacaggggacagggactttccccatccttcctacagaaagatgtaacactgtattttcccaggcaacaaagcactggcatcctgggaaccaaaacctcctgggtgtcttccctctccctccgttccacaccaaggcacccaggtctatctcttctccctcctcattctctctcacattccacttcctcctacctccagcctcatggtcttcaccagcagggagctggggaatagccaagtcccccaagttcctcccagggaagttcaggcgactctgagaaacacaagttgaaaatgtaatggaagggaatagctttctatagaaatgctatagccaagagatatatttttaatatggacccaaagaacattccagaaatcacttgtgaactcaagggggacttctggagggtagagaaagcctgggcagggagtagaccaactgagtttcaatagcacccaggttacctgtccacagtttgtttcactggc

SEQ ID NO: 1562800 - DNA, 4001 bp, Homo sapiens
gctcagcagccaggtgctggtcgtccagcagcgcagtggtaagcaccagcgtcatcaggttgaagaagttgtagttgccggtgatgataatcaggacctgcagcagcacctgggggcggcccgctctcagtgctcccggagactgacgcctggccccgtggcaggcacccacctccaccctgcagggtgcatccctctgctacaaggccttcccaacagcggttgccagctgtccccgggagccacgctgtccccaacagggcacgctgagcagcgctgaaggccgagccctgtctgcctctctctgacagctgcggccctcacccacctgcgagtagaaagcagccaagcgcaggcgtcgaatgggggcgaagaacaggggcggcacagcgatctcaattaggaaggtggccaccacgctgagcttgtgcagccagaccggcaggtggtgtgcgaaccaggcggcgggcgtgggcaggcactgggtctcgtagtggtaggtgagggctgcaggcgagggcaggagtcagggctggccgagcccccagactaccccaggtccagaccgggcccctcaccagtgagcccccaccacgcagggcagcggctggtcagcttgaccacgcctgaggcgaacatgaggcggaacagcagccatcgcaccagccagaaggggaggtcttcgtggggcagggcccctgcctgcctgccctggggggcctccttgcggtgggaggctggcctcagcggggccaccagcacggccaggaagccagtctctagcagcagggagtccctatggggagagcaaatagcaccaagagcccctccccacacagctgcttccctcggaaagtcctcccaggaagggcagagccctcccccaccccctacccagcctcccacagccccaggcccagccgtcactcaccactggaaataaaggaacacctggcccacctgcggagagaggggctgtcagggagcgggtgtgtctgtggactcaggtaaggtagaggcaggggtgggtggtgggggttggagatagagtgagctggtcacaggtcccacttgcctggcaggctgacaggtaggcggcccaaagcagcaagtagatgacagggtggcgcagtgggctcagcagcagggctcccagggccactagtgcacccagcaggctcagcagctccaggccctgggccgtgtccagccccagtctcggcgcttcccacagcagcgtcggggtctcccacagctgctgccagcgccccttgccctgaggccgcagcgtcctccttgcaggtaggatgccctcggggccatacaggcctgtgggagggcatgtcatggccaggccctggacagcccttgcagactagactacctctgagtcagggcctgcagatcccccagcctaggtcagagcatgcggatacctccatccctaggtcagagtctgcagtccctccagagcccgtcccccaggtcgggacctgtcaaaaccccgtcccagggctagaggcctgctcaactacctgagtcagggcctcccacccagcagagcccactgccctcttccaggtctcagcccgatctcctacctgtcccaccaggtctgggaggaagcctctctcccacctctctcagagttctgtcccccaccccaggtcagagtccagagccttacgggaaatggatcaccgcacaccttcctacccccacagcggcctgcaggacacgaaccgccgccccctaccccacgccaaggcctggccctcactcccaaccccggactgcgtgagtgccgggcacagagaaaagaggacatagggtcccgcgccgaggctgggggtgtcccaccctgggtgccttcacctgggatttgcgtgtagagggaagcgaaagcaaacatgaagacggccgccacgccctggaggaagagctgccgcgggagccgggagcccgccatgtccgctacgcggcccgctagagcagggcccgccctccgcgtccgcccgcccgcggcagccccaggccccgcctcctcaccgccccgcccgcccaatccgtggcagccccaagccccgcctcctcggcccgcccgcccgcccgcggcagtcccaggccccgcctcctcaccgccccgcccgcccaacccgtggcagccccaagccccgcctcctcggcccgtccgcccgcccgcggctgccccaggccccgcctcctcaccgccccgcccccccaacccgtggcagcccccaagccccgcctcctcggcccgctcgcccgcggcagctccaggccccgccccaccccgccccgcccgacccacggcggccccaaaagccctcccgtccaaactggtggcagcccaaagctccgcccacccccccctcccggaggcttcgaccccgccccgcgactcttccggtgagctcccgctgcgcggcgccggggttcgcctctctggcttttgcccacgttacgtcatagacatgcgcgcgacgccgcgcctacgcattttcctgggcgggaacagcaaaatggcgccagaactagtggcgggctgaggacgccgtacccctcggaaggcagccctgcggtccctttgccgcccgttccctcccggacatggaggacgtggaggcgcgcttcgcccacctcttgcagcccatccgcgacctcaccaagaactgggaggtggacgtggcggcccagctgggcgagtatctggaggaggtaagggcggcgggggagtgacgcggggtgggccggcgggtggggctgcggggcgggggctccgggcccggggctgtgggcgccccaccgtctccacgcctatggctatctggcgctctggccgcgcaggtcctcgggctccctgcttcttttcaaactccatctctgcctccccaaatcatcccttgttggattagcgtggacctgtcattgcaggtttctacccgtcagcgagccgtgaatgattgagtgggtggtgaccagccgtttctctaacgtagtggaatagactagaaagcattattgcttttattgcagttattgcgagcatgcttgtgtgtttgagaggtctggatcacgatgtcagaggaattttttatcttggattttcaaaccaatttcaagctattgccatgctctatcctgttagcgattagtgtttcttccatgtttgacagccctgtctagacctgtgttaagctgtctgctccatatttgcgcttcatttttactcctcagcccagctcagtctggcgtccacgacacttaaatgtttcttgtcttgatcagcagtgatctccattctaccaaatccaagggacataagtcagcatttgttggactggccactcctttctttttgaaacatggtggtaggattttttttccctatttcattgcctgatttttcttttctatccagtctctaagtgttgagttcctcaggatggggcctaggtcatcttctgatgcatttaccctgaagtgtcatttatttctatgattttaaatattgcctgtattaggacaactaccagatctgcagctccatcctagatctttcctccaaatctactttacatatccagctgctctcttgacatctagtgggtgtcacgcaaacatctcatttaacatatttaaagtggaactcttcatttttctgcttaaaccccagcttttcccatctcggaaaatgacaccgctgttcaaccaaaagcaaaagctaaatgtggctatagtgaagccccatgcttaacactcagttcatccatgaattccatcagttataccaccggaatatcacttgaattcatctgttgtccattttatttggtctaggccaccattgtctctggcctggatttgtgtaaaaccttcctatttgggttcccttatccctgtttttgtcccgtccaattcgtgctccaaccagcagcaagtgtgactcttaaaaattaaaatctggccacagcactgtt

SEQ ID NO: 1562801 - DNA, 4001 bp, Homo sapiens
gttcggcttccacccacaggcgcccctctgccaccctcattgcctgggagctgctccgcactcagggcctggctgggctctacaggggcctgggtgccactctcctcaggtgagcctttcttccggttccctaggacaagtgcacgggggagggcacgagggccagagagctggttgtccctatctgcctctgtgtccttcccagaatatccaaacccaggtgagcaaacgatttccatgcttcctgttttgtctggaactggccagggtggcacagaatgggtacctagaagactaaagttttaggccgcttgcatagtgatgaccaggcccacaggaaggctgggtgttttgtggcccaaaggcacctaagaaagccctgtctacagaggaccgcagagttcatagtaatgagtggccaggcccctcatcttcccttagcctgcctgcccctgtacagaacgcatttcccgcctcggacttgcctctggcagtcaagaggctgcaggtgctgcagggcagaggaaggagctgggacggcggaacagatggcaacagctcttttgtcccctgctgtccctcacccacgctcacggggcacaaaagaagggatgagtccccgtggctcctctcactgtaagccccacagctcacagcaaagctcattgtctcaccttgggtggcagccccagggcagctcggagctcagtgtttctccttcctcttctgcagagacattcctttctccatcatctacttcccactgtttgccaaccttaacaacctggggttcaacgagctcgccggtaaggcgtcctttgcacattccttcgtgtcaggctgtgtggcaggttccatagctgcggtcgcagtgacgcctctagatggtaaggagttgggagacgtgtcctttctatgggataaacagtaattttgcacttatagataaaacagcctgaccctggaagccatactgggttgcaatctggctgctggcggaggctcactagaggccctcatggagaaagtgggtcccaagagaccttccttctgtttctcatccctgacacatccctcgccttcaagatgctgattgctttagcttttcatcccctcagaagagttgtgagccccagctataaattattgctgatgtgttaaaatttggggctggctgggtgtggtggctcacgcttgcaatcccagcactttgggagcccagcacttttggatcacctgaggtcaggagtttcagaccatcctggccaacatggtgaaaccccgtctctactaaaaatgcaaaaaaaattagcagagtgtggtggcggatgcctgtagtcccagctacttgggaggctgaggtaggagaatcatttgaacccaggaggtggaggttgcagtgagccaagaccacaccactgcactccagcctgggcgacagcacaagacttcatctcaaaaagtaaataaatacataaaatttgcggctaatggtgggagctaaacctggcatgagaagacaatgcttccctccgtgttagggctgcctccagctccctaaacttgcgggtagacttcctataccaacagtaacctggccaggtgcggcggctcacgcctgtaatcccgaaactttgggagaccgagacaggagcccaggaatttgagaccagcctgggcaacaaagtgagaccctgtctctaaaaaaaaaaaatgaaaacattagctgggtgtggtggtgcgtgcctgtagtcccagctactcgggaggctgaggtggcaagatcacttgagcccagatggttgaggctgcagtgagctgattgtgccactgcactccagcctgggcaacagagcgagaccctgtctcaacaaaaccaaacaaagccacagtaacatgactcatttattttatagctgaggcccaaagaagaagacctccacttacagatcacacaatggcagaactggcctcatgaccgtttttttttttctttttttgtttttgagatggagtcttgctctgttgcccaggctggagtgcagtggtacaatctcggctcactgcaagctccacctccctggttcaagcgattctcctgccccagcctcatgagtagctgggactacaggaacgcgccacgcccggctcatttttgtatttttagtagagatggggtttcactatgttggccaggctggtctcaaactcctgaccttgtgatctgcccacctcagcctcccaaagtgctgggattacaggcgtgagccactgcgcccggcctatgagtcagttttatatgtggtggctctacaggagggcccagccccttagtgttgaggggaggacaccgaaagtaagctgttcactacttactttaacttttacttgatttagttctgaaaactcgaatccaaaccctcaagaaaggcctgggcgaggacatgtacagtgggatcaccgactgtgccaggtgagagccagtgtcccctcaaatggtggctgggacaggttcctctgcgtgggtgtctgcctagaccagatttagagaccaacttgaattgctgggctctgggtttctttgaagtctgtctttccctcacctctcaaagaaaacagaatgtactgggagcctttttcttcttcctggcatccctacagcatctctcaccaaagattctagccacatcaagcctgtttccaaggccttgacccaactgcataagtaaccaacctgcatgcacctagcgggcgaggcacagctcccacaccgttggcctcttgctcttgttgtggaaggcactattctaaaatgagaggtgcacaaatggagaggctgccactgagggctgcttgcagaatgcccctgcccatcagctcactggctcttctttctccccaggaaactctggattcaggagggaccatctgccttcatgaaaggcgctggctgccgggcactggtcatagcacctctctttgggattgctcaaggggtctattttattgggattggagagcgcatcttaaagtgttttgactagacagagctggaggtcaagtccctgcgcttgccgccctctctctagctgtttcacttagcctagagggggcaagggcaggtggggccactctggcctgcctggtcctctgcgttgtagtgctacctcaatctcgggagaaacagccctatattctaacaagttgagcacagccttcttccccttcgtgtctacactcgttttcctttgtgggcacagctaccaggggcttttggaagcccctaaccacctacttttcaacaaaaatggtactttcgttgtattaattgcaggaccttaacaggtagtcacaatagaagggttgtttctgtattttaacatttctatttcacagtcaaactcggcattcttcagtcagcttgaggatttagcattgttaatcttggactccataacttatgagtcctagcactgattttgaggaaaaggaggatcagaagttcaagggaccgtgaaagccctcagagtcagcacctagtttgagaccaagcaccctttcgaatccctggatggctgagggggctgaggccggctctgactgggcagctcagcccctcccccagagcccagggtcttgcacacccctccctgtaaccaaggaacactctgaaataaaggtgaatggctaaaatctcatctgttcatcagtgggtacagcagataggctgcagtgaatgctatcaccatctacttttctacgtccatttcaaaaccaaacattaaaaagggcatagaagcagacccccgtcactcttcaaactgttacttgtgggggtggaggaacacagccatagggaaatatctgcttgttagtgacactgggttttaagccttgattctatcccttcataagtgaatcgtcttgaggagctgagtttgctgtgagagccctcctcacgcacctcgattcctcccccaaaggctgctacaggagagata

SEQ ID NO: 1562802 - DNA, 4001 bp, Homo sapiens
ctcccatttggggacgagaaagccacaaaaccattctctattgttcttaagggtacccctgctaattaattccccaaataaaatttttggtgttgatcagctctgtctaccaatgtggtcccctggaccggacagggccctgggttggggaggtgacaggacctgggcagggagggtggtggccaggaagggaggggagttgcatgaggggcatgaggtcagtggatcagcaggttcagcgctgaaaacctgacctctgaggtccctgggagggcctggcccagggggcaagacctgaggaccccccagtccttactgctgttgcctttcagtggagaccctcctaagacgccttggggggtcagagccccgtgcagaggggctgccttctggagggcaggtaggatgtggggtgggaagccggccctgagctggggtctccaccctgagggaccctcgctgcaggatcgcctgggcatccctcccccaatttccacagagacgtgctcaccggccacttatgtcatgattctatgtccagccacaggcccagccctcaggacagaccccacctccacccttctctgcagcttctggcaaggatggtgcacagtggtgccatgtgcagggggctggcacggccactgggcatccggggcagtgctggtcgcctggcctccttgctggggccgctgggcctctggcctagaagggcaggaagccgtccactttgaggcgcaggaaggggtccagcagggcccggagcttccagacggtggcacggctcagcaggggtggcaccagcccctcgaaaggtgtggggttcaccacgtacacgtaggcagcggtccagaccagcagggcgcccagcagcagcctcagggtcagcagcctgcgggcggcggtggtcaggggcaggggcgcgcggggggcctgggggctgggctctgccgtgcagtcacctaccagagctggcctgccaggcccttggagcttcccagctttggcctccctttctgtcggggaggggctggatcagagcccaccccgagtgtccaggctgagggcagggatccctggctttgggaaaccctcctcagacagggctccccgcaccgcagccctggccccttcctcctggacaggctcctgcagccacttttccgatgccccctgccctggacctgccctcctggagcccatttctccctctcgcccaagcagggccctgggtggggggctggtctccagacccagagtggggcgtggggggctcaccgacatgcttgccatctgcttctccttcctggctcgagtgcggcactgggcccgctccctgcgggggcctcactgtcaggaccccacaccctccacccccagcctggcacccaccccctggctcggtgctgtggaggtggggggtcaaggatgggtctgccctgtcctgaccaggacaccttctgagaccctgctcagctggcccggcccctgcccccgtgttacctgagaatctccagctggatgtcctccatctggtccagcacgccccggatgtccttcttgaggttctgggggccagaggaggtaagcacagcaggcccctcgccccgccctccgtggcctctcgcccgccgggccccgtccttctgggtgctgccctgtggggacctaccaggagcccggtggcctggttgttcagggccatgtgcatctcagccacgttgtcccacacctagggggaggtggggtcacgcctgaggagcaggacccactgggtgggcccccagcacccctccccctcagccaggcgggcacctctgtgatgaccatcttcttcctctcaaagcacaggcggatctgctgcagctcgttctgagggtggggcccaggatgggcttgggcagcatcagcagggtggccagtacctccccgctgggcccactggcctactgcacgaagacctccctccctaatgaatccctcaggcccacctggagtgctgttacgaagcttcctccccccccacagcccctcccccaggcccacctgggactgttgcacgaaagcctcttgcccctggcacagctcccgccgcagcagctgcagaggtgccctgttccccaagggctgcgtgccagccgggtcggggggctgtgggagagcccccagatcagccctaagactgcgggctagaggggcgttggctgcatggggtccctgggccctgtatttacccaggccagagcagtgcagcttgagtgttcgggacacaggggcaggaactgctgccccggccccaggagggcccccagctgctcccgaagttcctgattctgccttttctggggtggggggcagagagagggggctgcctgtcatggccgctcctgcggctggggctggggcaggggcaggggcgccaggtggtgggtggggctggggctggggcaggggcaggggcaggggcgccaggtggtgggtggggctggggctggggcaggggtaccaggcggtgggtggggctggggctggggctggggcggtgggtggggtgctcaccaggctgtggttctcctgctccagctgcaggaaggactgttctgcagagcccagcagcccgcactgaagctgggacagggctaccctgggcgaggccagggcccctccctcccgtgacaggggtgggcatgggcagggtctggtccctgagccaatggatcccccctgcctgggagccccctggttcgaccctgggtgcaggggccagccccacccaagccctgcctccaggtctccttgtctcggcccctcagtgtctctcgctctctgctcctggctggacagaaagagcccgggagcctcgccctccactgtgggcccactgccccctgcccctgggactgggaaaggtctctgggactgcactgagtgagcagaggagatggggcccaggcagggccaccctacaaatccctggcagggctggtccaggcctcctccatggctgctggaggctggggttgggggacactgggggtgggggtggccgcaggggcccagggttttcagcccctccatccctccctgcaaccccttcctgatcccaggtccaggctctggcctggcccaacctgccaccctcttactgagggggctgccccaggcaacagtcacaaaggcctgggtgcagccagggcggtcacaatgggcccctcccacctggtcctgaagctgccccgcctgatgacctcactgcctctgacccactgacccaccatgcgagttttctttctttctttcttttatgggaaggggacttgctctgtcacccaggctggagtgcagtggcacaaggtgtctcattgcagcctccaactcctgggctcaggcaatcctcccacctcagcctcccaagtagctaggactacagatgtgtgcaaccatgcccggctaatttttaagttttttgtagagataagggtctcgctatgttgcccaggctggtcacaaactcctggcctcaagcgatcctcttacctcaatatctgaaagtgttgggattacggatgtgagccactgcacccagcctagttataaaacagataatacacacactcacagtgtggattcaaaaagtatcaaacaataaaaatggtgtccaagcttttcccacctttatctcctgtccctgcagacaggagcttcctctttaagctcctagaggtgggctgccgtcccctgcccctggttcacacagaagaggtcatcctgtagcccagctttgcttttcacctaatatatctctgaggttttaaaacattcttttctagctatgtattgaatatttacattatgccagatccagtacatgccattgttatcctctgtttttttttttttttttgagacggagtcttgctctgtcgcccaggctggagtgcagtggcgcaatctcggctcactgcaagctccgcctcccaggttcacgccattctcctgcc

SEQ ID NO: 1562803 - DNA, 4001 bp, Homo sapiens
tcctctcatatactttaaataatctctgggttacttataatacctaatataatgtacgtactatgtaaatagttgtattgtttagggaataatgacaaggaataaagtctatacgtattttcagtatagatgcaattatcaatttttttcctctaatatttcaatccatggttgtttgaatcaacagatgcgtaacccagtgatacagggggctgactgtattattcctctgtagcttgagggaggacccagcaggatcagccattcctcatcgaccttcatggactaacaaaggctccatttcagaaggtctttttttgtgagccaaggtctcactgtcacacaggatggagtgcaatgcgcaatcatagctcactgcagcctcaacctcctgggctgaaaccatcctcccacttcagcctgccaactaagtgagactacatgtgcacaccaccatgtccggttaatttttaaaactgttttgggggatggcatctcactatgttacccagactggtctacaactcctgggtcaaatgaacctcccgccttggtctcccaaagtgctgggattacaggcatgagccaccgtgcctggacagtgtcctttcaagcttctcatgcccttacttcctcctagacatggatgtggctcaagaatatcttttacccaagaggaaactttaactcggtcacagaacgccaggtttgggttgcagacgcttcttgtgggggagggaggtcttttcccctgtattcacagaagaggaggttgccaactggagatggttcatttccaagtttgtctggggtcccccagctatgcaggacccagaaagcagatgtctagacatccaggccaatggtctttcactactctgtgagtctcccgtgaacttcacctggaacctggctgggacacaggtccaaaatacgtaacttcagaacatacccagaattccttctgaccagcctggaaaagttctagaaaatcacacttcagccacgtgtacctaccctgtcaggtgccaaggcaggtacagcacacagacaatcccacatgacccttgcactgccccgggggtgttaaaagagagccttcccggttcacagacttacacactgaggagcagagccagaaattcattcaatcctgctcgcactttgaagatggtcctaacagcaggaacctaaggggtcagggggccccaaagctccagaccctgatgtgtccttactgggcagggcaagaaatgggtttttccccctgaggcaggatcagtggctccagtctgcggcagtcccacatggatcccctactacccctacgcaccggtcctggcccagggctagctccttggtgagaaactcaaagaagtgggcgctgtggctgcggttgtcctcggcggtgcccactacgccgatggaggagatggacagctgcgcgcagggctcggtggacccgctcagcgccatggccaggcccggccgtaccgtcacgttcacgcgctgagggggacatgaaaagttttgcccgaagttggagccggccgggctacctctggggacgggacccgagcgcgcgaaagccgaaacgcgcagtgttcgcggggcagggatcccgatacgggccgcggtccctgaaggtcacgcccgggtcatgactggggagggcgacaagggaaagacgtgcggagggggagccgcgggatcgtggagcacggaaagtcagagcttggcgtgaggaaaggagtggggagtggtccctggggaaaagattcggggtcactgtcggggaggcggagcagggacagggccggacccctggcccaccaacctcccctcgccccgtgctgcccggcccacgcttacgtccgcaggtttgcccaggatggaggcagcggcggcgcagagtcgtttctccagccccgcgggcactcggttggcgggcaaattcgtgtccagctccaggaacggcatggcgggcagaggaacggaaacagctctggcggaagaaaagctgggggtacccaaggctcgcggaccagggaggaggggcgaggcgccacagcaacctggcttctcattggctggacagagactcggcgctccccgattggctgcctagggtacctcccgcttctgcaaacaaaagtcacgtgtgccggctgatttccggaagtcccatcgtctccgccctacgtgtagccccacccactacaggtctttaacccggtagtggacccaccctgtctcccccgaccctcctgcctggcgccaggtgggtttccctctcaagcttccgcgctgtggtcgcccggttcctagccctattagaggtctgaacaccacacccccgacacacaaggacacacacacacctataggggtcttccccaggctcgaccctaataaccaatacaacgggagcttaaagtttttttgaatgatttgccaccatttcgaagtcaggcaatttcatgttcagtatggaaatctgcgcttgggcagtcaggagatgtggttactcgcgggggcgcgggtagggctaggctcacgacaatacctgtccctgcctggtccccattgacatctgcctgtgtagcctcttgtgccggtggtgagccactgtccaccagggggtggcaaaatatgttctttaaaacatggaaaggccgggcacggtagctcacgcctgtaatcccagcactttgcgaggtccagacgggcggatcacctgaggtcaggagtttgagaccagcctggccaacatgacgaaaccccgtctctactaaagatacaaaaattagccgggcgtggtggcagacgttgtaatcccagctgctcgggaggctgaggcaggagaatcgcttgaaccggggaggtggaggttgcagtgagccgagatcgcgccattgcactccagcctgggtgacagagcgagactccatctcgaaaaaacatcagaaaacatggaactctgttggcgtggcttaaacatgagtgtggtcagtgtggcaaaatcacttgaattgtacattacaaatatgattgaagttgtggtcgagcaatgtggctcacacctgtaatctcagcactttgggaggctaagaagggaggattgcttgagcccaggagttaaagatcaggctaggcaacatagcaagattctcttctttattttctacaaaaaaaaaaaaaaaagaaagaaatctgggtgctgtggtgtgtgcctgtagtcctagctacctgggcggctgaggcaggaggattgcttgagcgcaggagatctaggctgcagggagctatgactgtgccactgcactccaccctagatgacagagtgagacccaggctcccccctcccccacaaaaaagaaagaaaaaatttgcaagtttatatgtacaatttcaactacgtgtataaaattctctataagtgtgcatacttaaaggagcctccactgaaaggccgacagagtctctgtctgtcatgatcttgtcctattagcagtttgtttattagatgactcagatatcagaaggtctgagacacacgacaggtaaatatgacagtcctaaggggagagggcagggacaggtggcaagtctgggaccaggtgtggggcatggacaagccagtggtccgggagtggggtgtagagaagactgtggtcaaggttatgaggaggcatgggagagggccaggaaataaccagggacttcccttcctgcaaggaggttcatgaaccagccctgcaccccacttgtggaacacaacatcgccccacagtgaggagagagaccgaggagaccaaggctgatcctgattcagacatctttccaccaggtcacccctcatcgatgatacatgctcagtccgggggtatcccccgcaaggaaacactggggctgaggagcccagagaggtcgcctgacctggactggggctggggaggtcagggaagtctccctggagaagagacagggtgccaaatgcc

SEQ ID NO: 1562804 - DNA, 4001 bp, Homo sapiens
acgctgtaggacacactttcatatgcgtccgtgtgaagagaccaccaaacaggctttgtgtgagcaacatggctgtttatttcacctgggtgcaggcgggctgagtccgaaaagagtcagcaaagggagatggggtggggccattttataggatttgggaaggtaatggaaaattacagtcaaagggggttgttctctggtgggcaggggtggatctcacaaagtacattctcaagggtggggagaattacaaacaaccttcttaagggttggggtcacggcaccaaatttcatacacgtccgtgtgaagagaccaccaaacaagctttgtgtgagcaatggcctggcctgggctcagaggcctgacacacacagtggccaattatacaggacccccaaactggccagtggaccactgcaaccgccatttactttctccgctgcaagcaccataggctgattcaggaagataaactgaggctcaaggaatttcgaagtggaacaatacaccaaagccttaaacctgaaatgactatccttttctggggggtgggggggaaagaaaaagaaaaaaaagtttctggggctctcagggtggcccagatgccagggtcccagaagtggccttttctagctcctgtaactaaacctggcggaaaactccccgcctgctcaccccatccgcccaagaatgcgccttcccgtcttcggtggccctacccagaatcccaaaatgtggattccaacccaggccctgaacgtcttctcaaatccccgggacttacgttgcggcgcgcgccccgctgtcgggtcttgcccctcgggcggtaccgcccaggcagccctaaatccagcctcccaggcccccagcagcgccctccgcccctccaccatcccgtccggctcgcagtcggggccaaatcgagagacaagagggctgtgcctgaaactgagcggtttcaccacttggcacctcctggcagaaacttccctttaaaaaaagaaaagaaaaaaaaaaaaagcagcagcacttttgggctagcatttcaatccttcctgccctttagagttcccagttctgcttccagctgcctttgggtgttccactacaattgagttgtaaagatattctttaagtgtttatagaacattaagacttaagaaaaatctttaaaattagaggagggaaaaaaaagccaccttatcgcacacatccaggaaacgcagccccgtgcatccctgctcagggataagcaggcgccccaggactcccggggacagatttttgggcacccgagggagtcacccggcgcacctcggggtccgcggagaggcccagcccctcccgcggtcccttagacgcgccctccgcctggcccgtgtggaccgtcccggccattgtttacgggggaagcctgtcccgacgcattgttttggccatttccaacttcccccggcccttcccggggtatcgcgggggaccctacgccaacgtcccccctccgcccgcgccccaagggccgactgggcaaattgggagacccgccccgcggggcgacccaacttttcggaacagccccccaccgcccacccccgcagacccccggacccccgctcccggcggagattcagggaaccccgcaccccaagcccttctgaatcgtgcggcgtgagtgtgacggccaagagcggatgcagcccgggatcgcccgcaccttcccgccagcggaagcgcaggagccggctggggagggggcgccctagaaagagcagctagaaagctgagacggggaactgaggtcatcctggggggggacaagacaacgagagccgggcgcctcgggggcggcgcgggagcctccgcaggaccaggcgggcgccccggctggcgcgggcggggggcgcccccctttacctgtggctccggcccctcggccatttcctcgcgcggcggctgccgggactgagctgactccactcgggccggccgggtttgaaagaggaggagcgggcgcggaggggagggggcggggagggcggagggagggaggcctcgcgcagttttctcggccttttgtgcggacacctcccggattccgcgcccgcacccggccccccaaaagacacggggagccgcaagcgaggggtgcagccatctgccgaggcgcctagtgccttcgcgcctccaagacccccaacaaaaaaggagcgtcccgcacccccacccccgcccggaggatttaggggccgggctcacctcgggcgcggggctaagtgcaggcgcggggggggtccctagagccgccagggcgcggcgcgtccggcgctgggggactgttgggtcagaaagtgttcagggagcagctgctgcgccctccctcggcccgccgctcggagacgccccgccccgccccaccccgcccccgcgcccacgtgactagcataggcccgcccccgctccgccccccgccacagactccgcctccgggacgcgagcgagcggcgagcgcgcgcactcccagttatcgctcggcgactcccgcgcacgcacgcgccgtgccaccctccccgcgccccccgccccatacccctactcccgccatccgatttaacgtggcgggcgagcgccgcggcggtagccgtgacaggtacccggcggggggggcggggggggccgcgagggtgtgcgcaggcgcagacccgggtcccgtccccgccgccccctcctctgcaaggtgtgcccgggcgaggggaggggcccgcggcccgaactcctgggtcaccccgaattacaaacaaaaccttaacgccgttgctcgcgggttagaaggcagctgtgcgcgaaaaacacctcagattttcttcaagcgtgaggaaggtcgagaagataaagtttttaaatgagtatcttcagaaagctatttaattgttctgatttttttttttctgaaaggactgggcttgcgctattctaacttgagatttctaaacttagactaggttccaagaatctacttggttttgatagaaatccatttggaggaaaccggggacaaaaaaaaacaaaaaaccgctaccctttcccctcctccctacgcacaactcatttaaatcgtttcccaactgttttttttttcttactgaaaaaaaggacaaaaaaaatcctgattcctaaggcctgtgatatttccccattttaagtaagcctcgaggaaccacagacataacaaacatatccacaatttttctaccccaaaatgcaaactaatgcaaatgtgaaatggatctatgcaagtcgctaccaacaaaatagccaaatatttgtttttttactggccttcggcatatccaaaatgaaaaaactttaaaacacatcaagaaaagcatttaaaatatctatttcctaaatcaaaagaaagaacgcactacagaaacgatccggagctggtgagcaatgcaatcttaataaataggaaaaggaatttgagaagacagctcagcaaaggggaagaatttgccaagtgtcatgttttgctgtcattttatatataactactaaccccccatatggtctggttagtcttttttaaaaaggaagccaatcaattactcacaattaattagcagtgccggtagattcttaggccagcactaaaaaactaaattgggtgaattttttttcactcaagtccactgatattgatcacttttagtattaggagtccttttctgacaaaagatgaatacctatctttaaaatatattttttaatcttattgtcacattctaaaacacagtccaaaaacacttcataaacaagaaacttcatttaactttatgaaaacaaatgactatgagccttgctacacaacaaagaaactatgaacaagtgcaaccaggttgagcctttaagtgtagcctcattctacatgttaatggataacctttgaactctgagaacttgaatgctgtaaacacaatagcactgacagttaaaaatt

SEQ ID NO: 1562805 - DNA, 4001 bp, Homo sapiens
ttcatagagctggtgtgagcattaaatgaactgataaatgtccctggaaaacagtaaattgctgcgccaccaccattagcatgtttcaattgccatcaccctcactgtctcctgttaccatcctttgaccagggcactcccagctgcagcctttctatcctctaatccacccttcataactgtaagatcattcagctcccaagaaccacagtctacagggtagccacatttccaaatctcaaaccagacccagccagtctgcacttccaggacaacgggatattttcaaaccagcccaaaagagatgtgtggctcagcataagaggaacaggagaaaccgaggcctcttgccatgagaatgagcttggaagtggatctcccagcctcactcaaacgttcagatgactaaggccccagccaggagcttgaatgtgtcctcagatcacaccctgagccagaaccacccagctaatccactcctcattgctgaccccctccccccccgtaaaaaacctgtttgctgtttcaggctgctaagttgtgggctgttttgttacacagcaatggataactaacacatgaggcctggcgagcacagagcaaagctgcccaggccctcaagtctgttcatgtgggtgttggcctgtgtttgcagaaatccagccactgggtcctcccatgcagtcactactgctctttgcatcgacacccgccacaccccctgcctaggccaggagctccactagtgcaggaatggggtgtgccatcccaggaggatccctgacacctggcacagagccagcagcaggcagtacttggtcagtgaataaattgcccttcacctgtacatggaggggatgtttttctaaggtgtaattaagtatggggctgtgaagctatgctgaccagaaggctctaaaagcaattacccaccaaggggaaaaccttcctactcattcatttggcccactttattgaggactatgtggaaggccccctggtgagactggggaatgcagcaataactgagacagcttccggctgctgccctcaggatgcctgagctggggtagggccagggtgggggtggtggtgtgacagggttattgttcacaaccccctcgggccacaagccctccccaacaattccaaaatccaagacactctggagacggaaagcttttgttgctcatttggcgataaaacctcatttggtgcatgggccgggggcagtggctcacgcctgcaatcccagcactctgggatccgagggggaggatcgcttgagtttaggagttttgtgaccagcctgagcaacatgtgagacccccatctctaccaaaaatacgaacattagctgggtgtggtggtgcactcctgtagttccagctacttgggaggctgaggtgggagaatcgcttgagcctgggaggtgaaggctgcagtgagctgagacgatgccattgcactccagcctgagtgaaacagtgagactctgcctcaaaaaaacaaaataatgaaaaagaaaacaacaactgtgcataggtatgggctacagacagtcttttctgccctacttagaatgaacatgccacatttgctatagaaatatacaggtgctggggcaagtgtcacccagcccctgacactgtttcaagttctgagaagtcatgcatttctcaggtccccagagtttcagagaagagtctgttggcctgagttaagaaggaacgccttcaaaagcactggggacacctgggggcaaaggggaagggggtgccccgggactgggcgggtacctaccggaacgagccgtccaggttggcacggtggatgaagccgagcttagtgtcagcccagtagagcttcttctcccccaggtcgatggtcagtctattgggccagtaaatgtccaagtccacaatgatcttctgggtgctgtcgtccatccccacctgctcgatccagggcgtctcaccccaatctgcccagtacatgtacctgtgacgggggcagggcaagaggagaagcagctaacacagatctgtttttttgtttttgtccacacagatgcagacatgaaacaatagacagtgaacttgccctaaaatctcacccatcagaagtaaccaacaggtaaggtttcaggtattcctgccttaaattgggcaatcaaaatatactatttccaacttgttctcagttaacagtaaattctgggcaccttcccttctcgtgaatagaaagattccctgttcttttgatgactgcatagtgcactgtgctgtaagttctttaaataacttcgggttatttctgatttttttgctaccatgaaaatgctgtaaatgaacctctaaaaggcaattcaaaacatgcaggatagagtattatttagtgctaaaaagaaatgacctattggctgggtggggtggcacacgcctgttatcccagcactctggggggccgaggcgggcggatcacgaggtcaggatatcgagaccatcctcgctaacacggtgaaaccccatctctactaaaaatacaaaaaattagctgggtttggtggcgggcacctgttatcccagctactcgggaggctgaggcaggagaatcatttgaacccaggaagaggaggttgcagtgagtggagatcgcaccattgctctccagcctgggcgacagagtgagcctccgtctcaaaaaaaaaaaaagaaaagaaaaagaaaaaagaaaagaaagaaggaaaagaaatgatctatcaagccatgaaaagacatggaggaaacttaaatgcatattagtaggtgagagagccaatgtgaaaaggctacatactgtatgagtccaactctatgacattctggaaaaagcaaataagacagtaaagcgtcagtggctgccaggggtttgaggagaggagagggatgaatgagtggtgcacagaaaatcagggcagtggaactatcctgtatgacacgtaacggtgggtatatgtccttattcatctgtctaaacccaagtgccaaacacctcccaaccaagtaccgattacctcccaagcacctagcacctcccagctgagcatcatgcacctcccaacagcacacctagcacaccgaggcacagagcagcaccatgccatccttgtctcgtctttctatcgaacccacatgcagagtgcctgcaagtcaagctggctttcccttcagaacagatcccgtatcttgccacttgtcacccccagaagtgaggggtccccgctgctgccttctgttgcaaggatcccggtaataactgtggacagggctcctgcccccatgccaaccacctcacatacctgctcacataggcacatacatgtgcacagctcttgctccaaccagcaggggatgccctccagcacgagtcagacgtggcacctcctctgctcaagaccaattcgtcctctccccacaccttgggccctgttcccctacattctgctgcagcccctcaaataagccccaccccaaactagcccagggcctttgcactggctgatccctctgcctggaccgcactttccccagatagccacatggttctcagcctcatctgcttccagtctcggctcaaaagtcaccaagaggcattcccggcacctgagctccgatggaagcccctcgccacagcctccaggcactgctttatccccccacgcacacgtccctcttgaatactatttatttaccatctcctcccacccactgaaagggccagagactgggctataccagctgtgtggggtgcacaagggctcacaaatgtggctggatgcctggttgggaggtgagggagctgcagggacccatgctgggagggaaggcgaggatgggaggagcacaggtcccagcgacacgatgaccgcggcagccgctggtaagcgaccgcaggccggccctgggagagggctcccagcaggctgctatcttcggcctctcccactgctgcagatgccc

SEQ ID NO: 1562806 - DNA, 4001 bp, Homo sapiens
gctgctcagcgtccccagcacacccaccccaccttgcaggggctcacccttcccgcccagctcaacgccacctcatccctgaagctctctccctcccctccaccaacgagggcagcttcaggtcccaggaccgtgcctgggggggctcccaggcaggaccaaacgtacccatcaagtaaatcaccctctttactcactgcccagatgctcccgggtcactgagatgaagggaaaccctggttccgaagcccaggggcaccaagagctaacacagttttgtggccacttgagacaccaggcaacacaggtgcaagatgagaaacacctccagggcatgcgttctggtcacggctagacccagggccctggctccttggatggggctccaccgtggcctccacacagctaggccatcagaatgtagcgatgacccccagtaactcagacctggtttctaaacagggtcccacagagaacaggtaaggcactgtccatgcacttccaactgcgtttcagaaccaccccatgaagcaaccaccccacagccacctgggtctctgctgcaccccaggcccaagcctgctgctggctaagcaggttgaggccaagcctctccaagcatgggtggacaggcttcagggtggcacttacgcaggtggatgaggggagagcctagtcctctcaggatgtccctgcagacaggctggacacagctggggacaggaggatgctgaggtgattctagtctcaaaaaccccctctctagctgagggaaagatttgccggacctcaagattcgcacatattaaatccccaaggaaagttctctgctctgggcatctgtgccttgccaaactcaccagcgtggcctgacagcgtacggccggcacaagagaggctcgactcaggctctctcggcagccacagcaacactcaagagagcagctgagcagcagggcccagggatcagctgtggacggggtcctgctgctcaggcccagcagcatgtaaacccaaagaccccccaccacccactccacaggacacccccccaagctttcacccatggccctccagtgggcttctaagtttggggggcaggggcggttacaggattctcttatgaaccccctgtggcccaccttctacatgctcctgaccccccagggcccggggatccacacacagtggcatcagcatttctgattgtgtcctatgaccccccagttgggatttttcagagtttccggcagaagttgcatgtggagacccatgcagactcggggcccccagggtgccccataaccctgacacggatccttctgaggctgctggggtcaggatgtggctccctccccgagttagggcattgttcactgatttgttccagacctttctggtttcaaggatgcacagagccaagaaggtcagggtcagagatcccccctcaacatcatgtggccatgcccccacagtcacaatccgcatgggggcccggggctgagccagcccagagcatccctcatgccctggcccctagacctggccctgcagccaactgccaggtctcctgagtgccctaccaggctgcagccttcagccttcaaacaacagtagccccctgcgcccaggctctggctgttgccaggaggaatgcagagacctgaagagctgttccaggatcccggcgtccagcatttcaaggaaggacaggagccccttctgaatcctgctccaagccccctcgtgcataatccgattcatccactagagggcgcccaggtgatggtgacagcggcacaggcccagggctagggaaacggaggcaggcaggctggggacagtgaggtggaggcagcactcagaaagtgccccaactgcctggctacaatggaaatctctgagagccaaattcagatctggtcagaggcgtctgatttggtgtgtattggtagggggagggggatctctgaatttcaacaagttttctccctctaggctccactcccaaaatgttctgttgacattggacctgtccttcaaggcccaggtcacacggcaccgcctcctcagggaagctgttcctccccacaccccggtggatggctgtcccgtacccccagtctgccccatggccaaggcaccacccctactggctcactggggtcctggcagaagccctctgctctccacagcccctagcacagccccacgtccacagcagcgctacatccagggatgagcagggagaatctgagaccgaaacctctggggcctgcccgtgcttggtgacctcgggcaggttcctgcccctctctgggcctgtctcctcatccacagtgaataacagccagggctgatggtgcctgagtccctgtctagctatgacttagaggggaccatagactccacgaagggtccctgcttaatcagccacggtggggagatcacagtcctggaagtcctccagggcttggctgggaagagccctgtccacacggtgtctacagaactttccaacgagactgccaggcacagcgtgagacgaatcacgcttgacctcagcagtgtgtccatcatggccccacagagaacgccagtgccagacagaaaccggcatttgatcccaaaacacattccaagcctgccttgctagctagttccctccgtcgtcctaagaaatcactaaagtacgctaggcgcagtggctcacgcctgtaatcccagcactttgggaggcctaggcaggtggatcacctgaggtcaagagttcaagaccagcctggccaacatggcaaaaccctactaaaaatacaaaactatgctgggcttggtggcgcactcctgtaaccccagctactcaggaggctgaggcaggagaatcacttgaacccaggaggcagaggttgcagtaagctgagatcgtgccactacactccagcctgtgcactggagtgagactccgtctcaaaaaaaaaaaaaaatcattaacacaattttcacacactacccctcgagctatgaggatgccccatcctactgacaaggaccccaatcctcagagagggtaggctcccggcccaaggacacacagctgcaagaggaaagctcacttcacttcgcttcctcaaatacttcaatcccaggagccagcacatccaggaagcgcgtttgtcacttgatgcctggctgcctccatcatcccaccagtatctctgtaggaacctacttcaggccaggccctggaccagctgctagggaaggagaggtggatgaaacagacttgggatctgccctctggacgcccttggggtcacagggcagagaccttaggtgaacgacaccatccgtgaatacacagccacaaactgtactgtgaaggcaggctagggttatggggtacgtgcaggggacctgctgagattgagaggtctgttctccagctcaagagcctctgggatttaggtagctgtcaccatgtggcaggttctggcggggcgtcccaaatgggcctagaaccttcagggactgagcacacccagccctagccctctgttaactaggtcagcaaagggcctccagttccaccatcaggaacccattctcggcatcccatccaattacttaggaataaatcaaacctctgtggtgaagcagtcctttcactgctgggatgaatctgtaggtgtttactgactccagggaggagtctctgacacgcctcaggctacaaggcccctgaggtttttgaattttgcagagattgtgacacctgggagagagccaggacccaacctatttgcctgaaggtctgagtgagctgtgagcagtacagaggtgaccccagtgtggtggggactctgtccagccaggctggcagggagcagctgcagagagagtcccaccagcctgggctctgccagatgcctgccaaggctggtgcccacagctggcctccaggaggttgtgtgtgtagtgaggtccgggcagcagccatggcc

SEQ ID NO: 1562807 - DNA, 4001 bp, Homo sapiens
cagagcccattgtctcgaaggtccagccgcttgacatatggattggagctcaatgaggaagccagagcccgggcgccctgggacagacagagcaaacacactggccactatcctggctcatgctccagggctcagcccactccacatcctccagctggaaagccctccccttcccacctgttttaagtgacacctgcttctccttttaggctctgtgaaggtctccccccacccccagctctccctgaccccccagcgggttaggagcctgcaggatccacaacccttaacgccacctgtcacagcctcaatcccatctgtctcccagatgtggagggtagggcatgactgacacaggcagaagctggggagtgtaggggacagacacaggggcactcccatggctgctgtctcccgaggcctctccccgtaagcctggatacagtgtccctccagtggtacctggggccccaggccacggtgccggaggttcagctcttgggcgctcccttggcgcagaaagcaggagatgggcacaacactatgggcccggcaagacctcaggtacagtgtgtccctgaccagttctccaagcccatcggtgcctggcaggagacagggggacgaatgtggaccctgcacagctacagccacctgtgtcctcccctgccctgtgtcactacctggcctatgttttgcctctagaagcactgcttcctgtgcttcttgggaccactgctcccatatgacagatgaggacatcaagcctcaggcaacgcaaatcttttccttaaagtcatacggctatcaaaagaaagctggacaacctgggcaacatagctagacaaattttctttttttttttttcgagacagactcttgctctgtcacccaggctggaatgcagtggcacgatctcggctcactgaaacctctgcctcccaggttcaagcaattctcctgcctcagcctcccgagtagctgggattacaggcgcccaccaccacactgggctagttttttgtattttcagtagagacggggtttcaccatgttggccaggctggtctcgaactcctgacctcaggtgatctgcctgcctgggcctcccaaagtgctgtgattacaggcgtgagccaccccacccagccaaaaaatttttatattagccagacgtggtggtctcctgtagtcccagctactcaggaggctgaggcagaaggctcactagagtgcagagttcaaggctgcagtgagctattatcctgccactgcactgacgcccgggtgacagagcaagaccctggctctaataaataaataatttatttatatatttatttattaataaatatgagcccaagcaacccaatgttgtttgtagtagaagtcatggctggcctgcgctgagcatcccacagctagtggtggtagctaatcctgccagagtcaggcctctgcctgtctgatgccaaattgcatgctgtgtcttttaacctggattgcaggccacaaatgttttgtaaacattttacgggagaaaaaaccgagatagttctaaattccatacatccattagcttagtttttcctgtggattgggaaaacccggctctgatttcatttcagggtgggacagcccttggtgcactgtctggcgggattttgcattttatcctgatgcttccaggagcaatgaagggaaggcagggggctggaggcgccccgcaggcgggtacgttccctgctggccttagccccagcccgcctcccccaacccctgcgggagaagacccccaaaggggaggagtcgggcctgccccctcccccgagcaccttccgtctccaggtcggagtcccaattggcctcgggaccctgctcggcctcggggacccctgaaagacgcccacaggccaccatagcctcttctttctgctcttcatcctccccagacctctcacaggaacccctcatggttacgaccctctcgcagtctcagacactgagtcggagacagcttgaccccgcgcccagagcgcggcccgggattgtgggcggagtctgcggctgcgctgaccaaccgaatgtgccgtccagcaacaggcaccccccacagccaatagcgacgcgctctcccgcggcggtcgccccggcaacccggtgttgtcggttgccgtagaaactgtggccggcttgtgctgaggctcctcgcccgggctgatacactgcatgcgccacagaccatgcaccggattgggcgccttgctgcgtttatccccctgcctcccctaggcggttccagcatcgcccccctttcatggaatgggaaacatgcctgactccagagcttgtgttttcttcactgcacttgggaatggcttttcaggagggcctggggaacttcgcagagccaggtcaccctctcactctgtggctctcagttctcttgcatgcgctggcctttgcatacgctgttcgctcccctgggaacctccatccccatctttgtctgcttgttgaacttcagaatctgcaagcgtcagctcagaagtcacttattcctgaagctttactcagagcccccccggggctgttgctgccctcaggccgtcttctcacagcactgataacagctgtccttccccatcctctcaccacgtccactcccaccggaggaagtgaggccagagggcagggacagagctgctgttttctgtgtgccaccagggcccagcaaagagaatgtagggagggtgggaggtgcagggcagctggggttaggggctgaaggctgggtgttggaggctggatcctgctttagtggaagtgtccctttaacagcggctggcgtggcctggctcgggccctgctttgcctcctgttcagctgcggctgcagctgccatgctgactcatgtgcccgcagctagcaggagctggcagcatgggctccccaggggccacagcagactaggggcttctggattataaaacggagaagtatgtgatgaccaggaactggtgggggggcgccctgcagaggctgctgcagtttgggatcgtcgtctatgtggtagggtaagagagaagagcttttggccaggctggaggggcaagggaagaggtcgggggtggggcttggtcctgctgggttgaagttgagggttgggctgtttaggggctggaggggaaggggccataatgggacggggtgggaggtaggcaatacaagacaggagagcaagaacaagctgtgtgtttgtcctgtgtgtccacctgcctgcttcccagtccctccccacggccccacccagggggcacaagacattgtccttaacatctgtgagagctggagcactaggcccccagagagaccaccagctatatctccggtcaggggagtctataagctcggagctgggtctactgaggctgggggtgggtgctggctagtgaaggtgattgtctgagggcactggctctctgatgcatggctggagcttctgtctcgttcagggagtctacagtgggaagtggggccagagaggatgctggactgggagcctgtagggtgtggggagagaactgagcatgtagggcccagctctgccccgtcactacacgctggggggacaccacactgcccatcttctccttcccaggtgggcgctcctcgccaaaaaaggctaccaggagcgggacctggaaccccagatttccatcacaaccaaactcaaaggggtttccgtgactcagatcaaggagcttggaaaccggctgtgggatgtggccgacttcgtgaagccacctcaggtgggggccctgatgttgctgacgggggcgcaagtcctttccccactgacagcttgaacacccgccatgcagccagtgtgtgcgagagagaagcatgtgatgccaaaggtggctgcaggttctcaggaagggcttcacagaggagtggcacctgaacaggactttcagggatgtgtaggaggtttctgg

SEQ ID NO: 1562808 - DNA, 4001 bp, Homo sapiens
atactctttcagagggtctctttgttttgagacggagttttgctcttgttgcccgggctggggcgcagtggtgcgaggtcagctcaccgcaacctccgcctcccgggttcaagcaattctcctgcctcagcctcctgagtagctgggattgcaggcatgtgccaccacgcccagctaattttgtatttttagcagggaaggggtttctccatgttggtcaggctggtctcgaattcccgacttcaggtgatctgcctgcctcagcctcccaaagtgctgggattataggcgtgagccactgcatctggcccagagggtctctttagaggacattttgagagctgatggggcagccacagccaggaggggcctctagaccccatgtgggccttctccaatccataggtgatatgctctgtgcgtgggtcccaagcacaggaagttgggccaggcaggggaggccgtgggtcacagctgcagggtccctgcaggttatggagcaggataggccccggctggacctcaaatcccaacctctgagacacaaagaggtggtctctgaggatccttctttccctctagtttcccagctaaaatgcccaactggtgtcttggactccaggcagcatcccagactgagatctgtgcctctggttgtctggctgattcagtgctgctctgctgtttgccacagatgccagctagggaagatccaggaggaaggctggctgatgagcctggcagacccagacagggccccagaccgcaacctgccagcctgccttccatgggtctagacagctcctcttaaacggacagctccatttttccagcctgctgaatccagagttggaggaggtggagaagggaagggaggaagaagggctctggccctggcttgccccacattttctctgtgggccctggggtgaccacttcgctccatgcctcagtttccccatttctaatctaccttctgcaggccgaacacctgcatggctgacttcctgctcacaggatggggcaggtagtggtggtagctgctgtagggggtggggacggggtggtgagggaagtggcatgcccaggtgattggggggaccagcatcctgggacaacccaggggttgggatctgggtttagtgtacctggtgtgtgtaggagcagagccaccaccggaccgagtgttgtgatgcacagatgctggggatgtgtactctaagggcatgagccgcctgttggagaactggtgatgcatggatggctctctgtgggctgccatggtgtcttggggtgaggctgcatccctagaccagccctgggtcctctctccagggtccactgtctcccggatcctggaggagggggaagttaccctcttccattgtctctcaatacaagatgatttgacctcacttgccactcctcccgggcccctcccatcttgccagggcctgaatttgggctcttaggtccaggctaccgggccaccctcaacacacacaacccctctcaaaccccaaagacccggacacactcagcagccccctcctccacacggtccgccgacctcacccagccctcactccaggcggtcgccctctcgcccacgcaagaccccgcgtgctgcagcctgtcgcgccctcggaacccgcctgcgcgcgccagagaccagctccgcctcgcctcccggcggatacaggcccacaacccatagccccgcgcctcccagacccccagacccccagaccctccctggccgccagcccaggggcggacggctccttctctcgcctggcgcaggaggcgcagcagctgccgggcgcgctccggccgccgctcgcggagcgtggactggatctcgcggagccaccgcacccggcgctcgtagggcgcgggcccgcagccggccgccgccccggcctcagagccagcctcgggcccggcccgccggcccagccgcgcccccatggccgccgcgcgatggtcgccgaacccacaggaggccgggctgtctgcgccccgctcccggggccgcccctagtcgccccgcctccaatcaccgcggccctgccccgtccgggtccgaaggctgagcgcccgccccaccccgcgccggagcgaggccagtgggttcctcggtttggcctgatcacactggaggaggccctgcttgcgtcagtcttggcgctagaacccgagggcctggagccgccaggggagacgcggagctcggccgagacgaggtggcttttggcacctctttaccctctggccccagtgctgactggggaatagtcgctttgaccgtgcaaagagcattctaggcggggtgggggggttctgctgtgtgtgccagtgttaggtattgcccccattgcttttagaaatatgccctgcatggtgaatctccgtctctactaaaatacaaaaattaggccgggcatggtggctcacgcctgtaatcccagcactttggggggccgaggcaggcggaatctaaggtcaggagttcaagactagcctggctaacatggtgaaaccacatttttattgaaaatacaaaaaattagccgggcgtggtggcgggcgcctgtaatcccagctattcgggaggttgaggtaggagaatcaattgaacctgggaggcggaggttacagtgagccgagatggcgccaccgcactctaccctgggtgacagagcaaaactctgtctcaaaaaaaaaaaaaagaaaagaaaagaaatctctgcagctggcagttgtggtgtaggacctgctcacgctacatggacactcctgcactggcaaatatttactgcctcctgcttcttggtttggggcaggcccccacctctgaccccagcctgggaaataaaccggacgaagagtcaggttaaccgttaagcccagctctgggcaagctggcagcaggcgggctgtatctgccgctggcttcagtctgcctccctgacaaggggtgggggtggcggcaggcagagtgagatgggggccctggctcctctgaggaccagggtgaggtacggacccacccagctcaaggtgtatcccacttcccagggctccctcagcagaagcctaggtctctgctgcaggcctgctgggcccctgcagccccaatcccggctctgggacgctcacatctcctgcgtggggaacgtttgaggcactgatctgcagttcccacttctctaagcaaggagcacgtgtttagcctgtgaggactggtacctgttgtgcaggaagggctgagcactgtccgagggcatatatgagggacgacagccaagcacccgtgtgtatgtgtgtgtgtgtgtgtgtgtgtgtgtgtgtgtgtctgctaattaccctatgaagattcaaggttccttcctttgggttaagcactgcctgcccagagatggcagtggggagagggcagggtgctaggctctgtcatcctgtggggctgggcccctgagacaaggcagaggacagcaggatgtcttagccccttgaccatccacggacccccaacccctgctggagcagtgcttgcacccccttctcccctggcacctgccagctggacccaacagcctctcctcccactccagtgcagccagcattgtcctggggccaccttggcaccacaggtttcctccctggcaaacctgcatgacggccttgcgtgccctcccccagggccaaggcgctgttgctgaactgaagtggcaacctacccggtcagagctttaagctgcagctctgatgccccagggacctctcagacccccctgcccagagcaggcagcccggtaagccctcctcctcttcccctgcagcctcagggctggagccacagctgggagggctcccagatcctgaccatatcctcccagaggctgagccaggcctgggcactgtcccctcaaatgtgagaatactgggcagggggaggggagaaaggagggaatggagggctgagcctggaggcatga

SEQ ID NO: 1562809 - DNA, 4001 bp, Homo sapiens
ggatacaatggtaaaaggagcacaggccctgccttgactgaagagatggataataaccaacatctgtgtgcctcaggaacaaatgaagatggtaagaggtatggaggggaagcaatggtctccagttggtccagatggccaagtaaggcctcagtcacaagaaacatcagaggaggggcaggaaggtgagaggagagaatgggcagtgcaagggcctgagcaggggggcacttggtacaatccaaacatagcaaggcagcccgtgccgccccagtgcagtgagggactgagggcagaggagcagcagactctcatgaggacttgggcttttactcagagaggcagggaggcattacaggaggatgagccaaggaggagcatactctgacttgcttttgtaaatgggccccaccggctactcctggggaaagagagtgggaggaagacaggcttgaagccaggggaccatgcccaaggaggctcttctgcccagtatgcagatcctggtggggtccagactaccccaccatcctcaagcccgccccccaaggaggcctacaggaccaaggctgcagagccagtaagaggccagaccttccagggcttcatgctagttcctggggctgagaggcagggctaggacacatggacacaactagtcatgtgcaaatactccaccctctgcataaggaaaccagccacaacttaagtggagacagtttatgtgaaaggaggtgtgcccaccaacaaaacatcacgttgttgcctgatgtttggagcaatttgggaaaacccccacaaaaagtgaaaaatgcatgaaataaataaaactgtgtcctccataccgatgaggcacagggaaagaaaagtgcctggcagggctggccgcaagggtggttgtgtttctttcaaggctgcatctactcagaagagggacatttccacatactgagcatgtgccacccactggaagctgtgctgaggaccatgagtgcaggatctcatttaatcctcaccacgaccagggaggtgagtgcaaggaatctcacagatggggaaactgaagcttagaggcaccagctagcatctgaaaggacagtaatggagctggacaggcccagtccctgaccacagtacttctccctacctggtccaaacactgatgctgagactcactcacccattgtctccaccaaatacataaatggcatctttataggccaccactgtgtgcttgctgcgcctggaaagaaaggagtggagggcggtaaggacaggaccctcctggggggcacccaaggaatgggactaagcaggagagctgccacggaagttaggtatcacctctcaactgctaagatccatcatcttctaagataacaccaatcatcctgcaagtgaggacccctgacacggctccaggactctctggactcctcaccccacctcagagcacctgggaccccagcccaatatccacaaacacaacttagttccagtaccctgtcccgggacatcgggctctgggactccctcggaaccctctcccctgccctgaacagcgtcctgtacagcaccatccacctcattaccagatcctaccccaggacaccaccccccggcttcgcccctggacccgccctgggaccctcgcagatcgcccttcctgtcctcaggaccccatgaagcccaccgtaccgggcacccacgaactcgtcgcagggcgggaggcgccgccagcgatgcactgtttcgaagggcccgaagttgagcgtcaggtactcgacactgtccgagcagctatggtcgaagtccacgctcggggctaccttggaccgcgcgccgcctgccagggccgcagccccgatctgcccccccgtgctgcccggtccagccatcccgggtccacgccggatcggccgcgctgtaagcccaacttgcggccaccgccccgggccggctggagaaaccacatttcccggcgagccctgcgctgacggtgcggcacgtccggccagcgccgcacttgcgccctccagctcttcccgacaagcctaccgcttgccgagacaccgcgggcgagcgcaggatgcggttgtcgaccgcgcggcgagcgtgggaccttctggggagcgtttcaggctatgtactggcgctgcgttgtcccttccagtgaatgcagtgtgtcgtccctagccccgtcgcgactgctcttcccggcgcctcccaggcccacgcagcccgaagacccgcggccggctcgcagttcccggcatgccctgggtctgcgcgtggctccggcctggatcgtctgccgctgccgggatcccccatggagggttccgggctcgcagcggcctctgcaggcggctcaacgctccctttcctgctagcgccctcagccctgacccccagcaactcccctctccccttggctttcttactgactgagaggcagcccggcgaggagcctctggattctcattcctacttagcagggcctcagctccttcacctccgacatggggattgagaatgctccggctatgaaaagcatggggtctgtctcaggacacagctcccacagccctaagtgggcaaatgccccaaagtgtcaagcatgagccacctctgaaggagcatttactatctcaagacctttgggcatgttgtcccttctacctggaatacccttccttcaaaactcagagccaaaagcaaaaagcgttcgctgatcgcagagggggagagggatgtgggagggcttggggcgcagaattagttgctacctcctctgggcgttcacaggccaaatttccttggtgtggcacctggcattctgtgattgtgcctgtttccctgtggtctggtcctgtgcctattggcccaattacactgggagtcatacagatctgcaaatttgtgcgttttaattttacggtaatgtttaacgtgttgcagggttcttcaggggaccagtcccaatagagggagaagaggcagggcttgtcctgcctccagtgccagctgtcagtggcagcagaggccttgagggttgagcatcttctggatccagcagaggcctcccaggaggggagccaggtggctgaaggcaagcactgggagggctcaggttctgccctgggggatcctgggactggagattggcacctgcccccaaggcttggcctgtgcccttggtgccccctttgcctgcccaagtctactgcatgtgagctcaggatcctttccccgtaagccaggacatgtcgccagtcctgcaggagtgaggggaggaggggtcaagacagaagaaaacaggctctccactctgggcaccctgaacagctggcccttgaggacagcagggggtctgttctgtgccagaccctagtgcccagcagggaggtgtacttggacagagggagataagaccattgggtggagggtctgggctgacatgggaaaggctcagaacggtcaacatgaaggacacacgtacttgctgtgcagcacaaacagccttcacgaaggcaagagagagaaacggagagaaggccaaggagagagcatgtcatttatcatgtccccttctggtcctccattgtttccagcctgaagcctgcccctgtctcatagcctcccagtggcctccaggctgtccccagtccctgggagctctctcccagagggtgaatctcattgacaccacaccaggataagggaactggctggtgttgagtgaaacctagaaccacccccaccatctatgtggagggcatacccagggcatcagtagctgcatttcccacctagcttctgccaggctcagcacaactatgtccagttaggtgtcccacgcctggtgattgcccatgcattgggccctgaccccttcccacagcactggccctgcctggtgacacacatctctatcccttccatccaccatgaacacataaccagcctgctctcaaaccatgatccttgccccacacctc

SEQ ID NO: 1562810 - DNA, 4001 bp, Homo sapiens
cttgggtacccccagctcctggcatggggctgtcagccctgctttctcttccacaattcacctggaaaatacgctgtctgcacagacttccagagcttcccccttctacccaccatcctgccatcctggctgttacctagttcccagtggtagatgggaatactgagggtccgggctgctgtagcagagctcacccagggttcaaagatccaaagtcaaaagatcattggttcctcaccctagcaagttcaattgctcccctcccacaattccatagaccgtgggtgggtgggtggagggggaaggtggattaagaccaaggaatctctagcccccagcccatcctgcaggcggctacgacaaacaggtgctttctgcagggctattgggtgagtgggtgggtggcggctaggtcaggccccacccctcactcattaaccctccgtgcagtcagagttctatccccaatgcctactgaccctgcctggcccagggtgagggcactcggggtctgtcggctggctcagagcctcagctagcttccggcgtccagctgtaggtcagtctagtctcaccagtcccacttgtgaactgaaactaccaggagagcggaaaccggctccgccccatcctccacgacctagcaggtacagcctccagaacccggactagctaaaagcctgtggtcctctccctgcgccgcacccttgcagtcaaggttttctggcccttcctgttctcatgggactgaggggatgggcaaccctggggacgaacgagagtcccttggttcttccctccccaggaagccccaaaatctggggacaagaacctgggctccaactcactttgttaccagatccaccggggtgccaagcgggggtggctcacatccctcactcctagctcagctgggtggggtctttgataccttgccccaccctgtggctgcgggcgcgggctctgggcgggagacaaacactggggtcacgtggcggaggccctgggaaactccggggagagccggggacggacagccccgggtagtaggactggggcggcccgggccagaattcccagaccccgtgcgaagacgcacgggtccgcttccttcgctcgggtccttgttccgcgtttactccggtggccggcccagggcacgccctctccgaggtacacactgctggtgtacaggccccagggagcgcgcgcgcggacacgcacacacaagcacaacacacgcacacacgcccccgaggtacacagcgcacgcacgcaccgggcaggatacccaggccgcccgccagggaacacacgcccgccctcggacgtaaacaaaccgcgcacgcaccgcccgcgggcgccgggccagggcctgttcccaccgagtcacgtaggagcacagcgcccccgcccccgccgggcggacgcggagatcgccggcctgcgctgccccttcctcccggcgccgccgcctacccgcccgcgccccgggaaggggccccgtctccacccccactcccccgagctggcctcggccccgtcctcggcgtccccgggacggccgctcccttctccccgccccgagccgtccgggcgatggagctccgggagccccgacggatcgggcccgggcgcccaccccaggcgcatcccgggacgcagaaaccctgccgccttggggtcccgcgcaccgtcctcctggtcccgcgttcctcacccgcttctgggcccgcttggtccggcgcgctcacacacgcgcgtctcgccgctgtcccggccgctgtcccgatccgcgctccggtcagtctcccctccgctctgagccgcaggtcgctctgaaccgggcgcccgggagcgctgcgctgagttttgttgtggggcgggcggcgcagggggccgaggccgcgcggagttgtaaggcgagcttcccggaattactcactcacaggattcctttcattcataaaaacccagtcatgcggtgacgtcaccgacccggccgccctccggccaggagcggccgcttggtccctcggccccgcccccgtatgaccccgccccctggaagccccgcccccggggctgccgcgattctctgcctggttccagggctcgctgggtgcgttcacgtgacacctcgcgagagccccgtgggtgtaggtgtcattggctcattttacaggtagtggtcctggccctcttctttcgacctagaccttctgccttaatgatctcatccagtcccgtggctttaaatgacatttatatggctatgagccccaggtttgtatttccggagcgaacagcttctctgagttccagactcatagccagctgcccactctgcgcatccagtgggtgtcagatgggcactgcagaggactcggcccaaaaacccgctcctgatcgtcagccctacctctgctcccttgccaccccatctcagctgctcaagccaaaaccttggagcctggctccatccctccctctcccttcctccccacctcaggactcaagctagcggtgtctccaggtctcctgcataggaccatttctcaccacctccagtcatggcacctggtctcggcaccatcagcttacccggacaatggcagcagcctccgaggctccctactttgcctccaaagtctttctttctataccagccaatgttcttctcaaaacaaagctcaggttgtttacacaccttctttggccactctctcctcatccactgctcttcggccacagtgcccttctttctgtcccccaaacataccaagctcattcctgcgacaggcccttggcactggctgtctggtcttctgttcacttgcctgactctttctcatctttcacgtcagcccggatgtcactgcctcagagagacatttcctgaccaccctggttaaagcagtcttcacctctgaatttttttttttttttcgagacagggtctcactctgtcacccaggctggagtgcagtggcacaatctcggctcactgcaacctccttctcctggactccagccattctcccaccttagcctcccaagtagctgggaccataagcacacaccaccatgctaggttcattttttgtatttttttttttttttttttttttttttttttgtagagacagggttttgccatgttgcccaaactggtctcaaactcctggactcaggcaatccacccacgctggcctcccaaagtaatgggattacaggcgcaagccaccgcacccagccttgaaatttgttcttatattatcttaatacttctgtagggtgtttcatcatttatgtatgtgagtgctggttattgtctgtcttccccaaccagaatgtatgttttatgaaggcaggccttgcttctttttctttttctttttttttttttgagacagagtctcactctgttgcccaggctggagtgcagtggcataatcttggctcactgcaacctccgcctcccaggttcaaggaattcagccccccagtagctggactacaggtgagtcaccatgcccagccaggctggttttgaacccctgacctcaggccacccacctcggcctcccaaagtgttgggattgcagacatgagccactgcgcctggccaggcttatcttgttcaccactgcctgcccagtgcctggagtagtgcttggcacatagtaggcccacagtaaatacatgttgaaggaatacatgactggaggctcagagaggtgaaggtgactttctaaattcactcagctaggaagtacaagcactggaattggtatccaggtctgaatgattcctggcccagatgtttgggggtacatcgcaaccaggggaggagggccacataaacatgaggggtgtgcgccgtggtgggaagccccacccaaaagagatggctttggaggccacgtgcggggtggatgttgctgttcatcccctgctttcctttgctcatgatgttcccactgcctgaaattccatcg

SEQ ID NO: 1562811 - DNA, 4001 bp, Homo sapiens
acagaccacttcctccttcatctggaccatgaccacaaccgcctgctcaccagcctcttgccttgccctccgtctccaatccccatcattgatcctcccccaagagctgtcagaggaatcactactgacacaaacccacgagcctgtccgtgcttggcccatttcaaaaccctgcaatgccagcctccccgcaagccaacacagtagggtcctcaggcctcaaccgtattcctgtccactctctcccaggatcgtatgctaacagatgaatgaacagacagcaaattctactatccctgaatgtttcccaaagggacaagcgggcagtgcatgcctgtgtgtgtgagggaggaagttgcctgagtcctgaaggatttgctcgcttttgggagactgcttcaagattcccccagcccctgccctggcttcctgtttctctggggttcccaggcctttttctccatgtgttgtggagctcttagagggcagggatccagggctcattcattcaatcagcaaacatccaagaagcacctactatgttccaggctctgtgctgggccctggagaccctgaagtgaatcacagctcctgccttcaagggcttcacagacaaccaccactctatcagactcagcacactagtcacctccccagggaagccttccttgattgccctggctaagtcagagcgctgttatgtactttcaaaccacagtgacttctccctcacatcacccatctaagctgtgttttgcatttacttctgtggatcttttttcaagtttgtgtccgctgctgagctataagctcccagagggcagtctctggatctggtctgttcatctcatccctggcatctggtccaggacaagggcccaatggcaatgcagggcccaggggtgattcaatgggaagttaaacttctcagtgctaactttccatctgggactgagtcaaccagccacttcccctcatcccctgaccccaggccctactttgtaatgtttcctgcccagctttgagggtgggcctgtctggttcctgtgctcctggccccaaccctcctgactcaaaccccacctactcttgggtacccccagctcctggcatggggctgtcagccctgctttctcttccacaattcacctggaaaatacgctgtctgcacagacttccagagcttcccccttctacccaccatcctgccatcctggctgttacctagttcccagtggtagatgggaatactgagggtccgggctgctgtagcagagctcacccagggttcaaagatccaaagtcaaaagatcattggttcctcaccctagcaagttcaattgctcccctcccacaattccatagaccgtgggtgggtgggtggagggggaaggtggattaagaccaaggaatctctagcccccagcccatcctgcaggcggctacgacaaacaggtgctttctgcagggctattgggtgagtgggtgggtggcggctaggtcaggccccacccctcactcattaaccctccgtgcagtcagagttctatccccaatgcctactgaccctgcctggcccagggtgagggcactcggggtctgtcggctggctcagagcctcagctagcttccggcgtccagctgtaggtcagtctagtctcaccagtcccacttgtgaactgaaactaccaggagagcggaaaccggctccgccccatcctccacgacctagcaggtacagcctccagaacccggactagctaaaagcctgtggtcctctccctgcgccgcacccttgcagtcaaggttttctggcccttcctgttctcatgggactgaggggatgggcaaccctggggacgaacgagagtcccttggttcttccctccccaggaagccccaaaatctggggacaagaacctgggctccaactcactttgttaccagatccaccggggtgccaagcgggggtggctcacatccctcactcctagctcagctgggtggggtctttgataccttgccccaccctgtggctgcgggcgcgggctctgggcgggagacaaacactggggtcacgtggcggaggccctgggaaactccggggagagccggggacggacagccccgggtagtaggactggggcggcccgggccagaattcccagaccccgtgcgaagacgcacgggtccgcttccttcgctcgggtccttgttccgcgtttactccggtggccggcccagggcacgccctctccgaggtacacactgctggtgtacaggccccagggagcgcgcgcgcggacacgcacacacaagcacaacacacgcacacacgcccccgaggtacacagcgcacgcacgcaccgggcaggatacccaggccgcccgccagggaacacacgcccgccctcggacgtaaacaaaccgcgcacgcaccgcccgcgggcgccgggccagggcctgttcccaccgagtcacgtaggagcacagcgcccccgcccccgccgggcggacgcggagatcgccggcctgcgctgccccttcctcccggcgccgccgcctacccgcccgcgccccgggaaggggccccgtctccacccccactcccccgagctggcctcggccccgtcctcggcgtccccgggacggccgctcccttctccccgccccgagccgtccgggcgatggagctccgggagccccgacggatcgggcccgggcgcccaccccaggcgcatcccgggacgcagaaaccctgccgccttggggtcccgcgcaccgtcctcctggtcccgcgttcctcacccgcttctgggcccgcttggtccggcgcgctcacacacgcgcgtctcgccgctgtcccggccgctgtcccgatccgcgctccggtcagtctcccctccgctctgagccgcaggtcgctctgaaccgggcgcccgggagcgctgcgctgagttttgttgtggggcgggcggcgcagggggccgaggccgcgcggagttgtaaggcgagcttcccggaattactcactcacaggattcctttcattcataaaaacccagtcatgcggtgacgtcaccgacccggccgccctccggccaggagcggccgcttggtccctcggccccgcccccgtatgaccccgccccctggaagccccgcccccggggctgccgcgattctctgcctggttccagggctcgctgggtgcgttcacgtgacacctcgcgagagccccgtgggtgtaggtgtcattggctcattttacaggtagtggtcctggccctcttctttcgacctagaccttctgccttaatgatctcatccagtcccgtggctttaaatgacatttatatggctatgagccccaggtttgtatttccggagcgaacagcttctctgagttccagactcatagccagctgcccactctgcgcatccagtgggtgtcagatgggcactgcagaggactcggcccaaaaacccgctcctgatcgtcagccctacctctgctcccttgccaccccatctcagctgctcaagccaaaaccttggagcctggctccatccctccctctcccttcctccccacctcaggactcaagctagcggtgtctccaggtctcctgcataggaccatttctcaccacctccagtcatggcacctggtctcggcaccatcagcttacccggacaatggcagcagcctccgaggctccctactttgcctccaaagtctttctttctataccagccaatgttcttctcaaaacaaagctcaggttgtttacacaccttctttggccactctctcctcatccactgctcttcggccacagtgcccttctttctgtcccccaaacataccaagctcattcctgcgacaggcccttggcactggctgtctggtcttctgttcacttgcctgactctttctcatctttcacgtcagcccggatgtcactgcctcagagagacatttcctgaccaccctggtt

SEQ ID NO: 1562812 - DNA, 4001 bp, Homo sapiens
agacttatatttactttataacagtaagatacagaaaattctgcaagtattaattacactaaggaacgcagagtgttttcctaaaaacagctgaaaagagctacagtgtgtctagtagaatctcagtctacaatcttaataactctagttctatgacctcaagaattggcttcacctcgaaatactttctcacctgaaaaaaggaataacaccatcttttcctccctcaatgtggctgctcaaataaaatgaaataatatatgtagcacagtacctgccacgaagggttcaataaattattagtttactttcttcagtcaacacaaaagacacattcacaagattcagatttaaggaaatctatttccacaagtcctcaccagcacaaaatgctatcgctagtttgctctaataaaaactaccatcagccgggcgcggtggctcacgcctgtaatcccagcactttgggaggccgaggcgggcggatcacgagatcaatacatcgataccatcctggccaacatggtgaaaccctgtctctactaaaaaatacaaaaatgggccgggcgtggtgtcgcgcgcctgtagtcccagctactcgggaagctgaggaagaagaatcgcttgaacccaggaggcggaggttgaagtgaaccgaggtcacgccactgcacttcagcctggagacagagcgagaccccgtctcggggggaaaaaaaaaaccgtcactatcatttcacttttctaagggacctgaatcaagatgagggagtctacgtgtgattctgcaagaactccattaaggctgcatacataatgaccactaaatcattaacaggagtccatagcaattgggctaaaacatctgggagcatttatgctggtaaaagagctcacttgggggctaaaaaaaaagtcaaattaggcccaactctaaacggatctttaacaaatcaagagagtaatgttagtttatccttcctgaaacgccagcagtacgatattaaaatccacttagaagtaaaaacttcaagacggaaatatgccaccaacactggcgtcagtaatccattttagaaagcctgcgcggagaccaccattagcaccgctgaggatatttaatgaaagccgttggctgcaaacagaggcgaagagagaaaaacgattatttcggtgttctgcacacacgcggaggcaaaacgctttcaggacctcagcagccaccgccgccaacaccgacaagcatctgatggaattcacagttttacaatcgaaagtccaaaagaaggccatgatactagcaaattgaggggtggggacccttccgttgccttcccgagggtccagactttaaaggccgcgctgcgcccggggccaagggtccactagtaccggcctacgccccccgcgccactccctgagccccttcccgagcgaccgaaggcccgggaaccgcgagcaacaacacctaaacctcaaccggcccggggccgcgcccgagccctggcgcgcggaccgcggtgaagtccgggttcgaggtcgccgcggcgcctgaggccgaggcgcgggcgaggccgaggctgcgtccgctgcggccccgggcggtgggggggccgggcgtggccggtcgcggacactcaccacaccatgccgtaggcgccctcgccgatgtacgagaggttggtgtagcgcggccccacgtcgaacacctgcccgcggaccatctccgggcccgcgcccgccgccgccgccgccgccatgttggctgccgggccgccgccgcctccgccgcgctgagctcgacgctcggcggccgccgctcagctcttgtcgcccctcccgcagggactgcgccgccgccggtgcagccgccgacgctgaccgggaggaggaaggaagacgccgagcgggagagctgaagagccgacagccactcggaccgattgcctgcctgcctgccagactgacgggcgggccggcgggcgggcggagggaggggcgcgcgccgaggagggtgccggggcggggacaagaagtgtgcatgcggattggttcctcgcggctgggggcggggccgcgcgggccggcggaagcggcgggcttcgggaggggcactgcgacggcgttgactgagggggcgccactaggcgcggtcacgtgcattcgcggtgcattcgcgggggcgtcggtgcgggtcgcgtctcttaagacacccagggagacagacgtggggcagaactcatgggctgaagtgagagatggctggggcccaggcgagcgaccgagcagggtccgaacagagccagcgagggaccccgggctgtgcttgaggcccgacgacgcgccatatcccggcagcgccgcagctcaggcctctgcgaatctgtggtccacacgctgataaacttagaggcctctgcactggggcagaaaccgaaaggcatgacccagaccgagaaagatatttgcatactgagaaagtgtgaaacacaattgtcgagactaaaaggagacactgagaggatacgccaatcaggttagttcagatgtttgttgagcacactccatgttcctggggatccacccttatagaagttaccttttagagagaggagacagacaaatacgtgtaatgctcaagttgtgataagtacgatgaagaagtacaaagcagaagggagggcgcggtgtctcacgcctatcatcccagcactttgggaggccgaggcgggcggatcacttgaggtcaggagtttgagaccaggtctctactaaaaatacaaaaattaagtccgggcgaggtggctcacgcctgtaatcctagcactttgggaggccgaggcgggcggatcacgaggtcaggagttcaagaccagcctggccaacatggcgaaaccctgtctctactaaaaatacaaaaattagccgggcgcagtggtgggcgcctgtcatcccagctacttgggaggctgaggcaggaggacaaagcagagagtaagggattagggggtggtgggtcgaaacacatgagagatacatttgcgttcagagacagaccgagattggtacagataggcagaaatgctgacagagcaggtaatgaaatagaaatgcaaagatagagtcactaaaaccaaaacatcgaggtttagagaaaaagagacacaccaggttaagaaacagtcacaaacaacagaggttgaaaaaataaaaattagagtcctgaagcaggtggataccaaggaaagctaagacaacgagacggacaatgacccaggcactgcttctgaaccttttcccctgccatgtttggagggagaaggaagagcggcagaccctatatcctctttgttcaactcttccaagtttaaaaccatcaactcttgacttctagacatcaacaaagattaattagtcaatctcaaaggagaataaacaaagttttttgtttgtttgtttgtttaactctctggtggaagctggtgtggtggctcacgcctgtaatcccaacttgggcccaagaattcaagactagcctgggcaacacagcaataccctgtctctaaaacagagaaacaaacaaacaaaaaatcctgtgggggaaaaaggatgtgacacatgagaaaaggaataaactgctccagccaaaatttactccttcaaaatatatttagcccatgaagcaggacccaattttagaaaatacctaattcttgagttaatgggtgcagcacaccagcatggcacatgtatacatatgtaactaaccagcacattgtgcacatgtaccctaaaacttaaagtataataataataataaaaagaaaatacctaattcttattctcaaaagaggacattgcatatttttttaaaaaacaggccaagataaatggagtaccatgaaattaaaaccacaataaccggccgggcgcggtggctcacgcctgtaatcccagcactttgggaggcggaggagggcagattgcccaagctcagaaac

SEQ ID NO: 1562813 - DNA, 4001 bp, Homo sapiens
ctcaaagcccctggacccctggtgcctccgaatgttcaaaatacggagggaaagttggtcagaggtgtttattgcatcattatttggaacaaaaccgggacagaaggtgatgtacagctgagggcgtcagctggacccacagaacagcccttcgcccagccccacttcccagaggtccagaccctctaccctgcaccagcttcctgagcccaccctccctttgcaggtgaccctcatcccaccctcccatgtcccactgccctcagccctgctaaaggaaaggcctttgcacagcctgttccctctggctgatacttgcttcttctctccctcccacttctgtctcttgggatcctgtctcagagcaagtggaggctgaggccaccccccatgcccacacaaggggagcaggagcggctcctgctgggtctgggatgctcatgggcgcaggtcgaggtgcctggggcagccatgctcccagcctatgaccagggaaaggtgctcctgaggtggtgaggggagtggccctgcacgtggggcagcaagttcttttggccaattgcatctgtgcggtcaggtgacagggaattggcacctggcccgcagccttggcagtggaactaagaaaatgggccaggggtgcaaggggggagaccaggcctcactcagagaaccggacacctctcagcaactcccagacggcgagtccagccatgacccaccctagtcccctatggccactcccacaccgtcccagaccctcttcctgcccttcaggtctcaaagaggaagacagatctgtgctggcatgatggctagaatgacccacctacagcttctgatggaaggctagggaccacaccagaagacagcctgccctgggacccccggcccctgatgccggctcctgagctccaaatctggtgggcctagaggtcccacttccaacctgcaagtgcctggggcagagctctgccctggctgcctctgcctttgcgccccaccaggaccccccagtgggcagcagctaagcggcattggccatggtgaggactcagctgcacctctcaaagcctgtacccatgatcagcctcccagtcaacatggaggctgaaacttaggactcccggtaactacctcaccctaagcccctccagccctggctacccgggtctaacagagaccttggcccagttgacccccctcccccacccagactctgtcgtcttcctgggccccaggccaggtcctctggccccagggcctaagtggggtttgtggtctgagggggagtctgaggccatcccagggggagagatcttggcttccgggagcggggcttcccttttcagacaatagcccccagcccgggcgggggagggtcatccgctagaccccggggggctgcctgacccgactcagtgaatctcaggtgggtgctcagacgtttaggggcccggacatcagggtggctcggggctcggtcgcgtgagacccaccctcacgccagctgtgacctcccaggcctcaggcctggtggggagcagtccgaatcgggagaggccggaggacccccctccctcccggtaacggcgtctgcttggaaagtttctttacgccgccacccccgcccccccattcattcctcagatccgcttggcgcccgggggcggaggcagggcgaggcccctccccacgccgagaacctcgcgcgggcgaggaggggacgcgctctccggcccggcccggcccccacccagcaccccttctgccccgcccctaccagacggagccgtaggcgccggagcccaccgggcgcagcccctgcagccgctgcggcacctcccacacggtcttgttcagctcctgccggtagaagccggcgcgagggcccgacatgtccggagcagccgccgctccgcccgggcccagccccgcgccccgcgcccgcgcccgagccgagcccgagccgagcggagcggagggcggcggaggcggcggcggcggcgggcggggcggggctccggggcggggccgggaggcccgggcggatttcccgggctgggtggccggggcgtgggggggttcccggagacaaatgcgctgcttcctgcgcctcggaggcggtggcagagcggaaaccagccctccccttcccggggggggcgccgagggcggacacctccctccggctctcacctcttgggggccgcgcgcttctccagacttgcgcccgcgtctgggctcggcccgggcttccctaccccggcggcgccctccccaacgagggagaaccgtcaaaagcgaagaagccaggggtaaaccatgggaagtatttttcaagacagaaatatgaatagcaccttctaaagactcggcactggataggaaaataagccgaaaggcgttgggacagggccggcctggctttcttgcgcaggacctgcaggccttggtccgcggtgcgccccgggaaccttccaggcctcctgccccggctcgccctgacctcccctctgagagaggcgcgaccgctggactgtcaggaccagggacagcggcgtcaccccggggccttcctacccacaagcagcggccccaaacggatcctttttgctgcccagaacctttcctcctccttagcggccacctcttctaggaagcccaccctgactatcccaggtccgaggagccgcctttgggtgcagggtccttgaagtcagccccgcgggcgggcaggcgcggggggctgccttggcggtgacgggggcagcgccccactcggcgtctctgccgcgctcggggccgcacagctacttttattcccacttgaaagcgaccggggctcggcggagcattgctccctggaacaccggccaccgacctccgccctggtagagccgtggtgggaggcttcgcggctgggcgaccccctccagcgaagtgagaaatcaggatcccagtggcccaaaacactccttttttaaaacactaaaatccgagttttaatgtcaaatctgatttttatatatcggcaaccaaattaaaacagccagcacggtgctggccaccggacccatgcggaccgcggcgaaggaacgggtctcagtcccagccgctccggccccttttgcatgaccaagccccgtgcctcagtttccccattggaagccggcatccggctgggggcctggcgcgggcccggggatggcccctctcctcgctcgggctgggttggggcgaggacacgggcagcctccccgagggcccccgcccgggagcgcctttcactgggcccggccgaggcgggccgaggttttgtgcagagttaatggagcttcagctaaaggaggaggaggccggagcgcagccccggagctgtgggaaccgcggccgcggccgccgggggaggggagcggcctttgtctgcgccgcggccgggcggggcgggagtcgggttcccatggcgaccggccccgcccctgcgcctccccgtggactgggcggctccgttctcgcccctagggtgggggacatggaggtggggaggtgtcaggcttcccccaggcgtccgcccgcaatcctcgcggcctcgctgcaggccccggccgctcagcaggtcaggcgggcgtgtggggtgggggtgggggcggggggcggtggaaacgggcccctctcatcactgagctgacctgccccgggaaccccctgcctgcccaggcattagaggtcccgcccatgtgcctactggggacagtgtggggtcgtggcactgcaagggagtgatcactgaggagtttcgggtggcgtcagggcctggaggccatcttccaggagaggcaccttcagagctcggcgggggcaagggaagcccccctggagggagccgccggtggaggacagtcccaggcccagaggggaagcggcaggggagccaggaagggccggtggcagggcaggagtgagaagccctgggccagaggcgcctctcctacccagct

SEQ ID NO: 1562814 - DNA, 4001 bp, Homo sapiens
tcacttgaggtcaggggttcgagaccagtctgcccaacatagtgaaacctcatctcaactaaaaatacaaaaaattagccaggcgtggtggcgcgcgcctgtaatcccagctactgaggaggctgaagcaggagaatcgcctgaacccaggacgcgaaggttgcagtgagctgagatcgtgccattgcactccagcctgggcaacaagagcgaaactcggtctcaaaagaaaaaaaaagaaaaaaagccccagagcgcttggctggatggggcaaggcacgggtgggtgagtgggtgggtgggagcagggggccgtggggaaggctgcagtcctggggcaaggccttggtgtgatgggcgggtggtgggggggtgcggtgccggcgaagtgggggcagggctgggtgtgacggggtgtcgaggtgcgggcagggctggtgtccactgcaaatggatttcacagggcccagggtagtgagctgggggtcagggtgggcatgggaagcctcagagaaaaagacccatccaaggggctgagggagtagcggtggccaggaaccgggggacggggcactttgctggtggacggggcactttgctggtggacgcagggactcgttctcccaaggcaccggtggctcagatgacccaggagggtccagagcatctcaccctgtaggtagggtccgggtgcccagaccaccagccctcaggctgggcccagaccagggggagggcaggagtgacgtggggggcagtggacaagtgggactgtatccagaaaccagagcacccctggcagagagatcgggttcttagcagccagccaccgccatgggagaggcccagggcagctgtacgtggcatctcactggaaggactggaaaggatgggcccccacaacgcacaggagggtgtctgtgaggcggccaccacgcccagtgctcctcaaacagcagctccctaaacccttcacccccaggggctcctgagggttcaacacactccctgcgttctggcgcccccctcctccccctccaccaccgggtcggaagactcgggagatggacagcagcagagtgggctccacagaggggctggaaaggggatggggaagagggaaggtgccccttccaggaaaatcctcccgccgggagcatgctctcaccgcgggcttcctggctgggggcaaggcttggcgtgagacctggaggatcccctgggcctggccaagtcgtgttccctgaccagggcctggctgaggcgccgagtcaaggggctgagtccttcccggggctggcggaggatggggaacggcccttgggggagtcgtctcccaaggagagacaggccttgctctccttctcccctggggacccacggcccgacccccgcccggccccacagcaggctgcctggaggaggggttgccgggtgggggaacccagcccagctgaaccaagccgaggccgcggcgccttcccggagcggggccgcgcgactcacgttctcgtggcgcatgtgcttgagcaggcgcagctcgcggtaggcgcgcttggcgaacagctcggactggaaaggccgatacagcttcttgatggccaccttagcgccggtgcggccgtccacggccgagctgcggggcggaccgcttagcgggaaggccgggcaccccgcgcaggccccgcccgccccgccggccgccccgcccggcccgcgctcaccacaccgcgccgtaggcgcccgagcccacgggctgcaggtcccggtacacggcgcgcacctcccaggccgtcttggtcacctcctggcggtaaaagccactgcgggcgggcggcggagagctcatggcaggcccgggagctgcccaccccgcagagcctgcgggcggtgcccccacgaccggggacggggctccctcggcgcgcgcctcgggccggctccgcgccgctcgtccgctcgcccgcccgcccgccggccgctggggcgctcccgctcccggcccttccctcagggatgtcccaggtgccgaccccggcccgaccccgacccaggctgcgcacggcccctcccccgcccggggaccaaccggcccgcgggcggcgcgcacgtgacgccctcgcccgccctccggcccctccggaaacccgaggcggccgccgccgggggagggccggagcctggggagggccggagcctggggggaagcgcagggggaggggagcgccgccccgcagcttcgtccccataaagggccggacgcggcgcggagatacctctgccagcctctcccctttggctgaacttccccgccctgggggggtctcagcaggagccccccccccccccccccgcccgctccagtcctaactccccacggctccagggcgcagggcccatccttgacagcctgagcgctgacttctatggcagccgcaagtcgggctgagccctgtgttcccggggtcaacttcgcaggccacccccaaggatgccctaccactgagcctgatccatccgtcccccaacaaggggtccatctgcacctgtcctgcctgtatccctctttctacacggaggggtctgtcccccaaactcctcaggctgcatccccaaccccactcctgtggccactgaccccgggcctctcagtcccataggtccccgtgggcccttttggacccccagctcctccccctgctccccccatctgtggggtgcctgctccaagcattgcaagtactggtgtctctgcccatcccacccctgcctgtcctgtcctgcaaaacccaggctgagagtggctgcactctctccagcagggatggggacctgctggggccctccgcctgacccctctgtgtgggcattgtcctcccataggtctggccccatcctggaccagatgctcctgagggcaaagccccaccctgacaccccttcaccagcccaggaacctggatctcagaagggatgttggggcaccccaggagcccactgggctggtgggtaacaggatccctagggccttctgccccgccctcctgccatgaatcagcagctcagccgctcaagggtggtagtagctttacacctgggcttgggccgtgctccacggcattcaccagctcgtgaccagtgagcggggcagcccagggccacccaaaccacagctgcctgtggcccataccctttgtgccctgggctgcctgtggcactccatccacctcttccaggaagcccagcttccacgctgtcccccttactccccgtggtggggctcaggggtccagcaggccctgcacggaccaggcttctgaggtggggctgtgtcaccattctcctcccacccccaaccgccaacactggacttcccccgggattgaccactacactgaccaggccccaggaggcccccaactcccagacggtttccacccctacccaagacccaagcaagggcacagactgtccctggtccttagagacactgcctgaccccaaatggcctggaccctcccccacacataagctgcagcgcgtagtgggaacgggaccagcgtgcacattccctgggttaaagtggcctctttttccttcaccaggagggaaaggaaagctattttccctaccctgcccagcccccacccagggatgggcagacccttgctccttgagacacccaacttctccccagccagcttccctgaacactgaggggtaggcgggggtggtgtctggatcttggcccaaagccaagcctgcccagtacatccccacagggcagctggggtcaccatctgggtggctgtcacaccctgtgccctcaaagtctgcccatcagccatgtcttcccctggtccccctgggctctcagaccctccagggagcagggagggtgccagaagatggccgctggtctgactgggggcctgagggatctggccagctggaggtgagtgatgcaggatgacccagacactccccccacgcccagcagc

SEQ ID NO: 1562815 - DNA, 4001 bp, Homo sapiens
gttattccccatgctggcacttcctctcctccattccctcctacctaccccatctgcctggctctgctaacctcagggcatggttgacatttcctctggaaattctccctgattccttcagtgtggattgggttcccttccccctcgtggaacttatgtccctgttggaatgcagcccttgacacgtgggcagccattgtcccttacaagtctttctcccctactaagttgcagctccagagagcagctgtcctgttccactcccagcacccagaagcccccagtacttgccacatggcagttgctcagaaatgttcttcaataaatgaaagcagaaatgtggagagacagggaggaggagaagcaagagatggacgagaaaagatttcagcagggggagacatgaaacagacagatgggagctgcagacgagggcacagggctgcagaggggacaaggttgtgatggcagctgccagggattagatctttctgggagtgatctgaggacagagggcacccaaagcaaaggagcacctccctgccccgggctggccaccgatggggtcggggagaatgctggggaaggccctgcgtggaggcctgcaatgtgttggaataagagagagttgataccaaggaaacctcaagggttaagtggggaggagccatcagaggagtccccggttcaaggctgagctcacacccaccctaaaaccccaagtgaacgctaagaagaacctaatgaggccctcccttgagctggatctgtgtccccaactcttctcccaccttctcacagtggtctgagtcgtagctgaggcccaggccacagtcatcagtgatctcagacagatcttcgtcgtcaaattcttccaggcttatgtcctggggaggcctggaaaggagaccagggtcagagagccaccaaccctggactccctgcctggcaactggccctgaggaggggcagagggaggcgtcagctcctacacccagtggtttccacagcccccagctctcggaacacatcctgccatcatcttgacccccaagctctgctcgcctgtggatcccctcccccatctgagccaggcctgcccggaggagccaaccctgcccccacccctcccaccccgcctccctggagagccagcagcctctcctccctccactcgcagctccaggcccctggggtcagggtcttgcagagcaggggagggggagctgcaacgcggcagcggcagatggggaggggtcgctcctgctctgggaagagagtctggcctgtttgtctccccctctccggcggagtgaggcctaaacccagaggcccagcgtcctcccaaccccagtcccttcccgcagggctccgggcttgatttccactctctcccggccgggccctatcggccaggtctggcgtccactgaaagaggccaaggccaccgggacacgccgcgccgggagggtgtgcccgcatcccgcccgcatcctcccccgcagagggtcggcccagggcctccacccttgacaggtcagccgtccaggccgggcgcggctcagaatcccggcggggcccgggggtcactgaggctggggacgcgcggtgaagatggagggagtgggagcggggtgggggtggggcgcccgagccgaggctcagggaccgcagggggccggggccgggtccgcgccggcggcggggctggggcggcggggacgggggtccgggccgggtcggggtcgggggggtgcgcagggagcggagggtccgcccggcccgggcgccgaggggggtacctgcagcccggcggcgacagcgagtggaaggtggagagagaaaacatctccgcgcgatccgccatcttctccgggagaggcccgcgactgcggcggggggtgcgggagcctcgccgcgccccgcgccggcgctcggcccgccccgctcacctcgtgacacgccctgcggcgtccgccccgcgcacctcgcccggactccgcggcggcgcggggagggcggcgggggaggcgggggagggacgcggccggggacgctggttggaggagaggcggcggcttcactgccgggcgctggttggggaagggccgggcgtgcgatgaggatttttcccggggaggggcgggagggaaggggcgggcgggtgggcgtcgggccccgccctggaggacccgcgcggggcgggaggccgaggaggcagcgccggggtccgcgggcctcgggttcgccgtgggctgtttcctctgggcgagaggccggggcggccccgggagctgcgccgccgcgcccaggatccccccaggaaccctaacccgggtgcggcccggagcggggtggcgggcgaggcgggaggcgcgggaggagctgtccgccgtcgggtgctgatcggagctgtccccacggggtgctgaccggggctgcacggggacgtctgcacgagggtcgccgagcagggctggattcagaatcgagcacaaggtactcagaggatgctggctggggctaaaagtggactttgagcactcagtagagactgcacagccggacggacgtaccgacgggcactgggagaagttagcacccacggaggcgacatgcgtcccactggaaacactttttcttgggcaccgtgttgctgggccctgtgtagggaactgacccgctctggcttgggatggagccctgtggggagggccatggttgaagctgagctcgagacggtggctgtgggaggaggcgggagatcagggttgagggcgcagaactagggagagactgcaggacactttttttctttctaaaatagagaccggtggctgggcgcggtggctcacgcctgcaatcccaccactttgagaggccaaggcgggtggatcacgacgtcaagagatcgagaccagagaccatcctggccaacatggtgaaaccccgtctttactaaaaatacaaaaaaattagccgggcgtggtggcgggcgcctgtagtcccggcgacttgggaggctgagccaggagaatcatttgaacccgggaagcggaggttgcagtgagacgagattgcgccactgcactccagcctggcaagagcaagactccgtctcaaaaaaaaaaaaagagagagagagagaccggctctctctgtattgcccaggttggtctcaaactcctgggctcagctatcctctggcctcagcctcccaaagtgctgggattacaggtgtgaaccacagcacctggctaaatattggctaaagaaggaggctggcatttcaacaaaagcgcaatcccttttcccccttgatgaaagttatgtgccctaagatttctttatgtcttagttctgcggaaaattcttttttttttttttttttttttttttttttttttttttgagacagaacttgctctgttgcccaggctggagtgtagtggcacgatctcagctcactgtaacctccacctcccgggttcaaccgattctcgtgcctcagcctcccgagtagctgggattacaggcaatcaccaccatgtccggctaatttttgtgtttttagtagagatgggtttttgccatgttggccaggctggtcccaaactcctgacctcaggtgatctgccctccttggcctcccaaagtgctgggattacaggcgtgagccaccgcccctggcctggaaaattattccttaggaaaggacaaggcacttgagtgacaaacaccagaaacgacatggcagaaggagctcatgcaagtcgggaaggggggtatcaccattccagctcagagagaggcctgtggccagggcctgattgaacctgcactctttggtgtcccatcacaatttatattttatgccaattacagtatttttctaagaatggcatttacttggctgggcacagtgacttacacctgtaatcccagtactttgggaggccaaggtgggtgcgtcacttgagctcaagagtttgaaaccagcc

SEQ ID NO: 1562816 - DNA, 4001 bp, Homo sapiens
gcatgtcccacaacctaagacgtgacagggcaccaggcctctgggacctttcagggaccagcaaccctaggcattatgtcttatccctggctcccggcccccggcaaacctccgtgatcctccctgatgatgcaacaccctgagtctctttcaagacgtacaagtcactgccttaggtctggcagctcccaaatcaccttggaaagacctctgctctgcaaactctggtctcctacctccacgcctgactgtcctgcctcctcgccaaaggcaaaagtgcatcaaggactcagagaattctagggcatgagcgtgggacgggatctcggagaccatggaagacaatcccttcgctcaaccagcagagaaataaggcccagaggtggagagacttgtccaaggtcacatggcatatctgtggcccaggagttgatgtcaatttgtgtgtgtgtgttggtcgggggagcactttgtgcaatccaacagggcctgttgcagccagatgacagggacaggagaagaaagacataaacacactacgatgccattacagtcaacagaaaactcaactcttcttcctcaagtgtttctagcacggatcaccaacggctcaaattttagataacggagcttccaggaccagccatgctcccgaggtagacggaagctggaaatgggtaaagcccaagggagacccaaaggacgacggagtggaagaggaaaattggctctggctcacaaataaggagaaattaatctgcaaattaaagtgccaaagacaatccattcacttgtggcaaccccggcgcccacttccttcctcccgttggcagaaacgttgattcttaacctattagacttctgagggaaccagctcagaatggtgagggaaggggccaagagaagagtgtatcacctttgggatagaaggcaacgaggagatgagcttctatgtacaaaccacagccaccctctatttacaaacctcagaattttgttttctttggtgtattctggaatcccttgtggtagaaggcaggatatacttgcagaccacatcattcagacctctcaaactagagacatactcaacatcgaaggtcactaatgagcctctatcttctgttctctaattgcaatgctttgaaaggtccctagcctgggcttcatcagtaatagctactaacatttctaggactcagtatatgccaggaaccatgccaggcctcttgcatgcattattttatttaattctcacatctcctctaggatatagatattaggatatcccctcactgtacaggagaggaaattgaggctccgagaggttgagtactttcccaaaggtcacccagtggctcagtggcagagccaagtctagaaccagatctgtctccccttgaagagcatgtcttaaccttgacactttaagagcatttaatgagctgtgactctggaaatgtcctccccttctcagtccctttttgtcctcatcctgtaagagaggtggctgtacaaaatctctcaggacccttgttaactctgactgtctataattctaaaattcttcctggtggactctgagcatcctaggtttgattctcatgcttcctccagctgctgacatcagcctgaaatggctcctttccctctcctgagtccaatccctgacacttaaaagcaaagaaaaagcaagtgaccgttctaacacccttaactaatgcagccaactgacctaccccacgtgcaaactttccaccttgcagctgaacacccttgatcttagggtgtgggtggcaggggcaatggaatctcttccttttacctgatgaggacttcctgcccatggcctgggatgtcagcctccaccttcccccagacgttcagcaccaactgccattccccgtcgctgagccccatggcgcagtctgaagaagacaaaaagagcaagtatgggctcactgggtgtcctggccccaacagctggggtttgaggctgcctggtcccaagggcgtttttataccttctgggatgcttgacaaagatcgctcaatggctcgctgtccccctcccctgccctccttcactttctctctctcatccagggagggtctaatcttttcctttctctagccctcacatgggaagctattttagggcaggtgccattgtggcgaggcaggacagctcaggccacagggggtggggtggttgtgcgtgtggaaagaaggggaggaggttgggcactgtctggactctcatagccgacagaaagggcaccacagaagccgacgccagcagcctgaaacccaacgctccctgcggtcagccctcccaagaggacctgtcatgtttctaagcttggccaccaggtgccccggctggccccaggacagtcctggccattcgcaacctctcacgcaccttctgcccctttgccagagacccctcacccagccagaagtgacagaaaggaaccggatggttttgtgcttatagccaggtggtcccaggcaagtccacaatctcttagagaactcctgttttcatgaccctgctcaaaggtttccctctgaaaagtttttcttgacatactcctttgagacaccactaattgcttcctcctttcctttctttgtgtaagttcctgttgcattgcttcccaaagggcatcctatttcctggttttcatgccatcttctccattaggataatagcagccagcactcacaagagactttgctgggtgccaggccctgtcccaaacacttggcatttggtaactcatttaatccccgcaagacctcccaatgtgataggtactgacattatccctatttaattgagagaaagtagggaaacatcactgatgtacaactagtcgctggcagagttgggatttgaactcaggaagccacgcccctttctttgcagttttcaggagggcaggagctctgttttattaacccacgtatctcttgggcctcacatggtgctttgtgccaagtttgaactgaataaatgtttattgagtaaatgggtggatggttttgcaaagaaagagagtggaggatgattagccttatcttacatccatgcatcctccttcaatccattcaggtattcaaccatctatccatttatccacttgtccatccagttactcatccatccatccatctgtcatcccttaattcatccatccatcatctctttgtctatccatgcattcactcatctatccatccaccacccatccatccaacatctatcaatccctccatctatccgacatcccttaattcatctattcatctatccatcatctctttgtctatccaggcattcattcatctatccatccacccatccatccaaaatccaccagttcctccatctatccatctatccatccatccatgtgttcatccatccatccctcaattcattcatccacccatcatccctccattcatccatccacccatcccctcattcatccattcattatccctccattcatcatccctccctccatccatctatccatccatcacccacccatccctccatctatctatctgttcctccatccctccatccatccatccacccattccctcattcatccactcattatccctccattcatcatcccccctccatccatctatccatccatcatccacccatccctccatctatccttctatccatctgtaactccacccatccatccatccctctcacagtgatagagcacctactgtgtgtcagacactgctacatgctgaggataacaaaatcaaataaaacaccttcctgtgttcaaggaactcagagtctttttagggagataactaagaggaatgaaaatacagtacagtttgtttagtgctatgatcaaggtaggcacaggcccttccttccatctgcataagactatacagtttacaaagtggctgcttggcaagattacatctaatctttacaacacctc

SEQ ID NO: 1562817 - DNA, 4001 bp, Homo sapiens
atcatcctcaaggctcccaattctggaatcttgagatcccagaattaaaattctagagtgtcaaagtcttcaacttttcagcaccggagaaacttgggttctagattccagacttatagagagctagaagcagagaaatctagaattatagggccatagtatcttgtgactaaaagaggccttcaacggtattttgtccaatttcccactaaacatagttttccctacagatcatcatctggcatctgcttgaatactcctgggagtggtgagctcactacctaaagctttaaaaatccttttttatgtcgaaccaaaagatgcctccatgtcacgtgcacttccttgcggcagctccgcctgctccttggggatatagaggcccagctgagtctgcctcacaagagaaggagcaggctcacccaagacttttcttgtccagactgaacatcccaggacttccactgagcaccctccccaggcaaggcaagtcgggggcctcagtctggtggagaaagacgggctctgccatcttcggtctccagccactctcacctctggtcacatgcacacaaagagaacgctatagcaaaggggattccagcacccacctgcacaggtttgagcccctcaggcagctgtgcacctggcccacagtttttatggtcagaaaatccaatctaggtgacctaggaatttgctagcccttggacagctgacaattccctttggtaaatctgggcttaagacaccaccaagggagatcaaagatgtggcaagaaggagaactctggctcctcaaagccaggactccccacgatcttcactactctcttcctcctccttctgggaaccagcctttggaggccagtctgggcagtgcctccctcctgccagcaggccctcccaccccacccccagcttagcttgtgcctccctggcagagtctaccctcctggaccagcgccaggccagggctcagagcagggctgaggcctgggagttgcaggacctgctcaaggcccttgatggggcagcagaacccccaagcttgctccagactcccaggaacccacccaccagggctgctcctctccagcccctcagcatccatcatactgaccacagctccccttctccccagctgtcctcgcagagcctccagccaagcggccagggctgggggtggggagaggtgtcttatagcagccggggagaggcacagggaactaaaaatacagtttacatggcaaggctcctcctctccctgcaggcccagaggggcttattggaggagggctggcagggacacaacatcctaatcccttagtcaacaggtgtggcctgggacaccgacctgcctcccccctccaccctccccagccttggaggctccgagtggctcctccagctccaccatccacctgtcacctggacagagaccagccccgcctccacagtcacctaaccccacatccacccatcctccccttccttcaaggcccattgcataggaacggctcccctgccaggactcctcccaccccgctctacccattcccagcagatgtgccctcttccccactctggctccagcatgggtgcagccttctcatctctcttgctttggggtgcacctgtctggactggcttctccccatttctaccctgtgagtgcctcagaggcaggaatataaaagccacaaactcatattgtacttagtgcacaccagggacacccctcctcccagcagccctttcttttgcaggagacacttttacaagcgtcactttacacttgagagaactgaggcacagagaagttaagtaacttacccagagtcacacagcgaggaaataccaagcccaagattgggacccaggtagtctggcttcagagtctctgcttcatggctaagaactggtctaatttggagtccttccccctcactctctcacctgctctacagtacctagcaaaggaccaggccaacatgctctttgattgtttatttttggattgagtctgcccagggttttggcttgctggaggcaaaggcaaagacagtcggtgaccttgccccagggctgacaacgggtgccctactgccatctagtggcaacaaggaaaaaagcctgcacctctgcccttccatctgggctctccagtccctcaacccagccagtggggaggggtctttttctgtctctatattcgttatattcatggcgccttgcttagaagaccatggatggcttgccaaattattagaagatgaattgtgatcttttaatattgtgatccaggaaaagtggcataactttccaagggcgcttttttttaaatctgtaaaatggaaattttgaaaagaataacctacctcaaatgtcactatgaggactgaaaaagggagcactggccaggcgcagtggctcacgcctgtaatcccagcactttgggaggctgaggagggaggatcacttgaggtcaggagttcaaggccagcctggccaacatggtgaaaccctgtctctactaaaaatacaaaaattagccaggcatggtggtgcactcctgtagtctcagctactcaggaggctgaggctggagaatcgcttgaacccagaaggcagaagttgcagcgagccgagatcacaccactgcactccagcttgggtgacagagtgagaccctgtctctaaaaataaattaaataaataaataaataaataaataaataaataaataaataaaattaagaaaaagggagcactgaatgtggtggatacatagtgataaaagaaaaacttcagccaaattaaatgtaaaggagtttaacagagcagtgaatgatttgcgagcagggcagcctcccgagccagagtaggtctggagactccacagctaaatagtggaagatttatggacagaaaaaggaaagtgacatacagaaaacagaaatgaggtacagaaacagctggattggttacaggttggcatctggtttatctgaacatggttcgaacagttggctgcatttgattggccaaaatgcggtgattggcacagtgtaggctatagtctgtctatacctccacttgttatagttcatgatgtacagaaaaacttttaggcccaacttaaaatatgtaaggaggcggctagaggttaaacttttttaacaacagtaagtgctcaatagttgctcacggtgatataaggtatccatggtccttgctctcaagggactcaaagtccagtggaggagatacctcagtgggatctggaacgcagcagacatttcagcaaaggctttggaagggtgagaaggcagtgcctaggcctgggaggtgaaggcctttgagggatcaataggagtttgttcagaggtgatggctggcctggatgtgaacgtatgagggagcgttctgcagagtgttctaagcagaggtaccaaacagtgctgcaaaagcctgccagagacgtgtggggcaagtggggctgtgggaggtgacacctactgggaagaactttatgtgccaggctcaggtgatgcctgagcagcgttttgaaggatcaataggagcttgttaggagcaaagtgaggaagggatattccaagcacaaggaccaagacaaggacttgggggctcagaacggatagtcacgttccacagcactcatgctcacctggtgtgtgccaggctccgtgctgggctctggggggactaaggtgacaccggctggcctccgagcattgagaggtggtaggagggagggatgtgtgacctaatgttgtcagtactttctgataagggcaataatcgaggtcattcagcatagggctaaaggctttggaatgagactcctggactcggccctaccatgcactacttttgtgatccatgaaaagtatcataactttccaaggtctatgcttttgttatctataaagtggagattttgaaaagaataacctatcttaaatatcattgtaagg

SEQ ID NO: 1562818 - DNA, 4001 bp, Homo sapiens
cttaggtctggcagctcccaaatcaccttggaaagacctctgctctgcaaactctggtctcctacctccacgcctgactgtcctgcctcctcgccaaaggcaaaagtgcatcaaggactcagagaattctagggcatgagcgtgggacgggatctcggagaccatggaagacaatcccttcgctcaaccagcagagaaataaggcccagaggtggagagacttgtccaaggtcacatggcatatctgtggcccaggagttgatgtcaatttgtgtgtgtgtgttggtcgggggagcactttgtgcaatccaacagggcctgttgcagccagatgacagggacaggagaagaaagacataaacacactacgatgccattacagtcaacagaaaactcaactcttcttcctcaagtgtttctagcacggatcaccaacggctcaaattttagataacggagcttccaggaccagccatgctcccgaggtagacggaagctggaaatgggtaaagcccaagggagacccaaaggacgacggagtggaagaggaaaattggctctggctcacaaataaggagaaattaatctgcaaattaaagtgccaaagacaatccattcacttgtggcaaccccggcgcccacttccttcctcccgttggcagaaacgttgattcttaacctattagacttctgagggaaccagctcagaatggtgagggaaggggccaagagaagagtgtatcacctttgggatagaaggcaacgaggagatgagcttctatgtacaaaccacagccaccctctatttacaaacctcagaattttgttttctttggtgtattctggaatcccttgtggtagaaggcaggatatacttgcagaccacatcattcagacctctcaaactagagacatactcaacatcgaaggtcactaatgagcctctatcttctgttctctaattgcaatgctttgaaaggtccctagcctgggcttcatcagtaatagctactaacatttctaggactcagtatatgccaggaaccatgccaggcctcttgcatgcattattttatttaattctcacatctcctctaggatatagatattaggatatcccctcactgtacaggagaggaaattgaggctccgagaggttgagtactttcccaaaggtcacccagtggctcagtggcagagccaagtctagaaccagatctgtctccccttgaagagcatgtcttaaccttgacactttaagagcatttaatgagctgtgactctggaaatgtcctccccttctcagtccctttttgtcctcatcctgtaagagaggtggctgtacaaaatctctcaggacccttgttaactctgactgtctataattctaaaattcttcctggtggactctgagcatcctaggtttgattctcatgcttcctccagctgctgacatcagcctgaaatggctcctttccctctcctgagtccaatccctgacacttaaaagcaaagaaaaagcaagtgaccgttctaacacccttaactaatgcagccaactgacctaccccacgtgcaaactttccaccttgcagctgaacacccttgatcttagggtgtgggtggcaggggcaatggaatctcttccttttacctgatgaggacttcctgcccatggcctgggatgtcagcctccaccttcccccagacgttcagcaccaactgccattccccgtcgctgagccccatggcgcagtctgaagaagacaaaaagagcaagtatgggctcactgggtgtcctggccccaacagctggggtttgaggctgcctggtcccaagggcgtttttataccttctgggatgcttgacaaagatcgctcaatggctcgctgtccccctcccctgccctccttcactttctctctctcatccagggagggtctaatcttttcctttctctagccctcacatgggaagctattttagggcaggtgccattgtggcgaggcaggacagctcaggccacagggggtggggtggttgtgcgtgtggaaagaaggggaggaggttgggcactgtctggactctcatagccgacagaaagggcaccacagaagccgacgccagcagcctgaaacccaacgctccctgcggtcagccctcccaagaggacctgtcatgtttctaagcttggccaccaggtgccccggctggccccaggacagtcctggccattcgcaacctctcacgcaccttctgcccctttgccagagacccctcacccagccagaagtgacagaaaggaaccggatggttttgtgcttatagccaggtggtcccaggcaagtccacaatctcttagagaactcctgttttcatgaccctgctcaaaggtttccctctgaaaagtttttcttgacatactcctttgagacaccactaattgcttcctcctttcctttctttgtgtaagttcctgttgcattgcttcccaaagggcatcctatttcctggttttcatgccatcttctccattaggataatagcagccagcactcacaagagactttgctgggtgccaggccctgtcccaaacacttggcatttggtaactcatttaatccccgcaagacctcccaatgtgataggtactgacattatccctatttaattgagagaaagtagggaaacatcactgatgtacaactagtcgctggcagagttgggatttgaactcaggaagccacgcccctttctttgcagttttcaggagggcaggagctctgttttattaacccacgtatctcttgggcctcacatggtgctttgtgccaagtttgaactgaataaatgtttattgagtaaatgggtggatggttttgcaaagaaagagagtggaggatgattagccttatcttacatccatgcatcctccttcaatccattcaggtattcaaccatctatccatttatccacttgtccatccagttactcatccatccatccatctgtcatcccttaattcatccatccatcatctctttgtctatccatgcattcactcatctatccatccaccacccatccatccaacatctatcaatccctccatctatccgacatcccttaattcatctattcatctatccatcatctctttgtctatccaggcattcattcatctatccatccacccatccatccaaaatccaccagttcctccatctatccatctatccatccatccatgtgttcatccatccatccctcaattcattcatccacccatcatccctccattcatccatccacccatcccctcattcatccattcattatccctccattcatcatccctccctccatccatctatccatccatcacccacccatccctccatctatctatctgttcctccatccctccatccatccatccacccattccctcattcatccactcattatccctccattcatcatcccccctccatccatctatccatccatcatccacccatccctccatctatccttctatccatctgtaactccacccatccatccatccctctcacagtgatagagcacctactgtgtgtcagacactgctacatgctgaggataacaaaatcaaataaaacaccttcctgtgttcaaggaactcagagtctttttagggagataactaagaggaatgaaaatacagtacagtttgtttagtgctatgatcaaggtaggcacaggcccttccttccatctgcataagactatacagtttacaaagtggctgcttggcaagattacatctaatctttacaacacctctgtgaggtagcgagcaccaccccgctttacagctgtgggagatgagattcagaaaggataagccagtgtttgggccatcctgggtctgcactggatttgtcagtaatgactgccccacctacacagctttttgaagataactgccctgccccaatcttgctgaggtgcagg

SEQ ID NO: 1562819 - DNA, 4001 bp, Homo sapiens
gtgaccttgacaatcattgagtcctgcccctttatttaggaggagctttcctggttagttacagtccatcaactccgtccatggtcacactgacgccaacccagggctctggattcccttgccatggccctgcagcaggctctcaggccatatcgttgtgcacaagttaagagcatgacttttttttttttgaggcggagttttgctcttgttgcccaggctggagtgcaatggcgtgatctcggctcactgcaacgtccgcctcccgggttcaagcaattctcctgcctcagcctcccgagttgctgggattacaggtgtccaccaccacacttggctaatttttgtatttttagtagagacggggtttcaccatgttggccaggctggttttgaactcctgacctcgtgatgcacccacctcagcctcctgaagtgctggattataggcattataggcgtgagccacctcgcccggccaagagcatttttatctcatctgtgaaatgagggaagaacagggcctaccccaaagggcggatgagagaattatgtgaatataatgtctatacagtgcttagcacagacccagactagggtaagcagtgaatgaatattatgatgacgattcaacaggaccacttaactaattcttttaatatccctgagtctgcattcctcaaccatcaaataacagtattaacctcacaaggtggtgtgaaggtgaaatagggtaaaggatctcaagtgctagcttaacatttaccgtcttattaaatattaatagcaatcaatccaccaccttcaagtgaagtgacattctcaactcatctcaatgttccttcatttaggccagtgcagtggctcatacctgtaatcctagcactttgggaggccgaggtgggtgaacctgggaggatttaagtaaagaataaaaaaattagccgggcgtggtggtgtgcacctgtgatcccagctactgcggaggctgaggcaggagaactgcttgaacctgggaggcagaggttgcagtgagccaagactgcgccattgcactccagcctgggtgacagagcaagactctgtctcaaaaaacaaaacaaaacgggccgggcacggtggctcatgcctgtaatcccagcactttgggaggccgaggcgggcagatcacgaggtcaggagatcaagaccatcctgactaacacgatgaaaccccgtctctactaaaaatacaaaaaattagccgggcatggtggcgggcgcctgtagtcccagctacttgggaggctgaggcaggagaatggcgtgaactcgggaggcggagccgagatcgcgccactgcactctagcctgggcgacagagcgagactccgtctcaaaaaaaaaaacaaaaacaaacaaaaaaaaaaactcgatcgaatgagtaagacgtgggagcccccggaatggcaggcggaagcctctggcagggccaagagctcaggcagagctcaccttccccctcctgtcacggggcctcgggcctcaccgagggctgcaggtgatgtagtttctcgacagcggccagcgatgccacgaagatcgcgggctgacagtgcacggtgcggtccagggtctcctgcggcccgtgcaggctcagttccagcaggtcgtagcccagcacgcggcgggcggcggcgtagagttcgcggacgcgcgggtagttgagcagaccgcggcccatgcccaccacctggctgccctggcccgggaagagcagcacggagcactggcccggcattcgccgctccgtcgccgcccagggcgcctcctcctccgccccggtcgcatctcgcagcagctccgctacaccctgggcgcccggcggaggcaccgggaagctcgaggcgccgcggcggtagctggcgcccaagcccctgacccacgctacccgtgcgacccggacgctcatggtcggacacctgcccgcgcgcgttaccgtggcgaccgaggcccgactgcggcggcgcggcgcagcgtggtccctgacgcatttcctgccggggcttccggggcaccgggagcgggaagaaaggttccgcagacgctggttccgccccggctctgaggcccttcgggctgcgttctggggtcctggagggactcatgcgtttacttaaacagccatagccgttgaacggaacacgatgccacaccacagtgggtcctcaacagatatttatggaataaataacgcaacgcaatgtagtatttacgctttctacctggcacatgaagagcacttgaaactcttccacattgatggtttttgttgttgtcgttgttgttgtttgttgttgttttttgagacggagtcttgctctgtcgcccaggctggagtgcagtggcgtgttctttgctcactgcaaccgccgcctcccaggttcaagcgattctcctgcttcagcttcccgagtagctgggattaacaggcgcccgccaccatgcctgactaatttttgtatttttagtagggacgggttcaccatgttggccacgctggtgtcgaactcctgacctcaggtgatccacccgcctcggcctcccaaagtgctgggattacaggcgtgagccaccgcgcccggccagcaaccacatttcttgcatatgatcctcccaaccacaggagttggcatggccgaccatccgttgccagttcccaactatacaacagctctcttttataatgttttcttacaaaccacacagtgcttggcacataataagcatccaatagatctttatgctattgaacaaagccttgaatgtgtttcagatattagcttatttaattcctcacagcaacgctgtgatggatagctgctcagagattgagtgacaggtggttagtgacagaatggaggttggaaattggggttatctaatgttaacctaaaagcaactcaagagacacaggctcggccaggcgcagtggctcatgcctgtaatcccagtactttgggaggctgaggcagatggatcacttgaggtcaggagttcaagaccagcctggccaacatggagaaaccccgtctctactaaaaatacaaaaattagctgggcgtggtggtgggcgcttatagttccagctactcgggaggctgaggcaggagaatcccctaagcccgggcagcagaggttgcagtgagccgagatcccaccactgcactccagcctgggtgacagagcaagactccgtttcaaaaaaaaaaaaaaggctgggtgcggtggctcatgcctgtaatcgcagcactttgggaggccgaggcgggcagatcacctggggtcaggagttcaagactagcctggtcaacatggtgaaaccccctcactacaaaaaatacaaaaattagctgggcgtggcggcacatgcctgtaatcatagctacctgggagtcggaggcaggagaattgcttgaacccaggaggcagaggttgcagtgagcccagactgcgccattgcactccagcctgggcaacaagaatgaaactccatctccagaaaaaaacaaaaaacaaaaaaaatatatatatatacacacacacacacacacagaggacactttcaggttaagacgcatagagagagcactgcctctggaagcccataaatccacaacaaagagatatttaaagatataaatccacaaggacaggaagaacaggaaaggggaccgccagcagcagaatctctggaagctggaaagcaggtaggctggtattacctgactgagctgatctcagacagctaaatccctcccaggagtggggaaggctgcgagccaatccttatgcatacaacagaatcctcaaaaacttaagaacaggtagcagctgctgctgcttctagatctaagagtgaaagaaggctaaaacaaagaggattgtttggaggtgcctttgagaaacagatctttaggtcccctccacctccctagccactgggtgatgcccctccccca

SEQ ID NO: 1562820 - DNA, 4001 bp, Homo sapiens
catgagctggtggatcatgaagggcatgcccaggagaaagaggagatctactaccgagaggttgatgatgaagatgtcggggacgttgttgcaccagtgcagcttggacttcttcacgaccgcgaagatgaccgtggagttcccgatgatgcccaggaggcagatggtgccgaacaccgaaggcatgatgatgttgatgtaggagatgctccccgtgcgaggaggtgatcctggggacagaaggagcaagcgttggctgtttgacatgggctttgctctgagaactgacatcctgctggcatgctcagcctccagcgacccaccgttcatctggaatcctctcccaccattctccctcccttcactgttgctaatcttgtcccttttcccttctccatgagtttcctggtgaatcctaccagagtgccctgagccatctgtcttggaaggacacaacatgcctgcctcctgcaggcaccagaggcaagaaccacagttgtctgcagagattactctgtgagccccgggcttcaccaggaaaactcgtcagcatagccagaaggacacaaaagtaagtgtctgtgtatgtgtgtgtgtgtgtgtgtgcgtgcttttcctatgtgtagccctgagtgtttcattttggagatctctggttggaaactgtgtactgattcttgggcatatctgtgggtgactgtcttgtagaggcttttgccggctgtgccctggtcaagccagcagctctccctaccccaggcttcctagcggggatttccttgattggtatcttctgagcctgggcttcttgagtgaagcagagacagaaactgtctgttggagctcagcagcctggaaaaattatctacataagcctttcctcttttccttccttcctttctccttcaaagctggaatcccagggcaccgcagctctggaaatgtcaggaagcttaattcaccagaaaagttaatcccctcatggctctgtgaagtcttcccttcccagggcctctcccaggtggcagtaaggatgtctcagacctcatcatccaagtgggagtaaaaagctgaggctaacagtgcaggagtgagcccccagctgtctcccacataccaccctccagcttctctcgcttgcttttccagcctggaattttttctgccaagcatctttggaacccagcagcgagccttcccctgctgtctcacggctggccccccttccttgccattctgaatatgccttcgccccctgctctgctcctgcccgtctgcccctgcggaccattgcccccttttctcctgcccctcagagcaaagcagaccacagatcttgtccccaagaactgtgataaagtttcccaagcagtttggctcaggggtgaaaccttcccattttccacccacagcccagaggagggagggctcccagtcaactcacctgccgaagtgaggttatcggggccatcagaggtgttgctggcgttgggaccagtgggcagcagcgaggcttccaggtccatccagccagtgccggtcgcctgctcccacaaccgagctgagctcccctccacccacgcaggctgcggcagcctccagcgcctgccaccttgtcccggagcgcaagccccgcagttgggaagggggtcttcctccgtagcctggcagccgctgccgcctccaagcccaactgccctccccactcccttcttcatggctcccactgacatcacctagacacattaacattcggaggcagatgcacattaacctcttcagtcccaggctgtggctggcttccacttctgaatgcctgcagagccccagggccctggggaagctgggagggactggacacaggcagccccatcaggaaagggatctccttcccactgacacttgggattgtctcgtgtgcttacaggggctgctgcttgccttgcgtgaagatcgaggtctctgcaaaggcaaacggacaaagcacacaggctgcctccctttggaggagagagcagcttggcttagcccctattccaggtatgggtggctgggccacatggcagagtccagaggaaactgtgcacatagcttgggaatcaaaggcttggactgcagcagggctgccccccatgcacactcagggcaccctcggccccttccctgtgccctgacggcttccaactatctcgctggctatgctgccagcatcctgcagaagctgagtcgtcagctgctgaacccttgcctggcactcagaggtgacacaggtcactccatgctggcaatagccaggacctcggggactggaaggggacaaactcctctctgcatgggatctgcctggaccaagctcacagaggtgttatttttctaaacgctctgaggtccctgaggtttggcctgggactctttgagacaaatatctgagcatgatcccccaaagagatcatcccggaggaacagctgcagaggcaaaggcgttaagggaattttccacggaggcatcctgctgccagcctctggggccctcacagacaggagctgccactgcacccactgccagactcaggagccaggggtcgaggttcacgggcagatccctacatgtgtcctctatcttgtttacttattgggttcatccaacaaacattcattgagtacttactacctgccaagcactgttctaggttttgcagtaaaaaaaaaagaaaaaaaagtgggggtggggtgggggataaagtccctgtcctcatgaagattgcattcaagttgcggggagacagaaaacccctcaaaagacaattcatggtattggcaatt[450 bp omitted]caggaggcagagattgaagtgagctgagattgggccactgcactccagcctgggcgacacagaaagaccctgtctcagaaaaaagaaaaaatatggccgggcgcagtggctcacacctgtaataccagcactttgggaggccgaggctggcagatcacgaggtcaggagatcgagaccatcctggctaacatggtgaaaccccatctctattaaaaaatacaaaaaattaaccgggcgtggtggcgggtgcctgtagtcccagctactcgggaggctgaggcaggagaatggcgtgaacccgggaggcggagcttgcagtgagccgagaccacgccactgcactccagcctgggtgacagagcgagactacgtctcaaaaaaaagaaaaaatatatactccacataaagataacttatgatattggcaattgctgtaaaaaacttaaagcagggtgagagggcccaggaataccaagagaggtggaggttaccattttatagaggattgatcatcaaggaaggcctctctgagaaaagtcctgaaggaagtgaggaagcatgcttagaaatattctggagtggccgggcgcagtggctcacgcctgaaatcccagcactttgggaggccgaggcaggcggatcatgatgtcaagagatcgagacaatcctggccaacaaggtgaaaccccctctctattaaaaatataaaaattagctgggcgtggtg

SEQ ID NO: 1562821 - DNA, 4001 bp, Homo sapiens
cccagatgcttagcagagcatcccatgtgactgctgtggcaagaacatatttggggaccactgaccaacgcacaggctgttccccagcctcgcagtatcacaggcctgagccccgtctcccttatgtccaggagccagtaaaatggccagactgctactgaaagccacttgctgtgaggacaccccacacctctacacaagcaattgctcctacctagacagaaagctttctacacctgcaactctgaccttagctcaaaggtcccctcaaacttcagccccccggaaaacttccctaagtcctttcaccttcctctgtggaggaaatgaccaccgtggaagttatctgttggtcttcacgactcactcctctgacttaggagcttctctaggacaagaagcacgtcttttcatctttgtagcgcagtgcctggcacacaggtgggcaatatcagctgctgcatgagtaagtgaaagcaggaatggctttacccatttctggcctggtgaggcccagagacactgacacctggaagtcactcagctaataatgggccagtgctgaacctgcaacctcatgttctctgcattttaacatttcagggatagaggccgggcctatgagaattctcatgatgtcacaggtcgtacaatcacctagaagcaggagccaggtccagcttcagtgctgcagcccagcacccagaacagtatctggcaggcagcaggtgctcaatcaatgaaggtgcaagactggtataaataaatgaatgagcgaagtgaagtgaatcctaactgccatcttcaccttttacacctacagggaacttgagtttgtaaggtctcagacatgacatggaaggatgataggaagcagatgaacaggaacaagatctggataaagaactaaacggtccaagtggcgctagctggttgctggtggcccactcaacaggtgactcacccagaagttaactccaggtacagataaaatacacaaagcaggccgggcacggtggctcacgcctgtaatcccagcactttgggagactgaggcgggtggatcacttgaggtcaggagttcgagagcagcctggcgaacatggcgaaaccccatctctactaaaattacaaaaaattatccgggcgtggtgatggcgggggtagtcccacctactcgggaggctgaggcacaagaatcgcttgaacccgggaagcggaggttgcagtgagccgagatcgtgccactgcactccagcctggcgacagagcgagactccgtctcaaaataataaacaaatacgttaataataaaataaaataaaataaagtaaaacaaaatacacaaagccttataccaaggcgtgaggctgccgggatgagccctgtgacccaggaccggctctttcccccgtctgggcccatctgtgccctgactgtccaggactctagcaggctggtagaggcgtgtgagcggccacactggaactcgagcccccggccccgcaggagccgcacctgtatttgaaggtgaagcccgtgcggtcggtgcccactcggtactgccgcaggaactccttgaagcgcctctgcagctgcgatttgcgggcctgcccctcgtcggcctgggcgtcgcccccgaagctgtcgctgtagaaaatgccaggatcgtcgaatcccgacatgactgcgcctggggtgggaacaaacggccagaacaggctgggggcagcgcctggcacctcctcccctccgacgcctgggtccctgccctgagtccggagcagggggacccccggccgcgctcccggactccaaccccagttcccgagaaactcctgtcccactccaactacacccggaaatccagatgcctgctggctcccagtcccagtcccactcccactagcctcacctctggttttccgcacttcacaaaccaggggagacaagaacctccacgctcagccgccgagtttcgcgggaaaaacaagaggcggtgttcggacgccgcagccgctgcgctcccattggttcgccggagcctcgcggccagcgattggaccgttctgagccctccagccccgccgcccggactgtctgccgaagatgattggctgcaaagtgcatgacctcgcctccttccgggctccattttgtgtgcggaacaatttggcgcgaaacttctggctgggaaggaagtggcggcgcaggacggggcggacgcaaagatggcggaggggcgggcgcgcggaggacgcctttaggtggtttcttttttattttcttggtttttttttttttttcctgacgcatggtctcgttgtgttgccggggatggagtgcagtggctggatcacggcttactgtagcctcaacctcttgggctcaagcaatccttccgcctcagcctcccttgtagcggggaccacaggtgtacgtgattttcttaaaatatttcataaagacggagtctcaccatcttgcccaggtctcgaaactctactctcaagcgacccgcctgccttgacgtcccaaagcactgggattactggcgtgagctacccggccaggcctgcgtgcttttcttaagccttcttttaaagtcctatgaaaaaaaatgacccttttcatagccatagggagaaaaaactagaagttcagaaatgattgggtccaggtgcccattttgcattgggagactgtgccctgtggagtattcgcttcccggtcgtggggcccgttctctgggcctgaggctctgaggagcccctgtcctccagctggtggcaggacagggcgattaccgcgcggctcacccgcgtccccgacccgggttctcgcaccctaacacactgcttttatttgtttatttatttgttgagagggagtctcactctgtcccccaggatggagtgcagtggctcaatctcggctcactgcaacttctgcctccccggttcaagcgattctcctgcctcagcctcccaactagctgggactacaggcaggcgccaccatgctcagctaatttttgtatttttagtggagacagggtttcaccatgttgcccacactggtctcgaacttctggcctcaagtgatccactcgcttcggcctcccaaagtgctggaattacaggcgtgagccaccatgcccagaccggcctcattctgtttaacagctgcttaattttctgtagtatggtgacaaagactctccttgaccaaactctagccaggttcctctgggctcccttcacttctaagcctcaaccttgatctataggcactgtggctcatgcctgtaatcctagcacttcaggagaccaagatgagaggatcccttgagtccaggagttgaggccagcctgggcaacatagcaagatcccgcttctctagaaatttttttataattttttttgttttgagacagagtctcactctgttgcccaggctggagtgcagtgtcacgatctcggctcactgcaacttccacctcctgggttcaagcaattctcctgcctcagcttcccaagtagctggaattacaggtgtgtgccaccacgcctggctaattttttgtatttttagtagagacagggtttcaccatgttggccagccttgaactcctgacctcaggtgatccacccgcctgagccttccaagatgctgggattacaggcatgagccactgcgcccggcttgaaatttttttttaattagctgggcatggtggagcacacctgttgtcctagctactcaagaggccaaggtgggaggatggcctgagcccaggagtttgagactgcagtgagttttgattgcaccactgcacttcagcctgagcgacagagcgagactcatctctaaaaagaaaaaaaagacagtccaggcgccgtggctcacacctgtaatcccagcattttgggaggctgaggcgggagttcaagaccagcctggccaacatggtgaaaccctgtgtctactaaaaataca

SEQ ID NO: 1562822 - DNA, 4001 bp, Homo sapiens
ctcctctggaatctgtcttcctctttcagtttctaccactgtctaatgcaggcctttataatctcccgcccgactaggtcatgccacaatcattttacggagcaatgtggcaggcagtgagctagcagtgagaatataaggatgaaaaaggacaggttccctactccctccaaatgttcaaactctcttaatagcttaactggtctctcttctctgccctgcatccatctccagggacagggactctaggcatattcccaacactggcatttcactactccaaagaatgccacatgccaaacacaggctcaattccttggcacaacacccccactaaagtgctagtacctgctcaccctcattccatcatctcctgggctctcttactcctcgagccccagaactctcagcctacaagatcctccctccacgcagtaaatgctcatgtttcctaactcctcagcttggaatggtggctattcacactcctacttgtctttctaggactcaatttattcgtcacctactcactagactgcccctggtctgctcaagttaaccgccgcttcgcaagaaacccctgcagtatacacattacagactgacaagactgcgctgtgacggttcctttaccatccctcaggaaaggggctgtgtctcaggcaaatctgtggcgagcacaacacgccaataagctcagttaaaaactgtcaggcctctgagcccaggccaggccatcgcatcccctgtgacttgcacgtatacatccagatggcctgaagtaactgaagatccacaaaagaagtaaaaacagccgtaactgatgacattccaccattgtgatttgttcctgccccaccctaactgatcaatgtactttgtaatctcccccacccttaagaaggttctttgtaattctccccacccttgagaatgtactttgtgagatccatccctgcccaccagagaacaattgactaattttccattaccttcccaaatcctataaaacgaccccacccctatctcccttcgctgactctcttttcggactcagcccacctgcacccaggtgaaataaacagctttattgctcacacaaagcctgtttggtggtctcttcacacggacgcgcatgaaaaaaactgctaacagaaacaagcagtcggtggtgaggggctagagttcctctgagcggggccactgaccccagctcttcacgctctcctccagaaacgacgatcgcttcctgacagcggcttcctgccatccttcggcaaagtccacattccttcggggggtcaccctcagatcctccgtcccaccgcccacaccccaaacaactaccttcccaatctcatcttacatccaccctcctcccatcactttctttcaccgttgatgcgcttttctggaagagaaaccatgaagcacccagccctgctaaacccactacagccggctgcttctctccctttccctattcagtgtggttcaaaaagcgggggaaagtctgcacccaaagcacacaaatgacgaatgagaaagctcaagacgatgattcataagccagggctcgttggtttgcagagctcggccccaggaaagcaaacgagcagtccatgtcgggaacggaggggacagacgggggggcccgagccctgggacccacgcaagtccccggcgccttctgtctcccggcgccgtaggtttctcacgggtccggccctggcctcgcccgccacgctaaggaggaaggtcccacaatccagccccctgccccgaccactactcacatttgactgaccagcttctgccggaaggcggtgctccgccagtcggtctcttgcccggaaacgtccatgcctgttccccagctcccgccgcccgtatcccgcttggccgccaccgccgccgcctcagtcacagagccaggcccaaacccggaagccgtccgcagtgcctcggccgagccggaagtgaaggagggcttgtgggaaatggagtctcgcgcacaggcttgtgggaaatgaagttccccgccggggacgaagcggtctcggttccgcccggctgggagacacacgcccctcttccagtgcagctgtcggacacggcaggtgctcccgcagcagacctgcgcctgaccgcctgcattttctgcaactcttcagtgtgctggccttatctagtccctgagatccagacccctccgggatgccaggccaagctgccagctatctatagtaatgctagggagagagtgtttatttatcaaatatgtgtgggtacctactgtgtgccagtgcaacgtgatctgggatctgctttcatgcaactgcctgctagcgccgcatccgaagagcgaccagatggactctcatcaccgcttcactcttcgattttttgaatctcacatctcacaatggctgtatttgggggttgggaatgtgaggcccctaaaccacgttaattaatttttagacatgggctttcccttttgaccagcagccacgtccccttcatggagaactcagcctagctagttgctggaggccagatgtcaaacgaatttgataggtgaaggtgagcgagctgaaggtgggatgaggggttatgggggcctgagaatgcttttaggaatgtaaaagttctgcctccttggaactatggggcctttatctgctaccctggggagggaggtgacgtgaggaaaatctggagcccaagtggtcaataagcaccaggtggacaccaaccaacatgggcctcaggagactgtggactggcacctactgaagcctaagtgccaggcccctgctaggcactgtacaccccttacaccccttgttactgtgccccagacaggaggttgaaggtggtagagagtgggtgggagaggagtgagcactctccccaaagaggcctctcttgccaacagagtttcatgtcttgtgttgatgtgagagctgttcatgttttcaaacgttttctgctctaatactcccaaaatcgttattgttttttttgaggggggggggatagaatttagcccttgttggccaggctggagtgcagtggtgccatctcggctcactgcaacctctgtctcccgggttcacgcaattctcccacctcagcttccccagtagctgggattacaagcgtaccccaccatgcctggctaatttttgtatttttagtagagacagggtttcaccacgttggccaggctggtctcgaactcctgacctcaggtgatccacctacctcggcctcccaaagtgctgggattacaggcatgagccaccgtgcccggtggcaaaactaattttttttttttgagatggagtctcgccctgttgcccagactggagtgctgtggtgacatctcggctcactgcaacctctgcctcccgggttcaagtgattctcctgcctcagcctcccaagtagctgggattacaggtgcctgctacgaagcccagctaattttttgtatccttagtagagacagggtttcaccatcttggccaggctgaaaactaatttttaaaaactctatctagagtgatcatcttgaccggggttgcccaggacatccaaggttttagtgtttttttccttgttttattttgttgttgttgtttgtttgtttgttttttgagatggagtcttgctctgttgcccaggctggagtgcagtggcacaatcttggctcactgcaagctccgcctcccgggttcacgccattctcctgcctcagcctcccaagtagctgggactacaggcgcccgccaccacgcccagctaatttttttgtatttttagtagagacagggtttcaccgtgttagccaggatggtctcgatctcctgacctcatgatccgcctgcctcggcctcccaaattgctgggattacaggcgtgagccaccgcgcccggcccttggtttttttttttttttttttttttttttttttgagacagagtctcactct

SEQ ID NO: 1562823 - DNA, 4001 bp, Homo sapiens
aaaaacacacaaacagcaatatcgaaaaaaataaagaactcaattctcccggaagcaaaataaagctgagttatgaagtatccagtcactcaacacccataaactcttcaatcaccctcccagccctcttaacacttcccctacccccattttctttgatgacaactcacccttccagttcttaattctgggctttcccagagaagaacccttgccctggggacttttcttgcaggaaccctgaagtgggatatctctcaagttttcacctacagataactatattttatcagtaaaacactgttcactgattgtgcaatatccccagaaatatcccaaggctattcttcccaaagcccatagctactaactctacagtccctactctttccactgtactgaaaggtttcccagcattcagcccggcttccttccttccacaatgcttcaccccacaccccacccccctccatccagttagtcatcaagaattgtctacgttccccctcctctggaatctgtcttcctctttcagtttctaccactgtctaatgcaggcctttataatctcccgcccgactaggtcatgccacaatcattttacggagcaatgtggcaggcagtgagctagcagtgagaatataaggatgaaaaaggacaggttccctactccctccaaatgttcaaactctcttaatagcttaactggtctctcttctctgccctgcatccatctccagggacagggactctaggcatattcccaacactggcatttcactactccaaagaatgccacatgccaaacacaggctcaattccttggcacaacacccccactaaagtgctagtacctgctcaccctcattccatcatctcctgggctctcttactcctcgagccccagaactctcagcctacaagatcctccctccacgcagtaaatgctcatgtttcctaactcctcagcttggaatggtggctattcacactcctacttgtctttctaggactcaatttattcgtcacctactcactagactgcccctggtctgctcaagttaaccgccgcttcgcaagaaacccctgcagtatacacattacagactgacaagactgcgctgtgacggttcctttaccatccctcaggaaaggggctgtgtctcaggcaaatctgtggcgagcacaacacgccaataagctcagttaaaaactgtcaggcctctgagcccaggccaggccatcgcatcccctgtgacttgcacgtatacatccagatggcctgaagtaactgaagatccacaaaagaagtaaaaacagccgtaactgatgacattccaccattgtgatttgttcctgccccaccctaactgatcaatgtactttgtaatctcccccacccttaagaaggttctttgtaattctccccacccttgagaatgtactttgtgagatccatccctgcccaccagagaacaattgactaattttccattaccttcccaaatcctataaaacgaccccacccctatctcccttcgctgactctcttttcggactcagcccacctgcacccaggtgaaataaacagctttattgctcacacaaagcctgtttggtggtctcttcacacggacgcgcatgaaaaaaactgctaacagaaacaagcagtcggtggtgaggggctagagttcctctgagcggggccactgaccccagctcttcacgctctcctccagaaacgacgatcgcttcctgacagcggcttcctgccatccttcggcaaagtccacattccttcggggggtcaccctcagatcctccgtcccaccgcccacaccccaaacaactaccttcccaatctcatcttacatccaccctcctcccatcactttctttcaccgttgatgcgcttttctggaagagaaaccatgaagcacccagccctgctaaacccactacagccggctgcttctctccctttccctattcagtgtggttcaaaaagcgggggaaagtctgcacccaaagcacacaaatgacgaatgagaaagctcaagacgatgattcataagccagggctcgttggtttgcagagctcggccccaggaaagcaaacgagcagtccatgtcgggaacggaggggacagacgggggggcccgagccctgggacccacgcaagtccccggcgccttctgtctcccggcgccgtaggtttctcacgggtccggccctggcctcgcccgccacgctaaggaggaaggtcccacaatccagccccctgccccgaccactactcacatttgactgaccagcttctgccggaaggcggtgctccgccagtcggtctcttgcccggaaacgtccatgcctgttccccagctcccgccgcccgtatcccgcttggccgccaccgccgccgcctcagtcacagagccaggcccaaacccggaagccgtccgcagtgcctcggccgagccggaagtgaaggagggcttgtgggaaatggagtctcgcgcacaggcttgtgggaaatgaagttccccgccggggacgaagcggtctcggttccgcccggctgggagacacacgcccctcttccagtgcagctgtcggacacggcaggtgctcccgcagcagacctgcgcctgaccgcctgcattttctgcaactcttcagtgtgctggccttatctagtccctgagatccagacccctccgggatgccaggccaagctgccagctatctatagtaatgctagggagagagtgtttatttatcaaatatgtgtgggtacctactgtgtgccagtgcaacgtgatctgggatctgctttcatgcaactgcctgctagcgccgcatccgaagagcgaccagatggactctcatcaccgcttcactcttcgattttttgaatctcacatctcacaatggctgtatttgggggttgggaatgtgaggcccctaaaccacgttaattaatttttagacatgggctttcccttttgaccagcagccacgtccccttcatggagaactcagcctagctagttgctggaggccagatgtcaaacgaatttgataggtgaaggtgagcgagctgaaggtgggatgaggggttatgggggcctgagaatgcttttaggaatgtaaaagttctgcctccttggaactatggggcctttatctgctaccctggggagggaggtgacgtgaggaaaatctggagcccaagtggtcaataagcaccaggtggacaccaaccaacatgggcctcaggagactgtggactggcacctactgaagcctaagtgccaggcccctgctaggcactgtacaccccttacaccccttgttactgtgccccagacaggaggttgaaggtggtagagagtgggtgggagaggagtgagcactctccccaaagaggcctctcttgccaacagagtttcatgtcttgtgttgatgtgagagctgttcatgttttcaaacgttttctgctctaatactcccaaaatcgttattgttttttttgaggggggggggatagaatttagcccttgttggccaggctggagtgcagtggtgccatctcggctcactgcaacctctgtctcccgggttcacgcaattctcccacctcagcttccccagtagctgggattacaagcgtaccccaccatgcctggctaatttttgtatttttagtagagacagggtttcaccacgttggccaggctggtctcgaactcctgacctcaggtgatccacctacctcggcctcccaaagtgctgggattacaggcatgagccaccgtgcccggtggcaaaactaattttttttttttgagatggagtctcgccctgttgcccagactggagtgctgtggtgacatctcggctcactgcaacctctgcctcccgggttcaagtgattctcctgcctcagcctcccaagtagctgggattacaggtgcctgctacgaagcccagctaattt

SEQ ID NO: 1562824 - DNA, 4001 bp, Homo sapiens
gaacaaaaatattttcatataatattaaaatgttcttagtcttcctcatttttttttaaattttttccatgttggccaggctggtcttgaacttctggcctcgtgatccaaccacctcggcctcccaaagtgctgggattacaggtgtgagccaccggacccggcccagtctttctcattcttattctcccacaagtgtacagtggagtttttgagactatatgacatgatagcacaacagactgaatgcagaaatagataaaaatccagctgtttggccgggtgtggtggctcacgtctttaatcccaacactttgggaggctgaggcaggcagatcacctgaggttgggagttcaacaccaacctgaccaacatggagaaaccccgtctatactaaaaatacaaaattagctgggcgtagtgacgcatgcatgtaatcccagctactcggaaggctgaggcaggagaatcgcttgaacccgggaggcggaggttgcggtgagctgagattgcgccattgcactccagcctgggcaacaagagtgaaactccatctcaaaaaaaaaaaaaaaaagaaagaaagaaatcaaaatatttgagaacgcagccaggcacggtggctcacagatgcaatcccaacactttggactttgggaggtcaaggcaggagaattgcttgagactaggagttcaagaccagcctgggcaacacagggagacccccgggaccgtttctacaaaaaaaaaaaaaaaaaaaaaaaaaattgagaactgctgatctagccaatccacccactcacgaattcccctcccatgaattggagagaaacttgacctcccaaagtcttcttggatgcctccatggacaagaaaactcactgcaggtcgggcaccgtggctcacgcctataatcccagcactatgggaagccgaggcgggtggatcacctgaggtcaagagttcgagaccagcctggccaacatgatgaaactccgtctctactaaaaatagagaaattagccgagcgtggtggcgggagcctgtaatcccagctactgggtaggttgaggcaggagaatcgcttgaacccaggaaacagaggttgcagtgagcggagatggcgccattgcactccggcctgggtgtcagagcgagactccgtctcgaaacaaacaaaaccacttcattgcaaacgcggtaggcaatgaggacccaggcagcccgctttggccagctctgcccaaggaacagtcttcccgttcacccccacttctgcccggctgtaacctgtcactcctgtcccctcggagcccagactgcccctcctccgattcacaccccgacagctgaagggaatgaggagcggccgccgcatgcgcccctggcccgcaggtgagtggaggctgaaatggcgggaggctgaaatggcgggagcctgagctaaggccgaatccccgggaaatggaggcaggggcagcaaagggaaggagccagaaggcggaaggcgggaaggtgtgtccctgagactgggtgaggtcccgggggatccggatttccgtcctttcaggcgcagagccagtggaccgggctccacggaggcccgcaggccggcctggggctgaggggcccgagaggccgctgcggccgggtccgggacgggctgacagggaggagagtgaacacagcgcgggggcccggtttcgcgtcgggttcaccggagcgggtctggcaagggcctggccgcgtttgctgagggaaatggccaaacccaggtcttctgaagaaaaggttccgcccgcaccgacacgccggggtccggcagcagctccagcgcgcaggccaggcacaggcggggggtcacgggcagcagccagcgcgggtcgtgccggtaatgggccctctcgaatagaagcgccgcctcttcctctctcctgggcccgggagtgcccgccgtcgccgcctgcctcacagccatctcctcgcttgccctcagctgaggcggcactctttcccgcgcagactgcacgcatgcgcacttggaggacggacctgcgtcggtgtggaatgcgcctgcgcggacccagggcgctgcagtctcagacgagcagcagccactgagggcaagtggtggacgcaagtgctctggatcgtgtctagctaagccaaaagcggtttgtgcttagaaccctgcaggaatgtctttaccacatccaaagttgaaaagcaattataaagtagggggcatttgccttgaaaaaggaaggaaaggaagctatttctactgttttttaaaaatgaaggccgggcatggtggctcacgcctgtaatcccagcactttgggaagccgaggtgggcggatcacgagatctggagatcaagaccatcttacccaacatggtgaaaccccgtctctactaaaatacaaaaaattagctgggtgtggtggcaagtgcctgtaatcccagctacttgggaggcttgaggcaggggaatcacttgaacctgggaggcggaggttgcagtgagctgagattgtgccactgcactccagcctggcgacagagcaagactctatctcaaaaaaaaaaaaaaaaaggaaaataagcgatcccaaggattcgcatctaaaagcaattagaggctgggtgagttggctcatgcctgtaatcacagcactttgggagggaggctgaggcaggagaatcacttgaacctgggaggtggaggttgcagtgagccaagatcgcaccactgcactccagcctgggtgacagaggaagactccatcttaaaaataaataaataaatcagaagcttaagaccaaaaaataaaagtaaaaaaacaaaacaaaacaccaaagacagagagaaagaagttcaagaccagcctgagcaacagggcgaaacccctcctctactaaaaatacaaaaattagctgggtgtggtggctcatgactgtaatcccagctactcgggaggctgaggcagcagaatcgcttgaacccaggaggcggaggttacagtgagcggagatcaagccactgaactccagcttgggccacagacctacactccatctcaaaaaaaaaaaaaaaagcgtcccatgcagaggaccacccctccccataagcagctgaggcttttggagtgtcctgcctcaatcaggattagcttggagacagagcaggatagaacctcagtggactccactgtgaggagctggggggcaggtgtttcggagaggacactgggttgacccacattccctaaaccacaaccacagagtggaaggggcttctaccccacccacaaagtatcccaaaccccgaaagggggcacttggaaaatgtgccagagaaatcagaacaccacagggcccaaatgaccaatttattagaggctttgcagggatcaggacactctcaaagcttttctgatatgtcctgaggactctgggcctgagtctactttttaaagccattctggaagagaaaaaaattcagatgcttcataatactaaactttttggaggctcgtgtattctgtggagccccatttgggttcccaggtgcctcctggccctggggactctctgtcttaggaagggtggccccagtacagcagtgaccttgcagctgaagatccctctgtgaagcagtgtgatctccgatgctgtcctcccctgcacgaggatcacccactttgggaggcagagtagaatcaggttccctcaggctcaggttaggggccaagtgcttgcgcttggcgagctgtggggaccaggacatcttggccagaagggtcaggcccagctttgccaccgcagagtggagcctccctttgaagctgacaggttctgcagaatggcaggaaggctgctgcccagcccctctgcaccctgtagattccaggcttcctcttctccagtatgtgagctgctggcatttgagtctggggagcttagaggcctcccaggatgtacattccttcctccagtg

SEQ ID NO: 1562825 - DNA, 4001 bp, Homo sapiens
gccaaagggtgagagacgtggggtagcgactcctgtagcccagtgacccagtcctcacagggttcccaagtctcagcaggggagaaaagcacccaaccaggagcaaggttctaggtcccactgggctctgtcccctcaggccttctgcgtgacaccacgccagccagcacttcctctctctggcctcagtttcctcatccggggcaagggcaccaccgcggtgatggagataagacaggaaagggccgtgggccacgtgaggccacgctcccgggtacacagacgcataaacaggaaggcctgcgggagggcccgccttggctgcttccgcaggaagaaccaggatctccccaagatgagaagccgtgtggggcccagagaagagctgaggtgctgggggccagctggggaagagttaatcccaagtacgagggcagaaatcagggcagggtgcccctccccaggagggcctggcctctgccagccatcctctccccctccttttggtcttccaggaggtctcgactatctccaaagactcagtcacttcctcccactgagccagccgccaaagaggggaccgatgtgtgtgtgtgtgtgtgtgtgtgtgtacccattctccacctcccccatcaacggtccctaacaccgacatcactaactttgcttaaggaagatactggatgcgaggagggaaagggctggaagggacttggctcgccggagccgcacagccatgtgacagacatgcctcttgtcacacacatctagcacactccagctccgtgcgtgtgagcacacacacacacacacacacaatcccacgtgccaggcaggcctccccaacctccggcccaccactgcctcagccgccaccctcgtggcatgcgctctccttccctccctcggaagcagtccgcaggaagccaacacaggaggccagacatggcggcctcggcacacccggggcagcagagacacagcggcaggggctatcgggaaggccgaagggatgcctcccccaagaacagaccccaccattctcctcccgtcctccaccctcagagcccgggcaggacagcacctagggcctgggtgggacagcctggcctgggcacgggtctgggtcaggacctcttggaggcctccaccccagctgcccaacacccaccattacccctgatgccaggctgggcctgggtggctaggagcgaagcccccacgggagcggctaggaatagaagaacccccaggagggacccgggagcctggagcaggggcccagcctggcccccaaaagtggtggagcggtaggacctgggtgcacctggagtcaggaccagtacagggcacgggcagggccgcaggcagcccctaaagcccggaagaaggagagaggaagaggatccctgattaggcaggtattgagcagcttctcccatgaggcagtcagggaccccagcccagtagaaaggcctctgagaaccccttaggccaggggccacccccagggcccaatgtcacccacttgtcacctgttccctggtcctggaaacccacgtgtcaagcagcagctccaggcgcaagcggtggaaagcccgggtcgtcttcactgcaatgaagacatcgtgtagctgtagcttagggggccccgggttcggctggctcagctcgggggtcccttgtacccgctgcggggacaggttcaagtggtaccgcagacacaggagccccatgcacaggagggtgaggagggctccagccaggccccgcgggagccggcactgcattggttggccctgggaccccagacagctcagcccccaaatcccaaccagacagggaggggaagctggtcaggcaggggctccagcagaggcaaaagtctggcaggcatcaggggctggcaaggagggaagaggtaggagctgaggctctggacccagaggctgagccatggcagcacgatctcgaccgccgccagtcctccacctgctcccgctgtccggcctgccgcagcctccgggaccgcctggccccgccccgcttagcccgaggggcggggccagacgaagggaaccccagacagaggcggctgaaaggaggcaccagcagaaagggcagccccggctctgccagctgctgcggtgggaggaagtcacaacaaaccctccgtgcccggtggaagggagtgtcctccagcaccgtccactcccccagagagctgtcagctcggcccattcaacacccattactttggtgtcctgcttcacccagcccccagcttttgctcacaggtttcctccgggatgctctcccatattccaccagcctcacccacattccctccactaggctgagttctatctggacttcaaagcttaagggttccctcctccaggaagccttccgtgataacctcttaacctctggggctcccacagttgttcgctcagttcctgaggtcttcacaacagcactgggactgtcgttcccagtttatagctgaagacataaggcacaaaggcacagaatgagcaaaaacgatccagcaactcagccgcagagctggcagaacccaggtctctgttcctcatctagttcacaggaggtcccctgagggcacctgtccagctgtgccccagcccatacccgacctcactccgcagtctctggagctgcctctctcccagcacctgaccagtggacagacagagggccttctccagccaccacctccatcttgtttcgcacaagctcactcacacctcctccctcctccactcagagcctgcactggctcccattttcttcagaacaaaagccaaaacgcacacagcagcccacaaggccctgcgtgagctggctcccaagttactcccaccccatctcctgctactcaccctgctccactccagaacctgggaccctcgctggcccaggcacctggccgccacaggaccttggcacttgctgttcccacctgggcccctccctagagacctgcacgtctcactcccccactcccttctggtctttacacaaaggtcaccgtctctgtgaggccttccctgaccacgttattaacattgcaacccctcgccgcctccttcccagccccccaggcctgtccctctcaagccacttcactgttttcttcatcacacttttcatcttccaacattctgtatgtttaactaagtttctgtcctcctcatgagaatatcagggcaggatttattttttgatcactgagtccctaatccccagtgcctagaacagtgaccggcagacaagaactcaatcaatgttaattcaacacaacaaagtaccaggtggctggcaaagggaagtggccctgccgggctcaaccctgcatgaggacagctgggggagaggaagggaaaaccaaccctttgaatgaccttctcatgggccagcccccagccaggccccttcacaggccatattctcagaatggtgatgatgccagccttggtgatgatcccagactctgtaccccacagaccaggtttaaatcctgactgggggctgggcgccatggctcacgcctgtactcccagcactttgggaggccaaggcaggcagatcacttgaggtcaggagttcaagaccagcctggccaacatggtgaaaccccgtctctaccaaaaatacaaaaattagctaggcattgtggcaggcacctgtaatcccagctactagggaggctgaggcaggagaatcacttgaacccgggaggcagaggttgcagtgagccgagatggcgccattgcactccagcctaggcaacaagagtgaaactccatctcaaaaaaaaaaattcccaactgggccactcactggctgtatgactctaggaaagttaccttcatcatttctaaaatggggacaaaaatatgacttggtgacgattacaggatgagtgggcttctccaccccacagaaaggatgcttgacacggggaacaggcaaaggca

SEQ ID NO: 1562826 - DNA, 4001 bp, Homo sapiens
ctcacagggttcccaagtctcagcaggggagaaaagcacccaaccaggagcaaggttctaggtcccactgggctctgtcccctcaggccttctgcgtgacaccacgccagccagcacttcctctctctggcctcagtttcctcatccggggcaagggcaccaccgcggtgatggagataagacaggaaagggccgtgggccacgtgaggccacgctcccgggtacacagacgcataaacaggaaggcctgcgggagggcccgccttggctgcttccgcaggaagaaccaggatctccccaagatgagaagccgtgtggggcccagagaagagctgaggtgctgggggccagctggggaagagttaatcccaagtacgagggcagaaatcagggcagggtgcccctccccaggagggcctggcctctgccagccatcctctccccctccttttggtcttccaggaggtctcgactatctccaaagactcagtcacttcctcccactgagccagccgccaaagaggggaccgatgtgtgtgtgtgtgtgtgtgtgtgtgtacccattctccacctcccccatcaacggtccctaacaccgacatcactaactttgcttaaggaagatactggatgcgaggagggaaagggctggaagggacttggctcgccggagccgcacagccatgtgacagacatgcctcttgtcacacacatctagcacactccagctccgtgcgtgtgagcacacacacacacacacacacaatcccacgtgccaggcaggcctccccaacctccggcccaccactgcctcagccgccaccctcgtggcatgcgctctccttccctccctcggaagcagtccgcaggaagccaacacaggaggccagacatggcggcctcggcacacccggggcagcagagacacagcggcaggggctatcgggaaggccgaagggatgcctcccccaagaacagaccccaccattctcctcccgtcctccaccctcagagcccgggcaggacagcacctagggcctgggtgggacagcctggcctgggcacgggtctgggtcaggacctcttggaggcctccaccccagctgcccaacacccaccattacccctgatgccaggctgggcctgggtggctaggagcgaagcccccacgggagcggctaggaatagaagaacccccaggagggacccgggagcctggagcaggggcccagcctggcccccaaaagtggtggagcggtaggacctgggtgcacctggagtcaggaccagtacagggcacgggcagggccgcaggcagcccctaaagcccggaagaaggagagaggaagaggatccctgattaggcaggtattgagcagcttctcccatgaggcagtcagggaccccagcccagtagaaaggcctctgagaaccccttaggccaggggccacccccagggcccaatgtcacccacttgtcacctgttccctggtcctggaaacccacgtgtcaagcagcagctccaggcgcaagcggtggaaagcccgggtcgtcttcactgcaatgaagacatcgtgtagctgtagcttagggggccccgggttcggctggctcagctcgggggtcccttgtacccgctgcggggacaggttcaagtggtaccgcagacacaggagccccatgcacaggagggtgaggagggctccagccaggccccgcgggagccggcactgcattggttggccctgggaccccagacagctcagcccccaaatcccaaccagacagggaggggaagctggtcaggcaggggctccagcagaggcaaaagtctggcaggcatcaggggctggcaaggagggaagaggtaggagctgaggctctggacccagaggctgagccatggcagcacgatctcgaccgccgccagtcctccacctgctcccgctgtccggcctgccgcagcctccgggaccgcctggccccgccccgcttagcccgaggggcggggccagacgaagggaaccccagacagaggcggctgaaaggaggcaccagcagaaagggcagccccggctctgccagctgctgcggtgggaggaagtcacaacaaaccctccgtgcccggtggaagggagtgtcctccagcaccgtccactcccccagagagctgtcagctcggcccattcaacacccattactttggtgtcctgcttcacccagcccccagcttttgctcacaggtttcctccgggatgctctcccatattccaccagcctcacccacattccctccactaggctgagttctatctggacttcaaagcttaagggttccctcctccaggaagccttccgtgataacctcttaacctctggggctcccacagttgttcgctcagttcctgaggtcttcacaacagcactgggactgtcgttcccagtttatagctgaagacataaggcacaaaggcacagaatgagcaaaaacgatccagcaactcagccgcagagctggcagaacccaggtctctgttcctcatctagttcacaggaggtcccctgagggcacctgtccagctgtgccccagcccatacccgacctcactccgcagtctctggagctgcctctctcccagcacctgaccagtggacagacagagggccttctccagccaccacctccatcttgtttcgcacaagctcactcacacctcctccctcctccactcagagcctgcactggctcccattttcttcagaacaaaagccaaaacgcacacagcagcccacaaggccctgcgtgagctggctcccaagttactcccaccccatctcctgctactcaccctgctccactccagaacctgggaccctcgctggcccaggcacctggccgccacaggaccttggcacttgctgttcccacctgggcccctccctagagacctgcacgtctcactcccccactcccttctggtctttacacaaaggtcaccgtctctgtgaggccttccctgaccacgttattaacattgcaacccctcgccgcctccttcccagccccccaggcctgtccctctcaagccacttcactgttttcttcatcacacttttcatcttccaacattctgtatgtttaactaagtttctgtcctcctcatgagaatatcagggcaggatttattttttgatcactgagtccctaatccccagtgcctagaacagtgaccggcagacaagaactcaatcaatgttaattcaacacaacaaagtaccaggtggctggcaaagggaagtggccctgccgggctcaaccctgcatgaggacagctgggggagaggaagggaaaaccaaccctttgaatgaccttctcatgggccagcccccagccaggccccttcacaggccatattctcagaatggtgatgatgccagccttggtgatgatcccagactctgtaccccacagaccaggtttaaatcctgactgggggctgggcgccatggctcacgcctgtactcccagcactttgggaggccaaggcaggcagatcacttgaggtcaggagttcaagaccagcctggccaacatggtgaaaccccgtctctaccaaaaatacaaaaattagctaggcattgtggcaggcacctgtaatcccagctactagggaggctgaggcaggagaatcacttgaacccgggaggcagaggttgcagtgagccgagatggcgccattgcactccagcctaggcaacaagagtgaaactccatctcaaaaaaaaaaattcccaactgggccactcactggctgtatgactctaggaaagttaccttcatcatttctaaaatggggacaaaaatatgacttggtgacgattacaggatgagtgggcttctccaccccacagaaaggatgcttgacacggggaacaggcaaaggcagccaagtcacaggcccctgcctttccccaggccaagcactgggccaggctcac

SEQ ID NO: 1562827 - DNA, 4001 bp, Homo sapiens
ccagtggcacctcctggccacagcagtcttggcagtcataagggccacccagacgtcacggcctgcgccctctcccaacaggagggatattttctgagctcaaaggcctgacccttgattcacaagggcttcagtagggaaaccctacccccacccccactccccacccactcctggtcccctcaagaaccaaggagccggcaggaggcagggagatagcgctaggggccgccgccacccccgccctgtcacaaaccctatcagatcatgcagctctagacttccgcctcgtccagtttgccccgggcgggcggccttccctcgggacccctgtggcgccacccgcccgccgccgtgctcctgggctcctggtaggggttgtccagcaggtagtggaaccggtcgtagttcttcagcaggtacttgggcgcatacatgtgctcgctggggtctgcaggcgggtactcctgctgcgtgccgtcgaaccagcccccggtgcggatcaggccgcggatgtagttcaggtcccgcttgtcctcgtagtcaccccagcgtgggaagtcgccattctgggcggacacgagcttgaagtagatgccctcgggcgtgaagcaccaggagcagtgccagccggcgaagtgcagggggctgcccagcgaccactgcaccaggatgtggccggtgcggttctcatactgtctgaagttgggcatggtgtagtactggcggcggcgcaggcggatgccgtccagcccatacactgcctgcagcatgtccaccgtgcagcctgacaccacctccagggtgcccggctgcttccagaagaagccgtagagcgacttgcgcatgtggaaggcgaagggctcggtccagccatcgtagagcttgaggaaaaggacgccgtcacgggccgggatctcgtccgcatcgtcaatgatgaagacgtcgtcgggccgcaggttgcgcagccgcgagacgccgtcctgggtgaggaaggtgcgcaggtagtcgtcggcgatccagccgtcctgccggccgccgggcgggaagtggtccaggaagacatagagcaccttgtggcggatgtactcgaaggtgccattggtcagcatctcccggaacttgagcggccgcggctccccataagccgtgaagttggactcgcacaccacaaaggcgtccaccacgtcgcccagctcgtggaagcgcacgtccagcaggtcgaactcgtggttgacgttgatggcgttgatgacgcggcgcggcacctccctgggcaccagccgctccttggtgggcaggttggagtactgcaccacagtgggcacgccgcagctgggtccgtgccagccgggcaggcacacgcactccacccacttgcgccgggcgcctcggccccccgtgcgctcccgggcgctcaggaggtaccggggtggccgccgggccgaggagccgttggccccctcaggcttctcctccggccgtcccgggggcggcctctccagcatcttggtgccgggtttgaagcagacgccgccggccttggtgcgcacgaaatactcggtggtgtcctcgggcagcaccaagtccacccggtggagctcctcggccgccttgctgggcggcagcggctgcagcaggggcgagtgggagtagagtggggtacgcagcaggtcagggcctcctggctcggggctggcctggggcgtgaccggggcattgttccagaaaaagctggacaccaggttagggctgagggaggccagttctcgggggaaggtgacataggacagggtcttgaagaagtgcaggaaggagatgaggcacaggccggccatacagaacatgagaaagagcttgtagcgtctcatcttcatcctgcgggagagagagagacaggagactcatcagggcagcccaggctcctttcctaggaaggggacctaggaggcctctgctgccaccttgctggacaatgtggtggccagcacctgctgcccctgcatggagtgacctcctgcccccaagagtcaactcgcggtaccaaggcccctgaaagccccagcactgaggacaccgccgtgctcccatagcccttccctgagatccccaggccaccaccctgccccctctgcagcctgcttctccgcctggcccaccccaccctgactgtgcggctgcactgctaggcttggctccaggagtaacatgcgccttgggaaaagctcaactcgcagtacagactccgccccaggacagaacggggagagcaggctgtaggctgccctcctgggtcctgtccctcccctcctatcttcttttttatggacatactgacaaaccttttgaatattttttcactgaaaaaactcacaggtctcaagggaaaacacttaattctaacatatttaatgaataaaattaggccaggcgtggtggctcacgcctgtaatcccaacaccttcagaggctgaggcaggaggatcacttgagcccaggagtttgagaccagcttggacaacatagtgagaccccatctctacagaaaatttaaaaattagccaggtgtggtgccatgtgcttgtggtcccagctacttaggaggctgaggtgggaggatcacttgagacctcgaggttgaggctgcagtgagccatgattgcaccactgcgccccagcctggacaacagactgagaccctatctcaaaaacaaaataaaataaaagttccccttcattattccatgccctttactaatctccaggcataaaaatttgaggtcggccagtgcagtggctcacgcctataatcccagcactttgggaggccgaggtgggcagatcacaaggtcaggagttcgagaccagcctggccaacatggtgaaaccctgtctctactaaaaatacaaaagttagctgagtgtagtggcgcatgcctataatcccagctataccggctgaggcaggagaattacttgaacccagggggcggaagttgcagtgagccatgatcacgccattgcactccagaacctgggtgacaagagcaagactccatctaaaaaaaaaaaaaaaaaaatttgaggtctatctctggctttatatgcaatttttctattcttgatttaatatttttcataaatactaccatattggacactaagtctaaccaagttgttttcctcaatcaatgatagatttaaaagattttggtatcagtagaaataaatgtaccagttccttttaaatcccacatattacatggctattgtgaataaatcactctgtattcatgactcatgatgtaaccatttgctattcatttatacagtttaatttatcaatcagtttatggctgtggaatggagatgcttgtatattctcattctccaatttaaattttttttgtgtgtttttgtttgtttgtttgtttttaagacagagtcttgctctgtcgcccaggctgaagtgcagtggtgcgatctctgctcactgcagcccctgcctcccaggttcaaggaattctcacctcagcctcccaagtagctgggattacaggcacacaccaccacacccagctaatttttgtatttgtagtagagatggggtttcgccatgttggctaggcaggtctcgaactcctgacctcaggtgatccgcccacctcgacctcccaaagtgctgagattacaggcatgagccaccatgcctggcctaaataaacttttaattttagaatatttgtagattatcagaaaaggtgcaaagacagcacagaggcttcctcacacacttcaccctgttgctcccagtttataccaccatggtacatttgtcacaactaggaaacggacatcagaatgtcaccatcagccaaaccccatgctggatttggatccctcgttttatgaatgagccgtgcagccacagagcacctccgaccgtagccatccagctcatttcacccttgagtctaggcaggtgggcaggcgagccagga

SEQ ID NO: 1562828 - DNA, 4001 bp, Homo sapiens
gggtggatcacttgaggtcaggagttcgagaccagcctggccaacctggtgaaaccccatctctactaaaaatacaaaaattagccgggtgtggtgtcgggcacctgtggtcccagctactcgggaggccgaggtgggacaattgcttgaacccaggaggtagaggttgcagtgagccaggatggcaccactgcactccagcctgggcgacagagtgaggctccatctcaaaaaaaaaaaaaaaaaaagaaaagaaaagaaaagaaaaaggaatcaccagtgtgcctcaagtagccctgaccacaccaagggcaccaggcagacccttagaatgggtctgagccagcggcatccccccagccaggtcttggctccctgccgtcctcaggaccaagtgccagctccctgctgtgccctcccacctcacctccacctggcctccctgcccagcctctgccccgttttcatctcacttcttccagggggcacccacagtgcctgactgttcccactgccacctctcaacacacgccagacactcacacctctgagcctttgctcatgccattcccttggcccacaacgcccttcccacctttctctacccagagatctctggcagcttcctgtcgtcatctcttccagtaacctctctcttcctcctgggctgggacccctctttcaaaccttcctaggacccagagcggctccccttagcactccttagactgaaaaccccctcagagctgcagctcctgggggtgggggctctcccctccatccttctgctgggctccatgtctggatctttcataactgctccccctccccaaacgacacgccagtgctcacaactcccccatcaaggcgaatctggactggtgtgtcccaggaatgaagtggggaaccagggaggaatcccactggggtagtgtgtctgcccacaccccatcaggggccttcaggggcatcttccggggctgggggtcatccgacctcagaccactaggtctggccgcgcggcatcccttcctgctgcaccccagctcaggaaccccaccatacacacacccaggcgcactcccctccccactcccggttccagaactcactatttgcagatatttatagcgccctccctcagccaggttccctcccccgccctgggcagagcaatgcaaggagccgggggcccccaccccggtaaatggccgggggccctctccacatttgcctctgcctggtccccaggggtagctacggccgcagcccccgcacccgcccagcccccgactgcgcttgggcctcggctgccgccgccgcagtctggggtcgggggtggggaaggcgggcgcggaggcctcccaccccagccccgcgccgcgccggaggttgtgggggagccgcgccggaggctggggggtgccgcgcacaaagcacggctcgagccccgcgcctcggggacgtcccccgcccggccgtgggagggggtcgggcgctgaggctctgccctccggggaccggggagctcggaggagcggcgggtagggggagggggcccgcgccgagcggcttccccggcatcccgcccccaccgcggcctccgggcccccagccccagtgcgcccgcgcccgccccctaaggtcacgctcggggagtgggccgcggagccgggcggggggcgccaagcgcagcgcgggagggcgggcagcgcggggatagaggggccgcggcgccccccaggacgccggggtcaactcacccatcgcccgctgggtctcagcaacggcggcagcagcggcggcggcggctccgcggcccccggggtccccggcggggagatgctggcgtccgccgcagcctctcgccccatcccgggctccggcggcagcggctgcggcgggcgcccggcatcgcaggcagcgcggccccggcccggccccgatcccctccccccacccccacttccaccccgtcccggggacccggcgcggccgctcggctgcaccccggggcggcggcgggggcccggcgagcggacgggcgcgggggagggaccgcggcgggcgcgcggggggcgcggaggcgaggccgagcgcggcgcgcaggggtgcccgctcccgccggctcaagcggctccggcccccaccccgccccctccgcaaccccctcccctcccccgccagccgggctccgccgccgcgccgggccgggggcgcctcgcaccgcagactccggccgccgccgccccgcgccgcccgcgcgtgctggatcgagtgtgtgcgtgtgcgagcgagtgtgtgtgagtgcgagtgtgcgcgcgcccctcctgtgaccgtgcgtgcgccggcccacggcccggggcggcctgcgcgggggcgtgtgcggggaatgcgggtagttcggagtgcgggcctggtgtgcgtgcggggcagcaagtcccgttctgtgtatgcgtggacgggtgcgttccgcagcgtgcccgggtcggtgtgactccgtgtgcccgagtctgtgcctgtgtgtgcatggacgtgcagatccgtgttgcggtgtgtgcgtggatgcgcctgtgcccgcgtgaacctgggccgggatttcgcataggcatctgtgaccatgtgcagaggcctgggcctgtgatgtgtgcacggtgccgggcctgttacggtgtctgcagagtctgtgtgtctgcttggggcgtgggtgaccgctgtacaccggcctgtgtccttccgtccgaccccctccgtccctcacatgcccgaagccacctgcgcactcctggggtaactgggggggcctcccctcccccgcccccctcacccggccaccctaggcccggtcggccctgccaaccctcttgagcctactctcctgccacttgcccaccagcggttctccgagggcccaccgtgtcgtgccctggctcctcgtggccttgctctaggccattcctctcagggctcagaggcgtcccccacgtgtttcccgcctttcaagtggttccgttctggggcctacagagcagccacttcctcccgcggtgcgaggcacaaggcattgtgggtacgcagcagacatctctgcgccgccatcgtcgaaggtgcagggatgcgctacctattctatatcccagcgaatgtgctccagaatagtcccagaggcctttgctgaaccatccgggctgcctagggctggtctacctgctccaggtgcctccgtgcccagcttcatccatccttgctgaggaggcagagtgatcctactccaacattcacttgagcaggtcactctcctgcctgcaccttcaatggctcccacttgccctcagcttaagttcagtgcctgggcggggcacagggagcccctggtgacctagtcttgcccccttcttcaacgtcaccctcactgctcttttcttcctggaggctctctctaagcaagggtgggcaaaccatttgctttaagagattgattgtaaatcttttaggctttgccagccatatggtctctgtcccaactactcaactctgccatcgtagcataaaatcaaccatagacaatacgtaaaagaatgagcctggcggtgttccaataaaactttatggacacaaaaatttgaatttcgtgtcattttcacgtgtccagaaacattttttgatgttttcccaaccatttgaaagtgtaagatccattcctagttcctatcactctaagcacattccattataacatctccatgggccgggcatggtggctcatgcctgtaatcccagcactttgggaggttgaggcaggtggatcagaaggtcaggagttcaagaccagcctgacaacatgatgaaaccccatctctactaaaaatacaaaaattagccgggtgtggtggcacacgcctgtaatcccagctactcgggaggctgaggcaggagaattgcttgaacccaggaggcggaggttgcagtgagccgagatcatgccactacactccagcctg

SEQ ID NO: 1562829 - DNA, 4001 bp, Homo sapiens
attctcaagaagtctcatgattgtaagatcatcactccctaaagccccgaaatagggctattctccccactgccaagaaaccttcacacctacgtgggtcacagcagagcacctgccatggcttaagagaagagctagtgatcaccaccatgaatggagaagacagaaccatcagtgctagacacaagctcggcacctgttcaccttggacagcctggaaggcccttgatctgcagcatatttaagtggccatcatctcaacaaacgatatgacaatcaaatacaatcttacatcaacaggagaggaccatttcgaaggtttctaggtcaggcagatttctgtccaaagagatacagagtactacatacacactccaggcaatctcaagcctcctggaatgagtctaccacacacatgattcccgggaagcaattttcaagagccaaagttttgtgtgctaataagagttccaaaatccccatttctagactgaacgtccaggaacatgatctcgaaaatccacactccagagaagtactgagcaggagactggacacatatcttaagtagtttgctctgtgtgtgcggaaggaaaacgtgcaatgcttttggctttgtttttgttttgttcttagtggagtccagtactcactcatgaaagtcatgcctttacagttcttgaattttgctgatgaatatctacccaaatgcaaatccactgggggtggggctctaggtatcccctattgcacaaattaaagctcgtgaaagaacataacgtagccatgaagtcatctgcaaatttgtgtccctgctagcttgttccaaacttctcacactaggtgttcttctaaggagggaagcaggaaatgtacctctccatatccgcttcctcgcacctaccccgacaaaggcaagtgcataactcaggtctttgcttgggcctacctgcttcgtggaaaccccatttctccacatggtgaagaaagcaacagaaatactttggttcacaaagtccttgcttatgaatcaaaacagacttttggaacatggatgggaagaggttggaagcttgtggcaaatgccaagttcgcaaacagtataccttaccagctactgagtatggaactttggaaagaggacatgccaagaaccccaaagccgtgttcagacaggataccagcagggcttggctatgtccctgctaagtgacctgcatcctccgaaccacgtgaggttcaaaagagagcttcagcaaaataaaaggttcccatgccacttgactttggttgttcttaaatacttgaaactttgaacgctcaatatgtaaatacatgaaacatgcttaaaacagggtctgggtcatgcaagtcaaacaaaaagaggttagacatccacaaaatttcaacagggttgaagcctgatttcttatgctaggttgtggctagactttgcctggttctcactcagcctacctctaactcaatcctcctctttggcacctggatatggtcgatggctctggcacagaacttgccatagaacttcttggcacccagaccttgtagatcatatatggtgaatggccagagatgcaagacgttgttgagggagaaggcatctcgtcagtgaccccagggcccaacaggagcaaagcttaccttggtgttagtgcacgcttttccctttttgtagtctttgtgactgccccgtttgtccaattttgcccagagggctttggctttccagtagttaagcttggacttgagcttgtgatagaaggagcggtagtcctttggctttagttccaggtggtcacagagctcctggaaagccttgagggttcccttgcaggtggtggcctggacaaaccggtcaaagaggacatgagctgggttcatggtctcatgcttcctctcctccatgctgcctcactctcagcactccccagagggggaggtgggatggctgtgggtccacctgacactgtcacgttaatctgacaaaaagaaagaaaaacgtggttagcatttctctgtctacaaacattctccaggagacatattcctcttcaaagcagagttctaaagtgtcgcagtcatccatccataagtgtggactgcacacctgcaatactccaggcactacgaaacactggggctggaaaggtgagcaggatggttcttgctctcaaggatctgacagtctaggagacgaggcagacacagacacagaatgtctcaatggactgtaccaagtgccactagagagggagacacaaggccatctcggaaacagagaaagaggatctaagtcactattggtggtgaagggggggggtccccactgaaggcgagcctctgagaggtgacagctgagtctctcagcataaatgttagccaggcagggaagaggtgtaggacatgggaaagtgacaaagacaggcctgagtgactcgtacagatcaaagaggcaaggataactcccaggtttccagcttaggccccggattaaacggagacatcaggccaatggattaaaaacagaagcactccttggtgccagtggagcagtgagccccttcctcacctgcacacgtgagctccaagtggaggtgcttaccgggaagtcggtacaaatgtgaagttcagggagtggctggggacgcagatccagatttgggagtcgctggcacacgggcagtagctaagcatacaaaagcaggaagatcacgaaaggagagtgcacagggcagaagagccgcagactctggaagagatccaggaggccccaccttcaagaggctgggagagaaagatgagccctcttaaaagatgaggaacagtagggagaggtctgaagagaaccaaccagcagcatcacagaagtctaaggagcagaaagttcgagagtgtcaaagttggcagggattaaaagaactgaagaagtcctgctattgcgtaaggtacagggttgggagacttcacagtcattccattttcaccctgaatcgaattgaacagcagtaaatgacgatatctatgccttccacctatggaaatgtccgcacacctacgtccagtgagtctgctggacagaggctgggaggtgggagatggcaccgcgtgtactcctgcacccaccggctcctgtgagtctgcagaatcgtttttgcgtcacatctgatgaaacctcaccactggaactgtattggaaggtgggaggcaaaaggacaaaggacaaaactagtgagtagagagtgggtcagggtgacaagacgagtgtgaccacagggctgagcccacacagccagaccccagctgcacgaccccgctgcacaactctgggtaagcactgttgcacgaaccctcagtttccttgtgtgtaagacaaggaggttagacagcgcccctaagactttctttttttcttttttttgagatggagtctcgctttgttgcccaggctggaatacagtggtgcgatctctgctcactgcaagctccacctcctgggttcactccgttctcctgcctcagcctcccaagtagctgggactacaggcacccgccaccacgcccggctaattttttgtatttttagtagagacggggtttcatcgtgttagccaggatggtctcaatctcctgacctcgtgatctgcccgcctcggcctcccaaagtgctgggattacaggtgtgagcctggccaagactttcacttctgaagttctccaaggctactgctgagaaatccacatgcccacagcacttgctcctggtgctctcatcacaatggcccagcacaggcacatcaccaattcaccacgagagtgaccaacacaactggactggactttgctttaaagatgtacccttggggttgggtgcagacagaggaagggagtggttgatgcactacgttcagcaggcatgtagaagcaagagactgcccactattcagctgcaggtgctgctgaaaccaactcttggaagacag

SEQ ID NO: 1562830 - DNA, 4001 bp, Homo sapiens
ctgggactacaggcatgcaccaccacacctggttaatttttgtatttttagtagagactgagtttcactatgttggccaggctggtctccaactcctggccccaagtgatctgcctacctcgggctcccaaagtgctgggattacaggcctgagcctctgcgcccagccccctcttctgctttctaagtgtccattctccttgtagtgagtgggtggtggggggatatacacatgtgactctggttagtacataggcagccatgaagtccacaaatgtacagggagccacagctttcatgctacagacttgcaaaggtatgcatctgctttccccttgccctggaatatagatcagaacacttcatttagtgaagggacctgttccgagagtgatgatccctccctcgtttgagacactgccttcatcctgagcttcttggagcagcccaaggccctgccagctctctttgcctgtagcttgtaggcatttatgacagttgcataccctgccctccaacggcagcctgagagactgaactattaccaagttcacctggaaaaatgtcaccctgattgattagaatggtgggtggccatcttagctcattagaatcacctgggaagttaaaaaaaaaaaatccagtatgcactccaaattttcccaccaccactcctccccacaaaaagaaaatttaaaaaatcccagtgtttgggccatatcccagaccaattaagtcagaatctccagggattggacccaggtagcaggatttctaaaaatctccccagcagccaggcctgagagctaatgaatagcaccacagggcccagcctttcagcctacagcttgtctcggtttcacccttttttcatttctttacaatgaaaattctaaatagttgatcacagtgccagaccaataagaaagcattttagggaggagagaggagggaaggggttggcaggcacggagaggacttgacacacagaaagcattttgctatggagtcataaccatttgattctaagacacatgcagcctccagaagtcatgcggccccgccctctgcttccaggagggaatgaacttggccgtccttttgttgcacacgcccgggagctgcgccggcgcagcgcgccctgcagcctgggagcgcaagcgtgtgcgccactggtcctgggccaccaccgcgcgccgcgggcgggtgcagggcccctctgccgcagggaaaccggcgttccccgcgcaaagcagccgctgctcctaatgagctcatgggttcaccgcgctgagctagccagagcggacccggcttcgccaagggcctgctggctgtcctgacacctggcctacctcgggggtgcctgggtacgctcttcctttgcctgcgggatagaagcacaatgaaaatggggtggacgtggctgggagacagccctgctctctggcaggctctggggagtgtgtggtacgtggcatccgcactggtgggtgtcgtgcgatgatcgagacacggatactgggtgtctttcccactaggggagagagggctgcgtttagagggaaacgaaatagatccgagaaacacaaagatgtcacaaaggaaacgcttccccaccataagcaatctaaataaatgattcttagaagacatccagcaaaacacataaccttgtcatttagattcgctcgcccacagggggactggagggtactcaccgactagggcttcacagccgcatcaccgccggcggtgggcgcctgcctcggcaggggcagggtgggtgcccgcagggcacaggtgccgccgtggctgctcgcacaacccctgcagctgcgatcccgcccagttagcctcgggggctgcacagcccagccccctcgcccagggcccaggggttctcaggccgcgcggcgaggacggagggctgccccgggtgcctgcctacgcgggcgctccccgccgggactccgccggggctgcaggagcgcgcgctgctggctgggcgggctgcggctccgcgcgagcgccgtggcaacgcgagcgggcgcccccaggaggccgcggagctgcggcgtgggacgcttgggtgaggctcaagccaaaaccaaacccaaaccatttctcctcctccccatcttttcattttctccccttcttttcattttctccccttctccaaccccttcctcgacacacgttactagcacctcgaaggttggaaattccagcactctcctgaggcctcttccccagcgaatcctgctaaccacgcagtcggtgttcgctgtgtgttcgagcacacacctccttgcagtggcttcagcacccaggtctccgggagccagtgaaggaaccaagtgttggatactgagcaagtcgcgtaacatctgagtagtcgtgaaattgaaatttcaacggtataaaggacacgacgttgtcttacagattgaaaaatgctataaaatgaagttcttactgttactatgatgatgaccctggagatcagcgcagagccctgggggagggctacagttgcaagcgctccaaggatcagatcgcgcactcctccccaccggagaaaacctcttgatgccggagcccgggcagcctcttccacacttccagccagccccttccacacttccagccagccccggcattgccacagcccgtggagctggacagaaatccaccaggcactaaaataagttagatggaagacgggatggatttgaccaaattcctatcagcatctgctcagtataattgcaacattataatcagagcagaaagaagcccagagattattttgtcttcaaggatcattggcctcagtattatctccatctgaagctgtgttgtccaaagcagattgactccagccggccagctcagaagagggccgactctgggctggcgactccttgagaagggctctctctggtcccaggtggtatttacttaaccgtatcatcatctgcttcattcgtgttcccttcatgtccatcatgtgaggacgggaactgacagggccagggtgtcggctcagaggcaatctctgctcatcctctagagccccacttcatcacccagccactctgtccactgtctccccacctacaaacctgcaggtgttctgccccagtactagaataagggaacacatttttactgagctctgacaatgtgactgggcttttcaggagctatttcatttaatttttaatgtaaaacattgttttacatattaagaacctaaaagcacaaacagtaagtaacttgcttgtggaagcttatgcagcgagataagtggtaaagctgcaattcccagttttgtttgatgccacagctgaaggtgcaaggccatctgggcacggcctgagtggatattagggaaaaatgccctaaaaggtccagaatctctaataatttctcctacttctcattttattttatttttgacgctggagttttttttttttttttgagtcaggatcttgctctattgcccaggctggagggcagtggtgcaatttcagctcactgcaacctctgcctcccaagttcaagcgattctcctgcctcagcctcctgcatagctgggactacaggcatgcaccaccatacccagctaatttttgtggagatggggttttgccacatggcccaggctggtctcaaactcctgagctcaagcgatctgccctcatcagcctcccaaagtgctgggataacaggcatgagccactgcactaggcgaaaacgtttattttagaaaaactgaaaaatatagaaacataaaggaagaaaagcattcataatctcatcacctagagaaagccattagtaatattcatatttctttccagtcttttttctagctttctagctttaaactaagttgagataaaaccacacacacacacacacagacacacaagtgcatcctgctttttgttaaaaataactttgtgggaaattcttcctcctttgag

SEQ ID NO: 1562831 - DNA, 4001 bp, Homo sapiens
gacccaaggccatgcgcctaagacatggagaagctaaacacaaaccaggcggcctttatttactttgatgccaccaggctcaggcccaccaaatggcttcacttcacacccaagtcccctcccacactgggtttgtccctgcttcctgcctcactcctgcccctcaaacaaaacagaagaccccttgggccctcccttccaatgcccaggtctaaccctggtgcccttttcctccatccttctaccccctgctcctgggcaaccaggcatcaaccttgtgcttccattagtatgggtgtcacatgccccacagcgggcaggggcccacctacatgaccacctcatcttgttcccttctgtatccacagccccaaaaccctctcctccagggcccaagccaccacccacagacacggtactgcagggtacatacaggtaaaccaggtgcacctgcatcatggaatcctgaggcaatcccttagaagccttcccacatgctgccctcggacagtgcaaatctggaggtggaacaggcacagaaagcctccatctgccaggctgggggagccctggcaagagggctgcatgcgaaaggggtagggaccagaactctcctccctgattcacaggtgagacctgaagtgcaaggaatggcaccagataaactcacccagtgttttaggaatgaagggacgaaaggaggagaggttccagggctcaaggcagagagagcaaagacagaggctccaagtcaactgttccggggagtctgaatgcattttcccatgagaacctcattgggcagctctgggcaggaaggggccatttcacaacctgcagcacccggttggtgtctatcaatcggatcctaggagtcttcccaacattgccggcctgtgactcctcttgcgcgccccacctgcgtgccccactgaggagggctgcagggccatcgagcacacacccgggaggcagggctgcgtcctaagttggggggcgtggggaaagcacagggtctgtacatccattcatccaacacctgttagccgaggtctcctctgtgccgggaactgtgctactgtccggagacaagctcctatttgggggtcagagaagtgggggttcacctgcacacccggagcaaggggccaccccgagtgggaagcctcgggggagaggggaggcccggcgagcccgtggagaagagtttagggtaggagaggcccagggcccccaaagagggctcaacaccccttcaaagaggtcaagggcttaggggttcagcgatcctcggcggaaatcagcgctttgtgggcggggccagtgtccccgcggagggaccagcctcgggggagagttcgggatcccacgggcggggtcagggcggccgggcgggggaggggcgccctgggccggggtctcagggacccgcccggcgtccggggccgtcgggggggtcggcgtctccgtgtccgggggcggcgcctgtcaccgcccgggcttcgtgttactgagggggggcggcggtcgcggccccagcccgccccgcgccgcccgctcgcccggggccccgcactcacagcaggtcgggccggtgccggtgcaggatggcgcagaaggccaggccgtcccggaaggagctgctcaggtcgcggatctccacgccgcggtagccctcgcactggcggcggcaccaggccagcagcgcgccccgcggcccagccatgaccccgcggcccgcccggctccggctctggcttcggggccccggcttggccgggacggcggccgccgcgcgggcccggtttccggctgcggctgcggctccgagctcgggcgccgaccggcaggcgaggggaggggcggaggcggggccgcggtgtcctcgctcgggcgccccgcggccctgccctaacctgcccgagcagcgccgccgcgtggcccggcccggccggccgccgcctactccgcgctgcccgctcgcctcattgtgggccggtcgtgggagcgggcgtcccgccgcctccgtccgcgccggaggcgcgccccacccagcagcagctccgcctccagtgcggagcccacccctaccaagacgggccggcgccccatcgcccgcccctcgacggcgccgggctcccgctgctccactgggtgcccgcgaagcccccgcacccgccgcaagcggaccactccccacgatgacttcaccgccgcggccgccgccgcgccacccaccgggagccctccaccctttggaggcgggacacctcgtgctcccatccggcctccttcccgctcctaatgaccgcaaatccccccttccacccctagcttgaaactttggggaggcagttcccctgcagacctcagagcacccccccccggatagccaccagcttccctcatcccggctccccaccctaaagcaccgctgagctggaagttgtcatgtccaccatcccctcccccatagcttggcagggagacccatgcgcccctccgccacctttggtccaggtgtcccctaggtgattcactgagctcccctcagcccctgtgtaagctcagggatctcgtccctccccactgcggcctgccgggtcccctcagccatggttagtgtggtggtggtttgagttcctatgggaaggacctaggccaaggaggcccctgcctgggaggcatacaggcagtttgtatctggccctggaacctccccaaggctcattctctatctttgccgtcttcaaaacccccgccagccaaccgacccttccagccagccaacccttccagccagccgacccttccgcagaggcccctcctgactctcccacagatgaatcagcctccatctgctgcagaggtggtgatgtcaccctgacccatgcaatagttagctggagtgggtatttcgctccctcccaagggaaggaacagggtcttagtcatcttcatcacccctgagcactcaggggagtggaaagatcaggcattttggagccctattaacccaatctccaatcctggctttccccactcccttagtcatgtgatcttgtgcctccctggacctcagtttccacgacttaaaaatggagataatacctgctttacaaggtggctgagaggattaagatgtaaagtgccttaccctttagttatcactcataaattctattgactcctggtacttggtaaacatgatgaaatggactgaaatattttgtacccagattgtcatctgggccattctgggtaaattatcaaggagagaggccgacttagggaattctacctcttcaaagtccactgagtcccagtccagaatactggcccagggcctggagaacccagcttgccaatctgggctggcctaacactcctgcaactggaaggccgccatcttggctcagtatatggactctcaggccacctaggaagagcatggccagagtgcctggctagccctctggacttctcaccagccctgagctgccaactcctgccctgtcccctgtgggataacagtggcaggaaagcaggattccggatgctttttatgaaatcagggacttgggttcaggatcctgacaccagcatccacctaggccttcaaagaccacccaggactctcattaaaacctaaggggggcggggttgggcaccatggctcatacctgtaatcccagcattttgggaggccgaggcaggtggatcacctgaggtcaagagcttgagaacagcctggccaacatagtgaaaccccgtctgtactaaaaatacaaaaaattgggccaggcgcggtggctcactgtaatcccagcactttgggaggccaaggtgggcggatcatgaggtcaggagttcaagaccagcctggctaagatggtgaaagcccgtgtctactaaaaataaaaaaattagccaggcgtggtggcacgtgcctatagtcccagctactcgagaggctgaggcaggacaatcgcttgaacctg

SEQ ID NO: 1562832 - DNA, 4001 bp, Homo sapiens
acagagcccgatagagactcagcaccgcctctcggctccacggggccatgggggactggcaggggctgggtgtcacactataaacagaaggaaagacatacaagcctagtatcagaattaataacaaaaggacctgtagagactatgtgagggctttttaatccaagttccagagaccccccgctccaggtcaccgtatgacttaatggcaagactagaactagagaccccagcctctggatgcccattctggaaacatacaggttgtggttcaccagggctcaaatcctggccctgccacttacttgccatatgactttgggcaaaggactgaacccccgctgagcaccagcttcctcacttataaaatggagattaggatattatggcaatagtacctaccacataggattattttgagaactgtgcacgtaatgaacggtaatagaacttcaccacagggggtgatctaggagggttgaagacaagcactcagccatacttgaatcctggcaccagcacttacgagctgcatgaccgtgggcaagtctcctaacctctctgtgactgtctcagttcctcatctgtgaagtgaggataaaaatcatattttgcccatacggttggcataagcactaaatgagtttaatgtatgtgaatatgtttagaacagcacttggcacacacgaagcactctatcaacagcagatattattagtagcacctagccaggtttgtaaatgctcaataaataattacatttaagtataaactgccactgccttccttcagtaacaataaacccttacacaagcatatctgtaaagtgctttgttgcccatgaccacatttaaattaagaatctagaaggtggtcagggttcttagtaacagtaaatgcttattgcattatattgcactatatacaacgtgcaatgttcgaagcatgtctcacataacaactcattctgtcagctaccctaggggtcaacattaccccattttaagtggaggaaacaatctcccagagggaagtaacttgcccgcgggcccacagctgtcaaggggagggctgcactcctgaccccaactctgcctgcctctggaatgagttaccctttgctggagccggaccgtgtgtacagcacttctgggtgctccacgaactttcccagcacagcgcttggcacatacaaggggctcaaaattatgcgtaacggagagaatttcacaacgtccctatgtggaagaaatgatcacctccgtttcagaaataaagaaatgacaccaagtgggggaagtatttggctggaaaaaaagattggactttgggcccaaagtccgcgagcccttagcctccggccttgctaacttcctgcgcaagcttgagcaagccaccatccctgcccatttttcctcaactgtttaagagatccctcggccctaaggacctcccgatgcagaaaatcaacagaagtgtttgatgctgtaaaaggcgactgtcacggcgagggctgtaactacaaggtcgctgggcgactgggcggctgagccccagccagtctgcacttcaccaaccgtgggggccgggccggggtgcggaggcccagaggccagggcaggcctgcttcggggcactggaggtctccgaggttggggcggggcggggcagccgaggggtctcccaggggaaagtccagggcgggatggggcgagacccccggctgcatgctggtatcctgactccgggccgcatgcgaggcgccggcagcagcctgagaggaggcgctgcaacctccccgccgcccagccgccggcggccctcattccttctctcactcacccgcaggccgtgcgcgctaccactccgcaggactcgcctctggccgggtacctctccccgggtcacccatcaacatggccccttcacttccgggacacgaccttgcgcacggagctgcgaaggggctgaagggagcacgagggcgagtggaggcggagggacttccggtcttctccaagctctctctcgggccccgccccctgcgcatgattccgccccccaatcctgagccccgcctccgtgtgtgacctcaccaagggactggcctgcagaggccactcgcgccccgcccccagaggactccggtgtccgggtccggctgtgggtaccggggtggtcccgatgctggcagaagttcagagggcaggaggtagcctcgctgtccaacaaggctgccgcaccgggtaggcccctcacctgctggcaaccccttagcctgtcggggtacctggccagcctcctgtactgtatatgctgatctctggctggggccctggggtacctgagggaattctaacactaatattcagagctcctcaaaacccattttctcagatcgccttcttttcatccctccatgctgttcctactccccaggccccatggcttctggcaaactcctacccttccttcaaagtctacctcaaatgccccccttcactgggaaatctctcccagccccttcctcgcctccctctaacacactcacgtgccttctttgggccccacggaaatgtctgcacatcttacgcctcataatctgttcaacaacaaaacgtatttcttggcgcctaccatatgccaggcactgtaatttatccatttgcttctctgtctctcactagatttgaggacggaggccgtgtctctatggaagctccctcccccaactgcctccctccatgcctggctctgccaagcccagggcctggggctttggagtccggggccaccggggccaccgctggctcctagttccagttccaccacttagggacagctgccctctgccaagtttcctaacctcacccagccttggggctgtggtgaggattaaaaggtaatatctaccagtagaggggtgggcaattgcagaatagtcaggctatctgataaaaggacgagaaccaggagaagaacattgcagggaagagcatttcaggcctccccccaggtaagcctttaagctcagcgtggtctaggagccacagggagaaagccagtgctttcgcagctgagtgagcaggagctgggaaagaggccagaggggaggcccttaccagaactgggagggagatggcgggtgcaaaggaaccacagcagggttcagagccaagaagtgctgggatctgacttccctttcaatgggatctgtctggcttgagaataacggaatggaaccagggctgaggcagggagaccaatcaagagtctgttgcagggctgggcacggtggctcacgtctgtaatcccagcactttgggaggctgaggtgggcggatctacttgaggtcaggagttcgagaccagcctgaccaacatggtgaaaccccatctctactaaaaatacaaaaattagccgggagtggtggcattgtacctgtaatcccagttacttgggaggctgaggcaggagaattgcttgagcctgggaggcagaggttgcagtgagccaagatcacgctactgtactccagcctgggcgacagaacaagactcggtctcaaaaaaaagaaaaagaaaagaaaagaaaaccaagatggagagaggcatagtagtttctaagacactgagctaagaaggaaagaagctttcagtggaagccaagtctgtcttactctgaaatgtgtgttctttccactctttcaggctgccctaatttgctttttaaagaattttgtgacccaaataaatataattggtggcatttccatcggcataccagatgacctcttcatatctctcctgactttcttgttctatggaatgttatttttcggagggagggacagagggaggtcatttggaggggtctccccttcggatcagcccctctagatccacttgctcttcagggtcttatctttacttagactgacaaggcctctccctgcccccgatgcttccgtggcaatggagtgtgggcagtgaggtggtat

SEQ ID NO: 1562833 - DNA, 4001 bp, Homo sapiens
ctgagaggagtgggaccttcccgctacagctggagccatcccatgccccccatgtctcccccagctgggaggtagacgaggggctccaccgccctctcactgagttaacaatgagactgaggccctcggctggcagggagtaagctgaggagggccttgctttagagaccttcatggaaggggtgccccatcccaagatgggtgccacccttccagactccctggagcttctattctccttcctcttcctaatcttcaccccacccagccccattgctcttctggaaggagagctcgctgtccagtactgcgcgggatgaccgagtgaacaggggactggagacgagatgtggctggagactgagagaagcagaggagtcacactccactcacctccacctcccaaagtgccgggatcacaggcttgtgccactgcgcccaaacataactgaaggttttacagacatgtctgtggcaccacagaacacgaacggtcccaatggaaaccccacgcccaatttcctcagggaactgctgtggcggaggcttggtgggtgtctgaggggagcagaacccaaggcgtggggttcgggggtggacggggcggtatgaccaagaactctgcacctcccccacccacccgcctgaaaactctcctgaagtcacctaacaaagtggatggcagtgagtggctctgggtgggatctttctgtcctctggctaccctctgcccaacaagaaggctggggaaggtggggctgagagaaaggtctaggcctagaagacctcggactcctcccaactccaactcctcctccccctcttccgtggtcggctcacctccagcaccccacgtggtggccctaggtacaacggattccggcgggcagagcgccttagatcccgagtctgcagcccagggcagagtgccaacttctcctcatcccttcgtacgccatagaatggaaagacactggggctcctctgttaggagcgtaggagggacaggctggacaaaagggctcccgaacagcaggttcggaggagagcaacccggccctgacccccgcccccaacaccgttcccgacctcgctccccaatatcccggctctgcaccaattcctcccgcaagccaaggaaccccgaggcactcctagtctctaaaccgtttatttctccccaccagaaggttggggtgggcgggcctagaacacagcgtgcggcgggttcccgggtggagccagcgcagacagcgtgggtccctgcggctcttaggcgaaggtggagttgttccagcccacattggccgcgttcatgtcgtaatagttgatgtagaccctgcggggggaggaggccggactcagcgggtggctcagtcccgggcctggccgcgcgccgccgcccctcccccgcccctccgcgactccgcgtacctgtccgggctgatgcgcaggcgctcggccagcaggccgcacagcagcttgctgtaggagcggttctgcgcgccgccgatcttgccgatgctgtgcaggctgcagagcgcgcacggctcgctggagccgccgaaggccatgagctggtccgggaccacgtgcaccgcgatgtactgcgaggaaagggcgcggtcagcccgccccagcgacctcgtcgggccccgaacgtccacttcgggcccgagccaccgtcctccccccgccccgccccccagctccgttcaggagtcgcctccccagctcccagcgcggaacccctcgtccggtgggcacccccctcttcctgtcccctcccggcaaacctgggggggcttgccggtggcctgcgccagctgctgggtgagctcggagaggaacccgtccggcacggaggcgcggggcacgttggtgtttacgatgaacatcggcatgatggcagaaggaccaggagacccgcgcagaggcacagacgcacgcgccgcggccgccgctgagctacgtgcctgacttctcggacaccactgtggtcccgccttttgtgacgccaccgccggcgccaggccccgcccccgcgaggctgcggctccgccccgagtggggaagtcaccgcctgcctcggctcgacccccgcagggcaggaccctgggcgactccgcccgttcctccagcaaccgccgctaagcccggcgcaccgctccaacctgttctccacttggcggctagaaatcggcctgttccggcctcgcctcgggtctttcttagtcctttcactaagtcaccgatgttagtcgccaggaggcgctgtgccgggggtggggatgcggcggtgaacccggaagatggccccttacccttccagagatgaagcccagttcattccactgcacgcactgagcccctgtacctcctgtctttgggccacatgtcctcaagggctccagtcccgcatgcgtgagcttgtgtgtttgagatggggcggggtagtcatcgcggcaggtgagaggggagctgcccctgcgaatcaccatccagggaacttccctgaacccctgctctttaaagaggataggatgctgggaggcaccgaagggaaggaggcgaggtccagagcaggttcagtggttcaaacgtgctcagctccccttctctgggcctctgggcaacttcagctcctcagggaagccacaccctagtcaggtccaccgtgtatggcctctcatagagcccttggtgaatttcttaaatgtcttttccactaatggtaaactcggggaccatctagcaggtgccaggcatacaagagacattgactaatactgctgaatgaatgaatgaatgaatgggtgaaagaagataagccatgacatagcaggaagaggacaaggcagcaactggatcacaggccaggtcctcagagatttccagggaggtcctgtccttggtctctgataggtgcaatccatataccagtctcagtgaaggccatgtgatataggaaggacacccatgcctgtgggaccctcgtggcaccagccagcctccagctgggaggccccatggcccatttatacaaatagcctatgggtattggttcctgcagctgggccccagactctttccctcctggtgtcacaccttctcttacctgtgcccagggctccctaactgatggcactccataccatgtctccagccaggggcactcccctaagtcccaggcgctgacagcagctgactgagtgtccactgctctgtaaagtccaaatgtatgacttgtcctcctacacctcatcacctgccagtaaaatatgcttcctttcactatccctttattcccacttctctccattccctgaactaccgcctagtctacactacctgcatcccctttggcctggaccactgtgacttccctatggtggactgctgctcctcaagggaggagtctgtttccagccccaggcagcagagttagccccgactccctgtgccctatgaaagctgagcagaattacataagtcactccaggcagaagactgaagagccagggcctggttgacctgtgccctgtgaacctgaatgacaaggtgcagcctcgccagcaagcacatgagctgcccctggaggtgagcccctgccaatctcaggttgttaccataacaaagggttgccttacctggccagtgacggagcaggagcattgccatcttgaacaaacaccaccattctaagttcccccttaattaaaagccgcctaaatccagcccgaaaatatcagcctaatagctaatgtcagcataaccagaaacattccaaccctaagataaacccttctctgaccagaaacatgccaacccggagacagcctcccttctgaccagagacattccatccccgcaataaactttccctcacacagaaacattcagaacctatgataagaaccccctccaaaacccttaaatatccttagtttgtaagagagtgtggctctgacctaacttggccagaagcccctctcaagttt

SEQ ID NO: 1562834 - DNA, 4001 bp, Homo sapiens
agggatgggagggacaggagggacaggagggacaggcagccatggggggccgtgggggaagtgggggaaggtgtcgccgacgaccgcccactgcagagtgacaggagggacaggcggccatggggggccgtggggggagtggtgcggggaggccgtggggggtgcactggcctgtcccccaggtagtatcccaggccaagcaccgaggccaccagagggacaggcagccgtggggggggccgtggggggtgcactggcctgtcccccaggtagtatcccaggccaagcaccgaggccaccagagggacaggcagccgtcggggggccgtggggggtgcactggcctgtcccccaggtagtatcccaggccaagcaccaaggccactccacccccaccttgcctcaacatgcagcctcctcaccctccacttccaactcttacctggggctccccgaacagggccaggaccttccccaggtcgtgcaggagcccgacgaggtggaaccagtctgggagggggatggacagggcaggttggggactgcaggggccaaggcagaggatgagcaggtttgcggggctgagagccaggaagggtccagggcctgctccccaacccaggcagggctgctggaggaggcctgggcccactactgtcccctcccaccctacaggctgctgcattctgccccttggaggcagcacctgcccccctgcagcacagccagggctcacccttgtctgggtgggccttccggatgccctccgctgtctggaaggcatggaaggagttggggaaatctacgtccgggtccgactcatccaccagcccatccagcaggtccacggcctccatgactgtcattttcttgtaggagaagcccccaaactgggcatgctggcggggaaggagaaggcagtgtggcccagggtcagcaggcccaccacacaggcctctccatcccctcggcgcctggtgggctcatggggctgagggcaagggtccctccgcgtttgcacggggcggcaggaaacgcctaccttgctcctgacgaagtccactgtctggtgcgtgtgcatgagcttgtaggtggtgaagacacggtccaggaggggacctgactgcaggccggagggtcagtggcgccacccccaccctgcacacgaggccccatgcctcccctctcccaggcagccccacagggtgtgatgggggtgggagttcccacagggcaccccctggaactgtgtgaagggcaagtgctgctccccagggtgtggatgggggagaaggggggcaggacggcaaggtactcaccgtgtagttccggaagctggccttgtctttggccacctctgggtccacatcaggtcggtagaccagggaagggtctgggccctgggtaggtggaggattgaacctatttcaccatcatgtcagctccacgaggaagcacagacattcccagggtggctgcagactccaagcctgcctctgctcgagggctggtgggtgacacgcgaggacacagcctctcccacgccatcatcccagcccctgccctggcctcagcgagtcccaggagctctcactcccaggtcctcatctgcaaagcgaaagtcagcagacgtctgcttccggggtacaggggacaccacgcctgagcggcacccatggccacccttgaggggtggaagtggctttgggaggagactgagtccacagggagcctgggggtcggcagccgctggctcttgcccagctggacggaggaggagggctggccagtgccagctagaagagggcgggagtggctggccaccaggagagcagtcagcagagcctctctgcatggggtctgggtactcaccaccgtcaccttcatcctgagagggagcggcgctcaggtggcaaagcacaggctggcgagtgtgtcctcagccaggctcctatatacaccccaggttacataagtgtccgcagtaataaatgaccatccaccctcctcccggcctcagggagttaatgtgtcagcacagcagcagcccccagcagtcccacatcctctggccctgactcagcctcacactcctgtcccgagccgctgacctgcctagggttatctgtgggcccagcctcccacttgggccctggccttagacccctctgtggggtcccacaagtaggggcagacccaagaccccaccctcaagcacacgccccctctgcaccaccccttccccggctgccccactggatctcaggaggtgaaaacttgtccccaggccccccgtgattctgggtggggcaggagcttgttaagaaaagatgattctgaggacttgttaaaatggtgagaaaagctttattcaagagagtggtgagaggagctcacctccgagttcaacaaccacagctggagattgatggcgttggaggggtcagcggatgggaagttgttagggcggccttcgagggtagggggattctcactggagtggctcaatgaggatcttgcaggaggccggcagggtgatgagatcaagggtgggagatgaggaatgggatcagatatcgagggtgggtaattctccataaactgatttagaggattcttgctaacaccggggtcggcgggcccagcgaggatggggatggggtcaggcctcgtcgaggaaaggactcaggggcacctgcctagagttcggccacagagtgtgtcaggctctgggagaggggcctcacggagagttggagcaggcacggaaccgccaacacccaggccgccaacgcaacttcccatgcatgggccctgcaggcatggaggacaccgtgagaacaaagtgcccgcggcagagctggcgtcttggagcgtggccagggaagtctgggaacagcagtcggctggggcaggagagagggcagtggggtgctggggccatacctagggctgtgaagatcagagttctgggcttcaggggtcaggcaagagggctgtgggcagctgacctgactcaacaagatcctggcacagctgagctgagaagcaactgtgaggagaccccagcgccccccatttaaacggcacctgccccacactctccttccttgtctgacttcctgtggcactcagcactccctgccactccaccacccacttattctaccttctacgtttgtctccttctatctccccctagaatgtcagcccctgggggtcaaggctgtatcctcacgtgtcccaacacgggtaggtcacgtgctcagcatgcactggccagagggatgcagacaggtgcctgggaggaggctacggccatcgccccgaaagcaggtggtgcctgggtcaggagaaggtgtctggataggttcaggaggtgggaccgggtgggattcagaggaaggtgtgaaggaagagaggaggttttttttttttgaaacggagtcttgctctgtcatccaagcttgagtgcagcagcgccatctgggctcactgcaacctccacctcccgggcttagacgattctcctgcctcagcctcccgagtagatggaattactggcatgtgccaccacgcccagctaatttttgtattattactatttttttttttgaggcagaattttgctcttgttgcccaggctggagtgcaatggcgcaatctcagctcactgcaacctccgcctcccaggttcaagtgatcctcctgcctcagcctcctgagtagctgggattacagtcatgtgccaccacgcccggataattttctgtttttagtagagacgggatttcaccatgttggccaggctggtcttgaactcctgaactcaggtgatgtgcctgccttggcctcccaatgtgctaggattacaggtgtgagccacggggcctggccgagcggagattttggccagagcagctggaagtgggtgcaggtgctgctgggcctccgcgtgatggtgtcaggtgggtctgatttcgcacccgaggcgacacgga

SEQ ID NO: 1562835 - DNA, 4001 bp, Homo sapiens
ccaggaggttgagttcagcctgggcaacatagcaagaccccatctcttaaaaattaaaatgaaggccggacacagtggctcaggctgtaatcccagcactttgggaggctgaggcaggaggatcacgaggccaagagatcgagaccaacctggctcatacggtgaaaccccgtctctactaaaaatacaaaaaaaaaaaaaaaaaaaaattagccaggcgctgtggtgggcacctgtagtcccagctatttgggaggctgaggcaggagaatggcgtgaacccgggaggcggagcttgcagtgagcccagattatgccactgcactccagcctgggcaacagagcaagactccgtcttaaaaaaaaaaattaaaattaaaagccaaatccacctcctccatgtgggtgataatgccctggctctagccctgcccaccttacccatcttcacttgccccttctctctctccaccatgccccagccacactggcttacttgatgatctccaaacacaccaacttctggcctgcaccaggcccagacacttgctttttcttctctctgagccctcttcctgctttctgaatggccagcttcatctgatcctttagatctcagctcaaatctttcctcttcagtgaggcctttcttgaacatcttattcgaagtgactccatcttattcctattacttattaacacaccaatcagttaatttacttgatagtacttaccaggctctgaacttaccaactgcatttcaaggtgatccctgctctgaaatttcttgtctactactagtcttgcccttctaaatataaatcacctgagagcaagagctggatttatcttgctgcatcaactatcacatattaggtactcaaagattttgaatgaatgaatgaatgaatgaatgagagctaggaaaatatggtagcagtcagccagcagacaatgagttaaagtgaaaaacatcagttctcccaccatgaagccagaagttgtatgattgttttttgacttacagtgtatccaagtagtgataacatacaaacagaaaagagagcctatgttctctgctgatgatttaaaaaagaaaggtccgaaagatcaaaacctcaccagctccagtttcagctccgtttataatgctgttggtattaaaggcaaatttccttacttctaacagattccaaggtttggtttcatttttcccctaagggatggacttctgcacccactgagcccggtgccgtgatagcgccatcaacgactctactcagccatgctcacgcccaggccagccttagagtatctcaggatctcactctacataaaactgtggttgattcaaaataccagaaaagaggtttctcttcctaagaaccagaacatgaaggcaaagcatatgggagaagtggttcttcctcacaatacaccaggctcaagatctgcccctcctataaagggaagtataacagagtgaaaactcttttaaaggtgcaattccaaagtaaaggaaaattcagtggcaccctttacacctaatttaaaccaggtttgaccctttaaacacagtttgtttcactgaacttgatcaattagttatcttaactatttagtgattgagctctaaacttggaaagtcatgagaaagaagagagtggaaaataaaacgcatcatccttgttttatgttagatgcttcccatggcatactcggtgaacacagccatgtcctaaaagcaatctaccaaatgctgagagagagaggcacttacgcggcatgatcccttggctcaccagttcttcccgggtccggcgctgctggagtttcaactgtagcactgcagggcagcagagagagaggagagatgaggggtcagttgggtattccacctcaaaaaacacattttcaaacgcaaaaaaagtctaaaaacagaaggatgtagtgtgaaagaagggtccccttgaagtgcaactgtctgtaattgcagaagtggcctgatacagcagagtttccgtattctgctgtgggcggtgagaggaagttgcgaagggtcttgcagggcgataacaatccacaaagcatcagagtcttgccttttgctcaaaacctccaaaacactgagtcctcctcctaaaacttttttaaaaacacctcttccaaactcaaaatatcctaacgaggaccaccacccagcaaaaaaagctttccagatgctctacgcttaacaaatgtttaccaccataagtatagtgaatgaaagaactactcacacagatcaggaagtactatttgtaaactctttttcttttgtatctaaaaattatagccatttcaccaagcaatgcctttttctagcctagaaaatattttaccgttaatatgcctctgtttttcttctttctcttcacttagagccttttctgttgaggtgaaacaattcagctagatgactcaaagcacatccgggctaggggagactgatgggtgtttctcttattttcactctggcaatactgcttaatgaaaaaacttaatagggattttttttaagttaaaaatcaactatcagccaggcacagtggctcatgcctacatgtaatcccagcactttggaagaccgaggcgggcggatcacaaggtcaggagttcgagaccagcctggccaagacagtgaaaccccatctatactaaaaatacaaaaattagtcgggtgtggtggtgcgcgcctgtagtcccagctactcaggaggctgaggcaggagaattgcttgaacctgggaggcggaggttgcagtgagccgagatcacactactctctctcactccagcctgggtaacgagagtgagatgctgtctcaggaaaaaaaaaaaaaaaaaaaaaaacaactatctttctttcaaaagccagttaaacctaaacggtgttacaactacaaactacacagaatgacaatggcacagctgtcattcagagactaaatgagaaactgcagaggttgcagtgagctgagatcatgccactgcactccagcctgggcaacagagcaagaccccgtctaaaaaaaaaaaagaaagaaaaaaaagaaaatgttcagaggaggagggttaggaggatcccacgggccaaggaaagcctccttacataattaagtcttcaggtgtaggggccttccaagtcacatctgagaggaaccagaatctactgggaatcatcttaatatctgcctttttctatccacagagtagcttttagggaggcgtccaagaatcgcagaaccataaccatgcgcctgcctacatctcaaattcagtagatccaaagccaaacttgttttcctcccaaaaacctaatccccttcccatccttcttacttctttaatgatatcactatctttcccagtattttttaaatgtctgggccaacttcaactctacctcctcacactcacactcccctcttatcaattttaccctgccatgttttcccatgctgcagtggtagctccctggctgtgtccttgcctgtagtgtctctctcccatttcaagttatcttaatcaagcctggccagttactcttcctcaagtaccgtgaattttttcctacctcttttattcacttcacctggaaatgcctaccctgttcatctgaacttccccactcactccacagcattcagttactctaggcctcctgtgagctaccttttatatgttagggaaaagtataatattttgccttgtgtaatagtagcccttgaacatcttacttctcctaccagtttataagttcctggagagaagagaatatcccttactgatatatgtcccccatagcacttaatacatagtaggcattcaacaatggtttcttgtactgaactggatctcaaaaggatgttacaaacagtctgagaaactgaaccaagaggctattattattttacaaattaccattgttaagaacaaagccttggagaactaaatcgata

SEQ ID NO: 1562836 - DNA, 4001 bp, Homo sapiens
tcccttaagtagtacttgtaattactaacgggtgacccaaactttatggttttgccctttataggctgagattctatttcatactctttttaatcactccctaatagcatctggcagagtactaaggacatggaaactctccaataaatacttttgggtgatgggatacatattactcttccacctctcttgatttgactctaaataacttattcaagtggatgtgacttttggaagccttcttaaaaacgggctcttcttaatagttattggccaaaaactgaaacaaacactagagctaaactacagatatttttttctttgcaggtgtttttaaagaacgcagtaatggattgcttctttctaaatcatttcaataagaaacagtaacataaagccctttggttcgctatgaaaaatgcaaacgacattaagcaaaacttagtttaataacttccagccaaaggttccccaccctgcagtcatagggctgtgggccagctggctgtaccacctcacccccgggagatgactgcttttcaacagtaaaactgcgtaagtgacatttggagttttgggggtcttctgaagtaaaacatgtaggtctaacttcttactgacaataagtcttaacgttacaggcttcggcttgatgtagaaaggaccctgaaaagatctcaaaaacttgcaactcggggacattccagacgtcttatgagtttaaaactatgtaaaaacatacgaagcatggggtaattccattattatatttaagtgatgtattccacattcctgtatatacacacacttcatgccaaacagaggctggcaagcaagttaaccattcaactgccctttcgttatgctgcataacagggagacaacagagagaaatcttgacaatgccaagctgggctagtgcttaaaggcacacaggcaaaccaggcattctcaacatcccaaaagcaaacatttcttgggcccttactatgggccaagcactgtgtcaaacgcttcacgtgaattatttcattcgacacttacaacaaacaaccgtatgcgattggtgctattatcctcatttttcagacgaggaaaccaaggcacaagattacacagctagcaagtggcaggtttgggagtcgactcaaaaggtccagccctaggcactatggagtatcaaaggtacccgaagcggggagggtggactgcatcagcgtcctgacagacgctttcttaggaggtaaagttcttggccatcaagtttcagatttgcagagccctgtacacctggcagcattcaggtttgctatactggcaccaacaagtccagctgagcctccttgcctgggaatcccaaggactgcacttggatcctgaaggtctgcacaagaccccagagaaagcggccgacaccccgtccctgcaatcaaaacacatcccgggagaagcgagggcgaggacctccgtgcctccccgccccgcgcagcacagccctgccaggcagtgcacaggtgcacgaccgcgcccgcccgcccggcccggcccgggtcccagccccggcacagtgaccgccgctctgcgactccggccccgagggcaggggcagaaggccggcaagaagagggcaggggacgcgagggccgcctcgcccgaccccccgaggacgcgcgcagcagggtcgggggggaaaaaggatgctccaggcggggcgaggccgcggtgggggaggggtccccaacccggactctcactcaccgcctcgcgcggctcccggccgggttccgcggctcgccccactccggctctagccgcccgcgtctcctctcgaggctcactgtccagcccgggcgcacggagctgagaagtcgccgccagcggagggcgtgtggccagcggcaaccaagagggtgggaaagatgggaccgtcgctctcgccgccgcggccaccacagacactgccgccgccggctcctctcagccacggaagctgcgggcccgcccaccacgcccgcctcccgtcctgaagactgtccgctggagaagtgacggcggcgctagccaatcagaggcctgatcggggtcgtgatcggcggactaaagggcgggcggagaaggaagcggcatgaagaaggcgaaaacggcggcctgacttcctgtgactgacggcacggcgcagccaatgggcaacggggagatgacctcatctctgaggaaagtctggaactggctgagctgcggcgagggggttggcgacgagccgggggcggagctctgggccttaaagaggccgcagccctgtggtcaccctgtgaagggaagggcggtggaccctgccggatcttgcgaagttgccaaggggtcaatgcccaggcgcgagtaattactgcattaatcccagaccccatcccgattcttgtcggggactgaagggtctccgcctggggctccgaagtcgatcatttcacattcacgcttcccaaaacgagacacaataaattccgctctggcctggagccttgaattcccgttacggtcccgccccgccgaggcccgtcgccttgtttctctgagtcagtttccccaacggtgaaagggaggacgctgacacctgcctgcccctccctatctgccgaggccgtggagatcagcagcagcgaaagcgctctgggcttagaagaggaaaagggctgcgtgagcccaagagcttgcatcggaaggctccaggaagagcatctgcaaaaaagaggattccacgggatgacccccgacaactcttggaattctaaaatcctatacccttgcccgcacccattcgtgtagtgaaggggcgcgcgttaggcgcagaggccacacgctccgcaagtgaacccgggcacctctctgaacctattccgggctgagggcggggagcgggtggctgcccgatttaaaaacatgtatatgtatgtgtatgtgtatgtgtatgtgtatgtgtatgtgtatgtgtatatgtatatgtatatgtatatgtatatgtatatgtatatgtattatgagtgaagtccatgactgcaacagggagaaaggagaaaggcgaaaggggagagagcaacaaggtaagccaggcccactgtgatgacagctgcggtcatgcaggcccttcgtatccgccttcctccccagcaatgggagagagcccagaaaaggagaaataaccccaactcgatggggtggaaaagggggaagcgctttccggaaggcttccgggatggggtcaccagagtcagaggaaggagtaacagtagatagaagaagaagtggtcaggggcgttcttctaggtttggggcggacccgcgtgaagatgcaaagactgaaaaggggcggctcactttacattccaaggtaaattctcactatgacccccttttccccatcaaaggcttctgggactgcccatgggtgaactcagagggagggtaggagagggtgctgctctatccaatggcggcaaaagtcaaagtggccttgggtattcccaattactcactataaatcagcttccaatgccggtcgcagaatcttggagttagacgggatcctcgtgggctcttagtcacacacaccttccccaaggcaaaaattcttgcacaaaatacctgataaaattatttattcgataaatattttttgagtaagaacactgagggggtaagctagatgagatacagtcactaccctgggggtgcttacaccaaactggaggatgctaaggcacgtactgcggtgactgcaatgccaggccggtatcccaggtgactaaaacaggatgcaggccgggtgcggtggctcacgcctataatcccagcactttgggaggtcgaggcgggcggatcacgaggtcaggagaccaagaccatcttggccaacacggtgaaaccccgtctctactaaaaaacagaaaaaattagctgggcgtggtggcgggcgcctgtagtcccagctactcgggaggctgagg

SEQ ID NO: 1562837 - DNA, 4001 bp, Homo sapiens
cgcctctgtccccagctccgaggcagacgcctgtcttggtggggcatgctcaggccacgggaggtgggcaggaccactgtgggtgctgcaggggctgccggcggaggccagggcacagggaggggagaaatcacagcctggatctcattctcagcccaagctacacggaaccgggggtccctgcatagaggcctgtcctgcagcatggctctgagcagctgcacacactcaggcccaagtggctcctccaatcatctctgtgcccacgactgtgcagggaatggccaggaccccagggaaatccctcggacatctggcgctgcccgtccaccccagacctgttcctttgttccccagctccctcccagccggcccctgaggccctccctaggaggaggaggtccctgaggttctctctgtgagggccgacctgaaggcctgagacgcctcctcccacctttgcaggtgacccctcagaggaccctgggcccccagagccgagggtcatggagactcctggggcccattcatggccctgggactgtccctaccctggtgggactaagccacaacctggagcagctcaaggctggcacaacagacacccataaattaataaaaataattgtgaaaacacaagcaaaacaagctcgtcggcatccaagagttctgcagcagcagggttagtctgagagttgctctctctgtcccacctggggctccagggcgctgcagtccgtcaccagagggaccagatgctcgtggccctccaagggcttagtgtggagctactcacccccatcagcacagagaagacccacgtcttgtggctgaagcaggggggcagtctcttcgacagctgcaggtcgctcggcttcgcgtctggggcatagctggcggggtcttgccggccccgctccagcgtgggcatccggtcataggccagctcctctctgaatggctcctgggtcatggcacttggggacaccacagctgtgctgaatgtacagccacgtgtcaccagttctttatctggaataaaattatcatcggctttggccactctgaggaaacttcaataagttgtttccaagaaatattttttaacaaaagaaatattgttcatactgaagtgctctaaatttgaagaagaaaatgagcacttgaatctaaaagtgaaaaagaaataactttcctagaaaaacggacctgaatagtctgggttcagggtgagattctacactttaaatgcctcattgatccatctgggccctccaggtgcaacacctgacaacatccatcggcaacttcgtccatgaacacatcacgccggggactcaagcacgttaaactgctccaattggtagctaaacgagagattgcaaaacatgcctctactcaacggcttaatgtctgagcacttacctcccccgctgctctgccgttgggagcactggtctctgggtgagggacttccagcaagaagtattcacaaatgaaacaaaagctcagcaaacttgagctgaaggcaggggaaggagagctgcttcctgaatatcaatgaggggaggaatcgggtggatcgtagaaatgtttcgtgttggttgtgtaaaccactgcctcggagctgtcagaacccaactaggaaaggaaggggccctgcctgtgccactcgccacagagctcgggtctctcagaagaaagaagcgtccctaagaatagaatcccaccaagtacacattctgagcaggctctgtttctgaaacgtaactgtttactcgaaggtcttctacatctttccaagtagcctttttccatcccccacagccacacggtgggaacctccttcacacggtcacataagcattcacgcactcggcttagctgtgtggccttgggcggctccggattcggccctgtggtttgcgtgggcagcccggatggctggtgggcccggtcctgctgccccctttatctctgctcaccaagcagagaaaaaccacagtaatgtgtgtcgcccagagacactggcaccctgacaactacagcaacgggttctttgtgcacattgtaaaaaggctcaaactaaagtttctgaaaaaccagctccttaaaccatgaacccacattaaaacttgagcaaagtcatcaggttccagaccatgggatgttctgttgtcttcgtttcaatcaagcaagaagcttttagtaagcttttattagcttttagtaagtttttattagcttttagtaagattacacatacaagcatccctgtcccagtgaaaatgcccactaaatcacctcgatcaaaatgcgtaagtgtcaagtacgcataaatgcagctcaaaacactttgctcaacctcacccccacaggaaacagcagtgataaatttttagcaataaacgaaagtttaagctatactagtattttagggttagttaattttgtgccagccaccacagccaatgttctgttgtcttcatttcaatcaagcaaggatgagaaataattttcaaaaactataatctgtgaagtcaagaactcattttaatggattgagaaacctcccaaacttcactatcttttaaagcgataaacgggattagtgggagtgggtccaactggatcgaatcctcctgtgtttctttttgtttggaaaaaaatgttaatcggatttcaacatttttttctttcaaaagttgctctccacttagaaatacaaacaagctgccctgaaccagaggttgcagagcaaatccctcagcttcccagatcataagtcatcacttgagaaatgctcccaagtttctgttggcaacactagtttctagaacaggccctgttctttcatacaatcttccaacaaattcttgctcctaaaatgcccttcatccctctgcctgctgatgtcccatcatcattcaacattcaacaaacatttatggggtggacaaagaagtgacgtccttcctataggctgtttacattcattgggggcacaggagtgcacaggataaacaaattagtgtgttatacagtgatatggtttggctgtgtccccactcaaatctcatcttgaattgtaattcccataattcctacatgtcgtggaaggggcccggtgggaggtaattgaatcatgggggtggttacccccatgctgctgttctcctgacaatgagtgaggtcttatgagatctgatggtcttttataaggggctttccccgcttttgctcaagacttctccttcctgccaccttgtgaagaaggacatgtttgcttccccttccaccatgattgtaagtttcctgaggcctcctcagccctgtggaactgtgagtcaattaaagctctttcctttataaggacttgactctaaaattacccagtcttgggtatgtccttatagcagcgtgagaacagactaatgcatccagtgacacacatgatttcctctatgagggaaaagaagtcaggggagagaaatgaggggctgctgtttgcaggggccagggcaggcctcagtgagaaggaggcagggaggggaggctggcagagttgaagcaaaggccacaggttggggaaggcaggcgaggaccatgcaagggggatacaggtaggacagccaggtgccagcacctgtgggtatggagacgactctgcttcaactctgagacagacctgctggaggggtctgggcagagcagcatccggtcactcactgggtggagagcaggctggggggtgggaggagcaggtgctgcctggcattgaggtggcagtgggcaagtggtgaggagggactgggctctgaacagggtttgaagagcggacgcaatctgctgtcagggcgacgttgctgagttctgtctgagcagtgaggacagagatgagaagaccagggtggagcaggtgtggagcgaggatctggagttccattctggacatgatgaggccgagatgtctgtgggcatctgccgggtctactgagtcc

SEQ ID NO: 1562838 - DNA, 4001 bp, Homo sapiens
ccgccgcagcccaggacatggaccagcctcccccagccatgtcggagcatggaccccccacgctgttatctggaggagagaagaaaggggatctgccaatatttagagcaaggaatggcacctctccccacaaaatactcctgccccaacatgttgtgcgtgcagtcttccagatcccacacccaggtccagacacgagactggaaaacaactgcccatccccctccgtctgcagaacctaatttccagatctggaagaagatccctccaggcaggggctccaggcccaggggctcctgagcagggaagaccctagcaggaggcagggagggtgctctctctcacgcacagcactgcaggggtgcggtggggagggggctctctctcacgcacagcacccccggggtgagtctgaggggagtcagtatcaaaggtcactgggacccagggtcctggcagaggaagcgaggtctggggcagaggggatctggcctgggcgggggaggggctgcgaccaagtccagggcaccaggtggaggagggcagagcccggagatggccaccaccacccgggagccgcctctgtccccagctccgaggcagacgcctgtcttggtggggcatgctcaggccacgggaggtgggcaggaccactgtgggtgctgcaggggctgccggcggaggccagggcacagggaggggagaaatcacagcctggatctcattctcagcccaagctacacggaaccgggggtccctgcatagaggcctgtcctgcagcatggctctgagcagctgcacacactcaggcccaagtggctcctccaatcatctctgtgcccacgactgtgcagggaatggccaggaccccagggaaatccctcggacatctggcgctgcccgtccaccccagacctgttcctttgttccccagctccctcccagccggcccctgaggccctccctaggaggaggaggtccctgaggttctctctgtgagggccgacctgaaggcctgagacgcctcctcccacctttgcaggtgacccctcagaggaccctgggcccccagagccgagggtcatggagactcctggggcccattcatggccctgggactgtccctaccctggtgggactaagccacaacctggagcagctcaaggctggcacaacagacacccataaattaataaaaataattgtgaaaacacaagcaaaacaagctcgtcggcatccaagagttctgcagcagcagggttagtctgagagttgctctctctgtcccacctggggctccagggcgctgcagtccgtcaccagagggaccagatgctcgtggccctccaagggcttagtgtggagctactcacccccatcagcacagagaagacccacgtcttgtggctgaagcaggggggcagtctcttcgacagctgcaggtcgctcggcttcgcgtctggggcatagctggcggggtcttgccggccccgctccagcgtgggcatccggtcataggccagctcctctctgaatggctcctgggtcatggcacttggggacaccacagctgtgctgaatgtacagccacgtgtcaccagttctttatctggaataaaattatcatcggctttggccactctgaggaaacttcaataagttgtttccaagaaatattttttaacaaaagaaatattgttcatactgaagtgctctaaatttgaagaagaaaatgagcacttgaatctaaaagtgaaaaagaaataactttcctagaaaaacggacctgaatagtctgggttcagggtgagattctacactttaaatgcctcattgatccatctgggccctccaggtgcaacacctgacaacatccatcggcaacttcgtccatgaacacatcacgccggggactcaagcacgttaaactgctccaattggtagctaaacgagagattgcaaaacatgcctctactcaacggcttaatgtctgagcacttacctcccccgctgctctgccgttgggagcactggtctctgggtgagggacttccagcaagaagtattcacaaatgaaacaaaagctcagcaaacttgagctgaaggcaggggaaggagagctgcttcctgaatatcaatgaggggaggaatcgggtggatcgtagaaatgtttcgtgttggttgtgtaaaccactgcctcggagctgtcagaacccaactaggaaaggaaggggccctgcctgtgccactcgccacagagctcgggtctctcagaagaaagaagcgtccctaagaatagaatcccaccaagtacacattctgagcaggctctgtttctgaaacgtaactgtttactcgaaggtcttctacatctttccaagtagcctttttccatcccccacagccacacggtgggaacctccttcacacggtcacataagcattcacgcactcggcttagctgtgtggccttgggcggctccggattcggccctgtggtttgcgtgggcagcccggatggctggtgggcccggtcctgctgccccctttatctctgctcaccaagcagagaaaaaccacagtaatgtgtgtcgcccagagacactggcaccctgacaactacagcaacgggttctttgtgcacattgtaaaaaggctcaaactaaagtttctgaaaaaccagctccttaaaccatgaacccacattaaaacttgagcaaagtcatcaggttccagaccatgggatgttctgttgtcttcgtttcaatcaagcaagaagcttttagtaagcttttattagcttttagtaagtttttattagcttttagtaagattacacatacaagcatccctgtcccagtgaaaatgcccactaaatcacctcgatcaaaatgcgtaagtgtcaagtacgcataaatgcagctcaaaacactttgctcaacctcacccccacaggaaacagcagtgataaatttttagcaataaacgaaagtttaagctatactagtattttagggttagttaattttgtgccagccaccacagccaatgttctgttgtcttcatttcaatcaagcaaggatgagaaataattttcaaaaactataatctgtgaagtcaagaactcattttaatggattgagaaacctcccaaacttcactatcttttaaagcgataaacgggattagtgggagtgggtccaactggatcgaatcctcctgtgtttctttttgtttggaaaaaaatgttaatcggatttcaacatttttttctttcaaaagttgctctccacttagaaatacaaacaagctgccctgaaccagaggttgcagagcaaatccctcagcttcccagatcataagtcatcacttgagaaatgctcccaagtttctgttggcaacactagtttctagaacaggccctgttctttcatacaatcttccaacaaattcttgctcctaaaatgcccttcatccctctgcctgctgatgtcccatcatcattcaacattcaacaaacatttatggggtggacaaagaagtgacgtccttcctataggctgtttacattcattgggggcacaggagtgcacaggataaacaaattagtgtgttatacagtgatatggtttggctgtgtccccactcaaatctcatcttgaattgtaattcccataattcctacatgtcgtggaaggggcccggtgggaggtaattgaatcatgggggtggttacccccatgctgctgttctcctgacaatgagtgaggtcttatgagatctgatggtcttttataaggggctttccccgcttttgctcaagacttctccttcctgccaccttgtgaagaaggacatgtttgcttccccttccaccatgattgtaagtttcctgaggcctcctcagccctgtggaactgtgagtcaattaaagctctttcctttataaggacttgactctaaaattacccagtcttgggtatgtccttatagcagcgtga

SEQ ID NO: 1562839 - DNA, 4001 bp, Homo sapiens
gaggaccccagggtgccaggaaacactgcgaaaggctgggctcattgtgcccctttctgggcctcagtttgcagttggtctagtgggtataattaatcatagctatgccttctgatgtcggtgggaggcaagacttcgaggagggcacttgttaggctatggaggaagacgggagcatcaccatgcaggctcagagaggtcaagcaacctgcccaactcacacagccaggtggcaagcagggatatcttctccctcaagcttccacctaatcttcctattctcacccctctgctgctggctccaggagggacggtagcttcgtcccatccatcggactgcagggcttccatcaaccctgaaagctgggaactgggctggataaatatttacagagctctcccagccttgctgaaggcagccgggggataaacacatcagaggtgaccccacatgctccctgcgtgtttgcagagtgacagaccacagtccagctcagaccccaccccaagctggcccccagctccagcactgaccatgcacaagcgtcaaagtggcagctacaggtgacagtgtttctagtgagcctggcatcacctcattgctcaacagtggacacagcagtaggcaccattgccccctcccacctgcactcccattagagatggagtgggtgagattctgaggcatggcaggattcacccagggtcacatggttcaaacccagatctctccaatttccagacctgtggttcaatgtctacccacagtgattcctgactctgtcccaagtcctaggaaccaagaggggctgggaaggaggcaagactccagactgagatgccccccattcactctaccccacccatcccatccctttctgctcccatagccagcacaggacaaggctgccctgagcagagccagagtggctggacagagggtcccagcctggccaggcctgcctcctcaccaggccagtcctgagactcctgcctgtcacaccctcctgctcccttccctgcccgagctgtctggatgcctccgctgtggagtggagtggcccaggctctggccccaggccctgtgactggtgcctggaagcgccccagggaaggggcagcttttgggacacatgcaagctgtcacacacactccatgacagtccctcctctcctcactctgctgtcctctcttacctgggctttcttctcctctcctgagcacacattttctccctttcctttctctccccgcttctttctgacagccacctctcagtcacacacacactgcactcatactatttcatactcatgttctcctggctccaagcctcccaaaactgctgccggcaggtgcccgcgggggacatctccaggcttagaccccatttcccgcagcacagcgctgccctcccttctccctttatccttcatcccaccgcacacctggaggtgtactaactgcggccacacacctgcaggctgacacctgcctgggatctgctcggctttgtccctgcgatgaatagggggccctgttaccactccctctgctgcttccttcaacgcacactccagcacccgcggctggagcgcgagaggcaggtccccacgctgggagcaagcgtgagtccagcgtggagtcccgtcccaccagcccgaacgatgccggcgccggctccccttcacacccccagggactgcaagctcgctgtctatcacgcctagagggaaccagaaagcgtttcgggtaccgggcgctggaggccacccggggcgcccccttcggtccggatccgccgctgggcccagcccgcgtgcccggcgccccctcagcgaggagcggccggcgagtggcgggcactcaccggcggcagagcccgggccagcagcggcggcggctggagcagcagcagcagcatcgggggcaggagggcgcgcgcggccgcgctgcggagccaggcggccggagccatccgccccggggctgctgggcttgctgggccgctccgggccgccgccccttatagcttccgccccacccccggcccgcctcggccccgccccccgccgccttttgttctgaactctcctagcagccgcggcccgggtgggggaggtgaacggggagggtacggcccagcggggtcgagggccggagacagggtcctgccccggggctggcaaagtccctatctggtgctgggtgaccctggccaacccgtgccgctctgggtctcagtttctcctctgggtggtggccgtccaaagtcttagacttggctagagtctgagaggagtcaggtttcatgggtcccatccgtacccccacctttggaaggcgcatcccactgggtctccttggtggcctgacctctgacctctgacaggtggtcctacccacaagcaagttcccccacccctcagagcctcaacggatccttctagaagatgacacaatagcccctgtgaggaaagggatattattttattttttattattattattttttgagacacagtctcactctgtctcccaggcaggagtgcagtggtgtgatctccactcactgcaacctccgcctcccaggttcaaacgattctgctacctcagcctcccaagtagctgggaccacagacgtgcgccaccatgcctggctaatttttgtatttttagtagagatggggtttcaccatgttggccaggctggtctcgaactcctgacctcaagtgatctgcccaccttggcctcccaaagtgctgggattacatggggaagccattgcacctggccaggaaagggatattaaaatgtgtcccaggggaaagtgaggcatatggcagggactggccagttcttcagcttgggatagaccgaagtttacagatagggaaactgaggctccaagagggagggtccaggcttttccacaccagcagacaagtggaggggtcaggaggtcctctagctggtcagctgtgggaaggatgctgtcagaaggctgtgggaggtgtctgagtggagtactgggcccccagggtgtcccctcgtcagtgcccaacaagcccctggggacccctccaggctagccacctcagacttgaaagaaaggaggcgagaggccgggcgcagtggctcatgcctgtaatcccagcactttgggaggccgaggcaggtggatcacgaggtcaggagttggagagcagcctgaccaacatggtgaaaccctgtctctactaaaaatacaaaaattagccaggtgtggtggcacacacctgtaagcccagctactcaggaggctgaagcaggagaatcacttgaacccgggaggcggaggttgcagtgagccgagattgttccattgcactccagcctgggtgacagagcgagactccatctcaaaaaaaagaaggaaaggaggtgagactcaaaggaggggttgtgtccacattctggaagggatccttcagtctcatccctgattttcggggttacccagtactgctgtacaccccctgaaatgatgaagggcctcaccacctcaccaggcgacctgttccatcatgggtggccctgcagagccacgatccaggcagtggctcgcatcctggcaggcagggctctgagctgctcaaaggtgaggctgtggtcaggaagcctgggccaagaaagggaagcgggtggggaaatgtttcacagcttattcaagaagactccacagagactcctagagggcgaggagaagtaagacagcagtaatttttacaacctacactgttcgtaatcttttcttttttttttttttttttttgagacggagtctctctctgtcgcccaggctggagtgcagtgacgcgatctcggctcactgcaagctccgcctcccaggttcatgccattctcctgcctcagtctcccgagtagctgggactacaggcgcccgccaccatgcccagctaattttttatatttttagtagagatggggtttcaccgt

SEQ ID NO: 1562840 - DNA, 4001 bp, Homo sapiens
gagggggtggcggggcctgctggggaggctgcattaacgggtgcctggagcccactgagggctccagacccacaggcatctttctggccccactgaacctctcaaagaacacaccatgctgctgctgctgctgctggggctgctgctgctgctggggctgctgctgcggtggctgggcgtgcattttggacaagcccaccatgcccgcagctctgggcatggccgaggcgcccgggaaagcgcccccaggaacctggcgacccgctgcataatgaggcagctgcccttcggagtcagagggcgaaaacatgtcaaaatgtcccgagggcgcctcgcccgggtaattgtattccagcgagtcgacggctccttggttcgtcaccctccgtggctccagactgtgggaatcggagccgctggaggacggcaggccgtggaaggaggcggctcggttagggctctggtccagcggcaggcatggggccggcacggcgtggctggaggcacctgaactgtggaagtccgggaggttccccggtcgctgcgggccgaagctctcaggcccctggctctccgccatgtgctcatagccctcggcgaagggcggctggctgcccaggcctccggctgcgccgccgtagccgagcaggcgacccccgtgcaggcacgaggccccggggtccgggccaccgaagttgcccccaaagtgggggtgatgctggtggggatgatgacttcccgggtggccgtggtgaggctgctggccgccaaagaagccgtgcacaggctgcgcttgcagcccccctgcgtgcaactccgagtggccgcgcgcgtggaagccgtagggctccatgttcatgcccaagatcgggggttcgcccagcgcgctcatagcaggatccacagggccagggggccccccagtgtggaaagccggggccttaaagtgggtgttcatgctcagtccggtctcgttaaagttcctctcgccctggccagcgttcctgctgttgacctggggctcgaattggtccagcccaaacatacttggcggggggcagagggggatcaatagggcatgacagccggctctccgcggcgcgcctccggccagctactcgttccagcccaggattgggcgctccgggacgctcagcaccgcgggggctcagcgcgcacctccaccccgcctgatgtgagggacggggggcggggtattagctcctctcctgaagctccgattctgcccggggagggcctctcacatcttgcgaggccgcggggcctctaggagccgtgttggggggcccatgccccgggcggttgtcacagccgcgggtgggtctgcggggaggggacgaagccgcggatgaacggagacaaaaagttaagtggggggaatggggagggaagggggttgggagagcagagcgatcaccttctcaagtccgattgggtctgctggggagccctcaggacgccgcccgcagcctcccggagtccgtggcagagctgctaagggcaggggagggagacccttcaaagccgcggctggcgccgggcaccgacagagcggtccctccccccgccccccggagtccccgcgccccgcagcccgagcctccaccgagcacgatccgctcgcacaatccccgtaggctccgggcgagcggctgctgcttcttcagcgggtcggaggactggaggctccgctcggcatcgccggtgccggcccccgagccgaggacgcagaggggctgcgaggcggcaggcgccgggggctggagccgagggtcggggaaaggcgcggctcctctgctcggcagcgggtgcgctgcgttcggcgcgcagcttcgcggccacgtccgccgcctgccgcttctgttctccgccgttgggtgtctgagttcgccggagtctccgcgcaccgttgcaggcgcgggagggcagcgagacgaggggttgggtcgctccaaggctccggttccctgcctccgcgctgaggtgcttcgcgagtccctctcggacctgagggaggggggcgtacgcgggtcggggggccacgccgggcgagcaggctaaggcgttcccgctgcgctctcagagcccggaatggggggaggggggcgcgggggcagctctggggggtctgcgcacccctctcccgactagcgggggggctctgcgtggggcgttccgagggtctcggctcccctctctgtgtctgcctctcgcccagcgccgggagaagcagcaacaagttttgcatttcagcaatcaatttcagccattacatttgcaccaatcagcgccgcccaagttccgggctcggggcggggctcgctcttaaggtggtccggggtcctggctgccgaagcccccgccacgaacccgcactaccccagctctggggtcccctgcgcccgcctctcctcggggtccggcgtcagtgcgctgggggcgcgccccggcctccgggcgcatcgagctggagagggtgcaggcggaggagaatggcgggagcttggctttgttcacccccttcccattcacactgttcccaactccccacccccaactggagcgagacccaccgggtgggcagggggcggggaggtgggcggtgagcggtacggggcgctcagacaatgaggtcgccaggcaaagaccctagactcgccacggaaagtcgctaagtgtctactgcacttcggctccggggtgaacactccgttctccgctagcggcgcccaagttagccggccctgggattttcttggagggtaaagcagacggggaacctcgaagttagggttctcctcgagagacctgggcgcttgctcactcctccgtcactagggcgttcacaattgttccccttccccactgcctggggttcccggttctcaccggccggcgtgggctccaaggagtcacagtcactcagccactttatgggggagcacatcggttgagcccagtaaccggagcgacttgcgaggcggctgggaaccccgagaagacacgcacgaagagggcgcacccgccgggccgcacaccttgccctgggccacccggtccaagacccagaccctctgcgggtgcgaagttggcctccttaagagatcaattaaactgaagaggccgaggaatggaattgggctgtgatactaaaatcaataggagtaatttaatatctgccctgctctttatgaaatatttatcccaataatcttagttaaaatgtttagatcgtcctgatccccacagaggctgaaatctatcttgcaattagaagttggaagttagaggtgatggaggatagaggtgtttattctgtgcgcctgtgtgcgtgtgctcgcgcctgcgtgcgtgtgtttgtgcatgcgtgtgtgtgtgtgtgtgtgttcctccctaaagtgtgtgtagggaaggaggggggagaaggcctttaattttccttgccataaaatagcacgaggcgattttgctagcagattcgcattcttaggagaagggcgaaaaaagaactttctttgaagtgcccctgatatcgctattaaatctaaataaaattaagcgtggtgtatgaaaatgcctttccccccccacaaaagaaagtgtttatcgcccgagtctgtctagcgtttgctaaattacgcatgaaatctgaaatgaaataaacgttataataaaaccaacccctgagccctttttatttaaaaaccttagattaagcactccaccgtcgcgggcaggagttaaaaagttaccatgtcgtacgcgcagattcattgctcccctgagttgcggctaggaaggcagtgctaagtatgccagaaccgacatgccgggggtggggggaaatgggctcaactttggggtagcggcagaattcctaagaaattgccccccgcccaaaaaaaattttaattaaaaataaacaaacaagaaaaaacaacaactttaaaactcagccagagcaagctcagatccaagac

SEQ ID NO: 1562841 - DNA, 4001 bp, Homo sapiens
cagttcatggtcttccaagattatcataaaatctgtaattccagacttaccatcattccaaaattcagagctgagataaccatttatcaaacacagtcatccatgaacatttaagtggccttcaactgcttgttcttaatatggcagttcaaacattaaaaaggacactaaagttttttcccaaggctatgctatcaactagctgaataatcactaatcagcaacctcacccaagtgtgtttcagggtcatcatacttaagtgttagaattcaacctaggtgactgctacaggccggccatggtggctcatgcctgtaatcccagcactttgggaggccaaggtgggtggatcacctgaagtcaggagttcgggaccagcctggccaacatatagtgaaaccccgtctctctaaaaaaatacaaaaattagctgggcgtggtggtgcatgcctgtagtcccagctacttgggaagctgaggcaggagaatcgtttgaacctgggaggtgaaggttgcagtgagccaagattgcgccaccccactctagcctgagcaacagagcaagactccgtctctcaaaaaaataacaaacttcctaaaaaaaataaaaacaggctttcaccatttgacagtttgcttcactacttggcaaaattttattccctttaaaggaaaaatagaaatattacagacattatgatatcacaaacatgttgtcttctccatcaaaagctaaaaaccattgtactattactacataatggaagtctatactctcgactctgaagtgggttcttcagagactggaccattcatgtagctgctcatctcctctccaggtactagaatgttagaacacttaccttcatctcaaaagtaacaggtgaatgtattaaaacactaaagttttgacgctactggacagcctccaagagagtgggcatatggattaaacctgaaacattccagaccatgttggagtgattagattactccttcatgaactcaagaaccatgaacactgtatgtttctgtggaaattttggggaaagactatctaaatagagatataaacaagttgccgtttcctgtttagcatatacaaataatattggatgtgagcaatctgccaggaagataatgccaacttctgaaaaaataaaaattttcttcttgaaagttgtcatttaaatgtcttctgttttcttgttagaaagtaaacacttgttataaacctaactgtttaggacgttgtcactacagaggggaaacggttgatactaaaatagtccaacatttggcgatccaatagagcagtatttgttggattcctataaacacttgaatgaaacaactcaacatattgacttcaaataactaaagtttgcatttagaaaattttgatccaataaacaaaaatcagattcttctggattagcaacaagtatttcactgatctcagttcttcaatacagagctcaagatatccagtgacacatttcactccagtgggatacatctcaaaaagtgaaaaagcaaaattttctggggaaacgatttccatataatatcaaggaacgagttactggttacctcagtggcacctagaggatacttacgaatttgtgtgcagatattcaaaggttagctgagctcgattcagactgctgtaatttgtgaaagccatgactgcaataaggtctccagcccttcacccgctaactgggaaatataaccttataatgatatcgatttcccaggattctgtccagtaaagcttcagtaagtctgtgctccttaatgacagttaaagtaacctagtagctatccaaaatatatgcagagatgtttaaaactacaatttcttcaagtgtttttttttaatcttctcaatgatttatgatgtaatattttggaaggaactatgtcataaatctgtagctttaaggagcttttagcattaagttgcgatagctcaattcagacaatctgagtctcgtgtggatggtcctgaaggagatggtccttgagtgggtggtttatgactgctccatcttcatgttcttccagccttttttggttccccgaaatttcctgtcaggaaatttaccaacgcggaaatttacccacttctgtcagaaaactgatcagccatgtcttcgccacacgtgatgccaggattcttaaacaggcccaagaccggagaccaagatgtcgacggagtgttatatggcgcaagttgcagcttcaccacctcccaagtgaaaaagctcctaggcactcacgatttcttttttcaaagccggaccaaacccagttcagggtggtggtcagattacctcacacttggcccacataaacacctcacaaatgacccgcccacagcacctcgggcaggccgcgccccgcccccacgtccctcagacaacagcctcagcctcccaggcccttcccgggcctcggtcccgtggccgcctccccacgaagaggagctactcccggcttccaaggaccggatcgagggcagtggcgagcgcaccacctgaccgggcactacccggatctcacaactgcctttgtccctccccgcggaattggaacccaacagccgcagagcgctcttggaaccatgtgctgctgccgcctccgccgccgccgccgctgcctccgccgccgcccgcgcgccgcccgcgcgccgcgctagttgagatggtgacaggattcagcaacacgaaattcggcgtttagagctgctctgccgccgccgtcacagacaccacagccaccgctttgtctccgatagtgcacacagccccggccacctcgcacactccccgacgccccaagcccccgaggcctccgcggagcattcagccaatcacaaagctgcagctcctcccgcccccgccctgatgtacagcctcctgattggcgggctgcgtgtccccatgtgaccggatcttggttggccggtcccgcccctgtcacgtgacagcgtgcgcctctcttcctgctttcctgaccctctccgccatttaaagaaacagtaccgggggcgggccgagcgacgcagccgggacggtagctgcggtgcggaccggaggagccatcttgtctcgtcgccggggagtcaggcccctaaatcgaagaagccctggcgcgccctccccccctcccgggtctggtagggcgaaggaacgggcgtgcggtcgatcgagcgatcggttggcggctctttctcctgctctggcatccagctcttggggcgcaggcccggccgccgcggcgcgcgcccggtggccgttggcgctcgcgccgcgtctttcttctcgtacgcagaactcgggcggcggcctatgcgtttgcgattcgacgaggagtcgtccgggtggtcggcggcggcgggcagctgctccgccccgctccgggggaggcggcggcggcagcggccgcgggatttggagcggccggggaggcgggggtggccggggccggcttggaggcctggcgccacccttcggggcctgcaaggacccagttgggggggcaggagggggccggaggatggttggttgtgggatttctactttgccttttcctccttatgccgccttagtgaggggcgggagctctggcggcagccccggggtggggagacgagctccggagtcggaagagctgggttttcttccgggcctagccaccagttggcggagtgaccttaggcgagtcactctgtaatttgtctgcgcctcagtttcctcctctgcctatcaatgtgtgtggggttgaaatcgctttgtaaactataaagcgtgggtgtacgtaaaggatggttattgtttataattttttttgagttgtaagaaaacttagcagttccccaatccttgggttttgaacctgggaaccttggattggagttggggatccccaaacttcctgaaattgtgggaatgtgcggtttgggggaatgatgggaatttgtgggaatgtgcgt

SEQ ID NO: 1562842 - DNA, 4001 bp, Homo sapiens
tgtcacctgaggtaggtaaacaaagaagttatcttggccataaaagcaagcgtacgctacagtgaaccccaccagagaaaggcagagtgcaaaagcctcctttttttgcagttcggaggcactgactccgaacgggctgacttgagacagagagaatcccatcagagagtgctgtgtctggaacgtggggtttggaggcagacagcccagtttcctcagaagggcacaggtagtggttgtggaggtgacagccctgactccacaacagactgcatggggttgactcctagctcttctactgccattggtgtaaccctggactaggtccttaactactctgggcctgttgccatctgtaagatggagactaatcgtcactacccaagagagctgctgaagggttaagtggcagaacacacgtgcatgtatggacctctgcgtggctgacacgcgttaagtgctatgtaaatggccacttatatcagcatctgggagtcattagcatgcacggttttattagtactatcgattatctttttattaccatcagcagcagcctcggaagactggagaatctcaacaaacacggtgctggaaaaggttcggggctgggcagacaagtctggcccaggagcagcgcacgccctcagccgtctggccactgctgcagccacggtcctgagtcctgaacgtgcctttactgcagcttcccagccacgggaggaacctggggcgacggttacagtacaggcataggatctgagcgctgccaagagctggagctccagctaccgctgagcgcgtgttctaccgaagagatccacggagcaagtgctccaggtaacacagccggccccccgggcatcggccctcgtggatccagaggccctgaacacgctgcctgcagcaggaagctcccctcctgaagcctgttcctgtcttttctcacagaaggcaattagggacccactactgtggattccattcccacataaggaaacatcgggagaagccatcagaacctcgggagaggtcgggcgtggtggctcaagcctgtaatcccagcactttgggaggccaaggtgggtgggtcacctgagatcaggagttcgagaccagcctgaccaacatggcgaaccccccctcgactaaaaatacaaaaattagccgggcgtggtggcgggtgcctataatccccgctgctcgggaggctgaggcaggagaatcacttgaacccagaaggcggaggttgcggtgagccgagattgcgccactgcactccagcctgggcaacaagagcgaaactccgtctcacacacacacacacacaaacacctcaggagaaaggaacggtgagggcatccgggcgcatcccgggctttagaaagatgggcttgaaaaccagacaaggaaatggcacgccttggcgcagcgcgttctgaaaggacaggccaagtctgcggggccgcgtttttcggggctttctagacacaccaccgccaatgacgctgcggacagggaggaacgacatggagagacgacttggcagctgctcggcgtaaacacacaaagtgagggcgggaagaggggctggtgtcaccggagagacctcacagaggacgggcgcccagagcggcgggatgctgtggggtcggaagcctcctgaggcgaacggggatccccgccagcggagatgaggaaaggccgggcccagcgttgcctgccggcccgcactgcactcaaagacctatgggcgcggctccctcgtggccgacacgcgagggcccgggacccgcctcccagccgcctcccgcgagccaccttccgcgagctcgggctccagctgcccggcttcctccctaggggtgtccgccgtcctccagaagaaggccaccagcttggctgcgaggctcagcatggccctcgcccggcctaggctgccgtcaccgccgctgccgccgcccgcacgcgcccgcgccgctcccgccgcccgccaccaatggggtcgccgcgcctgggcatgcgccttggggtcgttgcgcgagccgggacccgtagcggtcagaggtcggcggttggcgcctggcagctcctgacaaggcgaggtgcctggtgggagtgacgtcatgccgagcgcgcaaggcggtgtgaccgccgggtgggcggggcttcgagcgggcgggcggggcctcgcgtgggtgggcggagcttcgagcgggtccgccttcttgccgcccacacattagggaaaagtgcgctttcaccacccagagtgatgttaggagtcgttttttgttggtgttttttatcaagttgaggaagttccctctattcctgtttttccaagagttcttatgagtgggtgtgaaattttctgcaacgcttttctgcatgtattcaaatgatcctgtagctttttatttcagcccatagggaattacattgtttggctctccttggaaaactcacttggtcacgattcgttatccttttggtgtattgcctgactcagcttggtaacgctttgtccaaggttggggacggtgctggtgaagcagattgctctgtggccgacctcccgttttctgtgtctgtctggtttggggtcggtttaagccgggcctgcagtgacctgggagtaggatggggtaacttattccctaaaaattgtggtagtattcgctggggaacccatttgggcttcgagatttctttgtgggaaggtttttaatgagaaattcacttctgcatcagctagagggctattcaagttatcaaggtaatattgaataaactttggtaattcttttaaggaatttgtccatttcatccaattattagatgtcagattattggcataaagttgttcagcatatttccttattatccttttaacgtctgtatggtccataatgatgagccatctttcattcttgacataggtaatttatctcatccctctcattttccttgatcagtctatatttatcaattttattgagtttttaaaaaaaatcatcccttgatttcattgatttttctctattttaaaaatatctttacactttgcgaggccaaggtgagcagatcacttgaggtcaggagttcgagaccagcctggtcaacctgccaaaatcctgtctctacaaaaaaatacaaaaaaaattagccaggcatggtggcgcatgcctgtaatcccaactacttgggaggctgaagcagaagaatcacttgaacccaggaggtggaggttgcagtgagctgagatcacaccactacactccagcctgggagacagagcaagactctgcctcaaaacaaaaacaaaaacaaaatacgtatatatatctttactattccagtggtttctgttttttattatttctttttttttttttttgagatggagtcctgctccgtcgcccaggctggaatgcagtggcatgatcttagctcactgtagcctccacctcccgggttcaagtgattctcctgcctcagcctccagagcagctgggattacaggcgtgcgccaccacgctggcttttttttttttttttttttttttttttttttgtatttttagtagcgacaaggttttaccatgttggtcaggctggtctcgaacttctgacccgcaggtgatccacccgccttggcctcccgagtgctgggattacaggtgtgagccactgcgcccagccccgacttatttttgattgacatagctttattttcctaggtcagatctgtcagtctgatgacagcctggaccttgcctgtccatggatgcagagtgtactgatagttcttgctgtgggaagggagagagtggcgcactccctagcatttcaaatccccgctaagcctgtgtcttgggctgggtgctggaacacatacaggagccagcagggtcccagggacctactggttggtgggagattagcttggaaacaagagcgagctgcatgagggctggtggctcatgggctccctgcca

SEQ ID NO: 1562843 - DNA, 4001 bp, Homo sapiens
taaacacaaggaaaaacaacacaaagtcccgtggcgaagaaaaactgttcccaaatgaactcaaaccttaccctgattgctttcagtccattggacactttattttcttccacaactgcaatcacttcctgtccaacattcagaagcactctgctagtcacagcatcactggagaagtagatcatatcatcaatcatgccataatcgctgcagtaccttgtcacgacaccccgtacagttttcagcttagtgtcacctgaggtaggtaaacaaagaagttatcttggccataaaagcaagcgtacgctacagtgaaccccaccagagaaaggcagagtgcaaaagcctcctttttttgcagttcggaggcactgactccgaacgggctgacttgagacagagagaatcccatcagagagtgctgtgtctggaacgtggggtttggaggcagacagcccagtttcctcagaagggcacaggtagtggttgtggaggtgacagccctgactccacaacagactgcatggggttgactcctagctcttctactgccattggtgtaaccctggactaggtccttaactactctgggcctgttgccatctgtaagatggagactaatcgtcactacccaagagagctgctgaagggttaagtggcagaacacacgtgcatgtatggacctctgcgtggctgacacgcgttaagtgctatgtaaatggccacttatatcagcatctgggagtcattagcatgcacggttttattagtactatcgattatctttttattaccatcagcagcagcctcggaagactggagaatctcaacaaacacggtgctggaaaaggttcggggctgggcagacaagtctggcccaggagcagcgcacgccctcagccgtctggccactgctgcagccacggtcctgagtcctgaacgtgcctttactgcagcttcccagccacgggaggaacctggggcgacggttacagtacaggcataggatctgagcgctgccaagagctggagctccagctaccgctgagcgcgtgttctaccgaagagatccacggagcaagtgctccaggtaacacagccggccccccgggcatcggccctcgtggatccagaggccctgaacacgctgcctgcagcaggaagctcccctcctgaagcctgttcctgtcttttctcacagaaggcaattagggacccactactgtggattccattcccacataaggaaacatcgggagaagccatcagaacctcgggagaggtcgggcgtggtggctcaagcctgtaatcccagcactttgggaggccaaggtgggtgggtcacctgagatcaggagttcgagaccagcctgaccaacatggcgaaccccccctcgactaaaaatacaaaaattagccgggcgtggtggcgggtgcctataatccccgctgctcgggaggctgaggcaggagaatcacttgaacccagaaggcggaggttgcggtgagccgagattgcgccactgcactccagcctgggcaacaagagcgaaactccgtctcacacacacacacacacaaacacctcaggagaaaggaacggtgagggcatccgggcgcatcccgggctttagaaagatgggcttgaaaaccagacaaggaaatggcacgccttggcgcagcgcgttctgaaaggacaggccaagtctgcggggccgcgtttttcggggctttctagacacaccaccgccaatgacgctgcggacagggaggaacgacatggagagacgacttggcagctgctcggcgtaaacacacaaagtgagggcgggaagaggggctggtgtcaccggagagacctcacagaggacgggcgcccagagcggcgggatgctgtggggtcggaagcctcctgaggcgaacggggatccccgccagcggagatgaggaaaggccgggcccagcgttgcctgccggcccgcactgcactcaaagacctatgggcgcggctccctcgtggccgacacgcgagggcccgggacccgcctcccagccgcctcccgcgagccaccttccgcgagctcgggctccagctgcccggcttcctccctaggggtgtccgccgtcctccagaagaaggccaccagcttggctgcgaggctcagcatggccctcgcccggcctaggctgccgtcaccgccgctgccgccgcccgcacgcgcccgcgccgctcccgccgcccgccaccaatggggtcgccgcgcctgggcatgcgccttggggtcgttgcgcgagccgggacccgtagcggtcagaggtcggcggttggcgcctggcagctcctgacaaggcgaggtgcctggtgggagtgacgtcatgccgagcgcgcaaggcggtgtgaccgccgggtgggcggggcttcgagcgggcgggcggggcctcgcgtgggtgggcggagcttcgagcgggtccgccttcttgccgcccacacattagggaaaagtgcgctttcaccacccagagtgatgttaggagtcgttttttgttggtgttttttatcaagttgaggaagttccctctattcctgtttttccaagagttcttatgagtgggtgtgaaattttctgcaacgcttttctgcatgtattcaaatgatcctgtagctttttatttcagcccatagggaattacattgtttggctctccttggaaaactcacttggtcacgattcgttatccttttggtgtattgcctgactcagcttggtaacgctttgtccaaggttggggacggtgctggtgaagcagattgctctgtggccgacctcccgttttctgtgtctgtctggtttggggtcggtttaagccgggcctgcagtgacctgggagtaggatggggtaacttattccctaaaaattgtggtagtattcgctggggaacccatttgggcttcgagatttctttgtgggaaggtttttaatgagaaattcacttctgcatcagctagagggctattcaagttatcaaggtaatattgaataaactttggtaattcttttaaggaatttgtccatttcatccaattattagatgtcagattattggcataaagttgttcagcatatttccttattatccttttaacgtctgtatggtccataatgatgagccatctttcattcttgacataggtaatttatctcatccctctcattttccttgatcagtctatatttatcaattttattgagtttttaaaaaaaatcatcccttgatttcattgatttttctctattttaaaaatatctttacactttgcgaggccaaggtgagcagatcacttgaggtcaggagttcgagaccagcctggtcaacctgccaaaatcctgtctctacaaaaaaatacaaaaaaaattagccaggcatggtggcgcatgcctgtaatcccaactacttgggaggctgaagcagaagaatcacttgaacccaggaggtggaggttgcagtgagctgagatcacaccactacactccagcctgggagacagagcaagactctgcctcaaaacaaaaacaaaaacaaaatacgtatatatatctttactattccagtggtttctgttttttattatttctttttttttttttttgagatggagtcctgctccgtcgcccaggctggaatgcagtggcatgatcttagctcactgtagcctccacctcccgggttcaagtgattctcctgcctcagcctccagagcagctgggattacaggcgtgcgccaccacgctggcttttttttttttttttttttttttttttttttgtatttttagtagcgacaaggttttaccatgttggtcaggctggtctcgaacttctgacccgcaggtgatccacccgccttggcctcccgagtgctgggattacaggtgtgagccactgcgcccagccccgacttatttttgattgacatagctttattttcctaggtcagatc

SEQ ID NO: 1562844 - DNA, 4001 bp, Homo sapiens
ctctcagctgggcactgcctggcctgcatgccaataggctgaggccctgggagccacttcccaatctgcggcaccattaagaaaatggggttggtcgggcgcagtggctcacgcctgtaatgccagcactttgggaggccgagatgggtggatcacgaggtcaggagatcaagaccatcctggctaacacggtgaaaccccgtctctactcaaaatacaaaaaaattagccgggtgtggtggcgggcgcctgtagtcccagctactcgggaagctgaggcaggagaatggcgtgaacctgggaggcggagcttgcagtgagctgagatcgcgccactgcactccagcttgggtgacagagcaagactccatctcataaaaaaaaaaaaaaaagaaaaaaagaaaatgcggtctctagaatggctccccacaattctggcccctgctgcaaactcagtgaggttcccagctacagagcagccctcctggcgggtacctgtccggctcttccttctccgtgtgacaagggaggtaagggaggtgcaggagcagagagtccacagcgttgctgatggacggggtggggattttgcgggaaggagtcgtcaggagaagctgcggaactcttgcatgggaaggctgtgggactgagcggagagcaggagctcgctcggcacatgatctgtttctagagtgcagaggggccaccccacctggggccatgagctgaggaacaggtgccccggcttccctggctcgcccaccccagcagcttctgctctgtggtcaggaggcctcagtggggaaatgctcttggggcagaaacatgtcctgatgcctgaggaagcaggtatggggcagagagagtgtccggagccacgccaacactcaacaggacgcaccttgggcccgcaccgtcctcactgccgagcccacgtttacccttctcactgctgattccaggatctcccctctccaaccctagatgctgggcaaatccatcacctctgagcctcaggtgtcccactgtggggtgagaccctgtggtcagacctgtgcgggggcgggctcctgcttacagcagtgctgggcccaacatgtcctgcatccactcacggtcagctgacacctttcacttcaggtatcaatgtgtaactctcaagacacggatttcacaagtgacaccgtgaacccctcccagtgaaagatgtggaaatcagcaaactgccatttccccatctcatgtccctatttctgttgaaaaaaattaacattatgtatctttcctagaatgtaagtatttaggtttcaattctgtattaattgcagttatttaatgtcacttttgccagatgacattgctacttctttgccctttgaagtgcccctccccactccagccgcccccagtggccaactaacgctgtggggcctctgcagctgggctgcagcaccctccctgcttctgcacagagcgcctctgagagagcggcctgcagcaccctccctgcttctgcacagagcgcctctgagagagcggcctgcagcaccctccctgcttctgcacagagcgcctctgagagagcggcctgcagcaccctccctgcttctgcacagagcgcctctgagagagcggcctgcagcaccctccctgcttctgcacagagcgcctctgagagagcggcctgcagcaccctccctgcttctgcacagagcgcctctgagagagcggcctgcagcaccctccctgcttctgcacagagcgcctctgagagagcggcctgcagcaccctccctgcttctgcacagagcgcctctgagagagcggcctgcagcaccctccctgcttctgcacagagtgcctctgagagagcggcctgccctggccggccacctcctcccactacctgaacatcagctccagggtgcagggtccatgcagtgcccgctctgcccccaaagagccctctgcaccccagtgaggactggctcttcggctcttgacctttgactcatcaacacacattaacaaaaaaaatccctgtcttgttcagatccgtgctgtccaatccggtagccacacacggctctcgggcaccgcacagtggctagtctgaaacctgacatgctctaagtgtaaaatacatggtggattttgaagacttgaaccaaaaaaaatgtaaagtgtctcatcaatcacgttctactaatctcatgatgaaaggacatcatgtatgtgagagagttaaacgcgccgatgaaaccatccgtgacacgctgtgataggcgtggctggctgtgcctttgctccatgtggagctgacggaccacctcctgtggtcaccctcacgaccaccgtgacgctggacactgtccagggtgacctgtctccaggctgtcagggagggtcacgaccactgtgacgctggacactgttcagagcgacctgtctccaggccgtcagggagggtggggcttccctcagaggccctggcttctccctctctcaccctcagcctgtgcccccgacactgtctggctctatgcactgagagggagctgcctgctgcctccccgaccccacccccctgcactggggtctgagagtgccttggtcctcactcagcctccctgggctcgaagctcttcctcccagcccccaggggaggtcctcctatgacagccggcaccccacaatccatctcctccgcctgtctcccctgaagagcccccagcgccagggacacaaatggcccccagggtctgaccttacagagcccagccgtttcctaggcagcctgcctccccacgcccactccaagagactcactctcctgctcagaagcccttcactggcttcccggctcaccagaggtcgtccaaaggcccctccacagcccgccaggcctccccctcaccacccctttcaggccgttcctgctcacgaggctctggctctacagtctcctttggggagacctcagtgctcccccaccgcggggcctctgcatgggccagtccatctgcctgcccatcccactgctggctccttcgagtccttggggtctcggcttccccagctccattcaggcacggccctccccaaccagcctttctcgcccacagccctgcctccctccctgagcactgagtctctgggtcatccgcccctcagacagaagctaggagaggactccgacctctgccctgggaggccccatgccgcgctccatgcccggggctcacctcactcctatttggtaaaacagccctgagctgctgcatgtggtgatgattatccggaagcgtgaggctttccagatgtcttctccgtctctgcaatacggtttgacggcgtcaataactatctgggggcaaggaggcgtagagttagtttactcctccaattattaagcagaattccaaaagggaaccttgccctggtaccacttcttagttacgtctaagtcatgatttaaggtttttttctcaaaatatctcatacttccttatcaattcagtccatgttttatcaactctagagccacaaatataacacataatcctgcagacccttccccaaaacaactttgtacattttctattcagtttgtttgtttgtttatttagagagggagtcttgctcttgctctgtcgcccaggctggagtgcaatggtgcaatctcggctcactgcaacctctgcctcccaggttcaagtgattctcctgcttcggcctccggagtagctgggattacaggcgcatgccaccacgcccagctattttcaatgtcttttttaaacgcaatatttcaggctgggcacagtggctaaagcctgtaatctcaacactttgggaggcagaggcgggtggatcacttgagatcaggagttcgtgaccagcctgaccaacatggtgaaaccctgtctctactaaaaatacaaaattagctggatgtggtggcacacacctgtaatcctaggtacttaggaggctgaggc

SEQ ID NO: 1562845 - DNA, 4001 bp, Homo sapiens
cgtaccacggggtggttacatcagaggtacctcctcggccatgtaggtgactctctgaacccatccacatcaccagtacagggacctcattcaatccaggtcttccgaaattcctggggccgagaaataaataggaaggcagtcccacactgaaacacttccgaacacacgattaagcctccgtgactggattatcgccttttgactagccatcgcccaattaatgtacctccagtgagcaagcactagaatcgatggaaccattccaccgaaatccatctccagaaaaagattttacaagtgttgtggggctgccactcagaaagccaatttgcaaggagcccagcacggtgaagcgcagtttatcatgcgtggttcccacacagagggcccctgcagactgcgcctggctccagaatgcctccctagcaccacaagctcaaacgcattgaggttctcccctgcctcagcccggccgaatccatcagcaccctccccaaatagtctcttagagccctggctcctgtacaccaagatctggcttccgactggacgtggcagtcagctggtggcctctccaacatcgccctgtgccaggtttctcaccaagttggtttaattttttttttttttttgcaaagtccagtcagattattgacagtgcctgtctgcctgacccgcccccgccccccggcgccgcagatccctgctaacaagtctcccagtgccattcaactcccgtgagccagctccgccattcaacagccagcccacttttgttcccccagtttaatttcataattgtttgccacttaacaagctctcctctgggccattcaatagagcaggggaaatggggagggggaaggcaaagaaactctgggaggggagctgggagccaggccagcccagcactggggaagagacatcccagagaggtcagctggacaggggtgggggccagttccggagtggagcctcctgacaccaactgggccacccagcttgagcccggagaggtgggagggaaaggagcagggtgagttccgaaggccaggccggggcctgccagactcctgggcacatcagtgctctgaatgacacgcctctggccctgccagggtgaagggagacagcatgaattcacgctcccgtaacatgtcccagaacaaacacacaggagacagaactgctccttagtttgggcattccatgatcaacattccctttgagggctgggacctgtctaggtagccactgaatcccctggccgagcacatagcagacaggaataaatatgtgttgagtgagtggatggatggatggatggatggatggatggatgggagggagggatgaatggatggaaggaaatggatgaagtttccagcaatacctagcaaaagtggccactcggccagcgttcgttccctatctcttcccccccaagtgccagcaggggcttggcagcgcacacagtaggctctctacaagcgggggctgctattgttaccactatcatcatcactggcactccaccagcccgctgcttccaccagctactccgccagcagcagcagcgactggcgagcaagggaaaagtttcgctgaccccgcggccccagccggagtcccgcgccctggcggagccccctcccgccgccgcccgctaggcaggcggggcagctggggtgcccagcccgcttcccgcacccggcaaaggcggccaaagtaactttgcgggcgcccctgcgcagcgccgcgggcgtcgcccagcgcctggagagggtcccggccgcgccccgcgcccggcctcccgcccgcgcccgccgcgccccgcccgcctccggtcctacctggccccgggctcctcttcggcggccgcggcggctgcgagcagcagcgcgcaccgagggaggcaggggctcccgggagggaggcgcgcaggggcgggggctcctccggcggcggccgcctcgccgcgcgtccgaggctgcaagtgggagccagactcctccttcgtggggcggggggctccccgcgccccctccgccgcccgcccgcgcgccgcgaggctccgagcctccttggctccccccgcccgccgccgcccgcctccccacgcccgccctccccgcctctccgcgcccggccgccgggaggggcgcgctcgcggcctcggtcccggcccttgcgccgccacccgccggggcccccgccaggcccgccaggcctcggccctcggcccccgcccgggctcggagtccgcatcccgctgcggagggacagggagcgcggccgcgggcctggacgcgggaggaggagcggggcccgcgctgcggaaaagggagggggccgccccactgcgcccggcgcccctcttggcgcccgcccccagccccggaccgggccgcgcgcgggctgggcagggagcggggcgggggcgctctcacctccggatccgtggcctccgcagcgggcaccgcgtgcaggggcgtgcgcggctccttccggggcgccgcagccttcgcccgaggcccggaccccctcctggggccgccggggcaccctgctgtgggcccctcccgcccggggtctggaaggtccccctccggagacggagacactctgaccccagctcccagtctgaataggtcggggtcctcctcctgggccaccatctcttccactcgggagtcacaggtccccaatcccgggcacagcaggtagcctgcagcggccggagccccaacgggatgggtaaacaagtcaggaactcagacggcgcgacacccagtgtaaagaggccctgccttgctgggaagagcagagaccatcgccttcagtgtcgggggtcaccctggggagtttaaggccctgtggcttccagccccttgccgcgggtgggacggggattccagggccttgtatagttagggtgcagatcactctggcctgggcctcccagactgagaggaagatgaaaaggggctgtggctcctcagaggcccaaagcccctcaacaaatgcttgtagggtctcccttcaccaacacacacatcacacaatccccaaggacaccctctgcgggcccctcaggcctattctgcccctgaggactgctatctggtgtggcttcctggaggtggggacagcccagttgaatgagtgtatgccaggagagaaggcctggaaaagacatccaggccgagggaatgcggcatgcaaaggccttggcatgtgagttcattggggctagagacaaaggaaaagcaagggagggaagatgaggtggcaaggctgggagtgagggaacagaagccagatcgggaagagccttggatagactttatcaggggcagtgggagccatagagggtttttaagcagggctgtgacttggtcacgtttatctttttacagcttgttctggcacctctaaagacagaggtagagggggagaggctgggctatggagggagaggatggaggcctggggccctcaggccagagatggggggcaagggctggccgaggagtcctgaggcagtcaccccctcctgcttccttgtctttagaccccaattctctctcagggaatcccaaactcaacccgggagcctctttctcctcctaggctacaggcttcctgagcaccgtgacttcgagggaggtgaaggagaaaactgtcatgcctgcctgggaaggcggcttggactcagtgtctcagcagaccccacctgccgcctgcctgggacaaagccacagcttggctgtggcctctggagatcacaaaggacagtgacaaatgtgccttcctggtccctgggtcgagagcagaggttcctgtgacacttgtcctccaaggccagcttccccaccacctccagtcctaccagaactaccctcaagtcccagagcatcatctcttaccttcccagggtacacatttattgagcatctaccatattcctggcactcggcacttgctttgaagccaag

SEQ ID NO: 1562846 - DNA, 4001 bp, Homo sapiens
aaattagctgggcatggtggcatgagcctgtagtcccagctacccgggaggctgaggcaggagaatcgcttgaacctgggaggcagaggttacagtgagccgagatcgcgccactgcactccagcctgggcaacagagtgagactccatctcaaaataataataataataataatattgcattatttcttccattactctcattggtggccctggaactgccagcagcaaatctaaaatcttagaatttcagggcttggtgggacttcagagatctgaggtcaccctgccccagtctccctgcttgattggcacttctcacaaaggtctgtgggccataaaggagggtgtgaaggcaggctgtgggtgtcagggaggggtagaaaccaggtgcctgtgtgattcagaagccgggatcactgtaggtgagggtgccctgggagtggaggaccccaggacgtaaccgccccaggctcatgtcagaaggatacacagctgcactgaagcaagcgtgagccgcaggctggatccagggtaccccttgaggagcagagcttgggagctcctcttggacctccccagcctggtccctcctgcccaccccctcccccaaccaccagacactaggctttgaggattgctgtgagcattttagaacaaaacctttttttaaaaagagggatgaggccagggatggtggctcatgcctgtaatctcagcactttgggaggctgagatgggcagatcacttgagcccaggagttcaagaccagcctggacaacatggtgaaaccccatctctaccaaaaatttaaaaattagccgggaatggtggcacatgcctgtggtcccacctacttgggaggctaaggtgggaggatcgcttgagcctgggaggcggaggttgcagtgagctgagatggcgccactgcactccagtctgggccacagaaccacagcctgtctcaaaaaacaaaacaaaacaaaaggtcagggttgggaaacagggaaagcttccaggctggcctctgcaaaagctagggaggggcaatggtgtcccccagtttgcaagagcccatggcgagcttttcaggaattttgccaactggttgttaaatacagctattattaaaaattgaattacatcaacttatgattaaacgggctaagttcaaaacaggcaattttttaaaaagcatgaaccttcagggaagagccaggtaaacaaaggcagctggtaccacgtgggcttcagaccagggatcaggcccggcctcaactctgggtgtgtcctccagcaactcgctctgccgctctctcctgtcttagtaagtttctggcctactcctcagggttattgtgggaattaagtcacaccacgggagtacccagcaaagtgccacaccaagcagggctggacaatgttagttcctttcactcactaacaagttattggctagtgtctcttcctggggcctctgggtcagcggggtctcgtctccctgtcctcctctctctcccccgccctctctggtgccaccaggtcacccacttccacccaaggctccccacccgccactcgccacgaccccacccggcaggccgccccaagcggacagtcacccttagtgccaacgtagcggcgcgccttctctcctagactaagccccctcttccgcccaggtcccgcgcgggagccccgcgccgagcacccccaaagagccactccctccccctccagaaaggcaagccgccacgccgcggcagttacccgggtctcggactcccggcttcctggctccgccatggcccccgcggcgcggcgccccctccccgcgcccgcagctgtcccctcctcccgccaccaacctgcagcggaccaaagggaggagactccggcacagcccaccgccgcggccactcggagccgctgctgcccgcgccttccactggccgggccgtgggggtacgcccgctccgcccagcccaggcccgcgcggcccccgcgccacccggcgtccccctcagacccccgcgggtcccggaggccccgcgcgcgaggttggcaggtgccgggcgcgaagcggccgcgcgggggaggcgcgggatggcggcgggcggcgcagggtccccctctggcggtggcgcgatggtgcgcgccgcctggggagctgcggccgggggtttgaaccggccaacttctccagccggccggggcgagcgccagcgcggcgtccggggcgagtgagtgcggggcgggggcagcggccgggcgcctgggccgccggtcgggccacctgctgcccggggaaggatagcgttgcgagagtgggacggggtgccccgggaacccctgatccacctagggcagagggcagcgagctacgggccggactcgggcactctggaggcgggcgagctcgggctgcctggggaggccgcaggcgatggcgtgtgcgcggctcgcggagcttcctagccgtgcgcccaccccctctgccttggaaggaaaggggattctaagcccaagatgccatcgccccccatcccgggcatgctttcattgctctttcctggcgggatcgagtactgtaacttctaggagccagatccccgccccaggaagcgcccctacttggagtcctcggaaactcttgccccacccgcttctgcgctgggcccccgggccggctgggaggggcggggccggctttccagagggaatctgcaaacttatcccgctgcacgccccagcctcgctggcttgctgtaaacaaggaacccgggggagtgcggagggagaaagagcttctcccaggcctcaccctactgcacacaccgacttccttcctcacgcctgtctctctttcctggttcccacccgtgccaggtgacacgcagagctgaagccatggttcatcaggtgctctaccgggcgctggtctccaccaagtggctggcggagtccatcaggactggcaagctggggcccggcctgcgggtgctggacgcgtcctggtactcaccaggcacccgagaggcccgcaaggagtacctcgagcgccacgtacccggcgcctctttctttgacatagaagagtgccgggacacggcgtcgccctacgagatgatgctgcccagcgaggctggcttcgccgagtatgtgggccgcctgggcatcagcaaccacacgcacgtggtggtgtatgatggtgaacacctgggcagcttctatgctccccgggtctggtggatgttccgtgtgtttggccaccgcaccgtatcagtgctcaatggtggcttccggaactggctgaaggagggccacccggtgacatccgagccctcacgcccagaaccggccgtcttcaaagccacactggaccgctccctgctcaagacctacgagcaggtgctggagaaccttgaatctaagaggttccagctggtggattcaaggtctcaagggcggttcctgggcaccgagccggagccggatgcagtaggtaggtgtcccagtgctgggtggtccctggggagtattgccccatggaaggatagggagtaaggatgactgggaccctctccagggtccgtcccatgccttcaatcctcccatgtaggcctcagtctttccatcgataaaaccagaaagtggagacaaacctaaaggctttttcagcttggatgcacaaggacccaagaatgtgtcctcatagccatgtgctaagaagccacctagcatctgtgtgagcagaagtcactggtgacatgtccaccacctccactcccaggcaccagctgccccacatgtactaggatatacctaagggtgtcatgcccctgagccagcgtttgcattgctgtacagaaacctcccacggacacatccagcttctccaggcctctctcgtcccgcagaaacccttatagacatcaacagtgtccctccccgcaggatccccctctccccaaatctagctctcctggggcccctgcctg

SEQ ID NO: 1562847 - DNA, 4001 bp, Homo sapiens
acctgcaatcccagcacttcgggaggccaaggcgggcggataacgaggtcaagagttcaagaccagcctgactaacatggtgaaacctcatctctactaaaaatacaaaaattagctgggcatggtggcatgagcctgtagtcccagctacccgggaggctgaggcaggagaatcgcttgaacctgggaggcagaggttacagtgagccgagatcgcgccactgcactccagcctgggcaacagagtgagactccatctcaaaataataataataataataatattgcattatttcttccattactctcattggtggccctggaactgccagcagcaaatctaaaatcttagaatttcagggcttggtgggacttcagagatctgaggtcaccctgccccagtctccctgcttgattggcacttctcacaaaggtctgtgggccataaaggagggtgtgaaggcaggctgtgggtgtcagggaggggtagaaaccaggtgcctgtgtgattcagaagccgggatcactgtaggtgagggtgccctgggagtggaggaccccaggacgtaaccgccccaggctcatgtcagaaggatacacagctgcactgaagcaagcgtgagccgcaggctggatccagggtaccccttgaggagcagagcttgggagctcctcttggacctccccagcctggtccctcctgcccaccccctcccccaaccaccagacactaggctttgaggattgctgtgagcattttagaacaaaacctttttttaaaaagagggatgaggccagggatggtggctcatgcctgtaatctcagcactttgggaggctgagatgggcagatcacttgagcccaggagttcaagaccagcctggacaacatggtgaaaccccatctctaccaaaaatttaaaaattagccgggaatggtggcacatgcctgtggtcccacctacttgggaggctaaggtgggaggatcgcttgagcctgggaggcggaggttgcagtgagctgagatggcgccactgcactccagtctgggccacagaaccacagcctgtctcaaaaaacaaaacaaaacaaaaggtcagggttgggaaacagggaaagcttccaggctggcctctgcaaaagctagggaggggcaatggtgtcccccagtttgcaagagcccatggcgagcttttcaggaattttgccaactggttgttaaatacagctattattaaaaattgaattacatcaacttatgattaaacgggctaagttcaaaacaggcaattttttaaaaagcatgaaccttcagggaagagccaggtaaacaaaggcagctggtaccacgtgggcttcagaccagggatcaggcccggcctcaactctgggtgtgtcctccagcaactcgctctgccgctctctcctgtcttagtaagtttctggcctactcctcagggttattgtgggaattaagtcacaccacgggagtacccagcaaagtgccacaccaagcagggctggacaatgttagttcctttcactcactaacaagttattggctagtgtctcttcctggggcctctgggtcagcggggtctcgtctccctgtcctcctctctctcccccgccctctctggtgccaccaggtcacccacttccacccaaggctccccacccgccactcgccacgaccccacccggcaggccgccccaagcggacagtcacccttagtgccaacgtagcggcgcgccttctctcctagactaagccccctcttccgcccaggtcccgcgcgggagccccgcgccgagcacccccaaagagccactccctccccctccagaaaggcaagccgccacgccgcggcagttacccgggtctcggactcccggcttcctggctccgccatggcccccgcggcgcggcgccccctccccgcgcccgcagctgtcccctcctcccgccaccaacctgcagcggaccaaagggaggagactccggcacagcccaccgccgcggccactcggagccgctgctgcccgcgccttccactggccgggccgtgggggtacgcccgctccgcccagcccaggcccgcgcggcccccgcgccacccggcgtccccctcagacccccgcgggtcccggaggccccgcgcgcgaggttggcaggtgccgggcgcgaagcggccgcgcgggggaggcgcgggatggcggcgggcggcgcagggtccccctctggcggtggcgcgatggtgcgcgccgcctggggagctgcggccgggggtttgaaccggccaacttctccagccggccggggcgagcgccagcgcggcgtccggggcgagtgagtgcggggcgggggcagcggccgggcgcctgggccgccggtcgggccacctgctgcccggggaaggatagcgttgcgagagtgggacggggtgccccgggaacccctgatccacctagggcagagggcagcgagctacgggccggactcgggcactctggaggcgggcgagctcgggctgcctggggaggccgcaggcgatggcgtgtgcgcggctcgcggagcttcctagccgtgcgcccaccccctctgccttggaaggaaaggggattctaagcccaagatgccatcgccccccatcccgggcatgctttcattgctctttcctggcgggatcgagtactgtaacttctaggagccagatccccgccccaggaagcgcccctacttggagtcctcggaaactcttgccccacccgcttctgcgctgggcccccgggccggctgggaggggcggggccggctttccagagggaatctgcaaacttatcccgctgcacgccccagcctcgctggcttgctgtaaacaaggaacccgggggagtgcggagggagaaagagcttctcccaggcctcaccctactgcacacaccgacttccttcctcacgcctgtctctctttcctggttcccacccgtgccaggtgacacgcagagctgaagccatggttcatcaggtgctctaccgggcgctggtctccaccaagtggctggcggagtccatcaggactggcaagctggggcccggcctgcgggtgctggacgcgtcctggtactcaccaggcacccgagaggcccgcaaggagtacctcgagcgccacgtacccggcgcctctttctttgacatagaagagtgccgggacacggcgtcgccctacgagatgatgctgcccagcgaggctggcttcgccgagtatgtgggccgcctgggcatcagcaaccacacgcacgtggtggtgtatgatggtgaacacctgggcagcttctatgctccccgggtctggtggatgttccgtgtgtttggccaccgcaccgtatcagtgctcaatggtggcttccggaactggctgaaggagggccacccggtgacatccgagccctcacgcccagaaccggccgtcttcaaagccacactggaccgctccctgctcaagacctacgagcaggtgctggagaaccttgaatctaagaggttccagctggtggattcaaggtctcaagggcggttcctgggcaccgagccggagccggatgcagtaggtaggtgtcccagtgctgggtggtccctggggagtattgccccatggaaggatagggagtaaggatgactgggaccctctccagggtccgtcccatgccttcaatcctcccatgtaggcctcagtctttccatcgataaaaccagaaagtggagacaaacctaaaggctttttcagcttggatgcacaaggacccaagaatgtgtcctcatagccatgtgctaagaagccacctagcatctgtgtgagcagaagtcactggtgacatgtccaccacctccactcccaggcaccagctgccccacatgtactaggatatacctaagggtgtcatgcccctgagccagcgtttgcattgctgtacagaaacctcccacggacacatccag

SEQ ID NO: 1562848 - DNA, 4001 bp, Homo sapiens
cagtggctcaggcctgtaatcccagcactttgggaggcaaaggcgggcagattgcccaaggtcaggagttcgagaccagcctggtcaacatggcgaaaccctgtctctactaaaaatacaaaaattagctgggtgtggtggtgcgcacctgtaatcccagcttctcgggaagctgaggcaggagaatcacttgagcctgggaggcggaggttgcagtaggacaagatcgcgccactgcactccagcttgggtaacagagcgagactctgtctcaaaaaaaaaaaaaaaaaaaaaaaagtacaaaagcaacaagaggcatcagggtataaaatcgggaagtgttcctctttattgctgggattcaggtgtgccttgggattacactcaaaagtgaaaataccaaactgttagattagaagcttattactattaaaattgatttgtggactgggtgcggtggctcaggcctgtaatcccagcactttgggtgctgaggtgggtggatcacctgagatcaggagttcgagaccagcctgaccaacatccaacatggtgaaaccccgtctctactaaaaacacaaaaattagccgggcgtggtagtgggcgcctgtaatcccagctacttgggaggctgaggcaggagaattagtttaacccaggaggcgaaggttgcagtgatccgaggtcacaccactgcactccagcctgggtgacacagtgagactccatctcaaaaaaaaaagaaaaatcaaatcctttactatcaagattgactgaatcaagtatctacaaagagtcgagagtgccagatggaaatacctttaatacttgcatcttccccacactctccagggcctccgaatgggcagggaagaggaagggtcatggagaaacagaaacttaagctgtgtcctttaaaacacacaagaatcccttcaaggagaatacttacttcttgagaaactgctcaaattttaaaaattacaaacaacaatctatggtttggaaaatgttggaaaaacagaaaagcatcggcctaaatttaactgagaaactttgtaggctgttaattttgcaaaccacacatccagcattcttgctttgttctctacacatagactgacacctttacccccagaggtcaggccctcgattgagttttacctcatgggaatgagttcccagaaagacaacaatgacgctcgctggtgagtctctctaagctgcgtctgccaagttcccagaagcctgaaagatacaagagtatgtataaatatctgcttctccaggctaggcgcggttgctcacgtctgtaatcccagcactttgggaggccgaggcgggtggatcgcgaggtcaggagttcaagaccagcctggccaacatggtgaaaccccgtctctactaaaaatacaaaaattagccgggcgtggtgttgggcgcctgtaatccgagctactcgggaggccggggcagaactgcttgaacccgggaggcagaggttgcagtgagccgaaatcgcgccactgcactccagcctgggcgacagagcgagactctgtctcaaataaataaataaatatctgattctctcccacttcacaggaaaataaaaaattgcaatgctcccaaacccggggcacttctaactacttgatatgacagcaaggtcaacgtggaaggtttttcaaaatctttcgttcagaccacagaggacttaagcaggaccgctgctcgccagggtgctcagattttcatgcataagagtcacgaccagatggctcatccctgagatattcgtggactgggaggcgagcagggagcacaggcgagtcctggcggacagtcgcgaagaccccgcacgcgccctgggcactccgctatccggccagcgtccgcactcacccgctagtcgggcgcagggctagcgagatacttcgcagcacggaggccgtcatggctaccctcgccgcttccgggcgtgcgcccctccacagtccggcccgcggtgccccctgctgaggtccggcagaccaggcgcccagcgctcaggcgttccggctgcgtgggctgggacgcgcctgtccccgcccccgacgcagccccgcctagggtgtcagctgcgcacacacgagggccttgcgtttcacgcggctcggggtcctcccttccgtccccgccctgtgctgggagcgcgcctctgcagcgggcacagtctagccagtcaggccctagccggttggtcggtctgcgccctcgcgcgggcctcggctccgcagtgcagccggagcggccgagggggcgtccctctgctcctccgagtccaaatgttcatgtctaggcaaacggccccgatcttctaataaacgcgtccgccccagcctcccccaccagggttggctcgtcccccgcattcgttcgagtccgaagcccggatcgcattccggcgccggcgcggagcccggcgctcgcaagatgcccaatagcgcgtgttgatgaatgacggaagctagttaataagtcggactcagactggcgaggcagagctggtgacgggcggtccacgccacctgggccccgcctgcctctgcgggcggcccgggttgcaactgcaggccccgctcgctgtccgccgtccaggcgaaccgccctttctggggcgcccgcgcccgggcccgacccgaagcccctgccagcggaggagccggggcggcccagtccgcgtggggagcggtttcccgccggggcgatttggcaggtgcgcgccgtgacttccggcgttgcccgggagccgcctgaggaggagcggcgcaggggatgcggctgtggtggcggcggcggcggccgagcgcgggtggcggctgtggcggcggaggggggcgcgggccggcgatggcgcggcggccctgagggcgcggggcgggcggcggccggagggcgggtggcgcgggaggaagcggcggcggtggctccatggcccgggcgcgctgagggacccggcgctcgcctcagcccggcggcggcggcggccgaacaatgaagctcctgaagccgacctgggtcaaccacaatggtgagtgcgcgcaggggtcgcgggaggccgagcccggagtcgggtcggggtctggagtcgagtcggggcgcgcgcaagtcctgcctgtctcgcccctgacgcccggtacccggtgcccaagccaagaagccggcgggagcggactttgtcctcagcgcggagaggctggtgagccccagcacgtgctccgggttgaccgcagcgagggccatcttcgcccctggctcttgctctgagtcttccgctgcccacctgtggtccttggaggggccgcggcctggctcccaggagcgggccttggtgccagccagtgccttccactggtctgcatcgcccgagaagtgctcagacggtcctgaaggtgaaaccgggatgaaatcccccttgtggcctttcagtggcaggatgaagatccgaaatctgcaagagggactgttactgcccctctggatctggggacagtgcccccagttggggaattgtggtccctaaataggagggtttgggggccccgggcccccgcgaaggatccacgattaatgctgagctgggacatcagggtgaactagggttgggcagatagggcacaggtgtgttctagcagaggggcttcttagctctgtggcagtggctccaaagcacacccttggggaacggactcatccaccccatatcttgactctgatacagagaggctagtggtaatcagtttcgtcatagttctgccttgttggcagaactgctgcaggagttggtgtttgctccccgggtagatgaaaaaagcgcgcctccccctcccccaccccactctgctgacagcactgtagcacagaaatcaacccagggagactcctccagcccagggcctgattctggcctgtctgactgttgacaggcaaagggtcaccctgatgctgtcttgttcct

SEQ ID NO: 1562849 - DNA, 4001 bp, Homo sapiens
cacccctcttcttttattgctaaagtgcctgccataccatatgacaagggtacaggctgtcctttctaacccaggagccaagtgccagccttgtccctgctattgctccagcaaagtgggcataccccacacttcacagagtctagctctacctggagactggatgatccactctcatcactggagagtggatgatccctgaggccaagaaggtacccacctgtcaatggggtggataatgatggggatggtcaacagcccaagcgcggtggtggtccacttgcggacagccaggggccagcgggtggcagtgcccaggacatagagagaggcagcacacacgcggttgatggtgaagcccggaatggccacagaggctagagcctgccatacaaaggtgtccaccacagccacagtcaccctggcgctgcggcctgcttcagggctgggcacctggtgggcgcagagacacttaatccagctggggcagaggcagaaaatcctgcgacaaggggcacgaggctagaccgggaggggcaagtggccagtggacttgtccgcacccaggagtggggtacagtctgccacatccagttcggggagtgggagtgtgggggcaggggtacactgtcctacaaacaggactgtctatggactgcactaggcaaggttgtagggactggagtgtcccacagggactttatcacatgcaaggctgtggactgaaccacacaagaagagagctagggttgggggttggaaaataggctaacactcacctctccagccttcttgcctttgtcaatggcatccgccagcacgtaggagctggccacgccatagctcagccacaccaccgccgctggcacaagagagcggaaagcctcgcccacctcattggcatagcctgggggagggaacatttaattcctaggctcgcaactgttccacgagggggcgttggagcaggctggttctcatcctagccagctaagcagtccctgggtgaccttaggcaagtgacttgacctctctgagcctccctttccgagatgtaaactggtgccatgatgcccacctcggactcgggccactgagggcggactgagcactgagtcactgttaccattgcttattggttagatttcctggtcttggtcccaggagtaactgcactaatgaggtgacaggcacccagaggggcagagtgatcgagggcagcgccactgaccagacgctcgccaagtgccagggctttctgcgctttatcccattccaccctcgcaaccaccacccaatgagagaggccctcgtgtgtatctcgtttgttttttgttttgtttttgtttttttgccgaggaggaaactgaggttcagacagagccagtgcgtgtcaggaccgaaatgggagtggagatcccgactccacagccagccagagcgcatgccagagcgggcagcccgctcaccccatgggagcttccgccctgggcgacccaccagggtagtgtgaccttgggcaagtccctagccctgtctgagcccagtctccggcccaaaagcagaatgagaactaagatcatcccgcctcctccaggccccgggcgggcgtccggcgacccctgcttctccagcccagtggtggtggggtcgccgcgcccgtcgccccgcgctcacccaggtatcgcacccacgtgtcccggtagagatcgcgctctgcgccccgcggctgcggctctgacatgactctcccgccacggccccggccactacagccggtactggctccactgcagtctccgccgccggcacttgggtctgcccggccgggacccgccgaaagtcccgcgccgaaggacaggtcaggaaatctccgccagcagggagcgtctgcaaattccccccgcgcaccgaagcccctctcccaggctcgggttttacagactggttttcgtcacgttttctctgagctgttggcgctaatcgctcccaggactgagtgtaggttttggagccaaagagacaggggatcaagttgggggatgctacactgcaaagcttgtgacctcgggcttatccagcatctctttattcatttgtaaaaacgagggagggacacaggctgggcccgttggctcacgcctgtgatcccagcactttgggaggccggaggcgggaagatctcttgagcccaagggttcgagaacagcctggacaacatagcgagacctcgtctctactaaaaaaaaaaaaaaaaaattaatgtaataaataaaatggggaacacaatagtgtccactccctaggatggttccgaggattaattataacagtcaccatttattgagtttattgccagtctacatgttcgctaaaggactctccatgtcttacacctgaaaccctcccaccagcctgggagcccgttttacaggtgagaaaatggaggcacagagaaggtgggtcattttcccagaacacacagctgctaagtggtgaagttgtgatttgaatccaaacagtgtggatccagatcccgtgctcttaatgcgagctctaaatgaggctagaggagtgaacggtgagcccctgggaggtaggtgcctggactctggagtcccttctcagcagtcgccatgtataactaggaagcactcgcatttaactggatcagtatgtccccagactgagcttcttggggacaggatgttggatgaattaattaacgaatgaatgaatcgggcaagggagacagagttggggttagtgattacaacaggaggaagccttcccccgctggacctcagttcacccaggtgagcaatgtgtgcacttcactaagtctctgtgactccttggcgggtataattgagcggcgttggagacaatcctgggttcaaatcctagctgtgccgcctactggctgttagcctccctgagccccagttcccacgtctgcaaaaaaaatgagagtagccaacattgacgagcacttacttataccaagctcttaagcgctttgcacggcttatttcctttaatctttgcaacaacccaaagtgtaatagtaagcacagggtttttgcgtgatacccggtaggccttattaagaattagctcttattttcatcaaaggtagagaaaatgagtaactattgaggcccccgctggctccctacggaggcccccgctttcagccctaggcgcctctgtcttgtagggctgtataggacagtccggtcagcagttacctcaagctgagctgggcttgtaggttggggagggtggtgggtgggagaaaagttgatggggaacgcagcggttcccaccccctgaaacaccggcaatgctggcgtggaattattagacagtccctaaaaccacgtgatcgctgctcctccgcctccctctcattctgggcccagtgctagctccgcaggcgctcgcccggactcacacttggctcgcacgggctacgcggcacgtactgagcagctggcggggcagggtctccgccgtcactgtgaaggccgtggggagcatccttagtgccctgatcaaagatggcggaagacaacccaccagctggaccaatcagaaggcaagctgggcgtggccccttgggaaagctcacgctagagagccgaggaggatttctgcgcatgcgccctatctattggcgtgaaacggctgctgggtccgggtccctgacgccgtctgagtttgggcctcttgagtgagaggcagcgaggagcctagcggtgggcattgaatttcactccctgcgcactgaacgttgctttattcattggttaattttcctaacagcgttgtaaacccaggccgggatgtcctgagcgttctggcagaggcccgtgcagcctcggccccttccggtccgcgctagcctggcctttgccctgagctccctcagcttcgcaagatgagcttcccagacggggccggggcctggctctgagggaaaggcgttcccgccaggt

SEQ ID NO: 1562850 - DNA, 4001 bp, Homo sapiens
tcctgcatgagttcgaggaatttaggtagtccataatatttctaatgaccagccttaaactagacaaccactgaagaacctggcctatgagctgagaaactcagggttttttatggctggtcattaacgacaagcggggctgtaccactgtgctggtcacttgaagttctctgagtcacctgaaaatgagggagtaattggagccaaaagaggtattcataggcagccaatctaaaattctagaatcctccaaatttaatttaatatcacatactatactgggtttactcaaaacagtgtcattctggctggcggcagtggctcacgcctataatcccaacactttcgaaggccaacgcaagcggatcacttgaggtcaagagttccaggccagcctggccaacatggtgaaatccccgtctctactaaaaatacaaaaattagccagccgtggtggcgcacacttgtaatcccagctacttgggaggctgaggtgggaggattgctagaacctggcaggcggaggttgcagtgagcagagatcgcactactgcactccggcctgggcgggagagagagattctgtcttaaaaaaaaaaaaaaaaaaaaaaaaaaaaagtgtcattctgtaagctcttctagcctacccaagtcataggccctataaagggaagactttctgcatgccatcaatgtctcctgtcctactgaacagccctgaatctgaaaggggaaggtccccaccacctctccatggacaaatcacaaacatttcacattgaaaaaaataataataatctcctgtaattcaacccaggcctcttatggcattaccattcacatatgagaaagttgaaccttaactagaaaagtatatggttttggggttttgttttgttttgttttgtttgtttgggttgtggaaaaatagatgtcagaatcaagatactacaacagtaagaatttaggcctgggtctggaaaggacatttgaacatcaatatgtaatagcagtccatgtccaaaactcacaagtgagattatcaaattccaggggagtctattaatgtggccaaaaaatctaccccataattttgacataagttttccagtccaaaatacaacctacagtatcatcttatgggtccggaaatgccatacatcaagcaaaattactaccggagaaataacactgtaatcatttgcggagcagtctgaccagggttccctcagttacgccaaccgcccccaatcatcctacccacctaagtactaccaggtcagggggatgccctgctgcacgatcgggcggtcactcctcctttccacaaggcccaggcccgcaccgttcgccccggggctcccatggcccctgacctccagtatccggcaacgatggaccgccacagacccggcagggggcgaagggcgcacacccacctcccgggagttcgtgggaataactccgggcgctccgagggtacgtcccacacccagagccgcacgggcccatccccgccaggtctgggaaggcagcccgagcccgggaccccgcctcccccgcatctagggtccgggccgagctcggccgccgagctcccattcccactcccacacccagcgcctccccctggcggcgacagccgccggggacgcccctccccgggccccgcacgcagtccccagccctcccagggcgctgcctcctcagagggtgacagccgcctggccagggccggggccgaggccggcccctcctccagctcttcctcacccgccgaggagacggaggacggggatggggttcttaccgggcagcaggacatggcgaggccctccacggcacagtctccccctccgccaccccaccaggctccctgccagggccggcgctgggcagcgcctgagccgctgggacgtctcgtccggctgctactccgccgccgccgccgccttctcacaaccacaacaacatggcggcagcggccacacagagcgcgctcccgacgccgagccgggcgacgagcgaggacgcgcgcgcacgctcgggcgctgagcccggtgtccgggaaagggggcgggtctccgccggttggacgggggcggggcctggacaggtggtcacgccccaggagatgggcggggctgcagctggggagaggctcgcgaaaaagcccagcggagcaagaatggctagacagatgggaaatgggtggaggaaaagagatgacaaaaaaaaatctggaagaaaaccaaaggtggtcctacagatttttaggaggcgtcttttccaagctctgtaaccctgggcaagacatggctcactctacttaccagaaaaatagaacaatagtggtatcttccacctgcaattgtggtcaggataaaaccagtttaatataatgcaagtaaatatagtgttttagaagttgtattcagaatacaatttcttttcttttcttttcttttttttttttttttttttttttttgagacagagtctggctctgtcgcccaggctggagtgcagtggcatctcggctcactgcaacctctgcctcccgggctcaagcgatcctcacacctcagcctcctgagtagctgagactacagactcacaacatcatgcccggctaaattttgtattttttgtagagatgaggtttctgccattttgtccaggctgatctcaaactcctgggctgaagcaatccacccacctcggcctcccaaagcgctgggattacaggcatgaaccaccgcatccggtccagaatacaatttcaaactgattcaacttcagctcctaatcaaaagctcagcgggaagaagtgagttttcaaacaaagtaaaaaacaactcccccaaaaaattgtaacctacccacactagcctgcagaattccacaaaccaggattgcattaccgtaggccctaacagattcacctcctctgagttgccttttaacattctacccttgacttttctggaaactgggagaactagtcaaatgaaatctattcctgcgtctgttgtaaagtttttccacagcactttctgaaatttattttcaatgtttactgtcattttactccactaaaatgtaaaagctacttgaagataaggatcttgtcttgttcgtcactgtttccccagcacctagaactgtgcaggttaagtagtaggcagtcgaatttcttgattaactaacagctggctgggcgcgggggctcacgcctgtaatcccagcactttgggaggccaaggtgagtggatcacctgaactcaggtgttcgataccagcctggccaacttggtgaaaccccggatctactaaaaatacaaaagttagctgggcatggtggcgggcgcctgtaatcccagctacttgggaggctgaggcaggagaataacttgaacccgggaggcggaggttgcagtgagctgagactgcgccaccgcactccagcctgggcgacagagcaagactccgtctcaaaaaaacgaaactaaactaacagctaacatttattcatacaactcatctaattgaatcttcacaactttaataggtagatgccattatctccatattacagatgaagaaagtgaagcacagaataaattgcgtgtattaaaacaaaattcaaacccagcagacaaaaaaaaaaaaaaaatactgtgctgtcttacccaccaggctgtactgcccagtgcatggacacagtagcctgaaataaaatctcaagtaagaaattactttaggccgggcgcagtggctcatgcctgaaatcccagcactttaggaggccgaggcaggtggattgcttgagctcaggagttcgagaccagcctaggcaacatggcgaaatcccatctctacaaaaaataccaaaaaactggccaggcgtggtggtgcacgcctgtagtcccagctatttgagaggctgaggtgggagaatggcttgagcctgggaggcagaggttgcagtgagccctgat

SEQ ID NO: 1562851 - DNA, 4001 bp, Homo sapiens
gtaaactccccaagggcagaggcagggccccggggatttcacagggcagtctggctcccttctcccaatccccatgactcacagtacctttccggggtccctgtcatctctacctcacgttagactcatctacagatttgtctcagttctcccctaagtgcccatgggcacgggccaggtcttactcaacctcccacccccccaccacctggcagagtccctggcacagagagggcagttaaatatttgctcaattacacatctgtgtccccttcccccacacatagcagccttgtatataaactgactattattaattgagtgattgtctcaaaaggcctccctccttaccaaaaagggactcctaagccatcaggtgagccaaacactggcccagacagtgtagttagaatggccacagtgctgcgctgcacggagaaggagctaaggctctcttccctttccacggttactcatcagtcactttgaaatcctgttaaacccagaaaagggcgcagtgaaccgagaagtggctgggcctctcaactgcccggtggagacagccgcctgcctctacgacctgggacttcccaaggagtcttctctccacaccggctgggtggggccgtgcgctcaccctgccccccaccacaggacagccggcaagctagtgctgggggtgctgagtctcagtttgaaacagcggggcttccctggagaatgagggtgccgcagtcctgtctcctgtgcgtggccccagaacaggatggggtgaggaccccagcacagggaagcgggtgcgtggagtggagaatagaaaactccgatttggctcaaacaggaaagatgcaatcgcccaggcctgctcgtaacggcagagctagctgcccccgcaccccgcccagacgggatggcccctgggtgcggtggaatcaggtgcacgcctgggcggccccgacggctgctgcattccgggcctccctcccccgaggatcagaagtcggaggtcgagggctggagcagggactgggggtggcccttcctgtctcgcgcccgggtccccgccgggtcccccttgtccgggcagccgccgcacctcccccgggccctccccgaccagtccgacggcagcgggcgaatgaggaagtcggccgcggaggcggaaaccgggccgggtgcaaggtctgcagcgggacggtccgactctgactcaggaggacgccctgacagctgccaaacggtgcccgctgcccgttacctccgtgcctcagacgccagaaacttccacgggagcggctgccccgggctcccaacccgtgaggctgcgtcccaggggccgcggctcccggaaggggttaaaaagtttgcccgagtcgggcctgggcgaggcgagggcggggcgcgtgccccagcggctgggggaggtcggctccagtgcccagtcctgagaccgcgccgggggacacggggggcgccggggagcgccgggtcccgaggccgcccctgcacccctaggcctcgctgctgccggcgccctccccgagcgcccgcgtgggggtcccggtccccctgggaaggatgcggtgccgggccctgagccgccggcgttcgcccccgcccgcgcgggtggcgggccgcactgagcccaagaaccaccagtcggcctggcggcagcgcgtctcgcccccgcccgcccgccgccgcctgcccggggcgggaccgcggtggggctcgctcacctgaacctggatctgccccgggaacaggcgctgcttctcccgagaggactttctcgagcgctcgggcggcggccgggtggggcgagcgcacgaggcgggagctgcagcaggtcagccttgcttagccttccgtgccctgcccaggaaccgcggtgatctgcgcgcctcaccgcacccagctcggctcctcgccgccttcccgccccgccctcggagccgcgggaccattcccagccgggagccggctccggggcggagcctggggcacaatcccgcccccttcctgctacacccactgcaggccgcgcctggccttgatgggcagacgtattggcctgtggaaagggggtgggcggagcctctgcggccagatgggtggggattcaacatcctctttccgccccacctccacccgctccaccttcccccgcgcttcctaggcgggagccccgccctctagggcgggtccaacggacagccaggttctaggacaaggattgacacagggggaatccaatcaggaggcggcgactcggggcgcggagagctccgggccggggttttggtgccttgcctgggccggggcgaggccctgcgggagccgactgggaaggtctggaactctgacaccccgccccgcgagctgtgctctcagtctcatgtcatcccaccacaaggacagatattaagtaccatatatgggaaaaatgctattttacataattatgatccctgtgggggcgggcatggactcagccctggattccattgtgagcgtcttgagttcgattcctgaccctgcctctttaggatccgcacgttgctgcctttcagcctccaaaccttcgctctggccgttctctccacctggaatacccttccgagcctctcttcacctccatgtcattaactcgcatacatcctttcaggtacttgttacaaattgcactttttttttgttactgtccactacaagaggataaaaaatgttttcatttttaaatgaaaaatcttttgatccatttggaatttatttttggggtaaggaagaaacctaagataatttttgtaatagccacttgtccaaacactgttttctccactgattttagttggcaccttcatcgcctatagaactattatacttgaagctgtttctgacttgtatacattgatctctctgtgtgcacctgtgccaatcccaccatgctttaatgaagatacctttataatacattctatatctatgagggcaaatttctcatcattactctttcttactggaatgtgcttgctatcatgactattcttccaaattaacttcagaaaaaagctatgttctaaaggcaaaagaaagctgggaaaaaaagattttgcaactctgtgacaaattactatcagcaatatataaagatctcttcccagttgataagaaaaacctcggccgggcgcgtggctcatgcctgtaatcccaacattttgggaggccgaggcgggcggatcacctgaggttgggagttcaagggcagcctgaccaacgtggagaaaccccgtctctactaaaaatacaaaataattagccgggcatggtggcccatgcttgtaatcccagttactcaggaggctgaggcaggagaatcgcttgaacccgggaggcggaggttgcagtgagcagagatcgtaccactgcactctagcctgggcaacaagagcataactccgcctcaaaaaaaaaaaaaacaaagaaaaagaaaaagaaaaacctcaaagactccaaaataaaaatggccaaaaacaggaacaggtgattttaaagaagaattataaatggccaataattatttttaaaaagccataagaaatgcaaacaaaacaacataaaatgccattttcacctaattaaaaaaaaaatgctcaatattggtcaggtttatagatacagatgagaaagtaaattgatcaattctatctgagaattcatcttaaaagacattagaaaagtacacagatatgaactttaaagttctttgcagccgggcgcggtggctcacgcctgtaatcccagcactttgggaggccgaggcgggcggatcacgaggtcaggagatcgagaccatcccggctaaaacggtgaaaccccgtctctactaaaactacaaaaaatagccgggcgtagtggcgggcgcctgtagtcccagctacttgggaggctgaggcaggagaatggcgtgaacccgagaggcggagcttacagtgagccga

SEQ ID NO: 1562852 - DNA, 4001 bp, Homo sapiens
acgttttccatgtttgtgaaacatggaaattccatgagttttgacagggcaggtgctgagcaacagccttctgtggttttgttagctcaagtgaaaggaaaagctcttctccaatttgggtgggcaccagaaccacctgtgaggtttaaaatctgtggatttctgggccccttcccccaagactgttcaaaaggtctaggatgaacccaggaatctgcattttaaaacagccccccgcctcctgccccacatgagtctgatgggtaggtcgtcaacgaccgtcacttcaagaaaaaccttcctggatgctgaatcctaggaaagatcccagaggtggtctagcccaaccccctcaggttttagaaggagaaactaagttccgactggggagagtactcatccaaggttacagagcccacaccaggatattcaaggtgaccaggcctggaggcaggtgacatcaaatatttgttgattggtaacatgcagcccttcaaaagccaggagaccaggagactccctctcctcctcctcttcctccttctcctccctcctccacccacttggccttttcttttggccttttcctttgctattattcttctcctccttcttctctttctcctcctgcttttttcctcctcctccttctcttcttctccttctcctcctcctcttccttcttttctctctctcctctccactattattttctagaactcatccatagcctaagagtatatagacccctctcttttctgctcccaaggtacacactggacatggtacccaggcataggagaatacaacttaggtcagcaatggatacagcacccaaggccaccattatccttgttggagtctagaagccctagtgggacactcagcctccatgagctggtgcactgaatgaggcagcatctttttggacagccacaaagtgaaagtaacagcctcgtcgtattccaggccctacaggatagaagcccagatccccacacttgcgggttgaggccagactggacagcttggagccgactgggagccgactgggctccccattccgggcctccccactcctggcctcctccatggaaaagctgcaggaaggcagcagcccagaggcctgtagctggtgaggtcttctcctctcctgggagagagctccatgtcaaagcatagcccccttctgccccactatggggccactgggacctgtgaatcttcttcattcagagaaatgcctgctatccggggtgccagataagacaccttccctcagacagagctcaaggaaggtggcatgaaattgaaaccttcagccatgaacttccattgcccttcccccaacactcatacatgcttaatttgcagtttaaaaaagaacattaaaattaacatttcgactcaacagcgttgttaacacgaaaggggaagcctggctcttccccgaccataactgaacaccagtgaagcagaaattactggtagttgaggaaaaatataaaccctgacgtctgcgggcaaagattcacagtggagattaactcatgattctaaacacatttttaaaaattattagcgaacagctggggcctgaggagagtgattcttacgaatgtccatttgccccagcattttgttctcaaatccttccaccgaaacactcttgttttcaaagtgagcagcacgggcaacaggcaaaggaatcaggcctcggaagctctcaacaccagaaaggcctaaaatagaccaaaagaccggaggcctgccaccgcagcccccagcagcgcattccggaaaattaaaactcgccgatccgctcgcaaggtgcccgtctaaaacccagcccaatagtaccttctgcaaagaggacacagatcacaggaaccacgactgtctaagacgtctccccgggtggccgcgaagggaccccaccgagccgggaaagcaggagcgaaggagcaccctctccacacacaccgacacacatcccttccccttactgcccctccccgacccgtcctccccccaccctccttctgggccaatgtgatagcagcagctgagtcgaccagtcatttctaaaattagcttgtgagctccaggtctggccaggagacggcagcccggggtggccgttgaccaggcagcagagaccatggacatatttggtggcccctgagcagggaaggggacagctctggacacaagcacatgctctctcgtcatccctgtcccagggcagggccacacacccacactcccgcctctgcccacacagataaccagaggttgcaggaactgtttgaggaggagagctggccggttctacattccaggcagactctggaagaaaataacttgaatgaatgctggtgcgtcgtggtaaacaaccagtgcatgtaaacataccttatgcttaggtagtggttatcgcatgccacacaccgagggctttcatgaactcacttaatgttccctatgaggtagggtttttccccagccccactttacaagtggggaaattgagacacaaaaagttaaccaacttgcccaaggccatggagagccagaattcaaacccaggctgtgcgggccgtagaggaaacagacacaacagcaaactaggggctataaaaaagtgctttgggcctggcacggtggctcacgtctgtaatcccggcactttgggaagccgaggtgggcatatcacgaggtcaggagattgagaccatcctggctaacacagtgaaaccccgtctctactaaaaatacaaaaacaaaattagccgggcgtggtggtgggcgcctgtagtcccagctacaggcggagcttgcagtaagccgagatcgcgccactgcactccagcctgggtgacagagagagactccatctcaaaaaaaaaaaaaaaaatcagctgggtggggtagtggttgtctgtgatcccagctacttgggaggctgaggcaggagaattgcttgaacccaggaggcggaggttgcaatgagctaaggtcacgccactgcactctagcctaggcgataagagactctatctcaaaaaaacaacaacaaaaaaagtgctttgtccactgcctaaaaggagcaaagtacagacttcaataaattggataaaccatgcaggtccatgcagctagcaaagggtagagtcatgactcaaatccaagtctttctggttccaaagaccgcaatcagcccagcatgatactgctcctgtgagaattgtttcaataattgctatgtggtgctgctcctctttccccagagctcatcgagcaatattttcccaaagtactcacttctgccgaggtcttgaaaattagcattcaatcagaagttcattgaaacactaagggaaggctgcttagaaaatggcagtctaggccgggtatggtggctcacacctgtaatcccagcactttgggaggctaaggcgggtggatcatttgaggtcaggagtttgagaccagcctagccaacatggtgaaaccccacctctactaaaaatacgaaaattagctgggcgtggtggcgggcacctgtaatcccagcaactcgggaggctgaggcaggagaatagctggaacccaggagtcagaggttgcagtgagcagagatggcgccattgcactccagcctgggcgacaagagcaaaactacattttgaaaaaaaaaagaaaagaaaagaaagaaaaagaaaatacaatatacataatatacatgaggttgaggaggggtccctgcggcccccagtggagagtggcatgggacatttaggccacaccaggggaagagtttggagacaggtcccggtgagctgttttctccaggttgtgctagatcatttgacattgaaacaagaacctcccttctcccgccccttgcatcacaagtcctgaaccattggctcctgggcttttctgtccttgctgtctttccgacgctgttggtctgaagtggtagagttgacatgcag

SEQ ID NO: 1562853 - DNA, 4001 bp, Homo sapiens
cttatgtcctaaccttcctataacccccatcagctcctcccatcccatatatagaacttaacagtacagatgctcctaggcctaccacggaactacgttctcataagcccagtgtaagttgaaaatatcacatcagccagatgcagtggctcatgcctgtaatcccaacgctctggaaggccgaggcgagtggatcacttgaggtcaggccaacatggtgaaaccttgtctctactaaaaattcaaaaacttagccaggcgtggtggcatgcgctgtactcgggaggctgaggcaagaggatcacttgaaccccagaggcggaggctgcagtgagctgagatcgtgccactgaactctagcctgggctgtgacagtgcgagaccccatcccaaaataataaaaaagaaaatattatgtcaaaaatgtacttaatacacctaacctggcaaacatcatagctgagcctagcctaccttaaaaatgtggacaggccaggcacggtggctcactcctgtaattccagcactttgggaggccgaggtgggcggatcaccgtaagtcaggggttcaagaccagcttgggcaatatggtgaaaccctgtctctactaaaactacaaaaaaataccggggtgaggtggtgagtgcctgtaatcccagctacttaggaggctgagcaggagacttgcttgaacctgggagatggaggttgcagtgagccgagatcgcgccactctactccactccagcctgggtgacagagtgagactccgtctcaaaaaaaaaaaaaaaaaaaaagtgcgacaacgcacattagcctacagctggccaaaatcatctaacacaaagcctattttataataaattgttgaatatttcatgcaatttactgaatactgaaacacaggttgtatacgtactgtggtttctactgaatgtgcgtcgctttcacaccacagtaaagttgaaaaatcgttaagtcgggaccattggccagactccaggtctcctgagccccagtccagagctctttgctctctaccacagaccctcaagaggcctcagagaggcttaagaagtaagccagccaggatgggcacccaatcagctcacctaagtgagacctttccccctcgggcctcagtttccttatctgtaatatggagttactgtagggactgtacaggcggttctccgcacatgctgatatccatcagttagggcctctgtgcttgagggagaggaagtgagaaaggaagggcccctttgaaggagaaatgattcccgtatggggaagcatctcctcccttcctgcccagctctaagtaaaagagagaggaacctgtctctccacatacccacattagggaagaagggccaaagcactccttgtagcactcacccctacccttccaagccaccccagccggtgtaggtacctgtcttcagcagcatcgctctggactcagcttccgaggacctgaccagatctggtctgcgtgtatcagctgtatgtgttgggctctggaagctaagaaacgtctgaaaagcactggggtcacggctgcctggctagctcggccgccctcaaccttaggcgtggatcgtacactcggtccccaagttgcccgccccatccccagccatcacttcccggagcttcagttcttccttcagaaatacgaaacaacgtgtcttggatgtcagacctcacaccctctgcagtgctgggagtcccgagggcctacgggccgccttcggccccgcccgggctcagaaaaaggcagccactggcttaaggtcaccaagaaagagcggaggggcggggctgcggccaggctccggacttccagccgggtccgggttcccgccctgggctccccaaaaccgcagagccccctcccaccgcacttatcctaccgaagcgttcagacctgccgccgcttctgactcgaatccggtaacctgataagtccgaagcgttccagtgagggcggggcctcacgaaggcaacccttcgcgcaacctatcagaatcccccctagcaacgctgtgccccgcccatatgggtccggcctcccagcctccctaagcccttccccactgggctcccgccctgcgtgctagcgaggcaggcattggcagaacggactcggggctgtccttcgtggcccggaccccgcgaggcctgtccttccacctctgtggggaccaagagggcaaggatcgtgccaggctcaccgtgggcgctcagtaagcggccgtgcagaggacggttgagggctttgtgcagaggaaatgagagactgctctgaagcaaggcccgcctagtgagctgctaggaaaatggaagtctgggattaatcgtctctacaaggagggtgcgtgggaggcaccaaagcaggcggtcacagctcccgcaaaggcagccggctctccttccccgcctgacgctcagggactactcgcacagactgggctacttccttcttcattcattcatcaagtatttattgagaaactgctaagtgccaaatgctttgttctgggcattgtaggggcagaaaggtgtgatattttcccttactcatcccaaaggtcacagcggacactcctacaaataaaatataggttagcaagagaaaagcataatagattgatttactcaatgttttatgtgacttgagagccttcaggaatgaagacacaaatactcagggaaatctttatttttatgtctcggtttgatgaagaatggacagccctggccgggtctggtggctcatgcctgtaatcccagcactttggaaggctgaggcagggggatcgcttgaggccagacatttaaggacagtctgggcaacatagtgagaccctgtctctacaaaaaattaaaaagccaggcaggtgcctgtggtcccagctactcgggaggctgaggtgggaggattgcttgagtccaggaggtcgaggttgcagtgagctgtgattgtgtcactgtactccagcccgggcaacagaaaaaaaaaaaaaggaataaggaatggacaactgtgtataaacgcgattagacaaaagggaatgatttaatgttaatagctgagtgtggaaacccagcaatgtctgttcagattcggattcttcttgttctctctgtgtggcattccctcctgctgggaggagggcaggaccccttctggaatgagagtcttatgacctagtatcaggcaaggtagatcagagaattcctttatggccaggcccgacacagaaaggtgggggatgtttccagtaatatttgtagttacttttttttctttttttttttcttttgagacagagtctccctctgtcaccaggctggagtgcagtggcgcgatctctgctcactgcaacctccgccgcccaggttcaagcgattctcctgcctcagcctcccaagtagttgggactacaggcgcacgccaccatgcccagctaatttttgtatttttagtagagatggggtttcaccatgttggccaggatggtcttgatctcttgacctcgtgatccgcccacctcagcctcccaaagtgctgggattacaggcatgagccactgtgcccagccaatatttgtagttgctataactcaccttagggaggaggatttttagtttctatggcctgccttgcaggagaaaaacaggagaaagaaggggggcaggagaaggtcagagagatactttgcttctgaggctcttccagtgtcctttggttcaaagtactcagcatgcccaagtgccatatttttaggcatcgctttctgagccccaacagcaccttcactcagatggccactgggtgtctcaaacataacccagaccaagcaccggccactttccacatctcagataatgacaactctcctaggtgctcaagccaaaactgtgcagtcctgcctgctctttccctcactccccacatccaactcctcagcaaatcctgtgttctctacct

SEQ ID NO: 1562854 - DNA, 4001 bp, Homo sapiens
gggcgcggtggctcacgcctgtaatcccagcactttgggaggccaaggcaggcggatcacgaggtcaggagatcgagaccatcctggctaacacggtgaaaccctgtctctactaaaatacaaaaaaattagttgggcgtggaggcgggcgcctgtagtcccagctactgcagaggctgaggcagaatgatgtgaacccaggaggcggagcttgcagtgagctcagatcgcgccactgcacttccgtctcagagtgagactccgtctcaaaatatataaataaataaataaaaacaaaaaagaagattcccaagtgggggcagaaagcatgaagatcttccaccaagaaaaagcttggaggggccataggttgactggttcaaaagaacaagatacaaaacagcccaaaatgaggctaaaatggagagcagagccaggttcagagaaggaaatttgggttttattctgggcataatggaaagccactgaggggttgattttaggcagaaaacagtgctgtggccagattttaatttttaagagtcacacttgctgctggttggagcacgaattggacgggacaaaaacagggataagggaacccaaataggaaggttttacacaaatccaggccagagacaatggtggcctagaccaaataaaatggacaacagatgaattcaagtgatattccggtggtataactgatggaattcatggatgaactgagtgttaagcatggggcttcactatagccacatttagcttttgcttttggttgaacagcggtgtcattttccgagatgggaaaagctggggtttaagcagaaaaatgaagagttccactttaaatatgttaaatgagatgtttgcgtgacacccactagatgtcaagagagcagctggatatgtaaagtagatttggaggaaagatctaggatggagctgcagatctggtagttgtcctaatacaggcaatatttaaaatcatagaaataaatgacacttcagggtaaatgcatcagaagatgacctaggccccatcctgaggaactcaacacttagagactggatagaaaagaaaaatcaggcaatgaaatagggaaaaaaaatcctaccaccatgtttcaaaaagaaaggagtggccagtccaacaaatgctgacttatgtcccttggatttggtagaatggagatcactgctgatcaagacaagaaacatttaagtgtcgtggacgccagactgagctgggctgaggagtaaaaatgaagcgcaaatatggagcagacagcttaacacaggtctagacagggctgtcaaacatggaagaaacactaatcgctaacaggatagagcatggcaatagcttgaaattggtttgaaaatccaagataaaaaattcctctgacatcgtgatccagacctctcaaacacacaagcatgctcgcaataactgcaataaaagcaataatgctttctagtctattccactacgttagagaaacggctggtcaccacccactcaatcattcacggctcgctgacgggtagaaacctgcaatgacaggtccacgctaatccaacaagggatgatttggggaggcagagatggagtttgaaaagaagcagggagcccgaggacctgcgcggccagagcgccagatagccataggcgtggagacggtggggcgcccacagccccgggcccggagcccccgccccgcagccccacccgccggcccaccccgcgtcactcccccgccgcccttacctcctccagatactcgcccagctgggccgccacgtccacctcccagttcttggtgaggtcgcggatgggctgcaagaggtgggcgaagcgcgcctccacgtcctccatgtccgggagggaacgggcggcaaagggaccgcagggctgccttccgaggggtacggcgtcctcagcccgccactagttctggcgccattttgctgttcccgcccaggaaaatgcgtaggcgcggcgtcgcgcgcatgtctatgacgtaacgtgggcaaaagccagagaggcgaaccccggcgccgcgcagcgggagctcaccggaagagtcgcggggcggggtcgaagcctccgggaggggggggtgggcggagctttgggctgccaccagtttggacgggagggcttttggggccgccgtgggtcgggcggggcggggtggggcggggcctggagctgccgcgggcgagcgggccgaggaggcggggcttgggggctgccacgggttgggggggcggggcggtgaggaggcggggcctggggcagccgcgggcgggcggacgggccgaggaggcggggcttggggctgccacgggttgggcgggcggggcggtgaggaggcggggcctgggactgccgcgggcgggcgggcgggccgaggaggcggggcttggggctgccacggattgggcgggcggggcggtgaggaggcggggcctggggctgccgcgggcgggcggacgcggagggcgggccctgctctagcgggccgcgtagcggacatggcgggctcccggctcccgcggcagctcttcctccagggcgtggcggccgtcttcatgtttgctttcgcttccctctacacgcaaatcccaggtgaaggcacccagggtgggacacccccagcctcggcgcgggaccctatgtcctcttttctctgtgcccggcactcacgcagtccggggttgggagtgagggccaggccttggcgtggggtagggggcggcggttcgtgtcctgcaggccgctgtgggggtaggaaggtgtgcggtgatccatttcccgtaaggctctggactctgacctggggtgggggacagaactctgagagaggtgggagagaggcttcctcccagacctggtgggacaggtaggagatcgggctgagacctggaagagggcagtgggctctgctgggtgggaggccctgactcaggtagttgagcaggcctctagccctgggacggggttttgacaggtcccgacctgggggacgggctctggagggactgcagactctgacctagggatggaggtatccgcatgctctgacctaggctgggggatctgcaggccctgactcagaggtagtctagtctgcaagggctgtccagggcctggccatgacatgccctcccacaggcctgtatggccccgagggcatcctacctgcaaggaggacgctgcggcctcagggcaaggggcgctggcagcagctgtgggagaccccgacgctgctgtgggaagcgccgagactggggctggacacggcccagggcctggagctgctgagcctgctgggtgcactagtggccctgggagccctgctgctgagcccactgcgccaccctgtcatctacttgctgctttgggccgcctacctgtcagcctgccaggcaagtgggacctgtgaccagctcactctatctccaacccccaccacccacccctgcctctaccttacctgagtccacagacacacccgctccctgacagcccctctctccgcaggtgggccaggtgttcctttatttccagtggtgagtgacggctgggcctggggctgtgggaggctgggtagggggtgggggagggctctgcccttcctgggaggactttccgagggaagcagctgtgtggggaggggctcttggtgctatttgctctccccatagggactccctgctgctagagactggcttcctggccgtgctggtggccccgctgaggccagcctcccaccgcaaggaggccccccagggcaggcaggcaggggccctgccccacgaagacctccccttctggctggtgcgatggctgctgttccgcctcatgttcgcctcaggcgtggtcaagctgaccagccgctgccctgcgtggtgggggctcactggtgaggggcccggtctggacctggggtagtctgggggctcggccagccctgactcctgccctcgcctgc

SEQ ID NO: 1562855 - DNA, 4001 bp, Homo sapiens
acacactcgcacagttcacagactttggagcctggcctgggggaggttttggagcctgccctgggggaggccgaggttggaagaacccttggagggcagccagggcaggttttctggcacctggcacatagtaggtgctcaaaacatgtctgttggaaccgaacttgccacccctaaggcagccctccccatctttggatgtctcaccttggggttctagaaagtccccgctgcgcgaacctgcgccctctccttgtactctctgctttgaccttaagcagaacaatccaggctcgctttcagataagaccttcgaggtacagggagcccccatgcccctagtacctggctcaaggcctcatgaaaagcagtccctccccctctgagggctaaggcagctgaaaggggacagggagtgggggagggagtgcacagtcctgctggtcagctctccgtgtcatcccctgaaccctgtaccccagaaagcaggaagtgcccaagcctcaaacagctgctgcttccggaagattcgagtttgcgtgcggctgggtcccccaggagcatgtgaggggaggaaggaattcaggtcggccagccttacccagctcctgcaccccgctctgaggctcaggaaggccacgtggactcccctgtaggcatttgcttctgctgcccttgccccaacccacgcttcaggttctacttccagccccaggccccaacatgggccttctgttccccgcgtaggcacacaccagcctggcctgtctctggtgaccccctgagtggcctccacgtaggtaacagaggtcacctgctgttccaatccagggggtgcaggggccaggctttgcgtcctcagggcccccgcagcttagagctcagacctggctactgaggaaaaattctgaaaatgcttcccaagcgacgaggctagatgctggtgaggccgtgctccaagccccaaccttgccagtcactctctgtgaccctgagtaagtctcttatcctccctgggcctcagatttccaatctgtacaatggcaaggttggactagaagaatctaagaccttttccgtctcaaagatccacccattcattcattcatttattcattcattcagcaacatttattgagcccttggtcctggtgctcaatagggatgagctacctcctagtgatacagcagcgatcaaaacggacacagcctcgtggagcttgcttctcatgggggagccaacgttcaagaaaaaataataaatgagcatataatattattcctgtaatataagaaccaggcagaaaagggaaatagggcaaagggtcagacagcaatgaggtaggggctgtcaggaaggcttcttggaggaggtgacatttgaggcaagccctgattagcggaagaacaagccagattctgtgaattctgtttgcgcagaagatggaaagtcattgctgatcaccatgtgaagcaaagggccccagcctgggacccaggacacctgcattcctctccagacactgccggtcactcgttgtgtgaccgtgggcaagtcactcccactcttggagcctcagtgttctcatttgtgtctgagggtggtgagccacagctcaaagtttcgttaaagcagttctgagaggttgcatttctgagtatttgggttctgactcaaccccagcctctcatgttgatcagggactgcagaaggactggcctttgtccctaaggcctatgaggagcagtgagaaggcccgggggcggccacaccccggcactcacctctcggcccgcagctgctgggccacagccatggtgggcgatggtcccagggagcaggtggagagtctcgcccagccagtcccaggctgagttcacctctcacttcctccagccaccctgcgtctcgtctcagcctgtggtcctgggagtccccaggagctgcctttggggaggctcaggcctgcttctctccagtctggcagaggctcctcctccaggctctctgggcctagcctgtggcccacacttcctcttacctcacctcccagctgcacagaaattgaggaagtggaccctcgggtgccaggtttgcaggaatccacttccttgatgtcagtccttggcgccaagcctcagttgggtatcagaagccttgctccatcagagatggggtcccagccatcagggtgtcttgtgaccttgaggagtcacttatcctctggcccatcaagccccacctttattctcttactgccaagcctttgcccaaactcttccccaggcctagaatgctggcctccattttcctgtgatctcttaggcccagagtaaatgccacctcctccaggaagccctcctggttcctctggcctctgtcttcctagagtgtgaagtttggtttgcgcgccctggcactctgggatatcctttcctcatccttagatctccatgcccagccaatcctctttcacagggctgccaatcagagtgagtttcaccctccctgcttaaactctcctgccccatcaccctgtgctcaggataaagtccagagtccttgccctgcctgcctccaatgcccctgaggccctgcagccttccccagcctctgctcctgagctccctttttctcactggcctcctttccgtttctagaatgttctaagacgtccgccccaaggcctatgctcatggtgttccctctgctggaaaaagctcttcactgcctcctttgcatctcagcttagaagctacatctttagcgaggccttccctgaccacacaccctaaattaaggccctccctactacattctctcacaggtccctgcacgtctactgcagagcactcataactattgtcatctcacatttgtttgtttatctgtatgtttaatgactgcctccttggctagcagcgtgcctggcacattgcaagtgctcaaccaatattcagtgaatgaatgaaacgctgccagtcagtgactgcagctcctaacaggtatgggtatttgattctgaagggacttctctgagaagaggtccacaggagtcattggcacagccacacccagtaactccctgccagctacacacgctcacacactcgtattcatacatgcagagcagaaagttgttttaaactactttaaacatacaagtcccagctaaaaaaaacaagaaagcataatttttaggtaggatcaaagagaggggtcaggaatctataccagggggagaggaacgtggccaacagcccatgggaaaaccaagattggatatgcattgttgggctgagattttaatgccaaatctgggactaggtacaggccacaggtcctgctgttagcagaaagtcaaatctgagttctcagtgtaaagtgggtgtcagaactgattatgggaacagagtttctcagccatcagcctagagtcacggcaggagctgaggtcctctcacagtccatgggtggaacaagggacgtgtgtaccagatcagcctcaagcctgccctctgcactggtgtaaggccccgatataagctacccacgtggtgcagaaatcctaagctgaggcattatataaaaacagcttggagtcagtgactctgcagggcctactctgtcaactcacagaccaaaactacaaatcgtgagctgtgaaagacagctcagagcctccacatcatgaagaattcacacccaaagaactagaaataatacaaacaataagtctgatgagttgctggtgtctcggggctcccaggctagaggatgaaatgaaacacagagcagggttattagtgcaggtgtctgtaagtaccaacaggtgcaagcacacagccataactgagggaagaggaggacattggcctacagttggtcaggaaggacaggaagtggcaaaacaattttagcaagcaagcatgatacagaatttgtaggtgattgtgtaaactgtgtgtgtagtatatgcctatagttggaaacacatatt

SEQ ID NO: 1562856 - DNA, 4001 bp, Homo sapiens
tggataccataaaacccgtgtggcacaggtttgagtaactggccagctacagatcactgatcttccccatagggatgcatactccttgaccccttcttttctctcctcttcccttgctttctaggctcctgtagccctctgccttcttttcctcctctcaagacccttctgactttgggactttcttcccaaaacagaatttgagggaaggtcttgggaggggtcggtttagaaagagctggatcctcagagtcaggatacctgggttctgtcttctacttggccactgatttacccttcacaagccaccctttttgaatgtggtcctccttcccccagcaccttcctcctgcaaccagagagggttctgggtactcctagaagtattctgccaggcaaacattatgttttcaaactgctgaatttgaatgcaccaccccgaaacacacacacacacacacacacacacactgctacagtcactccccacacacatcttttatctgcctgcccctgaaggcatctgaatttgcagtccctgaaccagcagatcactcaagtttctccttctctagtatcgcgtgggtttaagttctggtcagtagcaatttttccaaaagtcagcttgaagacagggactctgtggagcagacacagttctcatatgtcaaagaaccgggttctgcttggaagctgctgctaaggaaagccctataaataacaaaaataacaacaaaaacaacggcagcagctaatatttaatgagttaaatatgcatcaagtcctgttctaagcactctagatattttaacttaatacagtaaccttctgaagaaggaattattattcccattttaaagatgaagaaactgaggaatagatgaaataactggcccaaggtcacacagctagttgagggcagcgcctgaagaaaagtccgtgctcctaaccaccacattctaccgccttttcacacacacaagcagggactcgacagccctgaggagtggcaccgtgctccagctcactcaaaaacacctctttctcgcactttgggaggccgagacgggcggatcacgaggtcaggagatcgagaccattctggctaacacggtgaaatcccgtctctactaaaaatacaaaaaaaaatggccggcgtggtggcgggcgcctgtaatcccagctattcgggaggctgaggctgaggcaggagaatgacgtgaatccgggaggcggagcttgcagtgagccgagatcgcaccactgcactccagcctgagcgacacagcgagactctgtcacaaacaaaaaaatccaacgggcatctataattacactctgcaactctagactttgggttctgggtacaacagtggctcggcctgggccctgggcacatcacttcacctctcggtgcctccgctgcctcacccacaaagtgagtgtgtcactgacagtcatcgtcctcccgccaattgcgaaggacaaaagagaccaaagctccgatagcacgtacgaatgctaggcacggccggtctgaccaccgcgccgccgccaggtccggcccatggtaggctcgggtgaccctcttcccctgaagcacccgcagtcgcctctgcccaagttggtgacctcagctgggcccatgagaaaccccggccgggccggctacgaccttgagcggcggcctccgggtccccacgtaagccgctacctctcaccagtgttcggcacctcccgataccaggcgcggtagagctcgcgcaccctccgcttggcctcgttcatgtcccgactgaaaatgggcttcacgaaggtgctggcggtagaagtagcttggcggacgccgctccccgccatcttgccaaagcatccactccacaaccccacccctttgcaagcagcgcgtgcggaccgcgggcgaatgtcttttcccattggctaaggaggaacgccccgcctgtatgctgggtgggcgggaggatgactctgaggctctcggattggctgggaagcctctctctggctgagcgaacggtgggtgctgcgcatgctcatctacagaaacgccgcttggcctttggactacaccatctgtcgctcgctctaacgagccggcgttgccgccaggggacgctcgggccgcaggaggtcgctgggtcgtgagctggcgccggggacgccgagcgactgcggggtttccctcagcgtcctgctatccggctgcccgccgcgctccttggtagtgtccgtgggcgcgcaggccttgaagaacctcctcgtggcgggaccccgaggtaactgctgaggcagataatggcgcctgggctgcggtggggcttgtcctgccgcctggcggctttctgcagggccaggatatacttacttttctgtaaaccaactcttccttagcgcaggagaggtgtcaaagagctggcgcgtctccagagccccgggaggaaggctgtaacggcagccccatcgtagacagggacattcgcatcccgagccctggatctctgaaaaccagcccagaatttggaagctggaaggaactttagatcgtccattctgagtgtctctcttcgctggcgttttcccactgaggttatgtaaacatgaagaggagcctacaagtgtcaaggaaaaaacgacagctaaccacagggcaggccatgggcaagatatctcagtgttctccgctctcataggtcaggtaggtacctcagcatccccattttacaggtgaggaaactgagatggcccagagtctaggtcacctgacagatcgcccccacctgcctgactgctgcctaagaggctccgtctttttctgaaggtgtagttgacaggagcctgtgagtattggggaagggccaggggccggggctgagcatctactccaaactttcccatttcgaagggttaaaaaaccagatatactttttttcttccttattatcttctaaaatgtatatatatattcaagtgagctatacaaaagaaagcacgtaacatatataaattataaagcataataataaaatggaagcttttgaacctcagtactgacttaagaagttgtaacacagttaaggtttgtataaagtgtccttagatgtccttagtagccactgttctctagttctctaggtacattaacttggctaggcttcacaacacaccagtgagattgtgttgatatacccttttttttttttttttttgagacagagtgagactcacctaggctggactgcaatggtgcaatctcggctcactgcaacctccgcctctcatgttcaagccattctcctgcctcagctttccgaatcgctgggattacaggtgcgcaccaccatgcatggctaatgcttgtattttagtagagacggggttttgctatgttggccaggctggtctcaaactcctgacttcaggtgatccacccacctcagcctcccaaagtgctgggattacaggtgtgagccactgcccccggctgatatactcattttatagatgagaaaactgaggcacaaagagactaagttactttacagcattggggttgaagcccaggcagctggtgccagagtcagttttctgactctcgcagcacctataccatgatatctacctgtatgattctaaccttgtgtatacccctgcctccttcagaagtacccactatcatgataaattcattgtgttcaacattcaaaaaaaaaatggggcgcagtggctcactcctgtaatcccaacactttgggaggccaaggcaggtgtatcacctgatgtcaggagttcgagaccagcctggccaacatggtgaaacccccgtctctactaaaaatacaaaaattagccggcatggtggtgggcacctgtaatctcagctactcgggaggctgaggcaggaggatcgcttgagcccgcgaggtggaggttgcggtgagccaagattgcgccgctggactccagtctgggcgacagagtga

SEQ ID NO: 1562857 - DNA, 4001 bp, Homo sapiens
aggagtggaaaaggaacagaaaaagctatgcatcaaaatcccagctttccctgctagtgctggcaaagacttagaaaccatccaggtggttggagattctcaactattgtcgatcacagatgcttttggaaaatcactgaagcctctgccctctctctcaaaaacaacgcaaagttttacagacagtttcgtgagacatcatggaactccccggattaagcagcccagttgatctaccctcctctttcaactcaaaaagaaatgaaaaccagagagggcaagtgttggtcaaggtcaccctgcagctgctgggcacagcctcagggcagcgcaatctagctgactcagggctgcaaggagttgggggaggggcagacttgggaggctcccagcttccctaaaggagaaaggggacattaaaacatgaaagggcccaccagccacctccgccacaggcaacaactgactgtagtaatggttccctctaggaagaaaggatgcgaaaaggtcctgacccacccccacgtggaagatttaaggtaggaacgttaagcactgagcaggtagtgggaaggagcctggtaggggtgagaggaatagagtttcttgcggggtgtaggagagggcatggcagcattggcggggaagccttgctacttagaagggctaagagtctccagcgcttgcagaccagaatcctgcaccacttttttcctgtagaggaaacttgtttttttcttgacgggggagggatctcagagtggggtcgcctaagcttggggtagagagcagcagggggcccagagttgaagtacagccgtaaagaacctggaaagggggaaccgaaggacaacccagagttggggcgtcccacaagagacccagagtaaaactgcgatttaactaggggcatgcactttgcagagggaaggtgagcagcgcgccactccacgcgcagtccggcagcgcccccttgggtcacgcagcccaaaagttcgctgcggggtcagcaggggcgcccctccccccacccgcgcgcctgcgtacctcggaaccactcctcggactgcagcgtgctctgcaccgcgtggccttcaagctgcgcgcgaatctcgcgcagcgccgacgtcacgtcgcacttcagggcgtcgcgcgtctcggcctgcatctgcgcctgcgcggcgccggagccctggatctggccgagcagctcgcccacctcttcctggtggtggcgccgcaggtagccgcactcctcctgcagcgcctgcgccttcttctgcaggtccacgcgcgccgcctcggcctcctgcgcgaagcgcgccagcgcgcgggccgccgcctcggcctcctctcgctgccgggcctcgtcgtctaggcgctggcgcacgtgcgcgatgtcctcgagcaggtgctcctgctccaggcgtagctgaccgcgcgccgcgcccaggcgcagcaccgcgccgcgcatctcgcggacctcgcgctcgtacagctcgcccatagcggagcggcccgcctgctgctgccgcagcgccgcagcctcgccctccaggctgcggttgtgcgcctccagctgccgcaccttgtcgatgtacccggcgaagcggtcgttcagcgcctgcagctgctccttctcactgcgtgaggtggccaccgccaccatgcagccctccggcccgttgctcagcgtgtccagcgagtcggtgcttgaggcggcgcctgcgccacggaagcggctgggcgaggcggacacggagctcacggacgtccgtgtccacgagtggaagccgctggaggagccagcggcggagcgcgtcccgcctgcgccaccctttcgggctagcgcgtagtggaggctgccgccgccatgcagcggcgcgaacggggcgcccagcagcgcgtccgcgccgccgaagctcatcatggcctgagcaggtgcgcgaggccgggacggggcgggaggcactgcggcagcaccagggcgccggcccttttatagccgccgcggccgggtccaaccccttggcagtgagagggtggggaggagggccccgccctctccgcctcctcccctgcggccccccggccgaccggctccgccgcagtgagaggggcggggcaggggaccgaggagggaaggggaatcgacgctgcgtcagaggagaccctcgaggtcggggaagcgggcagaggactcccggagtgggccagtgaggacccccgggtgcgcgtcggaagagcctgcgagtgtgttcggaataagaaaggggacttgaaacagggagaggacaaggagaaacctgatgggaataggggcaggatgccctcgggatggagcaatggaagattgcagtcattaggatgaggggatccctgtatgagacaggacacgaggctttccaaatagttaagagaggctttcaggatagggggtgcagagactgtgcagccagccccggaacagaggagggagcaaggcagtcctgaatgggagcatggacgctccatagaacggagacaggagacccctgaccgggggaggtacagtgttctcctaacatctagaggacccacttggagagcgctcaggaaactccgcggccagccccggaatagatgaagggggacctggagttggggagaatagcaaggctaccctgaatgggggtatgggagacactgcagaggatggagagagggaaccccggatgggtggggttggggggaggcaaggcgttctctaaaaagtctgcagtggcccccgagagaggagatgggagaccctgctgccagccccagtaaaggggacggaccctcagcgaagcgggcagaaggtcccctgaacaggcaggagaaagctgggctgagtttgaggggcagagaacctacagtgggggtaccgtaggagggcttgggcatgaagttgagagagctggcccctgtgtggggtggggggaaatgatgggtgtcacccgagccagcttctgcacactggggtcagctaggcagtttgctggtcgaatgaccttggacaagctgtgtcctcccacccttgtttttccatctgtacaacgaaggggtcttgccccagagacaagctccaactcctgacccccgactgccccaggaagttccactttgaggggtctctggctgaactggggatggggaacccacatcttgccgttctgtcaacactaggaagtcctcttttctccctccccctccccatcttctcagcctcaacttgtcctctcttcccccactcctgtaacagacaagcaggcgcctgagtcggcatcccttctctcttacagggaagtgatgagatgctttctgagtaccaaagtccctcaccccaataggatgtcaggtagaagaaggggtccccaggatttagggggccctgcaacggctgtgacatttggctctttattggttttggctcatgttttatgctgtgggagtgggggtggtgctgcggctggcgcttcagcaccggggacagggcctgctctttgttgggcgtggggcggggaaagagattaaccctctgcttttactttaggggaaggaagggagggacactgtgctgaggggacccgagaggggaggcaagtgatccagcagggtcacatagtgagccagggacccctccctggacttcctgtcgggggtccagttccgtgttttctgggctgttcccctcctgcttagggacccctgcgaaaggacccctggggatgctgggagccctgagacgcccttgagagtttgtagactcgtacttccactctgaacctcccccaggcagttatctcaacacccactacacccctactttacgcgggttttcctgctccaggatccccaggacagaacagacatatcccccaggaaagacctctgccagttcctttctctttgccctctgtctccttccagccccctagttctaagcagaccctcagagctgggaaattgatggcgctgtc

SEQ ID NO: 1562858 - DNA, 4001 bp, Homo sapiens
gagtggattgcttgagctcaggagttcaagatcagcctgggcaacatggcaaaaccctgtctttacaaaaattagctaggtgaggctgggcggggtggctcacatctgtaatcgcaccactttcccaccactttgggaggcccaggtcggctggtcacgaggtcaggagttcgagatcagcctgcccaatatggtgaaaccctgtctctactaaaaatagaaaaattagccagacgaggtggcgcacgcctgtaatcccagctacctggaaggctgaagcaggagaatcacttgaacctggaagtggaggtggcagtgagacaagatcgcgccattgcactctagcccggtgcactctgggtgacagagcgagactccgtctcaaaaaaaaaaaaaaaaaaaaaattagccaggtgtggtggcacacgcctgtggtcccagctactcgagaggctgaggcaggaggactgattgagccagggaggttggtcagggttgcagtaagccatgatcacactactgcatgccagcctcggtgacagagtgagattctgtctcaaaacgaaacaaaacaaaaaagaattttcaccagttttacagaggaatgggttccttaagctgtcatgctggaagctgatcttatctaaggctgcttttgtgttacaatggtagagttgaagagttgaataactccaacagagattctctagtctacaaagttgaaaatatttactatgtggtcctgtacagaaaaagcatgccaacccttgcttactgctgccaatgctgctggtccacaaaccacacttttagcagcaagaacttaaattacttgagaagcagtactgtacgggctgtgagcttggttcaaaaccccaccttgccatttactagataaatgggtttgttctgaggattaaatgtgcaaatgtctagcactttgaaaatactgaacaattgatagctgttatcatcatgttggaaactatgtggaaagtaagtatgagatgttatatcgttcttcaaagggttttttttcccagaatatgcaagctttagaaaagggaaacaagtattggctttccaataaacaagacgcaacttctaatacctgggtacataacaatattacctaatgaaagaataaactttcaagcttttaagcgtaagcctaacttaagcctgacactgaaatcctgaattttctatcacaggagcatccagcttcttccaataacaatgaatgaaaataaccttcaggaaatgccaaaacccaaaagtcctatgaaaaaaagcagcaatcatctttaacatgaggttttgggcctagttggcccttccggttctgcccgtctctagctacacccataagatgatataaagagaacctctcgagcttccacctcgactgtcaccgcagcagtcggggctgccggccggttacctcgcaattgaactccatctcggcgtccatggtgacgatcctcacggtgaacgtcttgggttgcttcctcttgagagagctgaagctcatgcgggaagcgatggccccggccatggcgcggggctcaggcccgggaccctcgcgccccacggcctgcactctgagccctttagcccccctggagttgctgcacaggcctcagggccaccatggtggccggctgcccggcccgggaacggtctgggctgcgcgggtccccagcggccagcatgggccgcgaggaccctgcctgagcggaaaggggagttgggggacgggccctgacggctgcagggagggcacaggagccgggaccttcggtgcaggcgcgacccggcactccgggattcgggccggagatgccggggacgcctcgggacgggacccctagacggcagcggcccagactccgcgcgcctctcagcggccgactagggtcacggggccgcgctgcatcgggcgcgtacgcgcgcgcgtggctgtcaccgtcctcactccgcgcgcccgcgggaagcgcaccctccccacagcccggggcctgctcccggccccgccctcaggtcgcccagaccactacgcgcagcgcaaccgaaccggaggctgacgcatagatgctgcgattggctgggaaggccaaggtaggcaggactttcccgctccgtcccgcctcctttggggtgactccaccaatggaaagtttcactctaactgcaaaaaaagcaggcctaggctcggcgttgagtggctacagtggcagtcactctgaatgcttttgtgcctactctaacaagactggttgaggcggcggacctctgctgaccttacccgggaaaccacttagaggctggatccggggcgaggggaattgggtccttcgttggcccagggagggactcttcggttcaagtaggctccgagtgtggcgccccaggggactgcgtttcggacacacggcgaatattcttctttggcagttaatcacatataccgacccctatgaaactttaaagacacttgtggaggcctgttaggtttgctggcactttcccgccagatccctctgcttccctttagaattattattattattgttattattattattattaattattattattattgggacggagtttcgctcttgttgcccaggctggagtgcagtggcgcgatctcggctcactgcaacctccgcctcccgggttcaagcgattttccggcgtcagcctcccgagtagctgggattacaggtatgcgtcaccacgcccggctaattttgtatttttattagagacggggtttctccatgttcgtcaggctggtctcgaacctcaggtgatccgcccgcctcggcctcccgaagtgctaggattacaggcgtgagccaccacgccccgcctagaattattattggttatacctacctcgtgaggttgttgaatttcagcgcactgaatacatataaggctttagagctgagcctggcatcctatgaaattgctgaatttgggttgaaaatgaaagcattctttattttatactctatgatgcccatttttgaaccgtattcatgtattatttatttagtgtcatcaagggttctaacgggtgtaggggggataattacacctttctgtacttagataataaattctattttaaaatagctcttagtagtcaaatagggacaatttactgtgttttttcgtttgttttttgttttgagacagagtttcgctcttgttgcccaggctggagtacaatggggcggtctcggctctctgcaacctccgcctcccgggttcaagcaattctcctgcctcagcctccccagtagttgggattacaggcacccgccaccacgcccggctaatttttgtatttttagtagggacggggtttcaccatgttagccaggctggtctcaaacttctgacctcaggtgatctgcccaccttggcctcccaaagtgctgggattacaggcgtgagccaccgcgcccggtgtactgagttttaacaacaataatcaccccataaatgttagctaacattagcatcacccccccaactccacaggtgaagatactgagagatatgatagagccactcgctgactataatgcagatagtgaaaggcaaagctaggactcaaacccaggtctgtcccacccagagcctgctggttagcactgtgctgccctgcttccaaattctccctactacagcctcaggaaatgtgaattacagttccggagtactcagcagacattgttgctgtaacggtatattaatggaataaatctagttcttctgcacggacccctgctgtgcctggtagcaccggccaggcctcaggaatgatttgctgccacacccagtgaggctgctgtggggactttatgtcctgccttctgctagcaaattctccccaccaaaactgattgctcagggcagtatgggcttggcatgggagtgtcttcattatcattgcttcatttcttccccgcaggtgggag

SEQ ID NO: 1562859 - DNA, 4001 bp, Homo sapiens
ctaaaaatacaaaaattagctgggcatggtggtgggcacctgtagtgccagctactcgtgaggctgaggcaggagaatcacttgaacccaggaggcagaggttgccgtgaaccaagatggcgccattgcacttcagcctgagtgacaagagtgaaactctcaaaaaaaaaaaaaaaaaaaaaaatcatgggtgggggtttgtctgctgctccaagggactctaggacaccgtaagggtgttttcacctcttgtgaaagaacagtttctcttttatgtaatgtttgttgcaataccgggtgggagggggtggcactgggaatgttttgttatagttgagactgttacaaaagagcttttccccagtagcaccccataaaacctcttactgctcggttaccagggtgtgctgggtgtcttttggggaggaggaaccacacaaagggaaaggatgggaattggggggaaattaaattaaaaatgactgtagttgagacacattgacactaacaggctgcatttccggggtctggccgtgtttgcaccaactgtctggggtgtggggcgaggcgtgcacaggattaaaggagatggtgtcctagggctctgggctgcagcctggggaggtacacacaggtcagcctttgcctccccagggtaagtttccggtgaagaacattctttacaagtaagaggatcctctgagcctactggccgaggggcccagcttggggctgaggctggcctggggctgaggctggcctctacttaccggctaggtcttgagcaaacgaactggcttccctgggcctccttttccctgtccttaaaatggtgcaggtgaggacaataggagccccaaggggtgctgtgagggtggccagtacgtgccctgctaagggctccataaagcctaatttgtggtcatgagagggggtgcagcaggacagggtgggggcagctcttgaaagccccataaactaagagaatagaaaggaaggcaccctgtctccacagtggaggccacccctttggccagagggagggttggctgctgcccggccaaggaggggcagagagaatctggcagaattcactgagccctcgtgctggcagccctggaatgggaccctcctgggccgtccctggcctgatgaactggccctgaggctacctaccccacagcttggctcggatcccggccacccagcttccaagaaagcctggaaccaggaaaggagcgccgctggcgtggaaagacacacttgcatcctaaaacacttggcctctggttgtgtttcaggaactgggaggtgagaccctttctggtgactgacagttttgtgcctctgggcgcagagccctgtggctggccctggtatccccccctcccccctctccccgctctccctggccaatgccagcaacaacccagagggtagccccaccacttgccaggttcaacgcagtgtcccccgcagcagccacgtgaggttcctcggatggggagctgtccctcccccctgccccgcccctggccccagccacacagcgcccaccctccttgtttaagggccaggaggccagactgctggggcaaagctgtcacagcagcgagggagagagcgctgtccccctccccttcaaaagccaccttggcaaggcattagctaaacatcttctcggtcccagaaggcttcccctgtgaagtctgcagcgttcaaacgacaaccagcaaatccccagagacaggtccctgggaattagctgcgccgggcgggatgaaagccgctctgatgttctggagcgagagagtagagagaaggaggaagacagacactacctgccagtcgcagggtcccgggcagcagcagcacgccaaggaggagccagggggctgcggggagcccaggagggcgtgggaggcctggcagggcccgccacctcacaggctggttctccatctgggggcctgcttgtctgcggcgactctttagttcacaggaggggacggccggcgctgacagcttcccctttgctttccccacgaagctcctccctggcagcccctgaccttccgctcagaagcaaagctggaacagcccagcagggtggccgccagatgaggaacctggcactgagactggtccaggccacacaaccagaagaagagctggagacgggacccaagcctccccactccaacccctggtgggcttcaccctgtctcggcccctttccagcaggggccccgtccaggagacactggtaactgtgcagagggatcatgggatttccatgagtgacttcgggccttggtttagcctctcacttctgaaacacttttaaaacgaccacaagcatgttcacacaaacttctctaaaatattctgagaatcccttaataatgtgtttaccaaaggtaggttttttggtgaggggtggtagggaggctggggtgaagggcaggagcctcatgttcccagccctagagagggccaaacacccagggcaggtgaaaggcaggctgcccatcattcacccagcgagaacctctgtgggtcccctgcagaggcccaggagacgcctcctctctggtccatctctaacgtcagctcctccctgtggctgccctaaagcttagctcactcggcctcccaactgtgagaccctcgaactgcttccccattggctgcaggtcacagcccctgctctcacttctagcagcatcagccggggacaggaattgtttgctgccgggacccccttccccagcagactgggagcccctcacccttggcacccacacatctgcctgcgtgtctggagtggcagaggaaaggggctggggtgtggtgatggctggtggagctggaggcacctggtacatggaagacgcaggcgggaaggtggctgagtttcagcgcatgctgagcgcttacctcccttctctgcaggtgtcccttcactcaccagataaatgtgatgatcccagttgtacaaaagagaagacctcggccccaggaggcaaaacaacatgcctaggatcagggcaggtctgtggggcgggcatttgaactgccagtggtatgatgtccgagccttctcccaccctgctactgcctgctcaggtgtgtccagctgcagcccccggtgacggcatcatgagatccatttcagttctttgcacacatgcttttccctgggctgctccaaacatgaacagtgaaagcctaaagacgtttccaccaatgccacgagcactgggaggctggcaagagcaggggccgcccaccaggggaggaagacatatgaacaggagaagtttcctaccgcgcagggggcaggcggggaccccagtgttattgactgttgatccatcacagtgatacatgctcacatatgtcacagtgagatgcagacccgctgcttcacgctattcctggctcctgggagtagcaggttgtctaagcaccttgatgccatggtgatagacctcgtgtcaatgcctcagggtacacggggagcattggaaaagcatcggtctgtgcctctacaagtctcattacgacttggcactgggaggcagctgaatgccaaactgcctcggaacaagggagcctgctcttccagccctggtgccgcctccgctcctgcccctgtgccagctcactgaccctacctctcagcctgtcacggtgccccccacaccccaactctgtacctcggactcccgggagttctgccgcctctgagtctgggtctagcctgctgcacacctggtttccacgcttgcctgcctgagctgcctgtcttcctcccctctccttcttgagcctggcccagggggtgcaggaatggacggatgggtgagcataaggcagggagaagccttcctccaggcttgatatgaaggcaggtgcccaacaccacgctggtgcacaagaggcctcaagggaaggggtagcctctgggaggcagggtgggaggaggcgtgcatact

SEQ ID NO: 1562860 - DNA, 4001 bp, Homo sapiens
ccaccgtgcccagctggaaattttggttaataatttatcacaagttttatttatttatttttttgagacggagtctcaaactgtcacacgggctggagtgcagtggtgtgatcttggctcactgcaacccccgcctcccaggttcaagcgattctccttgcctcagcctcccaagtagctgggattacaggtgcccaccaccacgcctggctaatttttttgaatttttagtagaaacagggtttcactatgttggccaggctggtctcaaactccggaccccatgatccacccgcctcagcctcccaaagtgctgggattacaagcatgagccaccgcgcctggccctgttgcatgttttaaaatagatatacttagaaatattacatggaacccccaaagtatgtacaactatgatatgtcaatttaaaaaaactttaaaaattgccattgtttccaacaacccattctctggaaatcaggattctcaaatctcaataaacatcaaattcataaaagaggaagacttcaggaatctgaacaatcattaaatacctaaatgtttcactattagtcaacaaaaaagttaaactcaattttaaaaccaaactagcttataaacactaattgaaacttgcttagggtgtatttatttgcctttcaatttcttcaggggttaaataaattaacgaatgatatcataccaccagccaacctaaatccctacctagcatgatcagtttggtttcgctgtacaccagacagccaaaacttgcaaggttttgattgaacaacaaatactgcgtgcttactctgtaccaagcatcaggactagatgtttaccatgctttatttcatttgatcctcacaacaccctcatgcactgtcatccccattttacagttgaggaaaactgcaaagttcaacctgagaccatccgattccaaaacgtttcagggagctgcgttaaagcgagcactgagtttggaagcttcaagttctaggctcagccacgtactaagcttcaaaatgcatgggaggaggtttgtggggagtgctaccgccgggatccaagctccactggaaggattaactatagaagttacagtgctttacaaattcttccctcctcaccaagtgccaaccaaaactactacgccaggacacacgttttagaactttccctagatgtttaaaagtcagagacgaccaagagtttagagacgccgcacgtggtgctaccagacttctggtttttgaagccaccgccttgcaggagaagcctttcctgcactccaggccgtgagtcgcgctcacttcatgttccccacagcccccaaatgccaaaggctcctctaggtccctggcgcgtgtgactcgcggcgggcactaagcgcagacccatgggagatctcctcctgaaccccagcaacgggggtggggtgaggtagggtgggtaggagaggttgatccgaatcccagggtcccacgccatcgtagatttcgtatgaaaagaaacaaggaaaaaaaaaagttggagccaagttttcttcacccaactttttgccctctcccacgtgggttggtctctttctcccaggctgggccatgccccctccgctcgctgcaggccttttgccaagcaaacagaccgtgcggcaaagcaacacagctgcggggatcctaaggtttcctgagttctaacctcgggccaggctgctgggaccccgccgctgctggggttctaactaagggcccggcggttaagacccaacgccggcggatgagacggcgcaggctctaagcctccatctaacaggctagggagtgaacgcaaccctgagtctcccgcttcccggtccctcggccggcgcacgcactcaccatggctgcggttccgcgggctcagcactcctaggggagcgcagctgacgtttcagaagcactcgcgtgcaccggaaaaactcacagaagcagcagcggaaatggccccgcgcggcaggaagcgaaggtgacgctacgcgagcgagtgggccccgccctctacgggggcactggcgcggaaactggccctgtgtcgaagaaggaacgtactttggcgttcttatgagctgcctagtacaaattattggcagaaacaatgaattaaacattcaaaaagtaacccaccggccggccgcagcggcttatggctgtaatcccggcactttgggaggccgaggcgggcgcatcacctgaggacaggagttcgagaccagcctggccaacatggcgaaacctcgtccctactaaaaaatacaaaaattagccaggcgtggtggcgggcgcctgtaaccccagctacttaggaggctgaagcaggagaatcgcttgaaccccggaggtggaggctacagtaagttgagatcatgccactgcactctagcactccagctgaggcgacagagcgagactctcaaaaaaaaaaaaaaaaaggccggccgggtgcggtggctcccgcctgtaatcgcagcactttgggaggctgaggcaggcggatcactaggtcaggagatcgagaccatcctggctaacacagtgaaccgtctctactaaaaatacaaaaaattagccgggcatggtggcgggcgcctgtagtcccagctactcgggaggccgaggcaggagaatgccgtgaaccccggaggcggagcttgcagtgagccgagatcgcaccactgcacactgcactccagcctgggcaacagagtgagactccgtctcaaaaaaaagaagaaaaaaaagagggccgggtgcggtggctcacgcctgtaatcccagcactttgggaagctgaggcgggcggatcacctgaggttgggagttcgataccagcctgaccaatatggagaaacccccgtctctactaaaaatacaaaattagccgggcgtggtggcgcatgcctgtaatcccagctactcgggaggttgaggcaggagaatcgcttgaacttgggaggtggaagttgcagtgagccgagatcgcgccattgcactccagcctgggcaacaagagtggaaactcggtctcaaaaaaaaaaaaaaaaattccagccactaaacagttaaggcctggctcattataattggctgacgtccctgcctgctcagatatttaatattttgaatagaacttttgggtaaaagagtcttcagggtaacatttattttcccaccaacactgatcctaagatgggaaaagtaattcccccacaggaaatcaggatactgcaagcaacgagaaaggcatgttgagtggttaaacaagaatacatgtattcaatacagtgttcattaaatgtttgataatagaaggacaggcagatccaagtatttcataggaagaaagaaatcaagcagaccgcaggttatatcaccccatcacacattcagggaacttaatcttttcattccagaggatgggtttgtttaaaacaagttcttcctcctaattacttttgaacaattccccaatactgtccttacctgcaccaagagcatgctaaccaggcctggcaccagggtcagagttgaggctggggcatcagccccctttgtgaggtggcctcagtgacaggggtgctatgaggtggcggctatcctactgcagctggctgcatcagatgtgccaggcctgccctctagctcccaacaccatctgcctgatctaagctttgccatgttgttgtcactgctgggtgcctgtgctgtggtggggccattccatggccctgagtgggagccagtgcagggcctgctctcccagaatcacagctgcagggaccctcagtgctgtggcaacctgcttgtcctctgcctctttctggtctggcaggtccggcactgttggcaccaggtcaccaggacccgcttcagcacaaggaatgtcatcaaggtgagtgggccccatacaccttcacccttcttccctcagcaccatgattgtctctgtcacttgttac

SEQ ID NO: 1562861 - DNA, 4001 bp, Homo sapiens
gagtctcgctctgtcacccgggttggagtgcagtagcgtgatctcggctcactgcaacctctgtctcccgggttcaattgattctcctgcctcagcttcctagtagctgggattacaggggtgagccatcacacccagctaattgtatttttagtagagacacgttttcaccaacatggtgaaatttttgtacttttttttttttttttttttttttgagacagagtctcactcttgtcgcccaggctggagtgcagtggcaggatctcggctcactgcaagctccgcctcctgggttcacgccattctcctgcctcagcctcctgagtagctgggactacaggcgcctgccaccgcgcccagctaattttttgtatttttagtagagatggggtttcaccgtgttagccaggatggtctcgatctcctgacctcgtgatccaccgcctcggcctcccaaagtgctgggattacaggcgtgagccaccgcgcccggccatttttgtactttttatagagacaggatctcgccgtgttgccaagctggtcttgaactgctgacctcaagtgatctgcctgcctcggcctcccaaagtgctgggattacaggcatgagccaccatacccgaccaaccacagcatctttaatcctcaacaaccctatgagatacatcctgattactcccattttacagatgaggaacccgaggcttaaagagtcctgaggtcaccccacctacaaagtctgagttagatctgttagtgccaggcaaactctaggcttttcccacggtgtcagctttatccctaattattgggcagtctaggtggggcgcttatgccactcctctttcccagctgtccaaaagccccactgctctgtgctgtaacatctcatggcaggcactatcagaactttgcagcttcattcctgggctgcagggcaggagggatggttgcttccttttcacaggttgggggagggggaacaggtggcctcacttctttggtaaatattccttgaccatacacagtcctgagccctctgagggtgggaggctggggaaacagagaaaaatgagatcatggtctagtgagagagacagacaagcaccaagtcataactgtgcagggtcatatatgcagagatgggggaagtacagggctgtggggaccaaggagtgaggggctgcccagggccagtcagggaggccaagccctagctcagcccagagcagggcccaaacaaaagcccaggctgagagcacatggcccagccagactcccactcccaggaggccaccagttgggtgcaaagtgcatggcgcattggcaggcctgggtcccagacctggtgctgccacggcacagcagggagggtgaccttggacaactcccattccctctcaggtccgtttccccacctgtacagttcgaggtggaggaacaaagggtctgtgcagccatggcccctggggatcccccactgctcccctgccatcatctctttcccacagaacttcccgacggaggagctgactaccagaagcccccagtgggtgttaaatcacaagctacgcctgggaatgggccactcctcctgtcttctgccctctcccactctccagggcccagtacctgcccttctcaccatctttcatcaggtccccatcacagcccggtcccaaccaggacaaagaccctacccatccctttctcacctcccccattctttgcccagacccctccctaggccttgatcctgccccgcctctaacccccagattccaagcgaggagtctcagcccctcccccacgacccagtccctggcccccgcgcctgcaccccaccccgcgcgcgtctatccctgcctggccgggctctcaccgcgccgcagctgcagacgcaacgtccccagcgcgaggccccgggccccccagcagccgccgcgccgtcacagagatgctgcacagccgcggagccatgttggagccgcaaaggttgcaggaaggccccgcccccaagccctggtggcggaggcggggcgcgaataaactccacccctccggctcgcccgccccctcactcacccggtcaggtgggcgtttcctgtgggcgtctccaactccgcaggtgctggacggaagtcagggttctaatcctctgcgcgctctgcgaccttggcaagccctttgcccactctgggcctcaggatccacctcggtaaaatgggagcgtggaacaataataccaagggttctttttttttttttttttttttttgagacggagtctcgctctgtcgcccaggctggagcgcagtggcgcgatctcggcccactgcaagctccgcctcctgggttcacgccattctcctgcctcagcctcccgagtagctggaactacaggcgtctgccaccacgcccagctaattttttgtatttttagtagaaacggggtttcaccgtgttagccaggatggtctcgatctcctgacctcgtgatctgcctgcctcgtgctcccaaagtgctgggattacaggcgtgagccaccatgcccagcctaccaagggttcttaacaaggctgtccgggatgtgcagcagagggtcagtgtaaccaccccatgggttcattttgcccgtttcccagacagcggatttatcaagacagaggaattgcaataagagtttaattcatgcagagccggctgaatgggagaccggagttttattattactcaaatcagtctccctgaaaattcggagactgggttttattaaggataatttggtgggtaggggccagagagtggagagtgctgattggtcaggtcggagatgcaatcatagggagtggaagccgtcctcttgtgctgagtggatctctgggtgggggccacaaaaccggatgatccggtttcttaatctgtgtatcgccagcggatccattgagtgcaggatcggaaaaatatcttgagcaccaatcttaggttttacagtagtgatgttatccctaggagcaactggggaggtttagaatctgtggccactacctgcatgactcctaaaccgtaatttctaatctcgtggctaatttgttagtcttacaaaagcagtctggtccccaggcaagaaaggggtttattttgggagagggctgttatctttgtttcaaagttgaactataaatttgctgccgggcatggtggctcatgcctgtaatcccagcattttgggaggcaaaggtggatcagaagtttaggtcaagagttcaagaccagcctggccaacagggtgaaaccccgtctctactaaaaatacaaaaaaattagccaggcatggtggcgggcacctgtaatcccagttactcgggaggctgaggcaggagaatctcttgaaccctggaggcagaggttgcagtgagccgagatcgcgccactgcactccagcctgggcaacaagagcgaaactccgtctcaaaaaacaaacaaaaagactgtaagtttggcctatgcccaggaatgaatatggacagtttgggggttagaagcaaaatggagtcggttaggtcagatcactttcactgtcataattttctcactgttaaaatttctgcaaaggggttgcatcagtaagccccctgaaattgtatacaacgttacgtgctcctctgtggtgcattctctggggaaaggcattcacatgccaggtttatcaccatcaaagaaacaaacttccttacaagtgaagacaggggcaaggctgtcagctgcagacactttatctccaccatctcctttccccttttcatccccctttgacttctctgcctgaaaatcctggggcctctttctgccctgcccagctcttttgcccgccctctaaactaatcccttctcagcccacaatcccccagatcacagacattggcaggggtggagagcctgcagaccccacagggggcaggggctctatccacttccaaaggggcagggacag

SEQ ID NO: 1562862 - DNA, 4001 bp, Homo sapiens
ccaggctggagtgcagtggcaggatctcggctcactgcaagctccgcctcctgggttcacgccattctcctgcctcagcctcctgagtagctgggactacaggcgcctgccaccgcgcccagctaattttttgtatttttagtagagatggggtttcaccgtgttagccaggatggtctcgatctcctgacctcgtgatccaccgcctcggcctcccaaagtgctgggattacaggcgtgagccaccgcgcccggccatttttgtactttttatagagacaggatctcgccgtgttgccaagctggtcttgaactgctgacctcaagtgatctgcctgcctcggcctcccaaagtgctgggattacaggcatgagccaccatacccgaccaaccacagcatctttaatcctcaacaaccctatgagatacatcctgattactcccattttacagatgaggaacccgaggcttaaagagtcctgaggtcaccccacctacaaagtctgagttagatctgttagtgccaggcaaactctaggcttttcccacggtgtcagctttatccctaattattgggcagtctaggtggggcgcttatgccactcctctttcccagctgtccaaaagccccactgctctgtgctgtaacatctcatggcaggcactatcagaactttgcagcttcattcctgggctgcagggcaggagggatggttgcttccttttcacaggttgggggagggggaacaggtggcctcacttctttggtaaatattccttgaccatacacagtcctgagccctctgagggtgggaggctggggaaacagagaaaaatgagatcatggtctagtgagagagacagacaagcaccaagtcataactgtgcagggtcatatatgcagagatgggggaagtacagggctgtggggaccaaggagtgaggggctgcccagggccagtcagggaggccaagccctagctcagcccagagcagggcccaaacaaaagcccaggctgagagcacatggcccagccagactcccactcccaggaggccaccagttgggtgcaaagtgcatggcgcattggcaggcctgggtcccagacctggtgctgccacggcacagcagggagggtgaccttggacaactcccattccctctcaggtccgtttccccacctgtacagttcgaggtggaggaacaaagggtctgtgcagccatggcccctggggatcccccactgctcccctgccatcatctctttcccacagaacttcccgacggaggagctgactaccagaagcccccagtgggtgttaaatcacaagctacgcctgggaatgggccactcctcctgtcttctgccctctcccactctccagggcccagtacctgcccttctcaccatctttcatcaggtccccatcacagcccggtcccaaccaggacaaagaccctacccatccctttctcacctcccccattctttgcccagacccctccctaggccttgatcctgccccgcctctaacccccagattccaagcgaggagtctcagcccctcccccacgacccagtccctggcccccgcgcctgcaccccaccccgcgcgcgtctatccctgcctggccgggctctcaccgcgccgcagctgcagacgcaacgtccccagcgcgaggccccgggccccccagcagccgccgcgccgtcacagagatgctgcacagccgcggagccatgttggagccgcaaaggttgcaggaaggccccgcccccaagccctggtggcggaggcggggcgcgaataaactccacccctccggctcgcccgccccctcactcacccggtcaggtgggcgtttcctgtgggcgtctccaactccgcaggtgctggacggaagtcagggttctaatcctctgcgcgctctgcgaccttggcaagccctttgcccactctgggcctcaggatccacctcggtaaaatgggagcgtggaacaataataccaagggttctttttttttttttttttttttttgagacggagtctcgctctgtcgcccaggctggagcgcagtggcgcgatctcggcccactgcaagctccgcctcctgggttcacgccattctcctgcctcagcctcccgagtagctggaactacaggcgtctgccaccacgcccagctaattttttgtatttttagtagaaacggggtttcaccgtgttagccaggatggtctcgatctcctgacctcgtgatctgcctgcctcgtgctcccaaagtgctgggattacaggcgtgagccaccatgcccagcctaccaagggttcttaacaaggctgtccgggatgtgcagcagagggtcagtgtaaccaccccatgggttcattttgcccgtttcccagacagcggatttatcaagacagaggaattgcaataagagtttaattcatgcagagccggctgaatgggagaccggagttttattattactcaaatcagtctccctgaaaattcggagactgggttttattaaggataatttggtgggtaggggccagagagtggagagtgctgattggtcaggtcggagatgcaatcatagggagtggaagccgtcctcttgtgctgagtggatctctgggtgggggccacaaaaccggatgatccggtttcttaatctgtgtatcgccagcggatccattgagtgcaggatcggaaaaatatcttgagcaccaatcttaggttttacagtagtgatgttatccctaggagcaactggggaggtttagaatctgtggccactacctgcatgactcctaaaccgtaatttctaatctcgtggctaatttgttagtcttacaaaagcagtctggtccccaggcaagaaaggggtttattttgggagagggctgttatctttgtttcaaagttgaactataaatttgctgccgggcatggtggctcatgcctgtaatcccagcattttgggaggcaaaggtggatcagaagtttaggtcaagagttcaagaccagcctggccaacagggtgaaaccccgtctctactaaaaatacaaaaaaattagccaggcatggtggcgggcacctgtaatcccagttactcgggaggctgaggcaggagaatctcttgaaccctggaggcagaggttgcagtgagccgagatcgcgccactgcactccagcctgggcaacaagagcgaaactccgtctcaaaaaacaaacaaaaagactgtaagtttggcctatgcccaggaatgaatatggacagtttgggggttagaagcaaaatggagtcggttaggtcagatcactttcactgtcataattttctcactgttaaaatttctgcaaaggggttgcatcagtaagccccctgaaattgtatacaacgttacgtgctcctctgtggtgcattctctggggaaaggcattcacatgccaggtttatcaccatcaaagaaacaaacttccttacaagtgaagacaggggcaaggctgtcagctgcagacactttatctccaccatctcctttccccttttcatccccctttgacttctctgcctgaaaatcctggggcctctttctgccctgcccagctcttttgcccgccctctaaactaatcccttctcagcccacaatcccccagatcacagacattggcaggggtggagagcctgcagaccccacagggggcaggggctctatccacttccaaaggggcagggacagctccccaaaagaatgtccacccactgactagtggttgcctcctgttatgcttggcatggggggagtggaggccaggccatgattgcaccactgcgctccagcctgggcaacagagcaagacccagtctctataaaaaaataataataattttaagattaggaccacgtgtggtggctcatgcctgtaatcccagcactttgggaggccaaggcaggaggatctatgaaaattcaaaaaatt

SEQ ID NO: 1562863 - DNA, 4001 bp, Homo sapiens
agcatcttcaagtattcctggtggcgctgaaaccacacaggcagggaacacagtgagtatggcctctcagtccaacctcaggctggggtattaatcacccccagggtgagggagaccatgatccatactgcaagatcaggaggagactccatcttccatcactcccagacccgggcccacagagtctccacctgtataaactattccccagtcctgcccacacacacatcgccccatgccagcagctgcctctattagggaaatccaaggctgcaagtgccctaagaatcaaagacctccctcccaccttccccctgcgtacctcctcccgaagcttcctctgctcctctttcagccgctgcttaatctcctcaatggctgccttctttcgctcgaccttccgcttgtggaagcctgtcaggtactccctacaggaaggaagccggcagagacaggagagtcattatacaaggagagaagggctcgctctaggagaaaaatggctaatgccgcgctcactatgtgctaggcaccattccaaaaaagtgtaagtattagctcatttaaccttcacaacaatggccaggcatggtggctcacgcctgtaatcccagtactttggaaggtcgaggtgggaagatcacatgacgccaggagttcaagaccagcctggcaaacatggtgaaactccgtgtctactaaaaacacaaaaattagctgggcttggtggcgcatgcctgcagtcccagctacttgggaggctgagcggggagaattgcttgaacctgggaggcggaggttgcagtgagccgagatcatgccactgcactccagcctggacgacacagactccatctcaaaaacaaacaaaaaaccctcacaataacctgtgcggtgggtatcaatctccattttacagatgggaacgttgagtcacagagtctaggttacttgcccaaggttagagaaaggatacatttaggaaaataagggagatactgcctctttccactcaatactctccagggatctcaggttcaggcaacagggccaggctgtggggcgggtgggggggggggccacacacagtacatgaggtaaccccttccacacctacaaacctcattactctctcaacagggttttcagggccaccaccatccagaccttcggaaaccctgcactggaccaacacccatgtccccaggacacctgaccctaaactcgcctgtagggcctgttgatgcacgctaggagtttcctgatgatgcccagcatttccctacctccttccctcggtctaatctcagccccttctcatctccacagtgctagctgctctgttcccattttgtcccacggtccagcactgggcttttcgctgacccgctaccatgtgccatttatttatctggccagacgctgaggctcagaggttctgcttcctgatacgggacctggcacaccaaaggagcccaataaatgtctagggagcgaatgaatgaacttaagccactctcatttcattggctcatcatttatcaaccacggctgggcgcctgctgtgtgccggaccgatggactgggctgggctagggtggtcgaagccactgctctgagacccgagcttccggctatctggcggcgcacagacactaggcgaggtggggaggtcaagaagggagaaggtggcggccgagaagggagaagcgggaacgcgggctggaaggccgagaggggttctctagccacgccagggggcgggaccggaagagcccccggcgggagcgtgctcggccccagacctggccttggccgcgaagaacagctcgaggggagtccggtccggctttgccactcaccgcctcttctcctcgtcgaagctaagaacgagcctcggccgccggtcgtcaccatctcgcttcttcttcttgttgcggcccatagcagtgaggccgccggcttcctctccctgaagacacttccgggtgtagcgtactcatcctcccgggcgcacactttagcgtcgcaccgaagttccgtccaccaggcccagccttttaaagggacctcccagctccttttcttccctcttcccatgcatgacgcgctggtccctgatctctccgtgactcccagctccagcccctccccagcctcgcttcaatgagagcgaggtcccctggaccccactgcctaggactgtgcctggcacacactcaatatggagttactcgtgaatggcccaaatttcctgtactaaccctactttggatatttttttcctttaatttattattattgcttttgagatggagtctcgctctgtcgtccaggctggagttcagtggcggatgtcggttcattgcaatccctgcctcccaggttcaagcaattctccgcctcagcctcctgagtaactgggattacaggtgtgcgccaccatactccctaatttttgcatttttagtagagacaagttttcaccatgttgaccagactgcttgaactcctgaccgcaagtggtcctcccatctcggcctcccaaagtgccgggattacaggcgtgagccaccgtgctggcccctactttagatgctgatgtcaactcgttggtagtctccaagagggagccaaactgcctggatttgtatactggcatcacacctacagctgtgtggtcccagaccaatggtcttcgcggtgcctcaccctatttgtaaaataagggaaagtatagtagcttcgtagggttgttgtagacactggttctggaactttggcatacatcagaatcccctagagggctaaaaacctggatcgctgggccccaccccggagtttctgatccgatagaggtttctgagtggatttccgtttctagcaggttctcaggtgatgctaatgctgctggtccgtggactaaaccttgacagctgtgattgtgaggaagttaattatgtaaagtttgtctaacataaggcacgcatacatgtgttttctgcacaagccatcttccctctttgtgcctcactttgcccaaaggtggaatgagtgtataataacatccttgactgagaatgagggcatggttgtgaaagattgcagtgaaacaacgcctgaaggggatttttagtcacttggattgtatgccagaatccttcatccgctttttttttttttttttctgagacagagtttcgctcttgtcacccaggctggagtgcagtgttgtgatctcggctcactgcagtctccgcctcccaggttcaagcaattctcctgcctcagcctcctgagtagctaggattactggcacctgccagcacgcccagctgatctttgtaccctgactctgagttttggaaggaggcaggcagtaagtgcagcactccagaatgctgaattcattccatacagctcctctgcttgggaaatctatgtgggatcctgagaggaagttacctttttttttttgagacggagtttcactcttgttgcccaggctggagtgcaatggcacgatctcggctcactgcaacctccgcctcccaggttcaagcgattctccttccttagcctccctagtagctgggattataggcatgtgccaccatgcccggctaattttgtatttttagtagagatggggtttctccgtgttggtcaggctggtctcaaactcctgacctcaggtgatccacccacctcggcctcccaaagtgctgggattacaggcgtgagccaccgcgcccagctggaagttacccttaaactacaggcctggcctttcagttctgtggcccagagcaatgcagggggctcccttagggtgctggactgcacctctgaccagctgcttctgccccttagtggcagtgccttaaagccacccttggcaccttcctgggtagaggcatcaccctggctgaaggtgcccagagagtcaccttctgcagctggtctgtctcctcccagtcccaggcttcgacctgcttggt

SEQ ID NO: 1562864 - DNA, 4001 bp, Homo sapiens
gctgcactctgacaccctgtggggagggtgctgacaccagtacagacgtcctggagggctgtcagaccacgacatcctcagccttgtgagtgggcatcaccagtgctgcttgcccaggatttaacttaaaaagccccgggagtaaggggtccctgcatttactccccgcctctctcctccctccaacttgcctgctgcactccacctgggtggaggtagcagagggggcagcgcgggctttggcctctttctctctcttccttccacagatctgattttgttgcttaacccccttccttgtggtctggaagtcaggccatggctggggtagtgaatgtgtcccggatgtttgtcctgcccagtctgtctgccttgcacttctgggagccccaaattcattcttacagggaggaaggtggccatgggactccaggggggaaatgactggcccagggtcacatgagagccaagagtgggttcccccatgctggaccccttgtgtctgaccccaagcctgagtcaggaaagcctggaaaagtgagtggaggaggaggagctcggggggccctgttctccattcagcccccacccaagagctgtgggcttccaggtgtgtgaggctgggcgcctggcacctgagctcctgcggtttgggtcatagtctgagccagagtgggagattcagggtagggaggtggtgaggggcacccaggtttgtcttatagggcactctgttcccggctctgtgtaatgaggggaggaccccaagtcctttggacagcgcatccatctcctggccataaagtgtgagcgtggagctgggctgatttgggggtgtccggaagaaggaaatgaaagggacatttaatgaggtcctagtacgtgccaagcattttcacacacctacatttgattcaatttccactacaagtggacactgttatacctattttacagacacagaaactgaggctcagagaggtgcctggagacggaaaagggtggggagcgaatctttctggcgcgccctctgtgcctcagtcaccgtgccagacgcctgcccgcgttccctatcgaaatccccccgcctcgccagcgaggaaggcgcgatcgtccccggaacacagacgggagaccggaggctcggggaccgccggacgaccgcggccgggcggcccctcacaccacccgggcggctcccccgacggcgcgcggcgctcacctccaggcggtcgatgcggtcccgcagggcgcgcacggcgtcctccagctccagaatgagcgcaggcgagtcccagggcccgtcggccatggtgtcgcggcggggcccggcgccctggaggccgcgcggcaggccgctctcgcagcggcccagcttgccggtgagctcacggatggtgtcctggtcggcgcggatgcgcgcctcctgctgcagcgccgtctggcgcagctgctcggccgtgctctgcagcagcagcagctcttcgcgctcgcccggcgcagcgcccgccgcgtccccctgctgggcccccgacgggcaggcagcagccagcggcgtgcacaggaagcggctgaacaggggcccgggcggcagcgggtgcgcgctggccgcgggtgccccgggcagcgcggggggcccggctgaaccgcccgcgccgtgcagcgcgctcaggctccgctgcgggcccggggacgcggcggcgcccgaggcgaccgaagcattgtcggcgccgccgggcagcgcccgcgccgggctggccgccaggggcacgctggcgatgatgcagatgacggcaccgaggaacgccagcatgcccgcggccagcagcacggccaggaacttcagcgtgaggcgggcggcgggggcgcccgaggcccccggcaggcgcggcggcggggtcggggcgcggagcccgggcgcgctgggccgagcggggcaggcgcgggagccggagccggagccggagccggagccggagctggagctgtcgccgcggccgctgctgccgccgctctgagcccgggcggcgggaggaggagaagacggcaggcggcggggagggggagcgggcgcggcggccccgccccactcgcttccccgggccggccctggccccggcccagccccgcacccgttcagtgccgggcgcccggctgggggcgccgccggggatgcggcgaggagcgagggcagcgcctgggaccttatctcgccgcggtcacagcgcaggggccggcgacccgagggccgcgcggcggggctcctgggtgacccccatcccagccctcccgtgctcgggccccctccccaagccggttatgttcacatccacccgggagggagctttcttccgggtggggctgtgcactgggcgcgccacaagctcggtcgcaattgagccttgccgtggacaggctcacaatagaaatgaggaaactgagacacctgaggtcaggcctctgtccaaggtcaccgggtggctgcgttggagccgcctgcgagcttaggcacgtttcaccggaccagactgtggatggggctggagtgggagcggttagaggtggagaagaggccagtgttgggggttggggggaggctcggattttgacctaacttctgtttatactgtggccacctgcccgtcacccccacctccaaccttctgaaggagcagagttcactccccgccaccctcattacagaatcttcctgtgatctcagaggatgatggaaattctctcctctgaatccttgggggcttagagcctcacaggtccagagaaaccccccacccccactgcagtctgccttcgttggcaagcggtgccacgtgcctggtgggcatgtggaccaggcccagaaggaacagcaggaatgggagtgggctgtgctgtgggggtggcagaggagcgttttactttcttctgtcaaaaatgtctatatatattttgttgaaaattaactttgcaattaaaaacttaaaaacaatcctactatcctccacactttatccccagctccaattttccatgaggtctttcctgaccaatacggattcccagggctggaagggccttgggagggctgtggttattcccagctctgtctcccttccaagcctgcatttttgacttgaagggaaagcgcaaaccaggatctctggaccaccacggctaccactgtggtttcgagtgtacttcacatagcgctggtggtggggagagaccggaatgtttcccaggaagccacaaccctgggggacgctctccagccacggggattttgtccagtgttcccaggcacacgtgctccacctccctctctccacacatgttaggatgatgtccaccctgttcacccatctctaggagccagggattttcatccatacctgagttgtgaaagaggagagaagcaaacacaagcgctgtatgccaggaacctgagtgctgtgtgtgcgtggatgtgtgctggtgctcactgaagtcgtaacctcaaaacccagggcaggcagctgggcttggaggaagcatctcatggacagagagatgggctgggctcttggaaggcaaaggccagcggtaggccctgctaaagtcctggggatgcatgagacatcgggactcctggtacatctacacgtgtgccgtgaagacagaaacacggagatagcatccccaggagaaactgtcataggaagtccagggaaggacaggagatgccaagagagagggctgctgccaagagcagcagagccactgtgacttgggcaccaaatggtgccacctttacctgagctgccccctgagactttggggacagtttggataaatgggtccagaggctggagtcaaattgtgtttaaactggtctgttgatctcctagaatgactttattttttattttattttatttttgagacagagtcttgctctgtcacccaggctgcagtgcggtggcgtgatctcggctcactggaacctctgccttgcgggttca

SEQ ID NO: 1562865 - DNA, 4001 bp, Homo sapiens
aagaaagttaagataaacaaagactggcttagaacagtgcctggagcagaggaagggcttaataaattattaaagaaacaagttttattagaagcaaaggctataaactatcattttccctccaaaacgtaaaagttgtagcatggaagaagaataacttggattacaaaccagatttttacaaatattttaccaaatccctattttatttcaaagcatgacacttcagacaatacattttacttttatgctagaagtgggggggagaaaaaaccctctgtaaaatattcagaacaaggcctggcacctggagtcttatgtctagctactgttatgaagaacttaagggaggcggaaggatctcttgaagccaggagttggaaaccaacttggtctctacgaaaataaagatggacatagattagatgaatagaaataaaaaattagccgagcgtagtggcgcacgcctgtggtcccagctacttggaaagctgaggcaggagaatcacttgagcccaggagcttcaggctacacagtgagctaccactacactgaggcctggtgacaaagcaagacccagtctcaatcaaacaatcaataaaagggaatttaaaaaacgtttgcgtttgtgggtaaaaaaccaaattagacatgatttctaggtatgaagcaacgtggtgggagactgaaagtctaggtaaactggaaaaaaacattatttgtgcctgatatagttatgtggtctctggcatctggtgtagctctgcccttggaaagctcaacttgtcaacatcaccttaaaacgaaaacacagatttggctacacttaatagtgaagtgccttgttggaggaaaacaacaagggggccaagtaaggagacagaaatacctaatctccaagctggttcttaatggaaccgagcaaatgggtgatgaataacccgggaacgcagtaagacaggccagagaggtaatgcgcccaagagaagagagacgaggggcggccagggggagaggaagctcgagaggaatcgctaggaaggaaacggagaagaccacgccaggacagccctgccagccccctacctccggcggggccgcaggggagagtctcactcgagtcggacgccgcagcccggtggggcccgggccccgcttcaaaaacagccggggctgcgtcgccgctgtcatcccaccccaccctccacccgtcgctcccccaccgcgcgccccgcccggcccgtgcgcccgacccaggctccctccctagagtcccgacctctagccctgtaccccacttcccagggtcccgtcctccagccccttaagcccctccccagggtctggtcccccggccccgcacccctccccaggggcccgtcccccggcgctgaacccgcacctccctccccagggtccagtccccagccctgcactcgcactcccctcccaggcccgagcccgctcccgccctcccggccctgggctctcagcaccaggctcccgccctcagcctcttctcctcccgcgcccgccgccgctcctcacctcctcggcggccgccgctgcactcgctgggtcttggttgcggcgaaacccggggcgcagcggcgcaggggtctggagcccgcaggggtcgccgggctgagcgcgctcggccgcttccggtgctgcgctgcggaactcagaggacttagtgctcggcaagcccagagactcaaacaccatatccctgggggggctcctcacgctgtgttcggcagggaggcgagagcgccggttcagccagagacagctgggggaaccgcgccgaacacgctccgggcggccattttgtaactcgaatctacccccaaaaccaattcgaaaaaaagggaggaaagaaacgcccgcgttcagctactgcgcaagcgcgccggcgcttccggcagtagcacctccttccgccggccgggccccttacgcggcgcatgcgcccagctccctggaaaccggcgcggggctgagaatgccggtctcgcgcaagcgcgcacgcgccgaccttgatctcgtagccggcgccagcagccgcgctttggggcgtcggctcacgtggggccggcaacgcgtcttccaggatgttcgcgcgctagtcgccgctgaggggccggcgatgcgcgaggagttccggcgaggaaggtcggtcagtggacatggccgaggcccgcggtgtccgcgtgtgggagctgcagggctgaggagaggccgcccgcaaccctcgggaatcgtgtgaggtgccactggggtcgcttcacatcaggaggccccgtctcgggggacgcgcgcaggtgaccctgctggtcgtacctggccggggtggcccggaggggctgggtctcggcgccaggaggggccgtgtgggccgcctgttaaaggacccctcgttcgctgacatttgattttgcattgggtgccttctcttctgtttttttcagccagtgagatccgtcctgggcactcagctgtagagcaggggaacgagtcctgcgctttttgcgctgaggtctcctggcccgtaggccaggcagcctctgagctcctttctcaccagcagcttgcgatccctcatccctggccctgtcactcccagctgtttccagtgccgccctttttttttttttttttttgagatggagagtttaacttgttcgcccaggctggagtgaagtggcacgatcttggcctactgcaacctctgcctcccggattcaagcgattctcctgcctcagcctcccgagtagttgggattacagtcgtgcgccaccacgcccggctaatgtttatatttttagtagagacgggttttcaccatattggtcaggctggtctcgaactcgtgacctcaggtgattccctccccccgccccaccacctcagcctcccaaagtgctgggattacaggcctgagccaccgttcccggcctcgagcgccttcttataaactggatggtggtttttgttttcaccttcaaagtcgaatctccctagtccgtttattaccagaaagaggtctccactcagacccagcgagaggcttcttggatgtcgcgtaggaaagaattcggggcgagtccacggactaaagtgaaagcaagtgtattagagaagtgagaaagcaaaagaatggcagagcagggcattcctgaaagcgggaggaggaaggcgcccgccttaggtacagtgcttgttcaaatctaaggtaacacagccaaagaaatcttgggggacatgggctctaccacgagggcccacgaccaaggtttcatgcgcgtccgtgtgaagagaccaccaaacaggatttgtgtgagcaacatggctgtttatttcacctgggtgcaggcgggctgagtccaaaaagacagtcagcgaagggagataggggtggggccgttttataggatttgggaaggtaatggaaaattacagtcaaagggggttgttctctggtgggcaggggtggggggtcacaaggtgctcagtgggggagcttctgagccaggagaaggaaattcacagggttaatcacttagttaaggttgggcaggaacaaatcacgatggtggaatgtcatcagttaaggtggggcagggccttttcacttcttttgtgattcttcagttacttcaggccatctgggcgtatacgtacaagtcacaggggatgcgatggcttggcttgggctcagaggcctgacacaaggattgttcatctttgtttactgactttggcaaagatctatattatctttaaagcgaaacctaaatgaagaatgcttttgatcttaagatattgttaggttttgaagggaagacgagagttaaagaatgacacacaggtcgggcgctgtggctcacgcctgtaatcccagcactttgggaggccgaggcgggtgcatcacctgaggtcaggagtgggagaccagcccgaccaacatggtgaaacctcatctctactaaaaat

SEQ ID NO: 1562866 - DNA, 4001 bp, Homo sapiens
ctactcattaactaatgtctccaccagagggttggagaagtaagaagtcaccaacggtcacgtttgctatttaagattaactgtggggccagcgaagtgcctcacgcctgtaatcccagcactttgggaggccaaggtgggcagatcacttgaggtcaggagtttgagaccagcctggccaacatggtgaaaccccgtctctactaaaaataaaaaaattagctgggcgtggtggtggcacctgtaatcccagctactccggaggctgaggcaggagaatctcttgaacccaggaggtggaggttgcagtgagctgagatcgcgccaatgcactccagcctatgtgacagagcaagactccatctcaaaaaaaaaaaaaaaaaaaaaagaaaaagaaaaaaaaattagctgtggagaaaaaagggatggagctgaatacacaaaaactgtaatagtaaaattgtaacttctaactcatacccacaatgaagagacaggtgacgcagtaaaatagtctaaataaatgtaggggcttccacgtcctaacatactcaccaaatcagtatataaccaaaacgcagggatctttgttttgtttacagatatactccaaatgccccaacagtgcccagctcaaacagcaggtgtcctgtctgtcattagatcagtgagctggggaagtatttccccagtgagcataaagtatttcaaaaaatactaaaagatgctggcatcccagttttgccattttctagctgtgagaacttgggcaagttatatttaatttttgtgcctcagtttcttcatctgtggaacaggaagtattaagaaagttaagataaacaaagactggcttagaacagtgcctggagcagaggaagggcttaataaattattaaagaaacaagttttattagaagcaaaggctataaactatcattttccctccaaaacgtaaaagttgtagcatggaagaagaataacttggattacaaaccagatttttacaaatattttaccaaatccctattttatttcaaagcatgacacttcagacaatacattttacttttatgctagaagtgggggggagaaaaaaccctctgtaaaatattcagaacaaggcctggcacctggagtcttatgtctagctactgttatgaagaacttaagggaggcggaaggatctcttgaagccaggagttggaaaccaacttggtctctacgaaaataaagatggacatagattagatgaatagaaataaaaaattagccgagcgtagtggcgcacgcctgtggtcccagctacttggaaagctgaggcaggagaatcacttgagcccaggagcttcaggctacacagtgagctaccactacactgaggcctggtgacaaagcaagacccagtctcaatcaaacaatcaataaaagggaatttaaaaaacgtttgcgtttgtgggtaaaaaaccaaattagacatgatttctaggtatgaagcaacgtggtgggagactgaaagtctaggtaaactggaaaaaaacattatttgtgcctgatatagttatgtggtctctggcatctggtgtagctctgcccttggaaagctcaacttgtcaacatcaccttaaaacgaaaacacagatttggctacacttaatagtgaagtgccttgttggaggaaaacaacaagggggccaagtaaggagacagaaatacctaatctccaagctggttcttaatggaaccgagcaaatgggtgatgaataacccgggaacgcagtaagacaggccagagaggtaatgcgcccaagagaagagagacgaggggcggccagggggagaggaagctcgagaggaatcgctaggaaggaaacggagaagaccacgccaggacagccctgccagccccctacctccggcggggccgcaggggagagtctcactcgagtcggacgccgcagcccggtggggcccgggccccgcttcaaaaacagccggggctgcgtcgccgctgtcatcccaccccaccctccacccgtcgctcccccaccgcgcgccccgcccggcccgtgcgcccgacccaggctccctccctagagtcccgacctctagccctgtaccccacttcccagggtcccgtcctccagccccttaagcccctccccagggtctggtcccccggccccgcacccctccccaggggcccgtcccccggcgctgaacccgcacctccctccccagggtccagtccccagccctgcactcgcactcccctcccaggcccgagcccgctcccgccctcccggccctgggctctcagcaccaggctcccgccctcagcctcttctcctcccgcgcccgccgccgctcctcacctcctcggcggccgccgctgcactcgctgggtcttggttgcggcgaaacccggggcgcagcggcgcaggggtctggagcccgcaggggtcgccgggctgagcgcgctcggccgcttccggtgctgcgctgcggaactcagaggacttagtgctcggcaagcccagagactcaaacaccatatccctgggggggctcctcacgctgtgttcggcagggaggcgagagcgccggttcagccagagacagctgggggaaccgcgccgaacacgctccgggcggccattttgtaactcgaatctacccccaaaaccaattcgaaaaaaagggaggaaagaaacgcccgcgttcagctactgcgcaagcgcgccggcgcttccggcagtagcacctccttccgccggccgggccccttacgcggcgcatgcgcccagctccctggaaaccggcgcggggctgagaatgccggtctcgcgcaagcgcgcacgcgccgaccttgatctcgtagccggcgccagcagccgcgctttggggcgtcggctcacgtggggccggcaacgcgtcttccaggatgttcgcgcgctagtcgccgctgaggggccggcgatgcgcgaggagttccggcgaggaaggtcggtcagtggacatggccgaggcccgcggtgtccgcgtgtgggagctgcagggctgaggagaggccgcccgcaaccctcgggaatcgtgtgaggtgccactggggtcgcttcacatcaggaggccccgtctcgggggacgcgcgcaggtgaccctgctggtcgtacctggccggggtggcccggaggggctgggtctcggcgccaggaggggccgtgtgggccgcctgttaaaggacccctcgttcgctgacatttgattttgcattgggtgccttctcttctgtttttttcagccagtgagatccgtcctgggcactcagctgtagagcaggggaacgagtcctgcgctttttgcgctgaggtctcctggcccgtaggccaggcagcctctgagctcctttctcaccagcagcttgcgatccctcatccctggccctgtcactcccagctgtttccagtgccgccctttttttttttttttttttgagatggagagtttaacttgttcgcccaggctggagtgaagtggcacgatcttggcctactgcaacctctgcctcccggattcaagcgattctcctgcctcagcctcccgagtagttgggattacagtcgtgcgccaccacgcccggctaatgtttatatttttagtagagacgggttttcaccatattggtcaggctggtctcgaactcgtgacctcaggtgattccctccccccgccccaccacctcagcctcccaaagtgctgggattacaggcctgagccaccgttcccggcctcgagcgccttcttataaactggatggtggtttttgttttcaccttcaaagtcgaatctccctagtccgtttattaccagaaagaggtctccactcagacccagcgagaggcttcttggatgtcgcgtaggaaagaattcggggcgagtccacggactaaagtgaaagcaagtgtattagagaagtgagaaagcaaaagaatggcagagca

SEQ ID NO: 1562867 - DNA, 4001 bp, Homo sapiens
gctgacctcgcggggccggcatcctctccgcgccgggacccctggacccccggggactctgatcccatcactccgacctcaggccctccccactctcctgactctgacccttgaccctgggctccaggccacctgatccacgttgtaggccgcgggccctggcttccgagtgttgtcttgggggagcgaagtccgcgccagaatcgtgaactggggggcccgggacttgtagacccctggactcacgacctgataggcgcaggggcccggggtctgcgagagggcagagggtgctggctgccgcctccactgccgcggaccagggaccccctgcgtccgccccggcccctcccccaccttgctgaggtcctcgaagaaactgccagccgctctgcggccgtagatggagcaagttggggcggagactttgccgatgacgcgcggacccaagagcgagggcaccgtataggccgcgggacctggggaggaggcagggctcgggggtagtgggtctccgcggacaggcgcagggtggtcccagctcccggagggcggtccccggtctcgagtgggaaggcccacagttctgggatgggccgttctgacctcacctgggctctgctgttccgcctggacaccccagtttcggggagcaatggtgtgccgaggcgcactggggtacgtcgcgttccccgctcgctccgggaagtacctgcctgcggggcggatcaagggtgtggggggctagaactgcgtgggagcctggtgggtacccgagatggggtcctgggactagtggggagtctgagccacgatttatcaaagccccgtggggttcggggtttgggatttgagatccggatatgggggtaccgaatatgcggtgttagggtatccgagggggactcggggttcaggtcgggggttcccaggtgggcctccctggaggcagttcggcgttggggtggccaggggcccgggggtcctgaccaggtcccggagtgaggaagggcgctgagcggcgtgggcggccgtagatggagtaggcgggggcgccgtcggtgccgcgcacggtcatgcgagcgggcaccaggtggcctggcccggggccgcacgtcgtctgctgcgtggggaagcgcgcgccgaaggtgaaggcgggggcgcgcggccgcgacgggtcatgcagggcgtagcctgggagcatccgagttagcgtctggccgggcccagccccaagccccatctgcaacacggaccctcccccggcacagaccccctctcccctctagcaggcacggttcagccccgagcgcaggcctccctggtctcttccccttccctcccccaggcgccgtcccacccctcaatcccggggcctgccccttctaccggtgttgggcggcagcttgtatttgggcccggggcctccgtagtgcgccgcgatggggccgcggggccggtgtggccgccaaaggcccacccaggcgtccgagcccatagcgcgggtggggggcgcttacggctcgcagcacctgcggacagaaggcggtggccgcggcccctgcaccgcaaattcttggggagcgcactttcccactaccctgggatcagcgcggggcggggcggggcctggaccgtatccctggcgccagcaaaacaaacgcgagcttccttcccggctgtgtggagcttggggccgggagcggatccagggccatcacccggactccaggcgcattaggcagggacgtgaactcgcgggggccaagtctagacccagacttggtgaagggaatcacctgggggtggggtgggggcaggagattttcgtgctgttgggaaagggtgccccgggaagggcctgcgtgggggacccggtgccccgaggtgcactgacctgttgtggtagctcctagcgtgggaaaacaaagcgacgtggctggacatccccgctccgccccgcccacctcccagaccccattgtggccctttcccgcttcctggcaaccgcactgactgcctgcccccccaacctgggtccgcctcccccttccccaccacccagtgccgccgctgggcctctgtgtggattctgtggcacgggtgggatagtagcctgggccacccagaacgctggcctcacccttacccaagtttcagtatacccattctggaataggacaaatctgcagacaaaagcaaggatgggaataaaggaactgaataatgcaaagcacacactccatttaattatgtgtagagagaggacttatctatttaagtccatgaaatattcgcaaaaaaaatcatgtattgggccacaaaataatcacacaaattgaaaaaaagatgtgacacatgatttgattacaatcaaatacaattctaggcaaacaaaatgtaaaaaaaagaagaagaaaactcagcctgggcaatacagtgagacccatctcgacaaaaaactttaaaaattagctgggtgtgatgatgtacatctgtattcccagctatggggtcggtggctgagtcggcaggatctgttgagtctgggagttggatcctgcagtgagcagtgatcccaccactagactccggcctgggtgacagagtgagaccttgtcttaaaaaaagaaaaaaaaagggagagagagaacaggaagcaggagcaaacaaatattttgaaattgacaaatctttaaaaaaaaaccctggatcaaaacttgtcagaaataatctggttacaaactgtagcaggaagagccgcagacaaaactcctcagacaccaggttaaagaaggaagggatttattcggccgggggcatcggcaagactcctgtctcaagagccgagctccctgagtgagcaattcctgtcccttttaagggctcacaactctaagggggtctgcgtgagaggtcatgatcgattgagcaagcagggggtacgtgactggggtctgcgtgcaccgggtaatcagaacggaacagaacaggacagggattttcacagtgcttttccatgcaatgtctggaatctacagataacataaccggttaggtcaggggtccctctttaactaccaggcccagggcgcggcactgggctgtctgcctgtggattttatttctgtcttttaggttttactttttctttctttggaggcagaaattgggcataagacatatatatgaggggtggtctccttccttaaaactacatatcaaacactacaaaggtagattcccttcctactgaactcctacaggaggcagctaaagctgtgttcttgtgggcggaggattacccaggtgccgaggcaagagactgaaggcacaaactgtttcagtataataaagaaaatagttacagtaagaatagttatcatacaaattagatatagagatgaccatggacattatcaatcattagtgtagacattagtcattaacttttaatattactctttgttgcatcattaatataacctaggaatcaccggcgggtatagggtcaggtgctgaagggacattgtgagaagtgacctagaaggcaagaggtgagccgtctgtcacgcccatataagggccgtttgagggctccttggtcaagcggtaacgccagtgtctgggaaggcacccgttacttagcagactgcgaaaggcagtctcctttctttgaaggagtcagggaacactctgctccaccagcttcttgtgggaggctggatattttccaggcctgcccgcagtcatccggaggcctaaccccctccctgtggtgcttcactggtcacgctccttgtccactttcatgctcctcccatactcctggttcctctttgaagttcacagtagatagcggtagaagaaatagttaaagtcttaaagtatttgatctttcttagaaatgcatagaagaaaacgctgacgtttgctgccttccctctctgcttcagctacctaaaagggaaggggcccctgtcctgtgatcacgtgacatg

SEQ ID NO: 1562868 - DNA, 4001 bp, Homo sapiens
aatgttcatctcaccacataaaaattcacaattcatggcacgttagttcaataaaatattatgctttctatgaatgataattataaaaacttgctataaatgggagcgagtttaacattaaatcacatgaaacagacatattaacaaaaatagatacattagagcaattgaattataaatgtttttttccttcaaaaattttccttcatgttatgttcacattcttttagcagcaaatgacaatgaactgccattgattttattttattttttgaacttaagtagtgtatccacaagtacaccattgccctgtccaatctttaggggagatattctattatctaaaactcggtaaattgacctatcatgttgttggtgatatcttatttaggtaaaaatattaggtatttagaacaatgcatttctgaatattttgactgatattattatagatggatttagaatctgccctttaggggtccagaaggaggtaatgtttggatatcattaggctagaatattttattgtcctacaaaaatgttgataaattgcttataagggcttatgtattagtaatgaccatgtcaccaaaataataaacccaaatatgataagaatcacaatcagaaaatatattttttcttcttttatttacaaccaaccaaacaaaataacatagctataattttgtcaatctcagaacaataaatttaagtaaaatagaacataaagaatttttatcacagatgaatcagatggaaactatccagaaaacacccaaatatgtgtattcctcagttaatactcagtctaggtgccaaagggaaaccacacgcttccatttatctatatgatttggcaactttaatttgtaaggggtccaacaggtgtttaatttcataggctgatatagtcaatatcactaggtccatattttttagatttaaataactatataattctgatttctctttgttagactgtactgatctgatcatggaggaataatctaatatgccttagattatgttggaactccccagaactttcctcagggctgcctttatctccttattctggaggctatagataaggggattgaagagtggggtcaccatagcatagaacaaagtttcaattttctgcatccctgtagaatgtccgagtcctgggctcacatacatgaccataagagagctatagcacagtgataccacagccaaatgagacccacaggtagagaaggccttatgtctcccagtgcttgaaggcatacccaacatagctttcaggacaagagtataggatccaataataaagaggaagttaccaaaaataactaatgagcttagagtgtagcaaaacagttggattcttggggcagaaacacaatccaatgcaaatcgtggccctgggtcacacacaacatggtcaataatgtttgggccacagaagggcatctgagagatgagaacaatggggatcaggaaccacagaaatccacaaacccagcacagtatgaccagtttggcatagagatgcccagtcatgatattaggatagagcaagggacggcagatagcaaggtactgatcaaaggccatcacagtcaaaagcaagcattctgatgtacccaaagagaagaagaaataaaactggagaaaacatccagcaaaggagatgttttttttctctgaaaggaagttgaccaacatcttgggaactgtagaagagacataccatatctctaaaaaggagaaatttcccaggaacatgtacatgggagtgtgaagtcgccggtcacaccacaggacaaaagcaatggctccattccctgttatagtcagtgcatatgttgtagtaaagagtgagaagaggaagatctgaattgtccactcacaagagaaaccttggagtataaattcatttacaaaagcaaagctggaatttggctcagagacattcattaggccagtgacctgcaaggtcaagggacacattatcagtcaggactcttttataaaatgtgttccttttttaagaatgaagagaagataatgaacatgaagtcatttttcaaaagaataattaggaagagaatgtagtttactttttctcggctatacagtatatgagttttgggcttcgtaggtagctgattgaacaaaaacaaacttctgccatcttctaaatctctccttaatatgcaatcgtgatagaactaggtaaagttaaattccttttgtaaggtcattattttgagacagaaatgattgaatatagtttctggatagcatacaactcaaagttagtactttgagaaggcacaaatgtgttagtttcttactgcaaacccaacttatggtgcaatagactcagtaaagaaagttttgaccatttacatttcagctaaacatattacttaacattatttacatatgcaaaagaaatgcacatattttaaaataaattggtagcaatcacgttaaagccattatctctgaatttctattgctgctgttgttagcttaagtgattatctaatgttactcaccaatattgatttttaatattaatattgtaaagctgcaatgttttctgtagaaagcaaaggctttaagcttctgattaatcttttaccttaatttcataaactgatatagtgattattatattgataaaatcaatataatattgatttagtcattatgtacaaaagtttgcaaagatctagacattaaactttacttttgaaggtatttcataaaattttgagattgattttccttatatgctttttttaaaattgaaaatttttaccagatgacagaaatcaaacacttattttgttataggtaaacttccttcttcctacattcttataaaaatatattagggatttgagttacctggaaaaaacttttcttttcctcagaaatatggagggatgtgagtcctagatgtcaagaggacattttgagcagaaacacaaattttcaaaagtttttcttccaacttgctctctacaccagtgctctgggaagtcttttggtatgactagttagaagttatgtttgtgcttcttttagtaatatatgtctctttaataggcttccaaccagaatcattaataaaccaacattaagaaattatggaatgaaaagggattgacacaggagtgtcatgattctcagcagtgctcaaaaggtgaagccatcatcgttttgacaggaaccaaatctctaaatgatttattttataaatcatattatgtcttcagctagacagagttttattgtggccggccccaaaattaaaaatgcactttatgaaactcacattctcctgggatgtagcctctatagcattaggaaagttatcttccaagatgaatctttaaaaagttaatgattacatattctctgaagaatcagtaaagagtaatgacaactattctaaggcatcattatttacaaagagcttgcccaccagatggattccagaaaatcttctggaagacacagtctgaggagaaataagatacaaaatgttaccaaaagttttgacataatgtttaggaacatttcaagtgttactgtgcatatattggaggatatacagcccagtgaggaaaatactgaggttccaacattgtcacacattgaacaaaaacttacagaatttagaaataacttttagaaggatggcacttttttgccagaatcctttagatatgagaagaaagtataagaagtagcaacatttaagttaattaacagaaatacttcagaggaacatgtgacttcccaattaatagagagaagtatttacttgtatttattagtatctcttctatttttactttatgacatttaggggccaacatagtgtaactaaacactcatgtgtgagtgaatgctcataccaagtgctgtgaagtagttgaggacatcagggatgtatgccctaggaccacagacatctgtctaaaagcaaactt

SEQ ID NO: 1562869 - DNA, 4001 bp, Homo sapiens
aacccaagcttgccagaggtcatgtccgcagatcacattcacccttgccagaggtcagggcccccggcccttggcggcgggccagaagcgtgacttggcctgctggaatgcatgcccctaaacatctctagactagtggcagtgtccgccaaccatggaggccctccatcaccatccctgcagcatcaccaccctccaacccccatgtcccaccctggcgcttccatacctgtagtaagagagcaaaccattgcccagcacgaaccagcggcgctggtagcccttcagatagttggtccacttgagaagccagccctcgaagctgtccagaggcagtaaggccagtggggcactggaggtcgtgccagtccccgacattggaaccccaagaggagtcttcgcctgtcctggtcgcagaagaggcaggggctttaacgctggcagcgatcctgactcgggtctgagaaaggtcgcgctccccaccgcccgggagagcggctccgatgcggccttagtgaagggcccagcccctacacctgagcttgactctgaccccggccgcgacccctgcagcagttccgatggctgcccagcccctggctccggctcagacgtcgtctcggacacaggttccgatcttggcactgcctccgaaactgcctccgacacctgttctgacagcggtccccgctccggttcgggcacgggctggggctggggcttgggctccggcccggagccggacgtggaagcgctcatgcccggcgccgccgtgtggcacgacaggcaggggacaaccgtgaacagcgacgagagcccgcgggagcggccgccacagccgccgcctcggctcggagccgccgctttccccatagagccggccgacccgcgcgcggccgagcggccagtgggggcggggggcaggccgggggcggggccgggggcgcagtcacgtgcgcgcggcgcgaggcgggggcgcgcgcgggttcctccgcggtcccgtgcgctccgtgcccgtcagcgcccgccggctgttgtgctctcggccagcctcgggccatgtttggaccctgggtccttcctaggtccggccggtggaaggagctctgacaacacctgtgggcggaagagcttggtggtcggtcaactccgaaggggatggcgcgcttcaggccacggtctctgcttcggcccagccgtgccaggcgctggaggaacaatgatgaatgcggagcccgccagctcccagcgcagctctgcccacgggaccctgcgccgacgccccctcccccaacccaggctggggtgggttcgctctccgccacccaggaaagccgggtgggaagcaggtacggcacccagaggccacgaaatgcgcacgaagcacaggggcgctaaaggctaaagacgacgccccgccccccatggcagccattacctgtctgtgggtcgctcctgcggccgccagaagcggtggccccaagtggccgcctcaccgcctccacctcctgagccagctggcctacggttcatgccaaggcgcttcgctgccagtgacgacatcgttcgggttctctaaacaaataggggaagactttttgtaaaccaagcgttttagtacaagaaacatctcaaagtgggattctgaacttggacctcccgggatccctgggtaggctggcagtctgtgaggcttccgcagaggtttacctgtctgtgcatttttccagagtaggtccataacaaaggaggctgtgaccccagaatggttaaaacatcagcgaatttttttttccgctttttttttttttcctttttgagactgagtctcactcggtagcccaggctggaatgcagtggcgtgatcttggttcactgcagcctccgcttcccaggttcaagcgattctcctgccttggcctccctagtagctggaattccacggcccgcaccatgcccagctaaattttgtatttttagtagaaacggggtttcaccatgttggtcaggctggtcttgaactcctgacctcaggccaggatcctcccgcctcggcctcccaaagtgctaggattacaggcgtgagccactgtgcccagccatcagtgattttttttttttcttaagaatctatccaaatgacgaaagttgatggttactacaaataatcagaaatacaaatggaaagactgaacattgggtttctgtccagacttttcaagcttagacctctctgcagactcctcttagctcaccatcacgtcttactctccccttacccacctatccattcctgatctttgcttgtgacaagataacctgtgtagggactgcttcctacgtgaagtggtccccagaaggaagcagattggaaggtcctagaaataggaggtgcagacatgcactgagcaggagccgctggcatctttgctggtgactttgagaccccttcctcaggcacttgtctttgaatggtggtcttacctgcaattttgctgtgagctctggagtgcagagagccccccatcttggtctatctcatatgtatgacggtgaccctcaaacttcagcatggtgagtccccccaaggaaaagtgattgcctctggggtgtagtgggggacagaactggacaactgagaaatgaggtggaatgcttgcttttcactcacactttgaaccttttgtatgttttactgtgtatgtttcactgtgtgtatgtttcaccgattcaaaataatgatgataattgttaaaatcaccccagggaggtttattagaaacacacttttccagagctgggcacggtggctcatgcctgtaatcccagcaccttgggaggccgaggcaggcagatcacgaggtcaggagaccagtctggccaacataatgaaaccctgtctctactaaaaattaaaaaaattagccgggtgtggtggtgtgtgcctgtaatcccagctactcgggaggccaaggcaagagaattgcgtgaacccaggaggcagaggttgcagtgagccgagatcgcaacattgcactccagcacgggcgacagtgagagactccatcttagtaaaaaaaagaaaaagaaattcacttctccatccccagtaagtcagaggtggaatccaagaacatgctttttttttttttttctttttcttttcttgagacagtgtcttactctgtcacctagtctggagtgcagtgatgcaatcatggctcactgcagccttggccttcaggggtcaagtggtcctcccacctcggcctccagattagatgggactacaggcatgtgccaccacacccagctaattaaaaaaatttttttttgtagagatggagtctccctatgttgcccagactggtcttgaaatcctggctcagggaatcctcctgtcttggcctcccaaggtgttgggattacaggtgtgagccacctcgtccagccaggaacatgcattttattatttattcatttactttgagatggagtcttgctctgttgcccaggctggcatgcagtggcacaatctcggctcactgcaacctctgcctcctgggttcaagcgattcttgtgcctcagcctcccgagcagctgggattacaggcatgcgccaccaggcccagataatttttgtatttttagtagaaacggggtttcaccatgttggccaggctggtctcgaactcctgacctcaggtgatccacccacctcggcctcccaaagtatgaggattacaggcatgagggaccacgcccagctgagaacatgcattttaatgatttcccagaggttttgcatgtggatggatcatggagcacattttggtggacagtgatgtggagggaacatctacggctttgggagtcagacccacgaaagaaatcccagttcggccactcccttgctgtgggtccttcagtgaccccgctgagcttccacttgctcatctgtaaaatgaggataataacaactacctctcaggttgtaatg

SEQ ID NO: 1562870 - DNA, 4001 bp, Homo sapiens
tgacgggcgcctgtaatcccaactactcaggaggctgaggcagaagaattgcttgaacctggggggcggaggttgcagtgagccaagattgcaccactgcactccagcctgggcgacagagcaatactccgtctcaaaaacaaaaacaacaaaaaacaaaaccctgtagtgggtgacttgaagggatactgttggctgaatgaagtgagtgaagtgacctgaatttcagcaacagcaagtcaaggtccttttgtgtgcagcaatgaaacagtgcttctcagagtgtggtcctggaccagcatcaccagccacgcctgggaagttattagaaaatccgaatctcaggcccttcccctaggcccactgtaacagaaattcattggggaggcccagcactttgtgttccaacaagctcttcagggaatgctgatgcacactcaggtttgagaaccactggcatagactgatctgagttctcaaggcttaaaccaaccatccccaggaagcagacccagggaagagccagtaagaaagcaaagggaggcttcagtaacctcctttcaaccagtttcagtgggaagacagtgttagctctctcaccactggactttaattttgaatcccgtgctgggtctggaataagaaaggagggcagcaaaacacttcctagctctccgcaaaatgccaagatggactcctgaaggccaagaaccgtgtccaatacatctgtgagtctgtggtgcccagcccaaggcctggcaaccagaggcatcaggaaaggtgggagtaactgccccaggcgggaagaataagcagcccttcctaagagtgtgggtcctaaggactgaacaaggtgactctctccctcaatcccaaacacacaatgatgttagctcccgaaccagaaagggcaaggactttgaggggctgactctagctagctgccccaagccccacaactgccaagcagaagggaactgaggccccagatcactcccttactccacctccccacttgcccaaaaacccaagcttgccagaggtcatgtccgcagatcacattcacccttgccagaggtcagggcccccggcccttggcggcgggccagaagcgtgacttggcctgctggaatgcatgcccctaaacatctctagactagtggcagtgtccgccaaccatggaggccctccatcaccatccctgcagcatcaccaccctccaacccccatgtcccaccctggcgcttccatacctgtagtaagagagcaaaccattgcccagcacgaaccagcggcgctggtagcccttcagatagttggtccacttgagaagccagccctcgaagctgtccagaggcagtaaggccagtggggcactggaggtcgtgccagtccccgacattggaaccccaagaggagtcttcgcctgtcctggtcgcagaagaggcaggggctttaacgctggcagcgatcctgactcgggtctgagaaaggtcgcgctccccaccgcccgggagagcggctccgatgcggccttagtgaagggcccagcccctacacctgagcttgactctgaccccggccgcgacccctgcagcagttccgatggctgcccagcccctggctccggctcagacgtcgtctcggacacaggttccgatcttggcactgcctccgaaactgcctccgacacctgttctgacagcggtccccgctccggttcgggcacgggctggggctggggcttgggctccggcccggagccggacgtggaagcgctcatgcccggcgccgccgtgtggcacgacaggcaggggacaaccgtgaacagcgacgagagcccgcgggagcggccgccacagccgccgcctcggctcggagccgccgctttccccatagagccggccgacccgcgcgcggccgagcggccagtgggggcggggggcaggccgggggcggggccgggggcgcagtcacgtgcgcgcggcgcgaggcgggggcgcgcgcgggttcctccgcggtcccgtgcgctccgtgcccgtcagcgcccgccggctgttgtgctctcggccagcctcgggccatgtttggaccctgggtccttcctaggtccggccggtggaaggagctctgacaacacctgtgggcggaagagcttggtggtcggtcaactccgaaggggatggcgcgcttcaggccacggtctctgcttcggcccagccgtgccaggcgctggaggaacaatgatgaatgcggagcccgccagctcccagcgcagctctgcccacgggaccctgcgccgacgccccctcccccaacccaggctggggtgggttcgctctccgccacccaggaaagccgggtgggaagcaggtacggcacccagaggccacgaaatgcgcacgaagcacaggggcgctaaaggctaaagacgacgccccgccccccatggcagccattacctgtctgtgggtcgctcctgcggccgccagaagcggtggccccaagtggccgcctcaccgcctccacctcctgagccagctggcctacggttcatgccaaggcgcttcgctgccagtgacgacatcgttcgggttctctaaacaaataggggaagactttttgtaaaccaagcgttttagtacaagaaacatctcaaagtgggattctgaacttggacctcccgggatccctgggtaggctggcagtctgtgaggcttccgcagaggtttacctgtctgtgcatttttccagagtaggtccataacaaaggaggctgtgaccccagaatggttaaaacatcagcgaatttttttttccgctttttttttttttcctttttgagactgagtctcactcggtagcccaggctggaatgcagtggcgtgatcttggttcactgcagcctccgcttcccaggttcaagcgattctcctgccttggcctccctagtagctggaattccacggcccgcaccatgcccagctaaattttgtatttttagtagaaacggggtttcaccatgttggtcaggctggtcttgaactcctgacctcaggccaggatcctcccgcctcggcctcccaaagtgctaggattacaggcgtgagccactgtgcccagccatcagtgattttttttttttcttaagaatctatccaaatgacgaaagttgatggttactacaaataatcagaaatacaaatggaaagactgaacattgggtttctgtccagacttttcaagcttagacctctctgcagactcctcttagctcaccatcacgtcttactctccccttacccacctatccattcctgatctttgcttgtgacaagataacctgtgtagggactgcttcctacgtgaagtggtccccagaaggaagcagattggaaggtcctagaaataggaggtgcagacatgcactgagcaggagccgctggcatctttgctggtgactttgagaccccttcctcaggcacttgtctttgaatggtggtcttacctgcaattttgctgtgagctctggagtgcagagagccccccatcttggtctatctcatatgtatgacggtgaccctcaaacttcagcatggtgagtccccccaaggaaaagtgattgcctctggggtgtagtgggggacagaactggacaactgagaaatgaggtggaatgcttgcttttcactcacactttgaaccttttgtatgttttactgtgtatgtttcactgtgtgtatgtttcaccgattcaaaataatgatgataattgttaaaatcaccccagggaggtttattagaaacacacttttccagagctgggcacggtggctcatgcctgtaatcccagcaccttgggaggccgaggcaggcagatcacgaggtcaggagaccagtctggccaacataatgaaaccctgtctctactaaaaattaaaaaaattagccgggtgtggtggtgtgtgcctgtaatcccagctactcgggaggccaaggca

SEQ ID NO: 1562871 - DNA, 4001 bp, Homo sapiens
ttcactactaccagttttttgtttttgtttttagagaaagggtcttgctctgtcacccaggcatgatcatagttcactgaagccttgacctcctgggctcaagtgatcgccccacctcagtctcttgagtaggtaggactataggtgtgtgctaccacacccagttactattattactttttttgaaagatggggtcttgatatgttgcccaggctgctctccactcctggcctcaagcgatcctcccactacagcctcccaaaatgctgggattacaggcatgaactgccatgcctggctccactatcagttttaatgaccaataattcacgcttatattccattttctcagttggggtgagaaccatgaagagaaagtctctgatgaagaaagggtatagcactcctgatatagacagaagtggttttcttaggtagagagaggggctgcacctaggcctagaaggcaggggccaaaaactcagatacaatgcacttgatgaacaataaggccctacaccatcacttttgtcttcctggatccagcacattaaataaatatgtggagtaaagctgaattaaacctccctccaagaaaaacatggaatttggagatgggggaagagagatagcagcaataagcaatccagggagtctgacagagcggactgtgcttctcaaagtgagaagcttggagggctggcaggagccctgtgtagaatgtttattataaaaatgggggaaggtagggagtggttgctcacgcctgtaattctagcagtttgggaggcggaggtgggcagatcacttgaggtcaggagttcaagaccagcctggacaacatggtgaaacccatctctactaaaaacacaaaaattagccaggcatggtggcacaagcctgtaatcccagctactggggaggctgaggcaggagaatcgtctgaacccgggaggtggaggttgcagtgagctgagatcgtaccactgcactccagcctgggcaacagagcaagactccatttcaaaaataaataaataaaaataaaaaataaaaatgggggagggccgggtgtctcacacctgtaatccagcactttgggaggccgaggcaggaaaattgcctgagcccagcagtttgagaccagcatgggcaacacggtgaggccctgtctctataaaaaaaatttaaattaaattaaaacaaataaaaattaaaatgggggtccctaggtgccatatgaccatcggatctgaatctcagtggtcctgccctaggaatctgcagttttaacatgctcccccaggaagacttcatgtccctcaaagtaagagagaagttattcagttttcttttcttgtgttgtttaatccataccagtcaaattttcactcaagtgagttcataagagagttctttatactgtctggccagctgggaggatggggcttctctcctcctcaggactgaggggtctgagggtcaatagcttgaatgcacctatattttccctttgttctaaggagagcataaccctgttcccatccatcttcttagggagtgaggacagaggcagtggccacagaagaacctggatcagtatctgcaggcattctccaagccctaaggaatgtctcccccaacaagtaagaaacactgtgctttgtgaagtcattccttcaaacgggaagagaggactgttaagtggaccaagcccacttgcatccccaggcacacaggcagcagggttcccgagagctgtttacagagccagaacaacgccacactccctgggaatttatttccacctcagtgggatcacacccaacaggaacaggaggaaattcttccaagtcctacctgttagaggattttcattttggagcaatagggtggcaggctgtccaggtattctttagggccagcctctagggccaccagccacccaaccccctcctcatccccgcccaccccactctactgcctgctctagttgctctaagggcagagcctgggctgcctgggataattccaagtgctgggctgtgatatcagaatagagttatgacatcaatggagggtaggcgagcctaggggaggcgagaaccggggagcccctgaggcgctaggctagccccccagaagtgaaggcccaagagggaggtggccagctctgtatcggtttcttacaaacctgaacatcagaaaatgactcacaggtacggagagatttgttgcaagccagccaacctgctggtgcttccctagacactgagttacagaaaagaaagcgaacaagccatcttctagcgcccccctgtgtcaagtaaaaggatactatctcttttctgacttggaggtttgcctttggaccagggagttgggagcagagaccccaagtgggctgggggtcaaggtcccccaggatagggttaaatgctcgtagataaaatgcaggatgcccagttacatttgaatttcagacacacaataaataaattttagtatatagactgcccaaatattgcatgagacatccttatactaaaatattattcgttttgtatttgaagctcaaattaaactgggtgacctgtgggtttttttttttttttctgtcactctgttgcccaggctggagagcagtggctcaatctcggctcactgcaacctccacctcctgggttcaagcaattctcctgcctcagcctcccaagtagctgggattagaggcatgcaccaccacacctggataatttttgtattttcagtagaaacaggtttcaccatgttggccaggctggtcttgaacttctgacctcaagtgatctgtccacttcagcctcccaaagtgttgggattacaggcgtaagccactgcacccggccaacctgtgtttgtatattttgaatctgccaatcccactcaaggagcttttgaaaaaaaatacaaataccctctgcacccaaaagtcattctcattctgttttagcagggcaggggacttcttgggaacctgtattattttaaagctgcgaaagtgactatcaataactgcagcttactttagtcgagtgtttgccaagccgtgtgccaagatctcttcacacattatctaaactaatcctcacagcacctctaagagttggttctatcatgaaacccattttacaaaggagagaaatgatgcaaaagacggcaagcaacttgtccaaggtcacacagtgggtaagtgtgggagccacgatttgaacccaggcaggctggctccagcatctctgcttccactgacttagaaatctttgattgaagggaccctgggaagcacagaattgaagcttctaggggactgacaagcggggactctgaggctctaggaagcccatgctcagactaactgctacgctaccatgctcgaggggctgagccaaggagcaaacacctgggagcaaacatctggcccaggcaggaggctggctcagagaaggctttcctgaatggcctctccctggagggtaaacagacttgaggaaaatagggtgtgggaaggggctggatactagggaacagaccttgccaacaagaggtacagcattcacgctggctggcagcaagatggtgtgccagtgaagacagcagaagctggatgggtctagagcgcaagaggagccagagaagagacataaatcaaaattgcattttttttttttggagacggagtcttgctctgttgcccaggctggagtgcagtggtgcaatctcagctcactgcaagctctgcctcctgggttcaccccctgcctcagcctcccgagtagctgggactacaggcgcccgccaccacgcccggctaattttttgtattttcagtggagacagggttacaccgtgttagccaggatgtctcgatctcctgacctcgtggtccacccgccttggcctcccaaagtgctgagattacaggcgtgagccaccgcgcccggcccaaaattgcatttta

SEQ ID NO: 1562872 - DNA, 4001 bp, Homo sapiens
tatgtggaaatcttataaaaactgagatttccagcttctcttgaaaacacccttctggccttcccaggcccattttcacacagaacacctgagggacaaactcccgtattcccccctagggtctccgacatggtagctgagttctggctgctcttgactgctgcactcgccgctgggcctcctccctccggtgcagcaagctctgctccaggccctgttctaagcacagtgcccaccaacacacaacttcctgagccgcctcctccccaggcttgctgtgcagggcaggacaccaacagaaggataagatggaaggctggctggcctagaggggtctggccgtcaaaaaggtcaccccgtcactgctctcaagatacagctgctctggtcacacctgaggttccctacaaaggtgacattcctccacaaccaagccaagtgctagcagacatcgggtccaatgctccttgttaacacttccagacaagggcaaccaagaaaatcattagatgagccaagagaaaaaaaacaatgtcttttctttttaaaactaactccaaaattctccctcggaataaatccatccaaaccgatgacagaaacatcatttaaatttcgcgtaaagaacataactactttagaaatgacgctatatccaaaataaaaactggaaactaagaccaatcctctaaaaccagaacacacactttggacgaaatttacttgcaagtttccttaaaggactcttaagatggaggtgtagtatcaactcctaatgaaatacatttcatttacaactgcacacaccctaagacctcatatggtgtttcaagagaactcacgtggttggatgggattcctgggctgaggcttgcagcctgcaacttcgaagtcctctggaatggaccaaggtcttatgaagccattagcataaccagtaagcaggcaaagttaattacaaggtttattacagatcagagagtgctgatttctaaaggagctgtttctaataaattcgtgttaggtgaaattaaccgcctctgtgtcttttaagtccacaaggttaaagaatcctaatttttccgagtttcagatgttaacagaaacactcatcaaggtaaatacagcaaatttcactcacgcaaaatttccaataaagaaggtttcaagcatcaggaattgcaggcaagagcttacagagtttgcaagtcttccatttaagacagctaaggttttcccccacgctaggaagggcccttgggcttgtgagcctgcacaggccagggcagtcattcaggatcaccacgggacggggagggagggttgctcaaacccaggcggccactcggagaatcacacactgagcaaagccgacaccactggtggccccaggacgaggcccttgtgggcaaatcagcgactctacaggggctccaggggcatgcggaccccaggccgactctggggaagaagaggtagatgggtggataaaacaccgaccaccgcttcccccttcttttcataaagatatagattatatttcattttctttttgcataggttaattagacggacaagtctctagccgcagccccctctccaaaatgccccgcgcgtgaagcaagccgggagcgcacgccggcggggtgcggggacaggggttccccgaggctccccgcgctccccacgccgcgagggagtgacatcagaggctcccgtggatcgatcacgcagcaaagccaggcaccgggcgtgcatgcgcggggagcctggcctccctccgggtggaagcccggcaagcactaacccttcttaaatttattcaggcagccggagctgcagaaggagcgcacggaggccgtgtcccagcagccgcgtcccttcatttcccgcggcggggcagcctccaatcggcggggcgctacatggcgccgggtcccgggggcttgcacggacgcgtgcacagctcggtgggccgcccggcggaggcggcggacactcgtgggtcccggcgccgcgttaccacaatgcaccactgccgcccgccacccggtacatgagcgcgttaaccccgtccgcgccgcgggagccgagcccagcctgagcggcggtgctgcctaccacttcctcccgccccaggagcgcggcctcgtcccgcgcgtcgcctgctggtccgtgcgaccccgcggacgcccatgcaggctccccacttcaatgtcacattttaatgcgaaaatccgagcgaaagtgctgtcccctgcagcaacaagctcggcgttgctttatctcaaagggcaaagatgcccttgagagctaaggggcacgcgggaaatggggatggccaggggcctgacggtgattccaggaaatcggggtcacctctgagaccctctcatcttctgaccccgctgccgtggctggtgcacctgtgtctggccacctgcagacacctggccaccatgcaggaagaaggcaacaggcagggccccggggagctgggctcccttagttctgctgccacaggcctgcaggcatctggtcacaaggtatttgcccaggcctttgaacacaactccactgtccagctgcccacaggcataaccagtaagttagcaaagttaattacaaggtttattacagatcagagaacgctgatttctaaaggagctgtttctaataaattcgtgttaagtgaaattaactgcctctgtgtcttttaggtctacaaggttaaagaatcctagttttccccagagtttcagatgttaacagaaacactcaacaaggtaaatacagcaagtttcacttacaaaaatttccagtaaagaagcgcccaccgcctccgccaggcagcccaccgaaatctccgtgggatgtgtggtgggcgtcagaaacccaactgtccaaatctgagcttccctatccccgcacccccatcccccatccaccgccatttgtaccacacccttcctcaaccctccccacctcagctagtgacatcattcgggtcagaaactctggagtcgtctgtgacttctccgtctcttagatccacatccagttggtcagcacatcatgatggctgtacccgtagaatacagccaggatcccttgactctcaccacctgcatgttgtttctggggcctgctacgccctcgtcttgcctgtggactcttacacaatctccctgcaagtctctctgctcccactctggtccccacagtctctgcacaatataacagctgagagatcctgtacactgtatgtcagacgctgacactctcccactcagaggtcttcaactccacacttgggcctgccccactcctctgctgaggctcccacttcgctctgccttatgtatgtctcatctttcccactggactacagactctgggccctgggactgagttttagccactgcttcatctccaacagagccctacctaactgtgccaccttgcaggagctcaagcaaaggaattgatcaaatgtaatttattgaaaaggaatccattttcaccaatttaaagctttttcaaatacacatcaaagctcctcttttaacatctaatagacccagggaaggtggtgctgggtcagtaattcccttccaggcctttgaggcaactgagtacttctttcacctggagaattaatccttaacaattgagttagattcactggccgggcagggggatagaaagcatttagccattctgggccttggttttctggctgcaaaatgaagagcaccacagtgatggaaatggtcctagcgatagagtgttgagaacaccaggctgcatgcttgacctgcatttcctcatttcattctcacagaaaagccttgtttgataaatttcaccaacaccctcttttacagatgaggagactaaggctctgaggtcaagtgacttgcccagggtcaccaggcttggaactggcctggtctggctgacctcagaggccacactcagagaaccatgctctgcaaggt

SEQ ID NO: 1562873 - DNA, 4001 bp, Homo sapiens
tagccctgagggcacccagcaaggaggtggcagagccagatccagaacccaggtcctcaactgagagcttgctctaacatcctacctggctgcagctcccaggaggccctcctccccacattgccctaagcttggcccagtgctctgtcaagttagtcttggttccagccacctgttcatgggctctctgacactgctgctctgctgaccctggcccatgcaggtctccaggctctgctgagctggtctcaaggctcagagtgcaagtgaggaaggacaccctcatctccctgggtgctgcttcagggaagtcccctgcatcccgggactgggagaaggggctaatcgggtcagtacagggtgaacaggatgggatcccaggtctgtctagccccagggccacctccacacaaggcacgatccccttgcctgcctgatgcaagtaggggtgcagaggccagggctgtgctgtgcatggtgagagtgaattggtgcttcatggttttctgggttcttgcctatctggctgcacaaggcctctgccccgccctccctcatccctgcaccatcacttcctgccagtctcctacagcccccagaatcatcctctccatccacaagttctcacatagatgggtgctttgttttcatatacctcatgtcatttacaagacttatgaaagagccatacaacagcagtttaaaatagtagccaaaggtcatggtaagaattcccacaaactcacatctgagggtgcctgggcttcccagcagcaaaagcaaagagggaaagatgaccagagaacaaagatgaattaggccccctacctcctacctttgctgttcacagggactctaatactttagaaatgactattttctccttcaagggaaaatggagtatttgttttttccacagatccgggcagctgatagcctctcatagaaaatggtttccaatcctctccagcctcatctcctggggctccgttccttcccagggccctgagtgtggcccaccaggtatcctgtcttcttgcctttccctggctcaaattcaaaccctcctgctgattctgatgccagccccacctccctcacaccgcgggcccactgtggggcagggcattgcaggcattcttacaagcactgaggtagattttttttttttttttatagtgtgcatgaccgaggaggaaatgaaggctcagggtgactgagggactcgcccaaggccacaaggaggtgtgtgtagggccaggatccaagtccctgagcatctcacctgcatgtcccccagggtatggaaccagtgctgttagggtttactttgtaaagccaaatcttgattgccgtctgggagccccttgagggcagggatgttgtgggatcccagagccttcctggtgtggagctaggttcctgggagatattcactaaccaggctgcctgggaataaccctgtccaagcaacagagcccagccctagcctcagggagaaggggtggcctcccagcacccttagccccagctgaggactttgtacacacagccagggttgctggctgatacactggccgtgagtgacctcagtccccctcaaggctaccaaagggccagctggcatcgtgcagcagggagacaggaagtccctaggacagctgggcctcatttgggtacatgtgcctaggctgggcacatgcaggtcgtagagtgtcacagtcacctaaaagcggggcagggtgaaaactgctgtgccctaatatcaaaggcctcatgtggctgcacccaagacctttacccccacagcacatgagctgcctggtcaccccatggatgcagagagcccgtccacctcccccagcccggatgcacccacctggtgtccatccctgactcccagggtctcctctgctgctgccggccttctccaggccccatcctggctgtgctgtggggagaggcaggcgcctggcgtggccctgctgttctcagaatgctgagctgggctgtgtgctgtgtgcttgataagctggattaggcttggggcccggcagagggactggcagggggaggttcccaggggcccagggagggcctggctgacccagcccaggcctgaacgtggtctcatttctctgaggctgtgtgacaactctacctggggccaggagactcgtgctcagctgtgagcaggaggagagacgggctgacctgaagccccctacccgcacatttgtgtcctgaattgtttaaggggaagagagtgaggggtcctagtgggagctggaggtggtacctgggccctgcatgggtgctaccccactgcccaatcctgggacaggcctgtaatctcctggcgccctcctgggctcctacagagtccctgattctgtgacctgtcaggttgattgtcctcagcgtggggacagagttccagtgtcctggccctgccccttctgcctacccccaagtgctgcacagagggttctggtgaaaggggtgttgggggtatgggtgctctgagatgcagaggggccggcctggggtgcagagcccctgggcagtgtggtcctgtctccatggggagggcagggagcctgtcgagttgcccccaagcagagtgagaaccacaaagctcgacagacaaggggggtctccgccctggggcagccccacctggggagtccaggccctgcctgaccaccagggactctccctactgagaagtctggcctggggaagaaggctgtaagggctgcccacccaggggaaaccaagtcaggggccatgccatgtgaggtctgagcaggggttgctgctggtcaccggtgccccatgggacagacattgagcatctctgacctggaaacctttgcccagatgcaccccaggaagaggaggacaaactctaatcgcttttgctgttcctaatcctaatcctaatcctgacagtgatctcactgctccccaggccaggcgggagagcaaggtgtgaggtcagctagcctgggtcccctgtgtgtgacctagggcagcctctcaggctcttgggagcatgcagagccaggaccctgtctggccttcagtggcttcctggaaacttcccttctagacagggatgtgagggaggcaccagaggcctgctgggcattgacgtgggcagccactgggctcacggaggaggtggggagatgggccaaatgcccatatggtccaggctaggaaactggctccagccattagcacacacaggaggtcccagcacccctggtgcagggataatgggagaaagggccgtgttcttatctgcggctggtccaggacctgccaggcatctgacgtgtctgccctctggctctgggctcccaggtgggcggccggaggaccctctgctctccaggtttctagggccaaggctacccaccctccacgctgatcctcacatcccttgttgccacagaccctgcctctcaccagcctggggttctgaaggtgatgagcggtgagatcgcagagagtcagggtctccctgaacccctctgcatggccaggggactcactggagtaacaggatcttgcctcccctgccattgaggagtggcgggctggcctcacctatttttttttttgagacagagtcttgctcttgcccaggctggagtgcagtggtgccatctcagctcactgcaacctctgcctcccaggctcaagcgattctcgtgcctcagccttctgaggagctgggactacaggcacctgccaccacacctggctaatttttgtatttttagtagagacagggtttcactatgttggccaggctggtctcaaactcctgacctcaagtaatctgcccgcgtcggcctctcaaagtgctgggattacaggcatgagccaccatgcctggcttggcttcactttacacaagatgaaacccaagctcagcaggtgcctcacaaaggcaggaaggagctgcactgcgattctggtcttaagtg

SEQ ID NO: 1562874 - DNA, 4001 bp, Homo sapiens
ccagccttagctcctcagggttaaggctggaataacatagcgactcagttccccgacctggccatatggagtggggctaggcctgtcctccctgcttctcactcccttcctaaccccatagttctctgagactcagatgccacaagggcccaggtgcttacataggggtccaggagtctgctggtgtcctgcatgagatctgtctgcttctggagctggccaaggagcacgcggtactctttcgagcagctgcctatagccgccatgctcgccatgcttggaaacaggagtgcaaggaccagacctaaggcagagaagaggggtgtcacctgacttggtgaggaaagccacagatgggagcctcggggagggggttcaagagggccttgaaaggtgcctccttcatcccagactttgtgtagtggagggcgggggctgggcactgtgtggcacggtgtgtgcccaggtgtgcccaccaaggccaccatcatctccccagtaagtcactgcccagggcctgacacagcaagcagtgggagggactgagacagtggctgcgatttaccaagtaggtctttgagcaaaggctgcagtgcctggccggatcccagtcctgcctacagcacggttctaacctcgggagctgactctctgcaaggtgggactggctccctgcaagaccactgggctaaagaccggccactgccctaggacctgccttgtcagctgctctggccatccaggtagatgggcctgagagggcttcagggcaggcagcccgggagcagcttgtgtcctcagctctgtctagaaccaggagaggctgccttttcaaccagaggtgcagcctggaacagatgtggaagaccttccagtccatgtccccactttcctgacaggtaaaccaagtctcaggagaaggtcctactcaggtcacacaaggccagggctctcccctgacctctcttgcctccctcctctctccataagtggctccttctgtcaggcccaccagggatgctgtgagcctgtcagaaggtgttgggggcgggtacagttaccgctcaccaccacccccaacggggcaccggcagccacgtggtcggaaggggcctatggcgcaatggcccggaaggcagtgacaccatcgttcccgtcctaagaaccatccggccctttggggaagactggctgttggggagggccaaggggccaggcacccaggcttagcgaccccacggcaccctcgccgcctccccaggtatctgctgccgggctctggcaggggcctgtgcctgtggcagcgcacgtgggactggggtttctgtgtggctgtgcatctgggtctgtgtgcggcgtgagggagacctgttccgttcaccatggggactctggtctgcatgtgggggttcctgggctggtgagatccagggctgtagatgacgtcatatggctgtgtgcgcatgtggccatgtgggtgtggctgtgcatgctgtgtgattgtgtgggccctggggcccccaggcctggctgactttctattcatcccgggcaagctggaggccccacaacccctccacacctcacaccacttccctgcccagcttctgagcctccctctcctgcccagcctctttgcccatcctattctctcaccccctggttcccagagttgcctctacatcttgacatcacctccccctggaagccttccagggatgccccttctctacctgtggagatgccaggttctcagtggaccactctctctgcctgacctcctggctctctccccttctcagcatccttctgcctggcgcctggcctccccagttcccggagggcagagggtgcctctgctccccaccggcacccgtgggcagacccagcaggcgggttctggcggggaggaaggaagtacttactgagcagcgtcctctgtgtgagcagtacccccatgctgggtgcccgtgctccggcccgcgcccgctgggggtgacacctctcggctgggagccctgcaggctggcagccactttatgcccgctggggcgattggccaacacctcatgaggtgggtggggatggggaggggggagggcaggccttctgggaacatgaccccaaaaaccaaaatttccacgggcggccaatgggcgcagggcgcggtgtatgcccgctcctcctcctgttttcttcgaattcgttcttcgaggtcagccctacgcccaaggatgatgtaaaaccgcagcctcagccttcctagggtgagtggggaggaaaagggtccatgccatcttcagggaactgggccagggatgggcaggagggacttcgagctgggcctctggaggccccaggccagtcttggcccaggagccattggcctcacaggacacggtggttgggggctgaggggagcgagacatcttccttcttgagtgcccttcctgccctctcgccggggctgttgggacatctgtgagcggaaaccaccgggctctgggcacagagccagacgcaggctggcagccccgagattgtggttcaggccccaggaccagcatcccccagcccggctcccgacggtctcctttcccccatcgtgcaccctctgccaggcccactccccaaagccaggccttgtctttgtaggcaggctccactggggagaactggacacttggagcaagagaaacaggaggccagggttcaagcctgctgaggtgctgtgtgacctgaggcaagtcacttaacctctctgggcctcagagacccacaactataaaatgaggaggagaaaagcctttcccagcccacctcacagggttgctgccagcatggacataaaaggaaaagacctctgaaggaaaaagcaaagatgaaggtctgattccaagtattagctgtcgagggggcgggatgggggaaggaggagatggggaagctgtgagctcagaggggaagccggggagggggagttgccgccttgacagttggggaccaggtttcactttctctgaaagatagcgatcttaggttggtcctctgcgaaagggccctgggaacagcgcctccctagtcaaactgctactttactgtggggtaaactgaggcctgggtgaaggcagacagggaggccaagaggctggcccaggcctatagaccctgcctggtcagcacatctcccaggcccagaggagggtccttggcctgcaccctaagaagcccgggtgggaggaggccctcaggagtctggggagtcagggtgggactcctggaggctgccagggaggcctgagctgctccagctggagggagcatggggtctggggcgcctgagcaaggagagctggggcagccagaaaggaggaggttggatgcacccctgtccatgcctgctcccgatgcccactgtggccaccaaggcagttgccacccattctccccatcactcatttattcattcgacaaacctttatttggctccatgctgcaccagccactcccaggtctgaggatcacgtagtaggcaaaaataggcgaccccacgcccaggaggctgctcttcagcccctacccactccccggcacccaggctgggactcaccacaccaggcctcatacctccccctcaccacccccaggggccagttctggattctcatcctgagaatgtcgcttccgctgaagtcctcatctctgtgcccacccccacaatgctgtttcctggggccatgccaagaggggatccttctccatttcacatccctgatctcgtctttttttctctttttttaaatgcaggatcttgctctgtcacccaggctggagtgcagtggcgccattgtaggtagctcactgtggcctccagctcctaagctgaagcaaggctccccgccttagtctcctgagtagctgagaccacaggcatgcatcactatgcccagctaatttttttattttttgtagagacggggtgtcactatgttgcccaggct

SEQ ID NO: 1562875 - DNA, 4001 bp, Homo sapiens
tgctgcgtggtgtgcaccgagcagtaagggaggaggcgagaggggcatctagggaccctctaggaggccatagtctcatgcatggcatggcatgggtagtggtgaaaaatcttggaagggacaggaaggggtccagggtgagtcacgggtctggctgaggcactagtggatgtcacagccaccatgactagtgggcgtcacagaggccatgccaggagaggaaaataattgatctttggacatgtgggtgtgcacctagaagacagctgtgctctgggcaggtgatcactgggaatacaccctgggcatcagaggagcagaagtggcagttgaggctggggatgagctgggtggagggaggaggaaaacgcagccgagaagaggggaggagcagcacctgaccgtagtgccccaggtcagggagcagggctacagggaagttccatgccccagcacctcacaccactctcaagctcaagccattagtcctggacactcccttcttttctgttggcagtctttggaaatgcagtttctctggcctggcttttttttttttttttttgagacagagtctcgctttgccacccaggctggagtgcagtggtgcaatctcggctcactgcaagctccacctcccgggttcatgccattctcctgccccagcctcccgagtagctgcgactacaggcgcccaccaccatgcccggctaattttttgtatttttaatagagatggggtttcaccgtgttagccaggatactctcaatctcgtgatccacctgccttggcctcccaaagtgctgggattacaggcgtgagccagcacgtccaaccctggcctggcttcttgagtggcccctttttccaccccaaaacctcctacacatccctgaaagtcctgtccaggtgccactcctctgtgaagcccttcctgagaacccgcagccgtctctggcatcacatgcttctctctcgcacacactggctgcatggcgggtgttcaggctgtcagtggggaaaggacttgcgcccccgtcagcaacatcagggcccccacctgaggtggcttcacgaagtcggccacatcccacagccggtttccaagctccttgatctgagtgacggaaacccctttgagtttggtgatgatggaaaactggggttccaggtcccgctcctggtagccttttttggcgaggagagcccacctggggaggagaagtcgggcagtgtggtgtgtccccagcgtgtagtgacaggggcggagctgagccctacatgctcagttctccccccacaccctacaggctcccggcccaacatcgaaggccccacctcctctctggccccacttcccactccagaccccctgaatgagacagaagctccagccatgcatcagagagccaatgccctcagacaatcaccttcactagccagcacccacccccagcctgactagatccagcttcccccttacagactctcctgacccgagatacagctggtggtctctctgggggcctagtgctccagctctcacagatgttaaggactatgtcatgtgccccctgggtggggcctgggtgggggcctgggaaggaggcaagtggacacacaggacaaacacacagcttgttcttgctctcctgtcttgtatcgcctagctctccccaaccccgtcccaatctgcccccttccactccagcccctaaacagcccaaccctcaacttcaacccagcaggaccaagccccaccccccacctcttcccttgcccctccagcctggccaaaagctcttctctcttaccctaccacatagaccacgatcccaaactgcagcagcctctgcagggcgcccacccgccagttcctggtcatcacatacttctccgtcttataatccagaagcccccagcctgtcgtagcccctggggagcccatgctgccagctcctgctagctgcgggcacatgagtcagcatggcagctgcagccgcagctgaacaggaggcaaagcagggcccgagccaggccaggccagttgctgttaaagggacacttccactaaagcaggatccagatccagcctccaacacccagccctcaacccctaatcccagctgccctgcacctcccaccctccctacattccctttgctgggccctggcacacagagaacagcagcagctctgtccctgccctctggcctcacttcctggggtgggagtggaggtggtgggagggtggagacggacagctgttatcagtgctgtgagaggagggcctgagggcagcagcagcagggcggggagggtgttgaggaaagcttccggaagaagtgacctctaagctgacccttgcagatttctgaagttcgacaagcagacaaagatggggatggaggttcctggtgcagggagcagcgtatgcaaagaccagagcatgcaagataactaagaggcacagagtgagagggtgacctggctctgcgaagttccccaggccctcctgaaaagctgcccccgccaccttccccagtgcagtgaggacaacacaagtcctggagtcaggcgtgtttcccagtccacgaaaggggggcgatgctggaaccccctaggaaggcagggaggatgcccacaaggcgcccagcccagtgcatagcccgtggcgcgtgcagtttatcctctcaggcgaggagcctcagcgcaggagagccacggtttctacggcaacctacagcactgggttgccggggcgaccgccgcgggggagcgcgtcgctaattgccgtggcagacgccagtcgatggacgccacactcgattggtcagcgcagccgcagactccgcccacatccccgggtcgcgctctaagtgaggcgccaagcggtctccgcctcagggtctgaggctgcgaaaggggcgtaacgatgagcggttcctgccagaggtctggggaggataaaaagcaggaggaagaggcgacggcggcctgtggacgtcttgcaggggtccccgaagccaagcagggtcccaaggccgattcagactccgacctagagacggaaggtgctcggggcaggggccaggcccgtctcctccccttgggggcttctcccgcaggggttgtgggaggtgggctggcgccgccgaggaggcaggagacctctgtccagcagggcacgtagccctctgcggggcgtctccagccccctgccctctcctcggcgctcctggcggcatcaggaactttaccatgagaaggcgcttctagaaggaggttaaaatggaaaatcccgccagacagtgcaccaaaggctgtcccgccctgaaatgcaatcagagctgggttttcccaatccacaggtaaaactaatataatggatgtatagaatttagaactacttccggttttttccctggggaaaatattcacaaaacatttgtggtctgcaatcaggttaaaagacatagtgtgccatttgtcatcagacaggtagaggcctgactctggcaggattagctaccactagctgtgagactttatgtattcatttattagagccagggtcttgctctgtcacccagctttcagtgcagtggcaggatcatagctcactgcatccttgaactctgcactctggtgagcctcctgcctcagcctcctgagtcgctgagactacagggggctaccacatctggctaatttaaataattttttatctcgctatgttgcccaggttgtccagctttcttttgacagctgtatgactttaaggaaaagatttgcgttgccttagcctcgatgttcttatctgtcatatgcgggcagtggtcctaaggagcataggaagcagtgcttctagaggcaaaaaataggccaggtagtgatgcagggcaggggaggaggcaggtggctatagccatgcaggggttcacattcatccccctgtctcctaccaggcacccatggacttggagaactggtcggggac

SEQ ID NO: 1562876 - DNA, 4001 bp, Homo sapiens
tggtgtgaaagttcagcttggctgctgcgtggtgtgcaccgagcagtaagggaggaggcgagaggggcatctagggaccctctaggaggccatagtctcatgcatggcatggcatgggtagtggtgaaaaatcttggaagggacaggaaggggtccagggtgagtcacgggtctggctgaggcactagtggatgtcacagccaccatgactagtgggcgtcacagaggccatgccaggagaggaaaataattgatctttggacatgtgggtgtgcacctagaagacagctgtgctctgggcaggtgatcactgggaatacaccctgggcatcagaggagcagaagtggcagttgaggctggggatgagctgggtggagggaggaggaaaacgcagccgagaagaggggaggagcagcacctgaccgtagtgccccaggtcagggagcagggctacagggaagttccatgccccagcacctcacaccactctcaagctcaagccattagtcctggacactcccttcttttctgttggcagtctttggaaatgcagtttctctggcctggcttttttttttttttttttgagacagagtctcgctttgccacccaggctggagtgcagtggtgcaatctcggctcactgcaagctccacctcccgggttcatgccattctcctgccccagcctcccgagtagctgcgactacaggcgcccaccaccatgcccggctaattttttgtatttttaatagagatggggtttcaccgtgttagccaggatactctcaatctcgtgatccacctgccttggcctcccaaagtgctgggattacaggcgtgagccagcacgtccaaccctggcctggcttcttgagtggcccctttttccaccccaaaacctcctacacatccctgaaagtcctgtccaggtgccactcctctgtgaagcccttcctgagaacccgcagccgtctctggcatcacatgcttctctctcgcacacactggctgcatggcgggtgttcaggctgtcagtggggaaaggacttgcgcccccgtcagcaacatcagggcccccacctgaggtggcttcacgaagtcggccacatcccacagccggtttccaagctccttgatctgagtgacggaaacccctttgagtttggtgatgatggaaaactggggttccaggtcccgctcctggtagccttttttggcgaggagagcccacctggggaggagaagtcgggcagtgtggtgtgtccccagcgtgtagtgacaggggcggagctgagccctacatgctcagttctccccccacaccctacaggctcccggcccaacatcgaaggccccacctcctctctggccccacttcccactccagaccccctgaatgagacagaagctccagccatgcatcagagagccaatgccctcagacaatcaccttcactagccagcacccacccccagcctgactagatccagcttcccccttacagactctcctgacccgagatacagctggtggtctctctgggggcctagtgctccagctctcacagatgttaaggactatgtcatgtgccccctgggtggggcctgggtgggggcctgggaaggaggcaagtggacacacaggacaaacacacagcttgttcttgctctcctgtcttgtatcgcctagctctccccaaccccgtcccaatctgcccccttccactccagcccctaaacagcccaaccctcaacttcaacccagcaggaccaagccccaccccccacctcttcccttgcccctccagcctggccaaaagctcttctctcttaccctaccacatagaccacgatcccaaactgcagcagcctctgcagggcgcccacccgccagttcctggtcatcacatacttctccgtcttataatccagaagcccccagcctgtcgtagcccctggggagcccatgctgccagctcctgctagctgcgggcacatgagtcagcatggcagctgcagccgcagctgaacaggaggcaaagcagggcccgagccaggccaggccagttgctgttaaagggacacttccactaaagcaggatccagatccagcctccaacacccagccctcaacccctaatcccagctgccctgcacctcccaccctccctacattccctttgctgggccctggcacacagagaacagcagcagctctgtccctgccctctggcctcacttcctggggtgggagtggaggtggtgggagggtggagacggacagctgttatcagtgctgtgagaggagggcctgagggcagcagcagcagggcggggagggtgttgaggaaagcttccggaagaagtgacctctaagctgacccttgcagatttctgaagttcgacaagcagacaaagatggggatggaggttcctggtgcagggagcagcgtatgcaaagaccagagcatgcaagataactaagaggcacagagtgagagggtgacctggctctgcgaagttccccaggccctcctgaaaagctgcccccgccaccttccccagtgcagtgaggacaacacaagtcctggagtcaggcgtgtttcccagtccacgaaaggggggcgatgctggaaccccctaggaaggcagggaggatgcccacaaggcgcccagcccagtgcatagcccgtggcgcgtgcagtttatcctctcaggcgaggagcctcagcgcaggagagccacggtttctacggcaacctacagcactgggttgccggggcgaccgccgcgggggagcgcgtcgctaattgccgtggcagacgccagtcgatggacgccacactcgattggtcagcgcagccgcagactccgcccacatccccgggtcgcgctctaagtgaggcgccaagcggtctccgcctcagggtctgaggctgcgaaaggggcgtaacgatgagcggttcctgccagaggtctggggaggataaaaagcaggaggaagaggcgacggcggcctgtggacgtcttgcaggggtccccgaagccaagcagggtcccaaggccgattcagactccgacctagagacggaaggtgctcggggcaggggccaggcccgtctcctccccttgggggcttctcccgcaggggttgtgggaggtgggctggcgccgccgaggaggcaggagacctctgtccagcagggcacgtagccctctgcggggcgtctccagccccctgccctctcctcggcgctcctggcggcatcaggaactttaccatgagaaggcgcttctagaaggaggttaaaatggaaaatcccgccagacagtgcaccaaaggctgtcccgccctgaaatgcaatcagagctgggttttcccaatccacaggtaaaactaatataatggatgtatagaatttagaactacttccggttttttccctggggaaaatattcacaaaacatttgtggtctgcaatcaggttaaaagacatagtgtgccatttgtcatcagacaggtagaggcctgactctggcaggattagctaccactagctgtgagactttatgtattcatttattagagccagggtcttgctctgtcacccagctttcagtgcagtggcaggatcatagctcactgcatccttgaactctgcactctggtgagcctcctgcctcagcctcctgagtcgctgagactacagggggctaccacatctggctaatttaaataattttttatctcgctatgttgcccaggttgtccagctttcttttgacagctgtatgactttaaggaaaagatttgcgttgccttagcctcgatgttcttatctgtcatatgcgggcagtggtcctaaggagcataggaagcagtgcttctagaggcaaaaaataggccaggtagtgatgcagggcaggggaggaggcaggtggctatagccatgcaggggttcacattcatccccctgtctcctaccaggcacccatgg

SEQ ID NO: 1562877 - DNA, 4001 bp, Homo sapiens
ggataccatttccattcaaatgagttgttattcttctcccaaaaagtggataaagagtgcagacctaatcacccatctacttctctgtgttatgttactttcccaagtaataaatatcaccagcctaatggccactttctttaaagctttaagtctattgtcaaaagaaaaacacaccaatgtttttgatgtagtggcctcatatctcaaccagcataacctcaccaaagaggctaccaaactctagaattaagtttaagtccacacaagtgaaagttttccaggtgaatcaagagagatccaagttgcactggcacagcttcaatgtctccatgaggaggctgcatgcaggcaggctcatgaatcaagtggaacgacaacatcttgggcaagaacaggagggctggcattcaacactgcctgcctggtcggttcccttgccctgggctccaacctggcaatcccaggagggttaaaacagaacttcagcacacgggaataaccgcagaggaaggcaccgaaaaggagggaaggaagaaggtgtgagctcaccatctgcagctgaggttcaaactctttgagctggtttcctgattttcatcaagacagccaggcagtatttggtaaacagtgtaccaagtagccctggagactctgagcagcctacccccttaaccacaaaaacaccggacaggcggagggaaaaagagaagacaggatccaggaatggtgcacacacccagccaaaggccaccttccctcaggcacccaagccaagagtggcatccccaggtcctgttatacgtcaaaggctgcagccgtgtgggccccaaagcaatagcacagcttgctcccctgaccaaccaactccttctgaaaagaaaatcgaccttctctgatggagccgaaacccaatgaatcaatgaaattcaacagcagcagcaatcactacctctccaattgcggacctctcaggatgcctggccaggcttgaaagccctagaggagtaaggagttcggatttctgattcagtgagtctggggaaactctgaggagggtcacaagggcaaacctccccggcctctcctgcttggccccagccctaggacgtgctgcggtaagggctttgctccccccgccctacacacacacacacacacacacacacacacagacacacacacaccacccccccccccccgggacacggagggtgggaaggaaggaaatggaggccgctcatcaaagcgcccgaaatcagcgcacccgcgtgtgtcctgcgtcgccccccaggccaccccaggactaagccctgccctctcaccggcgcgtcccagccacgccttccctccagcgttgctccggcaccctcgcctaacctctgcacgtctcggattcccagctttctcctaaatcgcgtccctccaaaagtcgccccagctcccccttctgcagctgtctacacctcccccactcattagcagctcttaacccccgacggccctgctcctgcacttccctctccagcaggccccggaccccggaaaactgccccgctcccacagcgccgcccccatgggcccccgccccttccccgagccgaccccactcgccctcgtcctccccaagatgtcttctccaggcgccccccggggccccgagcactcgccccctcccacagagacaggaagttccgcgcggcccgacccgcttccctcagggcgcggagctcggcgcggcggccctgacggggcgcgggcccggccgcggaccagcgcccccgcgtcccgcccgcggcgccccaaccgtcgcggcgacccctgacctcggcggccactcacctcccaatccgtcgcacactccgttcaggctgccacggcgtctccagacccagctccggccgggctcccgctaccgcttttgctccggcagcactgcccagccctgcccagacccctgcggccgcttctgccgccagccgcgaccgcaccgcccccgccgctcccgctgggctctgtccattggctaccggacaccgagccccgccccacagcctccccggcgcccccgattgggccagatgagtagagaggcggctcaccccgcgtgaggacgagggaaagccccaggacgcgcattggtgacttctcctgtcaatcaaacggggagtgcctatttaatgggctgcgagggtggcgcagattactctcccaaagccgctcgctggtggtggtccttgagacgcgcttcccggggctggagttttgcggtttcgtcggcatccaggggtaagagggcgcggcagggcagcaccgcacctgaccggaagttcagggaaggtaatcctacagtctttcagaaagtttcctctcccaagggactcaaagaagctaatgtcgttaggagctcctccgacttgcgccaaaagcgtcattccacgtggacccgcttagtttaaacggggggttgggggggcgtatgttgctgctctctctaataaaatatatttggatggcaaggcaccaggcaatgcacacgcattctttccaattctcacaatcaccttgcatgatagggtattagccccgttctgcagagggaaatactcttgaaggaaaatggagagcacttcctgagcactgtcctacgcgctgtccaagcactgcttcatgtcatccaggtggagaggatggtgagaggaaccccaggtgaggggtgagccaggtaacttgctgggggtgatgtggagtaaagagagtaaatggcagagccaggattagaaacccaggtcagcccaacccttgagaataataatgatgactgtgtagcactatgggaaaatgcttaaactaaaacgttaaaagaaaaagccagatagagccaggcatggtgacatgcacctggaatcccagcttcttgggacgccgaggcaggagaatcgcttcagcccaggagtttgaggccaacctgggccacatagcaagacccagttctctaaaaagtaaaataaaagaaaataataataaaagaaaaagctagatacaaaatggtagaaactgtagaattgctgctacatatagataggtatgagaaaagagtccacaaagaaatctagtggttgtttactttctagactgctctgtggcattgtccttatgacaataattgagaaagaaacaaaagaaccggctaggcacggtggctcacgcctggaatcccagtactctgggaggccgaggcgggcagatcacaaggtcaggagtttgagaccagcctggccaacacagtgaaagcctgtctctgctaaaaatacaaaaaattagctgggtgtggtggcatgcacctgtaatcccagctacttgggagtctgaggcaggagaatcacttgaacctgggaggcggaggttgcagtgagccaagatcacgccactgtactccagccctggcgacagtgcgagactccatctcaaaaaaaaaaaaaaaaaaccaacacacagtgccaggacaaaccactgccaagaagtctctcctcattctccaggactgagccaacagggacctctttgccacccacaatacctgtggaccatttgtatagatagaactcagccatcagctctcagcactttcatatctgggtaagttccgcttacatcgcaattccatgccctataaaaatatagagccttgtcgggcgctgtggctcacgcctgtaatcctagcactttgggaggccgagacgggcggatcacgaggtcaggagatcaagaccatcctggctaacatggtgaaaccctgtctctactaaaaatacaaaaaattagccaggcgtggtggcggtcgcctgtggtcccagctactcgggaggctgaggcaggagaatggcgtgaacccgggaggcggagcttgcagtgagctgatatcgcgccactgcactccagcccgggcaacagagtgagactccgcctcaaaaaaaaaaagaaatacagagcctctccca

SEQ ID NO: 1562878 - DNA, 4001 bp, Homo sapiens
tcagtaacaattgactgtctctcccctgagctaggggagaggcaagcaaaactttataatatagagaattgttgatttttaagaaatgtcaatgctctttgtacttgaggtaattcactatacatctatgcaaatggtacttacagcaaaaaagttattgaataaaagctgagtgtttgaaagtgaaacaaatatgaacggactcatcagtagaaaaaaaaaacactcttagctaagtgatattcatcttaagataataatgcgaagaaagcagattactgtaatggaaagagtaatgagtctcatgaccagggtttcagactcactcggctaccaacgagacgagtgaccttggacaagtcgtcacctctggatcccaattcctttggtaaagtgaggatcctggaatattaagtccaagagccattacagctctaaatattgcgttcccaccttctgcattatgccaccaaatgaataacagaattgtgtgggtgggcaaacgggtctcaaaggactaacactgtttaaaaagaaaaaaggaaggcgtatttttacttattggcataaatctcatacctgtaaaaatgctttggtttgaagttatgaaacctctttgctgttttcataaatacagcatttaaaattcatgcagaattcagtaggatgttttactgacaagaaggaagggatctgaagaaagagatattcagagctacaagagcaaagacaaaactgatgggcccgattaaggtcggacagacatactatataccttgggggtttctagaaacctttcctatgcaatcttaaaagtatttgaaacacacacttcacagtaggtaacatcctaacaagaaagcatgtttttctgtgaggcacaggctgcaccagcacagtattttctggaggacggagagaggatgctgcctttttaatggcaatcagtaatccagtaagtataattcactgagtgatgggtcacttaagtatcaggattttaaaaatctaattagaattacagcaccacagcaataaaggggagccactgtttttcaaaaattccagaatatgacttctaagaaacaattgaatacgtacataaggctgctcagttattaaaacaataagacttttacattttgttacccgacaaaaatataaacagtgtctagtgacagccctcagagggggacgagggcacagggtccagctgggatgagaaatgagaagaactgagggggaggatgggaaggtggtcgggaggggtcctggagcggtggcaggtgatcagagactctgcagtaaacagtcatgaaacagcaattacagtctcctggaaaagataatttgctttctctctcaagtcccacttatgtgtttgtagattagatttggctgtaaagaaagaaaatggcagcatgtaataaacattaacgccttaaagtagggggaaaagccctctattaacagctaactcaagtaactcatttagctactcggtaagaaaaaaatacagctaaagtatgtcagctactctaaaacatgccaaagcaaaggtgcaaagttattgcatctattttgaaaggaaacacgcacgtatgttctaaaaccagagtcaaaaattacaaaacacaatccttcatttgtttaagccgaaatctattctccaagaaaatcaaacacttactctgacatcttctccaagcaccctggataaagcattctgcattgctcagttaataatgaactaattgaacattgccgtcacggagctctaaaactaggtgcgcttgcatagaaggtgagagttctgttaaatcagtcactcagtgagaaagaaaacaattccgtgaaaattctactttcaaagaggtctaccttaaaggaaatgcaagccttccacagcacactcacatttttctgtcagatgccggctaactctgcagctcagcttccgtacctgcctctttccaaccctgctggcatgtctgacctctgtctctcagctgaattctcccagcacatttcatcatttcctgttggctgccgagataaggtcattcccatacactgctgcattcgctgtacagtcccaggttcccagactgcacgctcctgcctgctgtggccatcacagaagagctctcttttcagaaagtggccaaagagaaatttcagtatttccacggaaaatcagggagaagaggtctgagaacaaaattcatactaccccctccccaacacacaaaaaatcaaattatatacaaactaacttacaccatacatgagtcttctaatatcttcttgtatttgggatcctcctgcttacaagagaaaaaagacagcatgctctctctgcatctgaggggcgtcacagcagtcagtgggacagggacttgcttgcacaggataatcttacactgtccctacatgtggaagtcaacttccttctgtgactacacacaacaaggcaatgcctgtcagcagatgaacaggaagcctcatgcaggagacaggactggggacacagagtcccctggagacaggcaggtgaccccatggtctctcagcagcacgactgtctcctaagaactaggacactcaaatacgcaactgtgattacatggaaataaaaacacctcgcttcttcaatttttacaaagaatttaaagtgaagaaaaaaacaataaagctttaggtgaggagagaaagattttaaaatgcttgtgcctacaagaatacatgctgtacgattccctttggatccagcacaagaaaaggcgtaactaatctacacccttcgaagccgggacagggaagagaaagaggaggcaggcaggaaggggtgccaggagggttttggagctgtgctgtggctcttaaactggctatgggtgtgctgggcttgtgaaaattcactgatatgtacacttgagatctgtgcactttaggtatgcatattattcaataacactttttaaaatctcatacagtaacaaaaaatacagacactacaggaaagagtagatatggaaaccaacctgcaaaaacagacaggaaacaaatatttcaagggatcaatttctgctaggtgccctcctagaagatacacatgcacactcccccattccccttggcaagccaggatctaagtggtaatggccagggcagggccagttcagggcggttcctcctttcaacatggcccaagcgggtgtatgtagggatgggaaaatacgtaattggcaaaagaacatactgcaaggggaaactgtgctaagtggatatacactatttaccagtgttcttgctactcatattcattcaaaaatgttcagttaaaaacagccatctagtcttaccttataacacaaaacgaagtaggttaaaaatctcttttgaaaatcttgtgtttagacaaacactgcggaaggccgcagggtcctctgcctaggaaaaccagagacctttgttcacttgtttatctgttgaccttccctccactattgtcctatgaccctgccaaatccccctctgtgagaaacacccaagaatgatcaattaaaaaaaaaaaaaaaaaaaaatcttgtgtttagaaattccttaggctgggccggtggctcacacttgtagtcccagcactttggtaggctgaggcaaatggattgcttgaagccaggagtttgagaccagcctagccaatatggtgaaacctcatctctactaaaaaatacaaaaattggccaggtgtagtggcacatgcctgtaatcccagctactcaggaggctgaggcacgagaatcgcttgaccccagggagcagaggttgcagtgagctgagatcacgtcactgcactctagcctgggtgacagagcgagatcctgtctcaaaaaaaagagaaaaagaaattccttaatggaaaaataccaataaaagcaaagaccacataacatgagactctattacttgacatatgataataatttacactacttgag

SEQ ID NO: 1562879 - DNA, 4001 bp, Homo sapiens
gagccaagatcataccactgtactctagcctggacgacagggcaagactcgtctcaaaaaaaaaaaaaaagaggcaagggctgtgtcatctccgtatccccagtgcttagcatgaggtagatgctcaaatgagtctgcacagtgactagatgtacgcaccggcaattaccaagctgacagaagcaaaatcagtgggggacgagggcaagaggagtctttggggagggagctgacactcaccagctcatttctgtagtggctgcagtgtgccttctctcaacctcctctgcctgtttcctggctgctggcgctccccaggttctgtcccaggccctctctcttacgtcttctgtgcccacacaccaaaccacctttaacctcaagccccctgatctgctgtctggcccagacccgcatctctgcctactggatgcctccacttggccatcacacagtccttgcaaactatccccttccctatgagcccactcctgttcctgggttttctacgtcagaaatggtcccaccattcattcacccagcttctcaagccagaaactcctcttcttcccacacccaacccccctcaccactaccacattcaatcagcttccaagaccggactacatcagctcttcaatatctcttgaatcctcccacttggctctgtccccatgatgatagctaccttcgctaaggccaccattgcctcctgcctaatccttaacaacgtcctaactaacctgcagccacttgtttagtccccgactcccttcattctccatgacattactgtgactctaccatggtggttggaatgtcttctggaaagatcaggttttgcctctactcaaactcctccccctacttcctcccgaagccagcagggcctccaggctgtaactactgctcctccagcctcaccactcacaccacactcctggccacactatacacgctctggccaccgttaatcacctgtgtctaccaacacaagcaccacactcctatcagctccaccccttcacacacactgttccctctgaacaaatgcacaaatgaattagaggaggtggaggagaaatcaacttctcatagccaaatagtttcaaaagcaaaataataagaatccttccaattacttttataacataaagaagtgtttaaactgcatgtgagcataacatacctaatataatccagggtagggtctccagaagtatgggtaccccaaacctgccacagtctaagggggaagtaaggacaaagctaataaagccaaaggatttgtccctgggggcaggagtggaagcactcactgactgccactgcatccaggaaggaggcacacattggcctctgagcctggcgagagcagcaatgtaccacgggctcacccactacttgggaggctgaggcacaagaatcacttgaacccaggtgatggaggttgcagtgagatcgcaccactgcactccagcctgggggaaagagcaaaactctgtctcaaaaaacaaaaagaacaagtgctcactgatttgccaccatgtccccacagcaagaagccccagttacacaacacacaaagctgcctgcccaggactgatgcagtgttattccaacataatcttaggatcccttcacacaggcatgcgcacacacatgatcctctctcgtccagctggggatcaggacttcagagcacatgaggacgcgtcagctcatctctgccaccacttccctcgcttctggtgtcctcacatcctaaccacagtatttaacaactgacagatggccacaaatacaggagacatgtggaccatgttgcagggagctgggccgtgggtccgggtacctgcgcttcccctctgatgcctgaaattctctgtgcggctccattccccttcgtgccagtcttcaggatcatgccagagcagccacggccacatacttcccgacgacgcctcctctccgtcagaggcacctgcccagtgggacagctctcccttaagctgcaagttttccaactcaagagacgcacttaaaccctaaaaaagaaaactcacacaggcccagatgagacagaaagattctcctggcataaatagaaggaaaaaatatagaatgggtcaggaggctgccctttgttcaggtcagaaaataggggcattcacaggcggcagagtgagcaggaaggagggagaagaggaatgctccaggccaccttcgaggtctgctgtgccaggttcccaagacagacaaagagtattattgacaacatgcatgagtcagagtggccccaggtcaacgcttcagcttctttcaacccctccactttcaggcagccccttctagaagcaggacttcctgtcacacaaagggcctctgtggccctttgtccacaaaagaggagcggcctcttcccatgcttggaggcagccgtttcagaggctcttccctacccaacagtctgatgagtggaatcctcaagaggagctgaagccctggtctgaacaagctgaatatgagagacagcaagaggggacaacaccaaagaacacgctagcctggatgcacaaatctagaaggtctctgaaatctgcatctatgagtcttcacaagacccctgggggtggggggggggacctcttaatgatccagctgcctcaggcaaaatacctaagagctctgcgcctgacactgctcatgggtaaaatagaatccaatctgcctgacaggttgcacggatcaaatggcatccggctgggacctggcacagtgcctggagtatggggaccttccacaagcattggccagggagaaggtgactggggccaggctccacggcagcccagctcctgagcccgtaagccaggtgcccccacactggggcactccattctcacagggtcgatggacacttgaacaacctcctccaacacagcggccaagagctaggaaacagttctgcacaacatgctacggggacacatagagggtccagaaagggtgcccagggctgatgtttcagtgggaattcttcagcaggagcagcaaggaaaggcatcccaggtagaggaacctgtgtgacaaaggggagttagaaaccagcccagtgcagggtcccgctggtcctggagggcaaaccctgggaagctgctgtggctgtgaaggaggggagaggggactgacaaatggcagggcgctgaagatcagacaccagctcaagtcactagttactccaccacaagagtgacttctgctccatttacctaccagcaataaaaagtagaatgtcctgataaaagcccaccataagaatgctaggtaagcatggacaagaagaggtcacacccatcagaagcgctatctagaagtgaactacctaaataccttctcaaccagtactataaatatgtgcctttgaagtttaaaaagccacacgagctgggtgtggtggcacatgactatctatagtcccagatacttgggaagctgaggcaggaagatcacttgagcccaagagtttgaggctgcagtgagctatgatagtgcctgtgagtagccactgtactccagcctgggcaacacagtgagatcccatctctaaaaaaaaattttaagtacaaaccatgagaggatttggttttcaaatattttctgggcatctatgcactcaactatggtgccgctttctcaagaaaatattctatttcattcaaaggtatcagctagagccaaagcactctactgtagagaagaatatggagccagtttcgtgtgacaaactgataaatgaattctaacttgacagtgcttttatttctaaaaaaagttcacataaaatgaactagccagtaatttggaaaaacaaacagggaactcaattgtcaggcaacaatctgaaactaataggcttaaatcaagcataaaattaatagcaaaagtttcccttaaacaaggggagtgggtcaggcatagtggctcacgcctgtaatccc

SEQ ID NO: 1562880 - DNA, 4001 bp, Homo sapiens
aaaaagcgggggggtggtgaagaagagaaaagggcacagtggctcacgcctgtagtcccagcactttgggaagctgagatgggaggatcacttgagcccaggagtttgagaccagcctggggaacatggcacaaaaattagctgggtgtggtgtgggatgcctgtggtccctgctactgggggctcggggctgaggcaggaagaacacctgagcccgagaggtggaggttgcagatcgcaccaccgcactccagcctgggcgacataccaagactctgtctcaaaaaaaaaggaaatttggacacagacagggagggaagaagcccatgagaagacagaggcagagactggtggcacggccacgagccaaggcgcccaaggattgccggcagcaccagaggctgaagaggctggaatgtccctttcctagagctgtgggagggagcagggccctgccgacacctcgattttggacttttggcctccggaaccatgagagataaatgtctgctgtttgaaactgcctagtttgcggtacttggttgctacaaacacagagaacacacgtggtgtctggacatgctgggcctgccccaaggccccaccgcacgcctgggctccctgctctgcagagtgtgctgtgtgcccaccccaggggtcctctaatccccggggtctggcctccagtgtcgaagaggagaccagcagaggcctcctccacccctgggtgggatcagacagcctggccaatgtccaccctcaggcctggtgtctccaggccacggggactccttaaggcaaggcatctgggagatttgggaagcgccagtgctgaggcagggtctgctgaggtttggaggctgcagaagagagggccccagggtcccaacacccctccccgctgcagactagtacctctgggccacacaggccaggagaccctgatcccccttgccttggcccagaccccaggggaggaagttctcggctccacctgtctcgccccactccttggggagggcagaggcaccaggaccccaccccgcagaggctcacaggcaggctggctgctctgtccatcttcctgcctcgcctgggtggcttcaagtgcccccacaggtcctgatctaaccagcgcgggtccctgccctggtccagcccccatctccctgcaggagctccaggctccctgctctgacacgtggccctgccccatgctagcccccctgcttcaaaccttcggaggcccccagtgcacccggagaggcctcgccctgcctgaggggtggagggcctgggcctctcagagactctctctgccctccttccacccaagtccagcctgggaaccctgcccggcagctccaccagcccctgtaatcagctctctgctgtcaacacccatcccggcctttcctggtccccacctggccaccctgcatcccctcaggcgctgcttgtgacattctccaaaccagaccccgtgtctcatgacatttgggacccctgggtccagacaggcctagtcccacccgcggccatgggcggacgaatggaaggaagaacaacaataaaatagagacgaggggtctgtgcgaccagcgacacctgctaggatgggggcggctgtggaaggtgcctgggacgccgcggacgcagccaggccacggtgggcgcggctggacggagccgccggggacgcgggaagcgccagctcccggacacctgcggacgccccctctgcccgcgccccgcgccccggccgccggcctcacctgcgaagttcttggtgaagaccagggtgaccagcaggatgggcaccagcacggtgccgatggtgaccacccggtcgaacggcagctccagcttcagctgcagaagcagcgcggccagcgcgcccgccttgtcgtcctgcgcgcccggcaggatcagctcccgcagcttctctcccgccagcagcgcggtcgccatgtccgccgactgctccaggaggtggtgcatggggggcggggggcgcggcccggcggggggcgcgggcggggcggggggcgcggggcggggcccggcgaggggggcgcgggcgggaggggacgcgcggcgcgggggcggggatcggggagcgtgggggcgcgggacggggacggggccgcgggccgcgggagagggtggcaggggacgccgggaccgagcggggggctccgggggatgggagtagccggaggcgcgcggcgggtgcggggctggccgggcgcggagcccgcagcggggtttggggggcgctccgccgccgcccccggggtcagggggcgggcgggccgggccggggcggcggcggggggcaccggagccgcccgcctccgccgcagcccggcccccgccctggcgcgtgcctccggcgggggcggcggcgggatcccggcccggagcgcgggcggcggctgctgtccctgcctggggccggcggccccgctcccgccgcggggagggggctgtttacctgcggcgactccgcggcgtggctccgccccaccccgccccccgccacgcagatgcggcgcgggcgatgactttgcagaaaatattgaaatgaaatgaaaggacatgaatgagtaatgaccggtccctcttcctgggaacgcggggtggctggcggggggctgccccggcccgcgggagggtgggcaggggtgggggcggccctgcggggctccgggctggggcgggggcgccgctcggtggcgacgtgaggactgggcgcgcgctggggctgcccccgtcgcatcgcagggcccttcgcccagcccagggcgcagagggggcttcctcgcctgggccccccacctgccccggccgcgccccgctgtgggtccggaggttcccgcgctcctggggtgctgcggccactggcggggaagccggcgctctcttctctgggctcgggcgccagtgcgcgggcaatgagggcatctccccgccccacaccctccactgcagccccggccccacccgacccccccacccagtacccccagtcccgccgccgtgagtgaccccatcacccccgctcctgcagcccgcacctccttcccccacgccccatcccgtcccctgttccacagacgttcccggggcctgtgccagctcagggggtccccgccgcctccctgaccttcattccctccgctccccacagccccgccctccgtcctgttctccctcggggagccgggggtctggcttcagacgcgggcgcatcccgcgtggtccctgcctcttcgaggcagccgttttccctcgtgcaggtccccttcccactataccaggacgaacgtgcacgatctttcatataaaagatttagtgtgattggagttttaagttcattcaataattcattccaaaaatgtattttgagcccgtgttcacaggcccggccactgctgtgagcaaaccaggaggtccccctgcctccctgggctgcgtaggggatgtgtctgctttgagctttcacgccgtctgcgtttttaaagatccttgcatgttttctgagggatgccagcccctgacttccagcaaacttcatcctgaggcaggcagttcagctacatccaatcccagcacccaaccacccagtcaccccagataaacccagtcaccccaaataacccaggcacctccagataaatcagccctggcagataacccagtcaccctgacaacccaggcaccccagataaaccaactcaccccccgataacagtcacccctaccagataacccagtcactgccagataaaccagtcacctcccaaataacccagtcacctctcacataacctattcaccccagataacccagtcactgccagataaaccaatcaccccaaataacccaggcacccctcacataatctattcaccccagataacccagtcactgccagataaaccagtcacctcccaaataacccgggcacccctcacataacctattcaccccaga

SEQ ID NO: 1562881 - DNA, 4001 bp, Homo sapiens
gtggcgtgatctcggctcactgcaagctccgcctcccgggttcacgccattctcctgcctcagcctcctgagtagctgggactacaggcgcccaccaccacgcccagctaattttttgtattttcagtagagacagggtttcactgtgttagccaggcttgtctcgaactcctgacctcaggtgatccgcccacctgggcctcccaaagtgctgggattacaggcatgggccaccgcacctggccaaatgtgatcttctgttttgcataatgaagacatgttgacatttggaagatgtgcctaattcagggaaccagtattttgcaaatgactagcatatgatgttacaaaagcatgcctgggtaaacaatccaatcacagtgccaggtagaccaggggatcttaatggaacagagtgtgaaaaagacatagacggggtttcagattccacactgcaactaacctttcaaaaccgttcattagttgagttttggtgaagtatcaaagaatgttcacagttatctgaaaaggctactaaaatactctcttttccaaatacgtatctatgtgaaaacacattttcttcatatgcgtcaatcgaacaacttcaaatgcaacaaactgaatgcagaaccagatgcaagaatccctctggttttgaagacagatattaaaagatctgcaaaattttacaggcgtgagccaccacgcccggcctatttcatctgtatttctaaaagttatttactcaggttggccactctcctccacctggcttttcttcactgggaaacaggggactgtgcctcatattcacagtggcccagtatttgaacccacatgagaacatgctcaaggtcatacggctggtcaaccacagagctgggattcacctccagtctgaatcacaatcaaagagccactgttcaactccttgtacataatgtcctcagacaggcaaaacaatcaatctctggtgttaaaaatcatctagcctttaccttgggggtagaaagccctagaaagctcatgagtggcatccactaagagtggaatctattgctgaatacaccaagatcttctcctttggtagaagaaaaacctgaggaaagcagtgagtggatttggtaaacagccccaacagggcaagagccagggcccctgaccctgggctcactgctagtccactttctttctttttttttgtgacagggtctcgctctgtcaccccagctggagtgcagtggtgcaatcacggctcactgcagccttaacctcctgggctcaagtgatcctcccacctaagtctcccaagtagatgagaccacagatgcatgccaccacacccagctgttttttttttttttttttttttttcatatagatgggttttcactatgttgtgcagagtagtctcaaattcctgggctcaagcaacaatcctccctcctcagcctcccaaagtgctagggttacaggcatgagccactgcacccagccctcatccactttctgacagtttttcccccaaaacttacctcctccttgagcatattcagatgtttccactcctgatctgtctgagccagggagaagtgaaccagccagagaagccatgagtgcctgggagcacaggccccagctgcaggaacacccacgtctcagctccagcctcctgctgcaggtaggaatgaacattttttgtttgtcggatccagtttctcaagagaagctagaaatttggacttctgagtacaacctgattttaacaacattcgttttgtttaaatcacagctcaccagtttttgttctctggactaaggaatccccttttctctcctctttggtgatctttaaacacatggtgcatttgtgcacatctaactgtcccaaaggtaaatttatctggtctttaaaaagggagaattcagaaattaaaatgagttcttagtttaaggagctgccggagatggggaggacgtcaaagtgtagggcctttgcaggagtcacccaatgggaaaatgtggcctgatggcagatcctcaccaggtgactgtcctttgtcctagtagcgatggcatttggcagaacagtctgctccctcactgggtcataagacttgtagacagcagccaggtacaaaagagccttgtggcacagtgtggcaggcacaccactgatgaaaccgtttgttaaaggtcacagtgtgtgtaccgagagcaccgcagattcacgataacagaggagtgatccatcacagctgttcttccagaagcattgtgaagattaggttcactaaaatcaatcttcttgttacaaatggaagatgaccgagccagcaggcttccggcacggagccggcagcattcttcagcggaagcagcccactggtttcatggcccatccctcgccgagtaaagcaagaggttaattaaacaaatacccagctctcttccagtccagaaaattgaggtatttagagaagaaacggagtaacattaagatgcaaagaatcactgagccaagggaggatttcatgggggattttgtgaggctttccatctttctttgctctctgagctctctaaaatagcagctatgaaattccttcccacaatgaacgtgccttatttttggtcttttgtggaaagcacttgatgaagtgcctctggcttcacgctctagtctgcccacttaccaccttctgaggatgaacagaacccgcattttcacccaggacctccactgttttcacttcacctgtggaggagcagcccgcggagtccacctgcaaattaaacacgctgcagccgcacgagagacagctggccctggtgagctttcattaaggagctggctgtagcgacctggggtaccccagacttgcttgattaaacaggtaacttttctcaggtgaccctttcgctgggttctccactgatgtagtagatgatttctcaaagatcatagtgctgagtctgtattattcagatttcactggtctaagttgatggtctgatcatgacagtgttgaaacatgggtttctggttttctcaaaggcataagcgtgaaactgtaaagaataaatcatttagggggaaaaagcacatttttccatgttcctaactattataaggaaggcaaaactcttttttttgagacagagtctcactctgtcgcccaggttggagcgcagtggcgggatctcagctcactgcaacctctgcctcatgggttcaagcgattctcctgcctcagcctcccgagtagctgggactacaggcatctgtcaccacgcccagctaatttttctatttttagtagaagtggggtttcaccatgttggccaggctggtcttgaactactggcctcaaatgatccacccacctcggcctcccaaactgctgtgattacaggtgcaagccaccacgcccaaccaaaactgtctctttttatatattctctgtaaaatccctgcagcttctgcaggtaatgagggcgagacagtcccggggcacctgagagtgtggcccagggataacatgggtccccagactgaggcccaaatcttcaggtcatttggcaaagacataaacaacaagttacggggaggactgaaagtgacggggactcagccccagctgagagagagaaaaaatcggagagtaatgcatgtgcgaagccctgcggggcatcacctgcaacactagacgtttccatatggcaccactttttcaattcaaaggaggtttcacgttcttcaaaaactttttttatgtgtgaccaatttaagattatcccccaaatattagagagatactagttgtgtgagacagaataatgtcccgcactcccacccagccgaagacgcacacctcctaatccctggatcgtgtaaacgtgacgataacatgacaagggggcgctaagtctgcagacggaattaaggacgctcatctgctgacctagaaataagacccctggattccccgggcaga

SEQ ID NO: 1562882 - DNA, 4001 bp, Homo sapiens
tctgttcccccacaccccacactggccccaggatgctctctgggaaatgtcgctggagtgatactgggctccaggacccctttcacagtgactcctaccccaccaggccaaggcgggcgggcaggggccggggggtcctggtctggggtctagggcaggggccctgtgactactaggaaccactgacttcgaataagcctggcaaggttctagcctcaagggttaaaatctgacacacctgagtgaagagaatctggtaccttggttagaaacagcaaggtgagcaaagtcccgcacaggtcccaggaggtgcgggcagggtctaccctcctccagccgccaagccccatccaccccatcccgcccagcactgtgcaggaaaagcactctgtgcgcaatcacctttttgccttttattgcaaggtctattgtccctgaagagcctcatataatgtgagctaagagatgcccagcattcaatttcattatgcccctccttccacctctggtttctcctctagaaatatccccacacatctacaaaaagcctgtgaaaaagatgcagaacatcaaaggcaaaaatcagcctgggagctcctccaggaaacagctcctatcttgttcatctgcgtcccaggcacagcgtccctctccttaaggatacccaggcagagctcagaaaaaaatgtgcattctttattccacaaaagtggggaaggagcatttaccaggagtttgcttggtatcagaaacaaaggagaatgtgaataactgtcatcttactgggtcccctagcagggcccagggaggcggccttcaagctgaggttgagagcactgactagggagccaggctgttgggtacactcctgactcccattccgatctgcggtgtgaccttgggcaggttacttaacctctctgggcttcagcttactcaactgtaaaagaaaactttttaggaggatagcactgagcaaagcacgttaaggagctgggatagtccctgggatgcagaaagcccaggacacatcagctctactgttgttcccatttcacaggaggaaaaatcgaacatagggcagcctggccgaccgtcacgatgggcgctaataacagcaaggctgggctcactcccaggcatgcccagtgcaaagcaccttctactgactctgcctcccaaagacaagacagaatatctagtggtgaccaggggaaagccaggcaccggccacgatcagctacttagaggggaaacacagaaccgaagaccactaacgagaaacccatggccgggcgcggtggctcatgcctgtaatcccagcattttgggaggccgaggtgggtggatcacctgaggtcaggagttcaagaccagcctggccaacatgatgaaaccccgtctctactaaaaatacaaaaattagccaggcgcggtggcgggagcctgtaatcccagctacttgggaggctgaggcaggaggatcacttgaacctgggaggcagaggttgcagtgagccaagatcgcgccattgcactccagcctgggtgacaagagcaagactccatctcagagagaaaaaaaaaagacagagagagagaaacccacagtatcaggtacccctatgaaaaagaaaatcttaattgcagcatgtgcctgagaatgttccaaatcccattcttctgggcccaatgatctactcgcccccagcagagtgctggaaatttcactccacaagtcagaccctcatccctctggggccgcagtgagacaacctggacccccttgcccatcgtcctaacaccaacgtccccatcaccttcctgggaaaagtcaagcagccacccagggtccattcttgcaaaacaaaattctgccataaagcagaaaagaaaagaagggctggcctgggtttagctcctgctgaaaatgatacgaaagcaacagaactcactggcgaggagggtgcagctggcggcagctctgcagaccagcacagccggcggacgtcggagggcaggcgggcacacaccccgttcatatagggacgtggcaggggcgccactatgacttgcacttcaagggaaagcctctttggggagcctttgaggaaggtcacagagggtcaggctgtggaaggaccggggtgtttccagcgatagctccttgctgaccacagaccactatttctgtcttgactcccatcagcctcatgggccagggcaactgctccccaggaaaacccccatgcacaaagaaggaaggaagggcgcgcccaggcccctgggctgactgaagatgcacgtggctcagagctaaactgaacaacagacattggcctcccactgcctttgctctctgggccctgagacaggagaagtgattgggggtctgcaagctggcacggagctgggtctcctctgcctgacccccggcaagaggtggcaccactgtgggcacgtgccaccccagctgcatctcccgtgtgccgactacgtcaggaggaccaaatgctaacacatggaacacttgccaccccgtttccacgacaacagaaatcaaatatcggacacagaaagaagaagctgaggctgccccgacacggaggcggcaggctgctctcgggagcactcacttccccaaaggaaggtccttgaatgaggggagaagtaggactcgcatgatacctaccttggccggcaacttgctccccctttcctcggcctgaaccctctcctggtttataacaccaggcccagcccctccctaccaggtgacacaggcgggctctctgtctggtctgggttcctcgtcggtaaaaaggggttattaacaatgaccagcctcatgtgctgctgtgggaatccacaaatttcagtggttcctggcatccaggaagcacgattagcttttatttattccaattaccagtcccccaactccctgtggaagctctttcctgaggctggcttcctggaggtgttgctcgattaactgacaatcccagttctgctgaagcaggaagcggtgaggcccacgggaggcccatgtcccgacccagcaggtgctccaggcggggctctggggcaggcagtggactgggacatgcctggcccactcccaggggcactagtgcccctctcccattcgaggccaggatcaacagtgagggctcacccgccggtcacccctgtcccccaacactccactcccacggcacaaaccaagcttcatccagagtcaaaactaggacttgaggaagcaacaaaaagacacccaatgccgatgcgagtccccagcactaatgcaggtccccagggctaatccaggtccccaatgctgatccaggtccccagcactgatgtggtccccagctctgatgcagttcccaacactggttttggtttaacagttttcctgctgggagacttgatgcaggaatccaaggccaggacagcaaacagcacttcatggcccaggagatgcctcgacagccaagtgaggacatcatgagggcacagacaggaaggccctcgccagcccagtgctccatggagagggcctttccatctgcccagtgtccagtgccacccacgaaggaaggctggggcaagggagggtcttcctgacgtgtgtgtatccactgagctggccaaggagatgcctggggctggtggtcagccccttgggggaggaggcagaaataacagaggatcagtcaggaaaggaaatgtgattagcttttaaaaggaaaataactacgcacttgaaaaatcataaaaggatcagcagcctagtagtcacatcttagagtcaggtttagaccacttcaatgtaatgcaactaactaacatttcattcactcaccctgtatgcatcgactgcctcctacctgccaggcaaggggatttcacaatgcaagcaaggcagccaagacccagctcctgacacgccattttcagaataaattaaaggggcctggcacagtggttcacacctg

SEQ ID NO: 1562883 - DNA, 4001 bp, Homo sapiens
tgatccgtggttgccagggatttggggaaacggagggatgcataggcagcagaaagaggattctggggtcagtgacgctgctccagaggtgactgtaatggtgggtccatgtcactctacatccatccagagccacagaatgtccaacggcaagagcaacccctaatgtaaactatgagcttgcggagataatgatgtctcagcgttggctcacgactctaccacacagccggggggcactgatggaggtgagaagggataggtggggacactttgtattctttgctagatttcgctgtaaacctaaaactgctttaaaaatatacgtcaatatatatatgtgaatatatatacacacacatgaatatatatatatatatatatatatatggtttttttttctatttgatatggagtctcactctgttgaccagcctgcagcgcagtgaggcaatctcagctcactgcaacctccacctcccaggttcaagcgattctcctgcctcagcttcccaagtagctgggattacaggcacacgccaccatgcccggctaatttttgcgtttttactggagatggggtttcaccatgttgaccaggctggtctcgaattcccgacctcaggtgatccacccacctcggcctcccagagtgctgggattacaggcgtgagccacctcacctggcccacacatacatattttttaaggtaatcaggggatagaaacttcctgaatgtgttgctcagaaaagagggacagaacctccagactggctgctctcgccccgctgccttcagctgtctctgagaaacctgaccctggccactgggcagtggcgcctgaggtccagtgcctggtgcagcacagaacaggcctcttgtggcaaatgtgtggagcactccacccgacctcttccacactggccagggccggccatccgcctctgaggacttccagcagcagctgggctgtccccgacctccatcctggcccactggacctacagggcctctcatcacatggtcacagtggggaaccctgtgtgttgttggtcttctctgcacacgggctcctccaagccccagtaaagctgaacccaagtttgaaacacgctgtcctttcacgtccccagagcttctgtggggagccctgggggtttccggcgttcctttccattttctgaatgcccacagttcgtcacagttcccttttctgacccaggccaccacgtgacacgcctcccgtagcacatcagccttaatcacgcccaccgtgaagctcattctcagacacttcctgcactgcttcctccaaaccccagggccccacatttcctaacccctctcctctggaacaggccacgtcactcatcccaaccatccctcccaaaagtccctccgtgccttgtcacacccctgcctgaatctggaacctcaccgatgagcccgccccttcccccagcttccccctcctcccttagagtcctcaactcaggaacatgtcggagccacatccgttctcccaaatccaccctcaactttctaacaaaggaggaaatgaagccgacggtgcagcaggcagggtcgtggaaacctcccaagcgccctgtcactccctggtaggcaaccgagcatagctctgacggcccaaagtcagggccaggggctgctccaccctggagtggcagaagcgcatgttgccaaggcaaatgggcttgcggaaataccagcgactctcaattattcaagccctcattatccagtcttcctgactcttccacttcccaggagaccacacagaagccgctaaacccttcccaatccagcctgtccctcaattcctgtgcctagatccaaggagggtttgtggccctctgtttgccaggcaccccaaccctgagaaccgaggcagggcgcccagctcacccccagcgaaagcagcatcagcagtgcccggcgtcctgctcctcctcctgcctccacgcccgttctattcagcacaggatgcttcctgctaccggaattcttggtgcatttgaattaaaccaggctgggcctgaattttctagacacacatcaattcatacaggcaaggaggagaagcactgcgtactttggaatttgggcccagtccattactttgggtgtgtgttcttcctattccgagagcgtaaacggcacctagaaaaagctgcaatagcccagaacattccggttccttgccattctatgaaagactttttcctctggttccttctggcctccactcaagtgtcccctcctcagaggcctcccctggctctgatcgccctgttctatgtgctccggggcacgtcatcacagcgccagttgtctatgtattcattccccgttccacgaaagcaagcaccccgcccccgctcttttcttcctggggtctaagcagcacctggcccatggcgggcgctccacaggctgtgggctgaattgggaggggagcgtcacttgcgtctataatcgttgcaagccataaagaggaaccgaaatgatttctggtgagggtgctgatgactgcatggaagaacagtggggatgatagaagggtgacagccactaatcatgtcatttaggagacgtgaccaacaccgaccaatacaagctacagtgggtcctccagtgtaaggcttgagagaagagtgacctatccgccaggagacctactgaaggggacaagaccctgccctcttggaacaggatcacgggtgggaagacacgcatccctgggggcacaggcatccctgggagaaaatgtctggggaaccaagcgttccctgcactgtacaaaaatcctggggagcaggtgcatgggggcacacacatgcctagaggcaaatctgtcatatgtcttcccggggcacacacatccctaggaatacaagagtcccagggaagaaatgaatgggggacctgcatcccggggtacactaatccctggaggcacaggaagagttcccaggggatatgtcaggcccaggtggtttaaggaaaccgtactgcatacccgctatgggagggctccttcccggggacccacctgaggccggcctttctccatctgcctttccacagcagctcccctcacctctcaccaatccgaaatctcactatagggcatggtcccggggcagaacctccccacccaagcagaaaattccagaatgtatctcccaggaggccctgggcaagcggtacacttaaagacaccagactatcccttgcaactctaacaatctttaaaacgtacgaggttggtagtgtttcgtgagcacacgcagtaaaaaatttaaaaaaaaaaatttttaatgggatctctgcaattcttgctcgcaggcctcccaggcctcagccctgcacgccctgagccccgcaccctgcagggcgcccgcgcaacacccagtagtgggtcccccaggccgtgtctgcccagagtgccctgcacacgtgagcgtcactgctcatggaatgaacggtcaccccgcgcggctggctatgccgctggcccagggaagagctgaacacccggcaggcagagcaggcgcgggccccgcacggtggcccgaggtccccgccgcgcaggcgcccgcacgcgcgtttggcagactccggaggccaccgcggccccacgcgccaggtcccggccgttgtttacgggtcctgggtcaaaggcctggcctgtcccgaaggtcgcgcagccgcgtgggccgggcggggtgcgtgggggagggcgggggcggcctcgtggggctctagggccgagggcgggcaccgccgggcaggtccccgggggtcggcgggcgcgggcgcgcactcaccctcgcgcgccctccgcttcctggccagggtgccgcccagcttgcccaggaacgactcgtccttcttcatcctgcggggccgcggggtgggcgagcgcggcgcggaggacatgggccgcgcgtggggccggcggcgggcgcagcgcgt

SEQ ID NO: 1562884 - DNA, 4001 bp, Homo sapiens
cttggtgcatttgaattaaaccaggctgggcctgaattttctagacacacatcaattcatacaggcaaggaggagaagcactgcgtactttggaatttgggcccagtccattactttgggtgtgtgttcttcctattccgagagcgtaaacggcacctagaaaaagctgcaatagcccagaacattccggttccttgccattctatgaaagactttttcctctggttccttctggcctccactcaagtgtcccctcctcagaggcctcccctggctctgatcgccctgttctatgtgctccggggcacgtcatcacagcgccagttgtctatgtattcattccccgttccacgaaagcaagcaccccgcccccgctcttttcttcctggggtctaagcagcacctggcccatggcgggcgctccacaggctgtgggctgaattgggaggggagcgtcacttgcgtctataatcgttgcaagccataaagaggaaccgaaatgatttctggtgagggtgctgatgactgcatggaagaacagtggggatgatagaagggtgacagccactaatcatgtcatttaggagacgtgaccaacaccgaccaatacaagctacagtgggtcctccagtgtaaggcttgagagaagagtgacctatccgccaggagacctactgaaggggacaagaccctgccctcttggaacaggatcacgggtgggaagacacgcatccctgggggcacaggcatccctgggagaaaatgtctggggaaccaagcgttccctgcactgtacaaaaatcctggggagcaggtgcatgggggcacacacatgcctagaggcaaatctgtcatatgtcttcccggggcacacacatccctaggaatacaagagtcccagggaagaaatgaatgggggacctgcatcccggggtacactaatccctggaggcacaggaagagttcccaggggatatgtcaggcccaggtggtttaaggaaaccgtactgcatacccgctatgggagggctccttcccggggacccacctgaggccggcctttctccatctgcctttccacagcagctcccctcacctctcaccaatccgaaatctcactatagggcatggtcccggggcagaacctccccacccaagcagaaaattccagaatgtatctcccaggaggccctgggcaagcggtacacttaaagacaccagactatcccttgcaactctaacaatctttaaaacgtacgaggttggtagtgtttcgtgagcacacgcagtaaaaaatttaaaaaaaaaaatttttaatgggatctctgcaattcttgctcgcaggcctcccaggcctcagccctgcacgccctgagccccgcaccctgcagggcgcccgcgcaacacccagtagtgggtcccccaggccgtgtctgcccagagtgccctgcacacgtgagcgtcactgctcatggaatgaacggtcaccccgcgcggctggctatgccgctggcccagggaagagctgaacacccggcaggcagagcaggcgcgggccccgcacggtggcccgaggtccccgccgcgcaggcgcccgcacgcgcgtttggcagactccggaggccaccgcggccccacgcgccaggtcccggccgttgtttacgggtcctgggtcaaaggcctggcctgtcccgaaggtcgcgcagccgcgtgggccgggcggggtgcgtgggggagggcgggggcggcctcgtggggctctagggccgagggcgggcaccgccgggcaggtccccgggggtcggcgggcgcgggcgcgcactcaccctcgcgcgccctccgcttcctggccagggtgccgcccagcttgcccaggaacgactcgtccttcttcatcctgcggggccgcggggtgggcgagcgcggcgcggaggacatgggccgcgcgtggggccggcggcgggcgcagcgcgtgtggagccgcccggtcgccccggggagaggccgagggcgcggccccgccgccggcccccgccccggtcccgcccccgcccctggcctggagcgcggccccggcgtcccggatgcccgaggcctgctggtcccggccagagccgtccccgtcccgcgccgccgctcaagctcagagaaggggcgtggggccaccccgggagcggcgcagccttttccctacgcgttggagccctgggctctgctcggctccgctagtggtgccggatccaggcgacagcgcgacagacaccattgccacgtgggtgcagcctcaggacgtcctgaaagccggagagaatcaggtcacacgaacgtggccggtctgttgttaagcttctgccaagagccaggcccggggcagggggagcccttcagaactgggaattgtccctacccacgggaagcttagaggatggagggcaatgcggggcacaggtcattggcctgacctccaaggggagttccaggagttgtttctggaagaggcgacggggaggccccaggaaatggcttgcaggccggtaccatgaggtgagcagaagagcaggccctggggacagtgtggggtgccagggaggggagaggaggggagacaggcctcgcatgtgttggaagcagaggaaacggcttcatcccgaggactgccagacagggctatttttattttattttattttattttattttattttattttattttattttattttattttattttattttgttttgttttattttattttatttttttagacgtagtcttgctttgttgcccaggctggagtgcagtggcacaatctcggctcactgcaacctccacctcctgagttaaagcgattctcctgtctcagcctcctgagtagctgggattacaggtgcacgccaccacgaccgggtaatttttgtatttttagtagagatgcggttttgccatgttggccaggctggtctcgaacccctgacctcaggtgatccgcctgcctcggcctcccaaagtgctgggattataggtgtgagccaccatgcccagcctagatacccaggcagggctttgagctgtgatgtcacagatgttgcctctggctgatggctgctcagcaggtgctggagacagagaaggcacaggcaggcggacggtgacttaggagaaaagcaaacagatttctgagatgctcacagccagaagccccagccttgaagaagtaggaggagtaggccaggtgcagtggctcgcacctgtaatcccaacactttgggaggccaaagcaggcagatcacctgaggtcaagagttcaagaccagcctggccaacatggtgaaaccccatctctactaaaaatacaaaaattatcggggcatggtggtggatgcctgtaatccctgctacttgggaggctgaggcacaaggatcgcttgaactcgggaggtggaagttgcagtgggcagagatcatgctactgcactccagcctgggtgacagagcgagactctgtctccaaaaataaaaaaaaaataaaaaataaaaaaaaagaagtaggaggagtgaaggctgggtgtcctgccaggccatggtggatcactcagcagaggacggcacctggggagaagtgggttcagctctgggtgtgtgggttgagatggtttttctgtctccctttgtgctggctgccccccagtccccccagtgcagtacatgtttctgttggtcaagttggtgccaggcccagtcctcagccaggggcgtgaagaccaagggcacagagctttgtcctccaggagtttgtggtcaaggagaacgtgggcacaggacacagtggccgtgtagcgtggccagcatggaggagggacagggaccatgtggatggggtgggggagaagtgctgtgggcagaggaggcttgcagggaagggacatttgacctggaacaaggatcaaatgcccttttcctttcagtaaaggaggagaagacccaccaggcagaaga

SEQ ID NO: 1562885 - DNA, 4001 bp, Homo sapiens
agagatagggtttcaccatgttagccaggctggtcttgaactcctgacctcaggtgatccacctgcctcagtctcccaaagtgctgggatgacaggcataagccactgtgcccggacggcagttatatttgagaacaagtgagaaaggtcggagaatcaggtcaggctaagagcatcttcagaaccatcctatatcacctacacttttcttttttgtttttgaggcagagtctcactctgttacccaggctggagtgcagtggggtgatctcggctcaatgcaacctccgcctcccaggttcaagtgattctcatgccttagactcccgagtagctgggattacaggtgtgcgccaccatgcccagctaatttttattttttgtgggtttttttttttgtttgtttgtttttagcggagacagggttttgtcatgttggccaggctggtcttgaactcctagcctcaagtgatcagcccacctcggcctcccaaagtgctgggattacaggcatgagccagagcccactaggctcagcccaaaaccaatttttataatagacaaagaattaaagccacctggattagtccctactccggtgcacctgaagcactcaggtcctgttccttctcgaagactggcttccaccacaccatctccaggcttcagctgtccctctccagacaggtaaccacccccctgccccacctgcacccttcctttctgggagttccctctcactcccctgccccacccgcacccctcctttctgggcattttctctcactccaccagctcaagggcaggggacgctcttctcactggccacttgccccagccttggacaaaccagacccttggtaaacgactgctgaacagaaccaatcggaagatccccagaaggttctgcaccattgctggccttgaaaactcggcatttcagtggaaaatattttatcctcatcaatagtaacagttgagtcctacccaataaaagtgcaggcgaagacaggccagctcaaggacctggcactctactgcagggcttcccaacctcagcacagtgcacaggggggcccggtgattctttgctggggagaagggagcctgtcccgtgcactgtgggatgttaagctgtaacccgggccccaccagctacctgcccagaacccaaactgtctccagacattgccaaagatcccccaaggggcagaacctccctctctgctgacaatggctgactttgaaagaaggaggttgaatttgtccctcagaaccctcagctggaaggtgtggattacttcgctccccgcagtcacggtcacacagtgacaaacctggacacaaacccaggcacttctccaaagcccagattccttccatccacagtttataatttttagcttatttttttttaatagcgtggttgcctttctctccaggctacccatcctggactagtcacaattttatcatcatttcgtaaaattcgacgcacctgaaacctgctatgacctgtgccaaggagagtttatggcagggccagcacggagggcaggccaccatctccgccacacaggggttccttgcctttcagagtcaacagcggtcacttactggtcagcatgcaaggcccagtgacgtcacatcatgaaaagtaaggagaccacctccatgtgtcatgcagcctgtgctcctggccgctagctttgtgcacgtatggtctggacccaggcagaggggcagatgagcctttattactcacctgcagctgtgactctgctgccctcttctccttgtggtcccagcagaagtttggggttcccaaagtcccatcccccacaaagggctgtgaaccagctcttcccccagctcctgtccaattggaaggtcccgggaagcagcgctgggtggagtcacaacgccctggcacctgttccttcgctggcaccatccatgactgctaaatgcatgaaagattaaaacagcagccaaacaaagacggtggacaggcccatgctcacgaggtctttattggaataaataacagcatactgtgacgccacgtggcattgtcctaaccgcatccctggcggaagaagtgtttgcccggtgttgcagtgagctcctgaaaagcgcttgcttcctgcactcagccaggtgggcctgacaaacagcatggccagggttttcgtggcttttatataacatccagaaatccaaagtaaacattgcttaaaacaattaagaagacagtaaaatactggcacacaaaacagggggaaaggattcagttgctttaaaataaaattgctctttgtcaccaagacaattaggacaccacggcccagcgggactctgggctcggtgcttgcataacactgtgtgggcgtcaaaggggaactgaagctgcgggaggctcccctagctggtgtgggttgagagacacgtcacatggagaaggagaatcagcaaataccttcctgcccttgtccgagcgtccacttgggccttgcaggcctgagacccctttgtgctgggacgtttgtccccatgggtggacatacttggccttgctttcactcagttcctatggaccagggttcctcttcaaagaaccattcactgaaaacgtggtgccgggaggaggaagggtcccagaatttctctgaactaagaaccaagagcagcagcagacggggcatctcacacccaagcctcatgtcccagcagccattcatcccaagcctataggaatcgagttcaccctgaattctgccttggaactggccccttgctgcatctgtccaggccatgctatgaattcagactcaaactgatggtgaatggagaaaaatgaggagtcgagcctaatggggcccttcccaggtatgcaaaaggcacacctacacctttgaaccaattggaaaagaatgtggacaaaagatcacatccaagccgggtgcggtggtgtgcacctgccgttccagggactcaggatacagaagtgggtggatcacttgagcccaggagttcaaggctgtagtctgtagtctgctatgtgtgtgtctgtgaatgaccactgcactccagcctgggcaacgcagtgagaacttatctcaaaaaaaaaaaaaaaaaaaatcacatcctttgctggaaacatcgcctttaagggtccctgttgtgaaacacaagtgcccatgtagcttccccacagatcttatgattccttttactgttcgacttgaaacccacaagagtgtgacgtgggcatgaggataggcatgggtttactggtttactagatgggggccgccaggacctccctgagaagctgaagccccctcccacagtaaccgtcctctcccctctgatgacacagaatgggccagggctgctcattttggctgaaaatcacagctctgttcttttctttttcttttttctttcttttttttttttgagacagagtctcactctgttgctcaggctggagtgcagtggcatgatctcagctcactgcaacttccacctcctgggttcatgcaattctcctgcctcagcctcccgaatagctgggattacaggcatacataccatgcatggctaatttttgtatttttagtagacatggggtttcaccatgttggccaggctggtctcgaacttctgaccccaagtgatccacctgcctcagcctcccaaagtgctgggattacaggcgtgagccaccgcacctggccaagctctgttcttttcaaatcccaatccctgggaaggcacagtgccctctccaggtccacctgtgagcagggcaaggctgggccactccaccagctccagggggccgcggtcctgtacatgccatgcaggcagcacagaacgttccagccccaggctttttgtcagtgtggcttttgaatgtcactgcatcccgcaagagacaccgtaatgctgttttaattatttctttcccctgctgggaaatcacctccatcaaa

SEQ ID NO: 1562886 - DNA, 4001 bp, Homo sapiens
ggctggctgaggtggatacgtggaatggtgacatctcccatcccataaaccggaagggccagggttgacagaggcactgttcatcttcctcctcctcattacaggcagaaggctgggctcaccacatgcccgggacaggggcagacccagaggccagcccagccctccttcctgttcccctggcccacttcctctcctgtgaaggcttcgctggctcggctggcgccttctggcctccctcttcctcccttttcagcccctgggtcttctcagtgttttcaaactcaatcagacattgaggtaggggagtcacatggcagaagttggtggccagagcagggagccccctgagctgtgggagacggaggcattcactcgactggagccacccatgtcacaccagcagccagcctggggcgggggatgccagactccatcctgccctgtagcatggaggtggtggggacacaactgactcccagccccttaatatccaagctgagggccatggccagagaaaacgaaagagcctggcctgggcgtcaggaagcctgggtcccaggccagctcctcctcactcaggctgtgtgacgttgggcaaaccccctgccctctctggtcctgatgcatggttacaaggagggcctggactcgatgctgcccaaagggatcagcagcctgggcaagccccttcctggccccagggcctcagtttcttcacctggagacggaggggttggctgaagttcagaggcggcaactcctcagtagaacagggagggaggacgccgagcagcctctgagcaggggcagccggaggggccgtggggactcaaggtcccactttaccgactcccttccccgggtggcctgggctgggactgcactctgggatccttcccaggtggtgtctgggcccctccctccgtgacccccaacactcaagtatggtggccccgatgccagaactcacccaaccgctttccacgcaggaaaacaaaggcctactgagtgcaaagggtggtccctggattccgaatggaagcaagttccgggttcttctggggtcttcggggaccaggccgggaggcaggagccccgctgctcacttcctccaggcccgctcagccggcaggagcttcctcctctctgcggcagggcccgaggggggtggatgccgtgaaagtgaagctgccacaaacctccagaaagctctgcccggagccccagcgcccgccgtgccgcctgggcccccggggttctgcaggccacttaaactcaatgctttcatttctccccctctccccgccttccccaaaccatgccagtttccccgcaggctgttcacctccaaaatggcagctacataggccagagcctggggtcgacccccgcaacccaccaccagcaccctgtcagcctggcctccaccctccatcccgcaccgccgtcctcccacctccacaccccgccccgggccaggccccttcctctcccgggaccacgcaggagactcctacctggactctcggctgcagacttccccacgccccctgcccgcccctgagctgaggctcccacaagccctcggaggagtgagtcacttcctgaccccactcactcaaacccaccaacggcacccaatagctcttaaaataaaatccaggctgtgcgtggtctgtctctctcaatcgcggttacatacccgtgtctagaacaatgcttggcacaaagtgggctcagtgaataaatattggtggtggttgttgccaaggggatcgggaaggctttccagaggagaatggggccttgacggctgcataggagtttgcagtggaagaagaaggggtgagaacgtggcaggtggagaaaacagcgtatgcaaaggcatagcagggttcgagaaggagagatctcagcacagtagatagagaaacacttcagacccgagctggtctctcaagctggaatcttcaccatccgggctgaaatggtgagtttccctagcaacaggtgactgggaagctatctaccctttctgacaggttaggcagaaagtggctaaatcaggtgggatgcaggtgtaaggagtgtgtgagagcaggaaagtagggtcgtttacaagaagttaataaaaaatgacaaaacttagtactggtattgttgctaatatttatggagtcattggtgatgaaacaaacataattttaagggctttcattttactggaaacttccttgtgaggtaggtacaatcatcacccccatattacagaggaagacactgaggcacatgagtcagtccctgccattctgaagtgcccgtgctagactggggcttgtaacaggtggggagagaagccaccgtgcaggacctattttgctggggcgtgtgtagcaggctcagcccagctctggacacagtggttctggtggtggcttctgactctggatcacagccacatagatgtagcagcagtcacagtcccagcagcaaagagacggtatattcccatgtgctaactgaagactgtttaataaagggacagctggggcagggttaaaggaacccagaagagacagtgctacaccccaggctagcaacatggggagctgttacttcttcaaaacctagagggtgaaggagggagtgggtggcagagcccaggaacagaatcactgaagctctaagaggggcctcgggataggagctgtggcctttggtagagggacacagccagctcatggtgaaccagcagaagggcacagctggaggaatcaatgaccaagcctcactctcctccctcctgccagggcctcccctgcccacatccagccagaagccagagaaaagaagtcccctgctgcggcccatagatgtgaggagagaaaatggtggggagtggatctgcagaggtgaacctaaagcattcaacccagaaagcatgcttctagggccagcctgactcggcagcttccttcaggagccagctctgcagtattcttccaagagtccttgctggaggcgctgcctccagccttccaacagcttgagaatcacacagcttcctatgttagattcctttctcctccaaacaactgaagagactctaatcatcggcaactgaatcccaattaacttcggatttgttaccagaaacaattgcaggcaacacgacctccaggatgggaactgggattggttacttgttctggttgatttaaaggcagtggggacctagtaactgttagagaatggagttctaatagatcgtagcctgtgatggcaaaataattacctgtcatcactcagaacgaagtacctattaaattgtggctttggcagagttgtggcttccatacgcaatacgagcacaggttatctaaggactgtggggtgagcttgttatcatcacaccaaagagtttaaagcaagaaaaggacagtcccagggctttacattctcagctcaaggtatgtgcagaatacagggagttctctgatagccctcaaagctatctctcatctcttggggctgcagggctgatgtaagaatcagatgcgaaatctaatcctgtatggtgtggagttacaacagactaaatccacaactcacaaagcctcttgtgtgtagagcattgtttaggggaagagagggactctaagaattggaagagtaacatggagataagtccaagcacccccaaaccccaattaagagaaaggcatggatagaagggaattattccagcctttttttttttcagagacacggtgtgaaatatacctgtgcaaatatgccaaacactactgaactgtatacttaaaaatagttaagacagtacattttatgttacgtgtatttttaaccacaactaaaatttttaaaaattaataaaaaataaataaattgcagggatcacatcactttagggatatctctaaatacttcagaatgtttctcctaaaaacattctcctgcataacacagtaccattatga

SEQ ID NO: 1562887 - DNA, 4001 bp, Homo sapiens
tcttggcaggagccttttcaggactaagataacgtgtggcaggggaggaagagggggcctttcctcacctggagaagcctttcccacagctctggcagatgtaaggcttgcccacggacccatcatgggaccgcacatggtaggacatgcggtcttttctcttgaaccgcaacccacacacagggcaggagtagggcttctccccagagtgggacagcttgtgccggttaagatgatacacatcacggaagatcttgccgcagatctcacaagccacctgcttcctggtccggctcctctttcgggggccgtcggggtcttcagagatgggtagcccattctcacccagcctcggaggaggaaggtcgatgtagcccagctggaggctggtgacaccgtgctgggcctcgtgctgccggagccggttggcatcagtgaacaccttaccacatagaccgcatggaaggatgcctgcctccctcaggccccctggggacccaaacattgagtccagcaggttggccttccttgggcggccccggcctcgcttgccagtcaggggaggggcactggatgccacactggggaatggggaagtcagcagttggggggataggggtccagccaccatgggcaagcggtccaccccaggtaacacaggcaaagaggcttggcctgcaatggctgcaccagccgcccgagctgcctcctcctctggctgcatgctgccggcgatgccattgctgttggctgccaaggctgccccgttggtcatgtccaaagggaagcccaagtccgaggtcccaggggggcgaaagagcattatatcggcgcgggcagggggtaccaggatctgtacgttggactgtttgatgacttcctggcagatctcgataaccgacctcatcagcaggaacttggcggccgtcatgagttcgggaaagctctccaagcgcaccacgatgcgggaagtgtaggcgaagtccagaatgtccccaaataccttggagctgatagtgtgcatctccagctcccggctgcccccggccccgccgcctggtgctgccgtcgcgccccctacatcagccggacccccgtccgcagctccgccgtcgcccaactgggcgctgaacaccgactcaaagtactcgctgcaggcggccagcacggcgcggtgcgctgggaagctctcgtcgcctacccgcaagagcacgtcgcagaagcgcccgccgtttttgcgctgctggttcaggttgtgcagcatctccgtgctgtgtctgctcacctggtatgtgtagcagccagacgggccgcacgaagcgtcgttcacccgctccatggccgccgccccctcccactagcccggccgctgcacctgcccgccccctcccttcccctcagcagcgagaagcggggcgcagcagacgtgtccacactccccacacgtgccggcccgaggctctgtagtctcgcaggtgcgccgagtgtacacgcccccagcccggatcagactgtctagactgcggggtgcaccaccccccacatagccaacccccgccctcgctggactgcgcgccactctctcctctccgcccgcccgcctccccttcccggtctaccttccgggggggtgcgcgagcgaagaggtgcgcccctcctgcaaacgcgcctgccacctcccctcccgcccgccaggcggcgccggcgcgcagccaagaagggcacgcgcacgcggggaggagaaggaggggtccgccgcgcaggcgcgcgcgcgcgccgcggcttttcccgggcccgctgggggcgcgcgctgcgtcccctgcaaagcgcgagccggggcgggggcgccggagcggaggaaacaaaaggcgaaggcgaaggcggcggcggcggggcgcgcacgggggcggtggcgcgggccgggtcccggagcctggagggcggtggcggcggcggcggcggctggagcgggcgggcggcggcggcggcagagtaggcccttcctcaggccgggagaaggcggcggcggagcggcggctgtgcggccccgggctccgtgtgttcggagcggaggaaagatggcagcggctgcacttcctcttgcactttcacccctggggggaggagaaggagggggcgataccaacaacaccccccctctcgcttgcagaaaaaaaagaaacggcgagctcagagtgggggccccggcgtccccggccttgcacgtgcgcgcccggatgcctagcccgggccgcctggcgctgcaaactttacactttctttgtgccgagcgcccccccctcaccaagacgaggatgcacgtccccccttccctatttatacaccccccccccgcagtccgctccccccgcttcctgccccccctccccattccccagatccgccaatgctagagcagcctgagcccccgtccggcccccgcctccccaccccgcccgcggggccgggggctgcagtctcagcccccccggaccaatgcaaacgaagcgccgagccagcaaaccagctcccactgcccctcccctgcccgctgagagtggcggctagcagggtgggggggcaggaactgaggggtgcggatccgggccccccagcctgcgaagcgcactcgcaggtcgagcgggcgtcgtccacccttcggagccccgctttcatgcgtgaaattcccagaagtcgcctgcgaccgcctccctgcttcaaacaccagagagggcccggggtcctggccggagacaggccgaacctccggagctgcttctgcacccggtacattgatcgatctgatgggctgcgcgcccggaagagctggagagatgaagccagcgtccagcttctcccccaaaccacagcacgccgagctttgtccccggggagcgtgaagtcaccagctccgggaggcgacaatatgagggcgatggacggggcagggacccccggaagccccagcaatcctcagggaagtgggggtgccggaggagtcggggacaccctcaggcctctccaagcccggagcatccccagcgcccgcagccctgtgagacgccgggtgctctggtaatgggccctgccgccaggcctcggcgctttgtccccggcccgcccggggatgctaccacgctagagttgtacaccaaggtttgtcttcccaggaagcgctggcggctgcctttgggccgcctggcgcggagccccaggctgcaggcgccgcgtgtgcgggcgggaagttcccacagttgcaaagaggcagcgaagtatgtgttccaaactttccacggttccaaactgagcgcttccattaagagaagcggtgtgcgggggaaaagcattctgggtattagcatgcaaatgaacgggcccggcttccaactccgctcgggattcccaccgctgcgcgccgagctcgcgcccagccacgcgcgccctgaggcttccgggcgttgccctggcggatgatccgagttcaaaatcgagacctctgccttctggtttcgtgtcctggtgcttagtcacttggcctccctgagattcagttaaactgtttcttaacctgtgcacagggacagcagcacctgtcctgcacacctccgctctagggcatagtacatgccaaactcctgttggagagaatgaattagaggcatgaagaaagttccctggacacgaagccaggagatctgtgttctaagcccagactcactgtcaccttaggctagtgcctccctctctgagccacagctttcttgggcggattttgggaactggcacgttttatttttgagagagctgctgggaacatccacagagaaagagaaaggggccgggcgcggtggctcacgcctgttatcccagcactttgggaggctgaggcgggcggatcacctgaggtcgggagttcgagaccagtctgaccaacacggagaaaccccatctctactaaaaatacaaaactaggccgggcgcagtggctcatgcctgtaatc

SEQ ID NO: 1562888 - DNA, 4001 bp, Homo sapiens
acggctacgtgaggctgggaggggtggggacggctccgaccccagcgctccctcagatgtttttataccccatctcccgtgcagctaggcttttgcaggcggcgcgctccgcaccctgcatgcgggggagagaggtgcttcctcctgcagggcgcgggcacaggtacggcaaggcctcaggcacacagcgccccgggggctggattccttcagagcccctagtcctccccctacccgagtgcccgaaacctacctgcgtctctatctttctctccctctctctctccgtctctctctccgtctctctctctctctctctctttctctctctctctctctctctccctgttactcccaccccaaaccccgcgcccgagacacaagctgcttccagaccgtgctctggggccgggcatgccctgcgcgtgccggagggcgtccacccggaccccgaccgggagccagggtgggacccgagccccgtcaaaggtcggcgtggatggcaccggtgcgcaagcttgcacctcctgggcaagccgatggcaggacagagcctaagccgaggctggcgccgaagtgggctcgggaggacgcgctgccttctgcaccctgggcaccaccccaccccctctcccccggccgggaaggggcttgttctcgggttcccaaagggtgggggacagggccacacacaccctcccccgacacggaacggcttagggagccagattcgcccgccggttggaaagaaagccaccgctgttgccttcccttagagcctgtcacccccggacctcgctcccagcccgaagaggtcacccagcgcccggcgtcaggctcgcgggctgcaagggtccaaagttcactgcagggagaggagggggcggtcagaaggggggggcgaaggtaatgaatgaagaaccagccccagccgccgtggcaactcacctcggcgctgaccagacgcaggtagcagcagagagacaggaagagcgcccagcagcgattcatgccgactccgggcccggccccgcggggccccggacgcgtagatcgagcgcgccgcccccgcggccagggtggggggctggggaggggggtgggctcggctcgggtccgcggcgatcaggcgctcaggcctctgcagccgcggctcacccgcatggcccccgggcgccgccgcccccggccccggctccgtcgctggggggcaggggaggacctgggcgcaggacctgggtccgaggccgctacctgggcggatcccgagcccgagtgagcatccacggccggggggctgcgtcgcgaaccagccgaggcgtctagccgtgtgggggcgcccaggggactccaacctccaagaggaaaaggaacacggcagtcgatggttcgtcttcactcgccggctacaggcgttttcctctgcccgccggcttagcttttttgcaacattttctggaaaggcccccaaaatcggaaagcgcggagctgggcacctcaaggcccaagtctcccccaaaaaactttttccaaagttggctttgcaacggcagctcgagcacccgggcagggagaggtgcaaactcccgcccgggccgggtaggggggcgggagcgtgtgcgccctggcgcggggcccgggcggcgggcacggctgctccgcgcgcgcggcgtgcccgctgcgcgctcggctgggcccggccgacaggtggacgcggcgcgagtccgtcggtccgtctgcccgcccgctcgccgctctgggcgtcctctgcgggctgcgggctgcgagctgcgagctgcgagctgcggctgctccggttttctctttgcagcgaggctggagggtgggcttttttttttttttttcctttttgcgcgcgtatgtatgtgtgtgcgcgcaaagtatctctatctagggaatgaaaaatgggcgctggcggccggaggggagccctagggaggcagcgggggaggctgcgggtgcgcagggaggcaggcaggccgctcccggctgcaggaggagaagttgccaccctttcagctgttccggcctttataaaggagaagggagagtgcgagaggtgggtggagacagcctttcctcttctggcccggagtcagcgccaggaggggggggacgcgggagctgggggagggcttggggccagggcggggcgcttagggggtctctgagagccgagcaacccttcagtccatgaatctggccctggggaaaaaagaactaggggtgacccaccgtcccgcccctcagcacagtgaccatggacaggttaggagcccacgtggtctagggggatgtctccagagccaaggccaggagtccacgctcccctccaggaccagacatttccaccctggcacaggcatggcagggagggactcaggctctgcagtctgagagcctgaattcagatcctgccctggcactcgggagcttgggtcaccttgggcaagtcacttccctctgtcccctccatctagcctcaacctggagatggggctattgtaaggactcagtgttagcaagggaagacaccgcaaggtgaacccacagaacccggcagccagcgcccttcagctgcaagctgggtccgagtctcctcctcctagctggttgcctggcacaacaggccctgccagcgttggctgaatttgaatttgttgaactgcaaagtcacacaaacccccacagccctgcagcatcttcgcagggctaccaacatgatcttcccgtcagtcaccctgctgtttactatctccctcagcccccgggttcgaggcccagagcccacccacccacaaccagccttcacacagttaacgccttctgcccccagtcagggagctgctgtgtccctgccttcagcagtcacactgtctcagtcacagtcacacgtactcacactgggcccagcacccccctcgggacacgcaggctcctgcatcacccagcctcccggctttgaggcaccctcatctcctccgcttgcactgtctctgttatccgcccttccctttgggatgtcagcctgcttctcacagaggagcacactgagagagtcacacctgctctctcttcatagactgtcttcttggacctggacagggtggaacagaggaggaaggacatctcaggtggtctttacagaccactgcaggcacccacccactgctgcctaccacccagcagcgtggcacagtggcagagacacagcctgaagacacatcaccttggtccaaatcctggagtggccacttgctggacaagtgtctgcaggaaggttttttaacctctcagtacctcggtttcctcctttataaactggagatgaatttataaactggagctgggtgtggtaacaagctcctgtagtcccagctactcaggagactgtggatcgttttgagcccaggagtttgaggctgcagtgagttgtgactgtgccactgcactccagcctgggcaacagagcaagaccctatctctaaagaaataaaaataaatctataatgggaaggagtgagagagaacagagaggcatggcaaaattttagtggtgatggaaatgtttgtcatttttgattgtggtgatgggcttatgggtgtatacgtacatcacaacaaaatgtgtgcagtttgttgtacctcagtgcagttgtagagaatttttaccctgctcctggagtggtctggaggctcccatgaggtcctccatgtggaggcgctcagcaaaacaccttagcaggaagcaagcgcctggaaccttccatgcagccttcaagttcactggtggccccgcactgctccaggcactggggagacaggtgtgaaccagcctaatgcaggcccctgcctttgaagagccccattgagaaggacaaccagatgtataaacagataaattaggagacagggtgacaagggagatggggcagcgggacgaggagataacccccaaacactagatttgaagtctaacg

SEQ ID NO: 1562889 - DNA, 4001 bp, Homo sapiens
cacccttcagggcacaggacggccttcccaaacatcaggagtgcagaggctgagaaaccctgtagcggaggaaagagcaagggctccagatgccagggcaacctggattcttggaatcttgtcacaatctaaaacctcggcttctgcatcttttaaatggggctaataatacctcgcccggggttactgggaggcataattgcacagagcagagctgccagcagataatgggagcttaatgagttgtcactgtcatcatcattaattctttccggatggctcctttgtgggcagcagcgagtggcacacgtgctcagggccagcagcacaggacatttttgaggatgacaaggagtgggtggagagctgcctgcccatgaaagagtgcgtgactttgcattatcccttgtgctgggccacaggaaatggtaccctacctccacactggcagagcctgggccgtgtgggcttacaaggcccttccggggctgggggtgggtgagggtggggggacactcagcacgtgctcagctccaggatgcaatgctctggggatgacgagcatgagcacctgttgggagtcacaggctcttcttggtatgggaaggtgagccgcccggagcctggttttcctgggcacaggttccgcaggcctccaggtggacagctcacttcagagatgggaaaggaggcctggcaccctgaagaagctgtcccaagatctcaggcccggggtttctggcagagtgagggcgtggcgaggaggcagctggggcaaagccagccgtgggagccaaggtaaacagcctcctccgaccccgcccccagcgccagctgcagcaggtaggaagggcacgagcgagcgtgaggccaggtgagtgatctgctcccaaccaggctggcagatcaaaggggcttgaaccccaccctcctcctgggcccagcacacacacacagatacacactccccggcccgcctgccattcccaccaagggacacacaggcccaagcaaccaggggcgttgtctgtggctggcagaggaagaagctgatgaggcctcccagagcctgcctgcctgagagtcgcaggccttatttagatcgaatgccaaagccaaccaacccctttgaagaagccctctcggggcaaaccacagaagccattagaaccagtgtttcccacctagcattccccttctttattgctcttgggaccctcccgctcagcctctgctccttcacgtgggcccagaaccctggcctccccacctcttgcaggagcagaggaaaattaaagcaggaagagaggaaccagtccagccatttataatactggcaaccacggcaatcactgcccatccccatcccagccaggggacggggccaggggattctgccattctttgggaactctgcactaatccaatcttctctctctctttttttttttaggtggcagaaacttagccccagctaaagatacacagaacctttgcagtctgattttctttctgtttcttctcctctgtcctgtctaatcctggtagcccaagtcccaagacagaggagagacagacatgcttctctctcaagatggggggctttgaaagactgatgcctaccagagggctgaaaaggggggctgccctcggagcagagcaaagcgaggactcagtggggccatggagcaacagggggccaggtcctgccctccccaccaacccagcactaactgttctttgcactaatagttactgattgtccacagggctctgggcactgttctaaaagtggggaccaggaggaaagctctctaatggggttgacactccagtagagaaagcaggtaataaacaatgaaataaaccagaacataggaagagttgtcacagaagaggctcctcaatgtggggaggggaagacaagacgtggagaggtacttacgaggcccatgataaacatctcaccattcctgctcagtcagtctctctctctctctctctcagatgcgcacacacacacacacacacactctctctctctctctcttcctggctcttgcaccagatcctccaaattctgtttgacctgcccttgcacacctccagggctctgggattccagcagttggtctcctgccccctagggccattagcaaagccagaggaagctggatggcaaagggcagtggggcccttcactctttcccggaagaagtgtgctgaggccagacgcgtcacgtgacagtgggactcgccctcctggaagccagctcagctggtggagatggcacctcagaggcctcggcaggccctccacccagccctgcctcacggctgcctgccgtctgctgaaagattagtccgagcacgaccaggacgtggacagctccaaggccacctccaccagcaggcctgccctgactctcccagcactggccattacagctccttcctggactgacccctgcgtggttccatccccatgcaggtcccctcccccagggccagcctgaggctcactcaggcttagcagcaaagtgcttcataaactgcaaagtgccacatacatcgcgcctgtggccatgtgttcaagaatgctgtgactaaagtgaggagaaaggcagtttctgtgccacagcctccaccccagatacacgagcccgtggagctgtgggaaagaaggaggaggtgctggacgaagctggaaatggtaaggggaggctggggaaacatccagctgtcagcggcctccccggggcacgctgggatcagccaagagaatgcaacagccaggggtgggagccccctccgcggttgcacacgccaggtccctccagtcttgcaggttcaaatgaaggcttatgtgaagggggaatcgctctggacagctcagtgcccctcagagtcacatcaccaccattttccaccacgcggaggtggttgaaaaaaaggagtcacagatgggtaaggtttgaggggcgtcgggctgacgaggcaaaaaaaaaagtaggtgctgtggtgctgatgggaggttctccctccctcacaggacgccaggaaggaaatggggccgctacagaggtggtgaggtgccagggcccacggagggcccacctgttgcgcgggggcgagcaccaggcgctgggtgcacgggggcccgtgcgtgcctgtgtacgtgcgtgggtgtgcgcgcacgtgtgctcaggccgcgcgtgcaggggccgtgcgtgcgtttgtgtgcggtgcgcgcgcgtgtgtcccgcgtgtgcacgggcgtggcagaggcgggcgcgcgacctggccgcggtagtgcgtgcccgtcgctctgcgcgcccgcccgccggagcgcagcatcgcctccggccaggagtgtgcatgcgtggggtgagtgagcgagtcgggggcccgggcggggtgggctgcggagagcagccacggggcgccgccgttcccaggacgccctggcaccgggcccagcccccaggtcccacggcgaggcgaggcggcagctggggccggccggccaccccctccccaacagctggccgcggcccggggggctgcgggagaggcggagagggggcgtcgggaggggcctgaaggcggcccggccgagccccgcgtcctccctcccgggtgcgggccgcggggggcggccgcggaagggcggggcccccgggcgggcggcctgcggccctcgaggagccccgagaacaaaaggagacggcgacggctcctccgtggtcaaaacaacctgcgctggcggcagcccaaggccgggccgcggcctccgagccctccgccttaaccccttcgccgccgctgcctccttcctgcgcctggctggaggccgcaggggccgaccctccccgggagccggcgaggtgcgggcgaggtgcggactcccggccgcagccgggcggaggtgggacggtacccagtcacgccgcgctcccggctgccctctcctcccctccaccgcgcgcgtcgtcctgccc

SEQ ID NO: 1562890 - DNA, 4001 bp, Homo sapiens
cctgtacccccaggatttaatatcaatgactgtccgggtcagtggccaacagagacggagtgacagagatctgtccacggccccagtatactgactgggctattaacctgtccacacacactgaccactgccaattagcctctgctgccacctgctcttgtctaacgcaaaccctccacaatggaggagcctccttttgcttctgcctcccctgcagggctgaactcgcaagatgacagcagtgaagactgccctggaggtcggtgtcacaaaggccaaattcaggttcccgcgctctatcactctgccagagagttgctggcagaattctgccccacccatcattggggtgcggttggagggttggaggggaagcctgcgaggactgtccctacttgtgagggctgaaacaccaattcccagaggcaggatggaggcaggtgtgtggggacacaggaggtggaggggctcactatatctgttcttgggcagctcacttcccttctcttagtctcagtttctttcctcttcttttagagataaggtctcactatgttgcccatgctgaagtacagtggcttttcacagatgcaatgatagcacgctacagccttgacctcctaggctcaagcaatcctcccgcctcagcctctcgagtagctgggactacaggctgttgccactgcatccggctgcctcagtctctttacttgagaaatgggacaataacttccatctccagagtaatttggaaaccaaagaagaacacacacaaagctgtttcattaagttctctgtaacatgggggactctggctacaacttacatcatctgaacacctactatgtgccaggcactcaccctgatcaccgtcaccgggcatgctgagcactgccatttctcacccaggcagagatgcttggaggttatgtaactgaacacgattacacagctgtgaagctggagctggacctggaactgaggtcaaactccaccgcctttgctccccacacacctgcctacaccctgcctctgggaatggtgtttcaaccctcacacagggggacaatcctcccaggcttcctctccaaccccaccccgatggtgggtagggcagaattccgcccaactccctaagttacaaagggcctcagtttcctcatctgtccaacagggaccacactgctgcgcctcacaggatgacggctacagggatcaaccgccccccacaccaaagcaccctgggcctccctcgcactctcctgttccccacctgccacctggagacgcctcttccccgcccctcacccttaggcgtggaggcgaatgcgcaggtcgcccccatctcagtttccccgccattcccgcgctcaccaggggtccggctgccgtcgctcagcgggtgccatgggtcacggtcggtggccacgagtaggcactcggggtcgcgcaggtgcgcgcacgcctccctcagcttggcgaaggagaagtgctcgtcgtagcccacaagcacggcgcgcacgcgcggggccgcgccgtcccccgcgctcgggtccccggccaggcgcagccccgcggcgcgcagctcggcgcgcagcccctcgccgcccagcacgaacacggcgcccggcgcgtccggaggcccgggcaggcgctggcgcagcaggcgcgcggcgcacagcgcggagctgaagagctgctcggcgcgcagccccccgaagccgaggcgcgcgaagcgcagggccagctcgggccgcgcgcgccggctgttgttgctcacaaacagagccgccttgccggcccgcgccagccgctccagcagctccggggcgcccggcacggcgcgctcgccgttccacagcaccccgtcacagtcgaacaggaccccctgcgcccggcccagcacgtcgcgcagggccgctccgcgcagcctctcgcagcgcgccatgcagccggccggccgccggcctcccgcgccgcgctctctccgcgggcacggcgcgctctccctggcacgttccacgcagccgccaattggcgcgctggaaggaccggggggcggggcgacggcgtggcctgcagccaatgggggcgagagtctgggagaggagcgaagccgcgagctaacggaacttggagagaggggcggattcgtggccaacaccgaggggaagggaccaatgaagagctagcttgatccttctccccgtccctggttctgctggaccagtcgccgccgagtttcaacgccgactacactcttacgcggtgggagactgacgctcttcttaaccaataagaatctacaaacaaaacgcgaagcgaaaggccccgtgccctccagccaatcagaagcttaggcgagctggttgctgggagaaaaacagatgttaaatgaactgcctttgggtcgaatctcattgccccctgaatcgtggacgctccagttcagagcgaagtcccaagaaacgtgtgtgtacgatggggtacgaggcacatggtgtcttcttgggtgctggagccctcggtctagaccagtagttcttcacactgcgttagagtcccctgggaacttattttcagatatcatttacatatagtaaaatgcatagatcttaaatgtacagttcaatgtcttgacaaatgcttttgaaatcaccgatgtgtagcaggacagatcctcatgtaagtgttttgggtgaagactgggcattttttggtttgttggttagttggtttaattccagggattctaccgtgagctaggatagggtagggaagcactgggctagaggctggtaggctgtcactgcagcacgccccgggagggcaggatccagaatggtcgtggccaattgcccagaatagtaatggggtgacccaggttggctgggtccctgtcttagggaggaggccttgtgatctggaagcaaccacaggtcttgggacctttgaggagccactggtctgcagtgtggggatgaatgaattgtgagctgtggtgtcacagttttgaagttgtctgccaacttcagataaggctgtgacccccaggagcaactggagctccaacgacttgggaaaaactgtaccttgtacccaaccttggaagctcaactagctcctattccccaagtgccctaagccttttgctcctggcctttgcatagatagtctccttggcctgaatgttcctttttcctttaaaaatttcaccttcagggccgggctcggtggctcacgcctgtaatcccagcactttgggaggctgaggtgggcggatcacgaggtcaggagatcgagaccatcctggctacggtgaaaccccgtctctactaaaaatacaaaaaaaaaaaaaaaaaaaaagaaaaaaattagctaggcgtggtggcgggtgcctgtagtcccagctactcgggaggctgaggcaggagaattgcttgaacccaggaggcggagcttgcagcgacctgagatcgtgccaatgcactccagcctgggcaacagagcgagactccatctcaaaaaaaaataaacaaaaaataaaaaataaataaaataaataaaaataaacaaaattcaccttcaggtcagctcctgaaagacttcccttaaatatcaccttctccaggaagccgttcttaaccacccaccccataccatgagtctaggttatatggccacccctaacttggctaatatgggctcccagtgcaatgacacttgattttttttgtttttgagacagggtcttacaccgtcacccaggctggagtgcagtggcatgatcactgctcactgaagcctccaactcctgggctcaagcgatcctcctgcctcagccttcctagttgctgagactacaggcacacgccactacacccagttaattaaaatttttttttttgtagagacagggtctcactatgttgtccaggctggtctagaactcctgggctcaagtgatcctcctgcctcaggctcccagtgctgggattata

SEQ ID NO: 1562891 - DNA, 4001 bp, Homo sapiens
ggagccacaaccattgtaatagctaagatactgcccctcaaccaattttgttcccttgagggtggtattaccctggctgaaaaagcatgctctaagccacacagcttctccccttcctcattcattcattcaacagacaataacaggtcctctattatggtcaaagcactaagctagatgctatgaaggcaataaagacaaaaagcctggtctctacctgcccctaagaagcctattgtcttgtataaccatctggatgcctgtggtgctaagatgctgcctcacacccacatttctgtatccctcacacttctgtatccctcgatagagacaatcagtgcactgtaacaaataccctgcaagctaacaagcatgtcgtttccaaacaagatcttcctctggactaagacagcaggggcctctttggctaggttcagctctaaagagacaaacctgttagtctcccacaggtacgtttactaataacatcatagtcatgaaacatacccttcattcattctttcctttagacattaattgtctattaggtattaggcccatgctaagtcttggaggtataaagatgagtttcagactgccttaagaagttgagttttcatttatagcgttttccattaccttatgccacacttatctctgtcaccatgcttatccttataaatgttaagggaataaatagttctcaatggggtactccctgggtatgtgctggggggaggagagttcagcaatgtttggagacatttttggttgctgggtgctactggtatccagtaggtaaaggatcagggatgttgccaaatatcctactacacacaagacaatccttcccacaacaaagactcatctttgttgattctggctctgaaacccagcttttaaaaactgtaacgattttgttacatatctacatctgcaactcaagggcaggttttccatcttgtatctttgcagttccgatggctagcactggatactcaatgtagtgtgttgggttaagaacactggcaatagaaactttcactctgaaagaaacacttaagccaactatatattcctcattcccattcccttcccagtcttttcatgtcactgggccgattctccatacagccacaagaactccctgaaaaactctaatcgtgttactcctcctttttttcctactgcacgtagaataaaatccaagctctacactattcctactgcacttagaataaaatccaagcttacaggccttgcacgatacagtacgtgtccaaccccaatcttatcagatgccattcttttcttggtttacatgcgagtcatcctaatgtccttccaactccttacacacagcaagccttccctgcctactgatcttggcacttggtttcccttgtcaggcctgctcgctaagcactcccatgccccagaacccatccaagacgttctgatctttcccatttcagccgaaatgttatgcctcgaagagaacttccaagacaacactaaccaactaatgtaacggtgcagtaacggtgagctctacgtaatgtttatcaccctttcggtaaatagtggtcccacggctcggcctgcttttggaatgaagctacgcttggtaagttcaactctctttcacagccctctccacagaaagaactctggagttcgttctcggatttcactaaacgaatactgccatccttgtccattctcggaccccttctcgcagctgattacggtcacgtcgatcccgtctttccagtctccacgagacggagcccgggaaaagagtcgaccccatgctctgccgcccccgcaccccacccctcgggaatccccaccgtctttcccaatcaccttcttcttctcaaggcctcccatcgctccacgttgaggagccgactagggccgcgcgtacagggagctccacttcctcccgcacgtgccctgccaaggaccccgaggaccctccccaccccacgctgtctgtttgtgcgggctgcccaatgagatgcctgtacaagtccagggaaagatggggatttcctcctcaagatttaaaactatagtctgaaaaaaatcactgagaacactctttccagatctttcccgctcacaatggttacaaacactttaagtgttaaaacaaacgtggatatacaggcttttctgtaatcaccctgatgacgattcattgactgtgagcctcgttgcatgttgggacggagaggggcggaaggcttagggacagcgcggtgccttctgggatgcagaggggcgccgcactccatggtgcgcgataggattgcgttgtcaaggtaacggttgctaagcgtcgtcagacttcggctgccgctgctgagaagcggttcccgaggggcagggtgagactgcgctgagttcccaccggcttcgggttctctttggttcattcgcggttatgcggctaaaatagaaaaaaggaagacatttttcctcgcggaggtatagagatcctagaggccacttatattttctgagccttagtggtggactcgtggtatatttaaaatgtacattcaaggctgggagcggtggcgcacgcctgtaatcccagcactttgggaggccaagacaggcggatcatctgaggtcaggagttcgagaccagtgtgaccaatatagtgaaaccccgtctctgctaaaaatacaaaaattagctggccatggtggcacacgcctgtaatcccagctactcgggaggctgacgcaggagaatcgcttgaacctgggaggcagaggttgcagtgagccgagatcttgccactgcactccagcctgggcgacagagtgagactccatctcaaaaataaataaataaataaaattaaatgtacattcaacatattcgagcttttaatttgtacacataaattctgtaagtgttcctcaaataataattccaagatttatacaaatagtcacatcaccttgagatggtgcagtctggaagtagatgcaattttaagaggtttttttttttttaaacgtttctccctttttccaaattccaaatttcgttcgaagatgatctcaaaagtttaaatttgaggctcttgtgaatgtgacctggcccaaggacttggtcttagaacttacacagagacagacgttaagcactggtgaatacttgttttgaactatgtgacttgcactatctaatttaaagctaaaatttaaaacccagcaattccacagttaaaaatgagatgaagccgggcacggtcgctcacacctgtaatcccagcactttgagaggctgaggcaggcggatcacctgagatcaggagtttgagaccagcctggccaacatggcgaaaacccatctctaccaaaaatacaaaaattagccgggtgtggtggcaggcacctgtaaccccagctagttgggaggctgaggcaggagaatttattgaacccaggaggtagatgttgcagtgagccaagattgtgccactgcactctgcactcaagcctagacgacagagcgaggctccatctcaaaaaaaaaaagaagaagaaggaaagggatggactggagagggtggcagtggctggctcatgagggcaacacaggaacagggctggtgtcgtgagcatgtggcctgggcagtcatctcaccctgtccctcacaaatcacctagctcgtcctgcacagatagaaccatgtttgcagaaagttgagccttgttttgctcacattaatgttgaggggtcactggaagacacaggtggggatgttcagggaagcaattgtaatttcagctcaaaatagccgtcatataggtaccacatttcacaagggaggaaactaagtctcaggaaagtaagtgatcgctgaagatcactcagctgctaagctgtgcagaatagattctcaccaagcagtctggtttcagagtcctctgctaaactcacattccactacctaacgtatagtagaaagaat

SEQ ID NO: 1562892 - DNA, 4001 bp, Homo sapiens
gacagggtctccttctgtcgcccagactggagtgcagtggtctgatctcagctcactgcaacctcagcctcctgggctcaagtgatcctcccacttgtagcctctagattagctgagacttacaggcacacaccaccatccctggcattttttggttttgtttgttttttagaatcagggtctcaccatcttgcctagactggtctcaaacttgtgggctcaagcaatcctcctgccttggcttcccaaagtgctgggattacaggcatgagccaccagtatttctaatatgtatgggaaatatgctgtcttcctattcctactcccccaccctctagcactgagtccaggtaggtaggcaggggggtgtctccctcctttacttcgacaccctaactaccttggggatcagaagtgactctctggaaggatgctgctgcttctcaccagaggctgacgataacgaaggctatcctccatggccacctcctccaggctgccttcctggaaataggaatcataatagttgttactggaaacaggcagagggttgggggagccaaggcagtcccacccaggaccaaggtggctccattgcacacacttcaccatgactcccctgaaggtccaaacgtgcggttctgcggaagttgggctccccactggcctccctccttcctcagaacctccaggggtgctcctcctagtggccacatccagcctttctgactggacaacctatcatttaaaattttcaagtagttccgtaaacagacacacgttgctgtatttatttatgtcaagggcttggtttgtgataaatcaggctcaaaaagattgtcttaaaagagtgaaccttggcaatttaccataaaataattgcaatgcagattgtgcatggaaatgattggagatattttaaggtcatagtgtcttcacaaattgagctgaaagggaactgttaggatgatcttgcctaaccctctcttctcacacaggaagaactattttaaactcgagaggttaagtgacctggccaaagtcacacagccaccactagttaactcgtatacattgattctcctgtggggctgggcagatgaggaatcttttgttctcttccctgtttgcagagattttttttgaggttactttccgagttctggcaagtacccctgcttctggtagctttgtgtctcgattcaatctcattctttttattttattttatttttgagacagggtctcactttgtcacccaagctggagtgcagtggtgtaatcttggctcactgtagcctccacctcttgggttcaagcgatcctcctgcctcagccccccaagtagctgggattacagacgtctgccaccacgccaggctaatttatggttttttgtatgtgttttttgtgtttttgtagagacagtgtttccccatgttgcccaggctggtctccaactcctgagctcaagtgatctgcccgcctcagcctttcaaagtgctaggattacaggtgtgagccaccgtgcccggacttaatcccattctttaacttgttttgttttgtcctctccaggaggctcccagccctttcggattggttgagaaaagtggcctggctggtctggggccagcggcacccaccctcccctcaattgcccaactccccccccccaccgaactgcccaactccccctccccaactgcccaactcccccacccccacaatcccctcccgccacaactgagggaggcggtgctgaaaaacagctgactccagcaatgctgctcacgtgaccactgcagctgcagctcccgttccactccttgtcctgggctaggtgggcactaccaggggctcctttggtaaggagtaccgggtaggcacccggtcctgccaatccaccactggaacagctggggggacagcagacaggcacggtcggacagacttgacagatcaggcatcaggccctctgcgctggtcccgggctctttaagcaggaacgtgaatggcctcaagatgtctcacatggtcccactagccctcctcctccctttgttccctacctccaggagggctgctctgcccttccttcctctgttctttggccttatgttccccgccaccacagaccttcccccgccccacccctctgcagacttagccgtgcattgcaggcatggaggattaatcagtgacaggaagctgcgtctctcggagcggtgaccagctgtggtcaggagagcctcagcagggccagccccaggagtctttcccgattcttgctcactgctcacccacctgctgctgccatgaggcaccttggggccttcctcttccttctgggggtcctgggggccctcactgagatgtgtggtgagtaactcgcctctatcctgtgcctctttcctcctgggtccttagtggggtggctagggcataggatgagggaacttacctgcccttctaagctcccatagcagtttgggcttagctggacctcagcatttaacacatcctattgtgattgattatatgtttgactcctcaccagacaagatctccgttaattcagtcattcgttcacacattcattcagcgcatactgagccttttctgtgtcaggcccagtgttagcctttggggaacgtgcaaagcatgagacaagtctaatccctgccatcctagagcttatgttctagggaagggggacagacaaaagaaatggttaggtgctcccacctgaaatctcagcattttggaaggctgaggcgggaggggaggatcgcttgagctcaacagttcaaggtcagcctgggcaacatagggagaccccatctctacaaaaaataaaaaaaattaaaaaatagctgggcatggggaagactttctgaagaccaagaggacacatgggagctgaaactcgaaggaagaaaaggagctggcaggaaaggagtgggggacacacattctaggcagcaggaagtgagccttcggaggtcctgcctgctccagctctgtgccccaaggggtctcttggagcacagtctcctgggacctgtctatgagtctgagcttagaggctcagggctgctccttcagacaggaggcagaaggcaggctttgggaactttgggccgcccacgcgccttttctcctcctctgcacctaggattacgttgagcaatacactttcacccccatggtctcttgagaccctggggaaaccctgagaggtgggtgcagtcatgtccaggtgtcaagtgaagaagtcgagggttggaggggctgagtgacccactcagggtgctccaccttttccagagctttgctgaacttagtttttagaacttgaagcctcgtttgttttcgttttgttttttgttgagagaggttctccctctgttgcccaggctggagtgcagtggcacgatcttggctcactgcagcctctgccttgtgggttcaagtgattcccccacctcagcctcccaagtagctggagactgcatgtgcatactaccatgcttggctaatttttgtatttttttgtagagacagggtttcgccatgttgcccaggctggtctcgaactcctgggctcaagtgaaactcttgcgtcggcctcccaaattgctgagattacaggcgtgagccaccgtgcccggccagaactccaagcctctcatctgtgttccataaatgcaatcagacacctcaggtctgggcccaggaaccccagctcttggttcatgtccggacagtccccaggggagttctgggttcaaccagcaagagctcttcctcctggctgatctggtcctcagccttggacagttagtccattaacctgaccccacaggagccccaatcccttggggtctggggaatcttgaactggggtttggggtgcaaatatctgcactgagtcacttaattgcacccagcctcattcctttatctgtaaagtgggctaagaatgctcccctgccttc

SEQ ID NO: 1562893 - DNA, 4001 bp, Homo sapiens
gggtagcttttcagggacctggtaatactgaaggacccaggagaggacttcttgccaccgatccatttctgccagggcctggatccccacaacacacagggagcacttcacctccaatgagctgtcagcagaaaaaccaatttcagttagaagtggttcccctccatttccattcccacctccaccttgggactgttcctctccagctcccaactcagcagccatcatctctctcatccctgttagtatttagatgggcttcacaattggtctcatgggctgccctttcccccaggaactaaaagttcctgtaaccctctttcaagaggcaagtcagctgttgctcaacgttcatctttgtatccaggtgaaatcagatttaaatgaagaggaagggtaatcctgagggggaaataacacacagcaccggtgtgtggctgaaaagagagctggaactaagagtttgctctgtgaacaaatgggcttggagcaaggtttctggctgagtggaggtatagactccatagctggctaaaaggcaccacctagtaaggttcctccagacacccagaagcaaagccttctgcattcactgaaatgagctcccacccagtcccctaaaacacagccagggctctccagatcatccttctttgtggtcaactttagctattctacctaccacctccctagcgtggcctaacccaagtttacaatgcaaagaaatgactccctcacctgccagacgaggctggtggcattagaaagagcaatgcaagcccaaggtttttttctccggattcttttctttttcttctttttggtagagaagagggctcattatgttacccaggctggtctcgaactcctgggctcaagcaatcctcctgcctcggcctcccaaagtgctgggattacaggcgtaagccccagctcccggccctgaattaattctttaatccagtcctctaattggaccagaacgctgctcctgccatgacccccattccccatcatcagccaaggtcaggaataaacaaccttgggcggggcggggagggcggaggtacctgggagaggacttttaccacctgcttactgacagaacttagcacttaatacacattcagccttcccatcatgtcattgtaccttggaacaaggagcaaataattggctgtgggatccccactaagtttttgttacacgacttcccttctctgtagaatgggcacacgatgagcgaccaccctctcggagacaaaccactgatgaaagcgaggtgtaaagctccttgtgggcaatctgggaaggacagaactcctgagaccttgagccccaccacaagagcgcccggaaatcggttcatttccgagcccagcacgtacgtgcccgcgggttcctctgccacggcgtggttggccagactctgccaggcccgctcgcaggtctccagcgccgcccggaagtccaggtgcaccaccaggaggtcggccgcctcctccagaaggtccacggccggcgcccgggccgggaccgcgcgcaccggctcgctgctgcgcaggggtcccccgagccccctgaggggggctgcagaggtcgaagaatcgctcttcataacgagtccgggtccaaggcccaggtcctcagacgtcggagtgaccgcctccccagaggctccgggatatcccgagttggcctgggcgaagagggagagtcctcatctctttgcccacaccccttcccgaggtcgattccccgagaaggaaaaggaaggggcctatctgaggcaaaagctgggctcgcctggaggctggggaagcagtttacacgtcagatttgcaggattcttgcatccctggaatacctggccctagcttctccggccccgcgacacgtgcaggaactgcctcagctccgggctcctggttacgatcaaagactcacctcgcctcccggcagcgggcgcggacatctttgcgctcgcccagccccgcagccgcgcggcgtcccggcggcgcggagtactctaggagttgtagttcctcagctctcggcccatcgccttctgtaatggaagtaggaggcagagcgcggactacaacccccagcacgccgcgccccggaagccgcccctgtgccgtgagaaaacaaactggtgctacagcttcggggtgcggaagtcaaaacgaagcaaaaccgaagctgtcttgtgaaatggaggggtcctcactaaccagttccagcggaggctaacggaagaagtgccagcaatggatgtgcagctacatgcacgcttttaattcagagcttctgcgacggtggcgatcaggggatctgtaatgtaatgtaatgtcaaggctgacgcagagctgatcaaacattttggcaaccttagtcttgaattgattcacactttctccgcgttgcctccggagtttgctgtagggtaatgaatattgcctggtgaggatgagggacttagggtggaaaccttcacaaggaccactgagaatatgttggtcccaagggcaatgttccaaaatgaatagtgaccccaccgaggcggggttgggggcgctgagcataagggcctcatttttctcactgctctctgccccatcctgaatttgctgttaaaaaacaacgttaaatgcagataccaattccacttccccactgttgtcacttccgatctgtctttatatttctccttatcatttatcaccatctacataccaatgtctatattttacttatttttattgtctatttccttccactatgatataaactcacaaaggcagacgtttttgtctcttttgttcactgtgggaacctcaatgccttgaacagtgcctgtcatctataggtagtcaaaaagtatttgtggaataaatgaagtcctggtttcacttttatctggttacagggtccagacttctctttcctcggagtctggtggacttggttctgcctcagcttcccatgcagacttttctgcaagagaacggaaatcccagaagatggatgtgtgcatgtctggtgacaagggcaggggatgtatgatgtgagcaggtgcctgtttaatctaatttctaggagagcaaagattctagggaagctttggagtgaattcaaagggtagagaactggggagaaactaaagccaagaggatctagtacaaatgtgggaagcttggcaaagcccgggtgaaacagaatataataataagtgtgatttgtggatctgtttaaaattattattatagttacaatttaccaaatactctgttcccagtactttactataaagtgcattatgtacggtatggttttgtttttcacaatgtccttattttacattgtgtaacttgctcatggaatgactgtgtatcccctgaatagcaaacatacttagttctgtccctgcagagcagagtagagctcaatacacatctttgaaccaaaagagcctcggtttgactgagattttgtcgcttactagttgtgtgacctcggcaatttatttaaataagctctgatttcctcacctgtaaaattgggataacagtttgtccttagctcccaatggctgagggaagaattaagtaatattgcgcataaagcgccatgcgcattaagcactgaaaatgtgagccaggcctgggaagacgaacatgctcagaagcggccagctctaagcggctgctgcctggaaaagtccctttcctaacaaatttcttgctattccaaatttgtccaggagatggaggcacagtcttaacagaagcagccttgctaaaagtaaatttgcctatttagtagtgagacagccagaatgaggtcaagatatttaaggcaggagagaggagagctagaaaccatataaaaatatgattgtattccatttctgattcacccaattttcaactattcccgggcttcatatcagtccgtatgtaaccactgtttagcactattatgcccacaaatggatt

SEQ ID NO: 1562894 - DNA, 4001 bp, Homo sapiens
gggcctggatccccacaacacacagggagcacttcacctccaatgagctgtcagcagaaaaaccaatttcagttagaagtggttcccctccatttccattcccacctccaccttgggactgttcctctccagctcccaactcagcagccatcatctctctcatccctgttagtatttagatgggcttcacaattggtctcatgggctgccctttcccccaggaactaaaagttcctgtaaccctctttcaagaggcaagtcagctgttgctcaacgttcatctttgtatccaggtgaaatcagatttaaatgaagaggaagggtaatcctgagggggaaataacacacagcaccggtgtgtggctgaaaagagagctggaactaagagtttgctctgtgaacaaatgggcttggagcaaggtttctggctgagtggaggtatagactccatagctggctaaaaggcaccacctagtaaggttcctccagacacccagaagcaaagccttctgcattcactgaaatgagctcccacccagtcccctaaaacacagccagggctctccagatcatccttctttgtggtcaactttagctattctacctaccacctccctagcgtggcctaacccaagtttacaatgcaaagaaatgactccctcacctgccagacgaggctggtggcattagaaagagcaatgcaagcccaaggtttttttctccggattcttttctttttcttctttttggtagagaagagggctcattatgttacccaggctggtctcgaactcctgggctcaagcaatcctcctgcctcggcctcccaaagtgctgggattacaggcgtaagccccagctcccggccctgaattaattctttaatccagtcctctaattggaccagaacgctgctcctgccatgacccccattccccatcatcagccaaggtcaggaataaacaaccttgggcggggcggggagggcggaggtacctgggagaggacttttaccacctgcttactgacagaacttagcacttaatacacattcagccttcccatcatgtcattgtaccttggaacaaggagcaaataattggctgtgggatccccactaagtttttgttacacgacttcccttctctgtagaatgggcacacgatgagcgaccaccctctcggagacaaaccactgatgaaagcgaggtgtaaagctccttgtgggcaatctgggaaggacagaactcctgagaccttgagccccaccacaagagcgcccggaaatcggttcatttccgagcccagcacgtacgtgcccgcgggttcctctgccacggcgtggttggccagactctgccaggcccgctcgcaggtctccagcgccgcccggaagtccaggtgcaccaccaggaggtcggccgcctcctccagaaggtccacggccggcgcccgggccgggaccgcgcgcaccggctcgctgctgcgcaggggtcccccgagccccctgaggggggctgcagaggtcgaagaatcgctcttcataacgagtccgggtccaaggcccaggtcctcagacgtcggagtgaccgcctccccagaggctccgggatatcccgagttggcctgggcgaagagggagagtcctcatctctttgcccacaccccttcccgaggtcgattccccgagaaggaaaaggaaggggcctatctgaggcaaaagctgggctcgcctggaggctggggaagcagtttacacgtcagatttgcaggattcttgcatccctggaatacctggccctagcttctccggccccgcgacacgtgcaggaactgcctcagctccgggctcctggttacgatcaaagactcacctcgcctcccggcagcgggcgcggacatctttgcgctcgcccagccccgcagccgcgcggcgtcccggcggcgcggagtactctaggagttgtagttcctcagctctcggcccatcgccttctgtaatggaagtaggaggcagagcgcggactacaacccccagcacgccgcgccccggaagccgcccctgtgccgtgagaaaacaaactggtgctacagcttcggggtgcggaagtcaaaacgaagcaaaaccgaagctgtcttgtgaaatggaggggtcctcactaaccagttccagcggaggctaacggaagaagtgccagcaatggatgtgcagctacatgcacgcttttaattcagagcttctgcgacggtggcgatcaggggatctgtaatgtaatgtaatgtcaaggctgacgcagagctgatcaaacattttggcaaccttagtcttgaattgattcacactttctccgcgttgcctccggagtttgctgtagggtaatgaatattgcctggtgaggatgagggacttagggtggaaaccttcacaaggaccactgagaatatgttggtcccaagggcaatgttccaaaatgaatagtgaccccaccgaggcggggttgggggcgctgagcataagggcctcatttttctcactgctctctgccccatcctgaatttgctgttaaaaaacaacgttaaatgcagataccaattccacttccccactgttgtcacttccgatctgtctttatatttctccttatcatttatcaccatctacataccaatgtctatattttacttatttttattgtctatttccttccactatgatataaactcacaaaggcagacgtttttgtctcttttgttcactgtgggaacctcaatgccttgaacagtgcctgtcatctataggtagtcaaaaagtatttgtggaataaatgaagtcctggtttcacttttatctggttacagggtccagacttctctttcctcggagtctggtggacttggttctgcctcagcttcccatgcagacttttctgcaagagaacggaaatcccagaagatggatgtgtgcatgtctggtgacaagggcaggggatgtatgatgtgagcaggtgcctgtttaatctaatttctaggagagcaaagattctagggaagctttggagtgaattcaaagggtagagaactggggagaaactaaagccaagaggatctagtacaaatgtgggaagcttggcaaagcccgggtgaaacagaatataataataagtgtgatttgtggatctgtttaaaattattattatagttacaatttaccaaatactctgttcccagtactttactataaagtgcattatgtacggtatggttttgtttttcacaatgtccttattttacattgtgtaacttgctcatggaatgactgtgtatcccctgaatagcaaacatacttagttctgtccctgcagagcagagtagagctcaatacacatctttgaaccaaaagagcctcggtttgactgagattttgtcgcttactagttgtgtgacctcggcaatttatttaaataagctctgatttcctcacctgtaaaattgggataacagtttgtccttagctcccaatggctgagggaagaattaagtaatattgcgcataaagcgccatgcgcattaagcactgaaaatgtgagccaggcctgggaagacgaacatgctcagaagcggccagctctaagcggctgctgcctggaaaagtccctttcctaacaaatttcttgctattccaaatttgtccaggagatggaggcacagtcttaacagaagcagccttgctaaaagtaaatttgcctatttagtagtgagacagccagaatgaggtcaagatatttaaggcaggagagaggagagctagaaaccatataaaaatatgattgtattccatttctgattcacccaattttcaactattcccgggcttcatatcagtccgtatgtaaccactgtttagcactattatgcccacaaatggattcctcaacacacatccagtgggacacatcatctcctctatgtctacaagtacttagactttctcaagcgaagaca

SEQ ID NO: 1562895 - DNA, 4001 bp, Homo sapiens
cctccgacgcgtgggagcttctcaggtgtccccaactacacctaacgcccggagcccaaagttggagcagaactggggagtcccgggggcgcgtttcttttgttccccgggagctggcgtcaggttccaagaataaaaagtgaagctagggaagtggaaggtggtgggggggagggagcctcgaggaacgatttcaaaacgaggtttgccacggaacccagaaatcgcttccaacgagtttggtgtccaggcccccacggccgcccccctccgcccccatggccgcctcagcgcaaagcgggggactccgagccgggagaaatcgccacgttccaaaaacatgtccaccacctcaaaatggacgccgggccgcgcgctgccttttaagtgagctcctctcttcggcccccgcagggcccggctctccctgccgcctccgagaacccggctctttctttccaggaaaggggaggggtggggaactttgagaactggagacagacccctctgggagtctgagcgtgcgtcgcccaggctggcactttttagggcgccgccaaagtgcccagccaccctcccgccccatcccagggggggccgcgatcccatcgcttacttgtttgtcgctgagcgcggcgatccgcggctgcctttcgtggagctgcttcttgaggtcgccgttctgcggaaacacggaggagcgggctcaggcaggccacccggggtcaggtgcaccccagcaccgcgggccgcggcaccccccgcccggagccccacgggcggggccggccgcagcgcaccccaagtttcccgggccgcgtcctgcacgcgcggcggccgggcagtgccgcgcggggccgcttacctgtggctgccgcctcatcggggcagctcgcggggcggggcgggggccgaggccacccggcggcgcgccccgagccgtgcaagtttgcaggccggggtgcgtgtgcgagtgagtgtgagtgtgagtgtgtgccgggggaggggggaggaacaaagagccaagtaaacacggcgagtccgtgtcgagcaaagctcataaatattcaagtcgcgtcctaatctccccaacacacacacgcgcacgccgagccccgctcaggctccggccgccacgccgccgctcgccagcagcgatcgccaaaactacttctgcacaccgggcaggttcgcccggggcgcgggggcccgaggggaggccggaagggggcctattcgcactcccctccccgggaccggctcacgaaggggccccctccaggcaccctcccagtcatgcagaccctacatcgcttaagagaagactccaggctcgggtcccacgcgtcctcgatcccgcaaactgtgcaggacagcgccaggggcaggcggaggggagcccagaagggggtccgcgcgtgtgctcactccctcgccccccgcccccgggcaggctccagcctggaagacccagagacccggaagagaggatgctgggctcgggtcccccgaccccctcaccccgcaacacactccccggccccgggcccggcccccggccacctacctggtggcgcgcgagttccacggcgagcgcctcgggccggctctgcagctccatcccggcaacttgggcagcactttgcgctcactttggcccgggctcccgggaagttgcgcggctccgcgggggccagagcgggcgcgggcggacgcggcctccgggctgggttgggggggacacgagccccctcccccacggccgaaagggaagggggctggcgaaggggaagacaggcttccgggcgccgcggcgccgagccctcggctgccccaactcctcaggctgcccggcaagttgcgccgggtccccgggctgccggcgcggcccggagcatggcccccccggcgccgggagccccgcgcagccccgcgcgcgcccgcccagccgccgccgccgccgcctcctcccgcgcgagcctcccgcgggcagggactatatttcctccggcgcgcgcgcctggatctcgttgggcctcggcaaagttgtgcctcggcacgatgctaattcggcagtgcccggatggagcgggccggggcggcggggggcggtgccgggaccctcagcccgccgcgccccgcccccgccccgcccgcgcctgcgcactgccgccccgccgcggcccggcaccccgagcggagaacaaaagtggcggtggacggggacgcacggtcgccggctccggggactgctcgggccgggcgctcggagaggacgactgcggagtcatcctctccgtccccgggccaacccggggaacgcggcgcccccaccccctgcgccgtgtaacgccgggatcaggacactttccgctgggaggctgcgagtccgtgtttccatttctcctcaccctggtcctcggctccctcctttcccccctcctccgcctccctctgatattttatttaaattcttccgtcccctcctgtccataccagcgccgcgacttgggggattaaattagtcgcgtcgccacattcccccgccgcctgatggcctccgtgttgtttaaacagcaagaaaattgatctcttggctcttcctttaatgatttttttttacacgattaaactctcaacagatgtcactggacattttaagactcttgttaagagtcgtaaacaggcccggtcaatgcgacctaaaacaattataattacagctgcggaggtcgcgtttcagaacccccagccgcgcagccaggaggttaatgtcccagagtcactgtcaccacctcggggctgccatcttcattcaggtcggagtgccgggtgccctgttggcagcaaactggcacgtttgaaacacgctggggagaaagggtgcaatcatatgtcaaagtaaacgtttaagctgttaagtcgttttaacttcagattcctctccggcagcacaaaaaatacccaagcaagcaccatcagcaaatgtccctttcaacatatgccaacaggtcacacattgcttttgttggcagaagttattggaattcccccttttctttcttttcttttttttttttttttcaagtgaggaccccagtgttgttctgctctctgttagggaatttgtaataaattacgtgtttgggacccccaaacacagatggcccctcatcccacaacccagcacctcgccttcagagcacgacagagtgagacttaggatatgagtaactatgcaaaaagcagaggggcatgtagatgacccttactttaacccaaattagttaacagaaacttgcaaacagcgctttaagactccataggaggccggccgggggcggtggctcacacctgtaatcccagtactttgggaggccgaagtgggcagatcacgaggtcaggagttcgagaccagcctgcccaacatggtctcgactaaaaatacaaaaaattaggcatggtggcgcaagcctgtaatcccagctactcgggaggctgaggcaggagagttgcttcaacccaggaggcagaggttgcagtgagccgagattgcaccacagcactccagtctgggcaacagagcaagactctgtctcagaaaaaacaaacaaacaaacagaaaagactcaacaggaggagccactaccctccggccagcatctgcctgaatctgtgtgggccgaagatgacctgaataacctctgttgatttaattacgtaggttaaatatgtgggttacggtaaggatcatatacatgcccctctgttttttgcatagttacttactgtgtgagtctcattctgtcgtgcaggctaatgtgcagtggtgaaatcatagctcaccactgcctccacctcacctgctcaagcaatcctcccacctcagcctcccaagtagctgggaccacagtcacaccataagccaacactggttaatgtggatgcaaaactagcccgtgtttgaagtggtcgtgattcctttggttttgccccaagca

SEQ ID NO: 1562896 - DNA, 4001 bp, Homo sapiens
tgggtcccctccccccgccaactccccgacttcgccggggccgcgcgccgggcccccctccggcgggaatggaagcttccactcccggacgggggcgcgcggccgggggcgggggggccgcggcaccaactgaaaagggttagcgcatttgtcccaagccttcggtccagcccggcggcccagaccaggcgcgggccgcggcactgccatcttcctttcagcaagcccggccccccccaaaacccgccactcgcgcacgccccctcccatcactttttaactttaaagactcgacacgaacgcccggcctccgaattctctctcgccagggtcaccggcagccgccccaacctcgtccacgtctctcccctacgccagaaaatcccccgggggagggggcgtccgatccggcggcccgggctggggtgggagcgcgggggcaggcccgggcgggggcgcgcgggggcgggcccggagctgtccaagtttggcgctggcggctgcggccggcattccgaaggaaacgcgatcgatggccgggggcgcggcgcgggcgggggcggggcgcgaaggagggagggagggggcagcggagggagggaggggcgccgccgcccccgtgcccgccacagcggtgcccccagcacgccattggctgcgccgctcaaagttctcggctcggggctgcgcggggaaggggcgggtgtgcgagcgcggggaaggggcgggtgtgcgagtgcggggagggggcgcggcgggggaggggcagcggaggaggggcgggagccagggggcgggggcgcgcggccggccgggctctggcggcggcatctgttcgtggtgctgaaaccccgagcgctgagctcagcgcaactaagtcacaatggacaacttttcctccccggagggggcccggaggggggggagcggtcgcgcctccgacgcgtgggagcttctcaggtgtccccaactacacctaacgcccggagcccaaagttggagcagaactggggagtcccgggggcgcgtttcttttgttccccgggagctggcgtcaggttccaagaataaaaagtgaagctagggaagtggaaggtggtgggggggagggagcctcgaggaacgatttcaaaacgaggtttgccacggaacccagaaatcgcttccaacgagtttggtgtccaggcccccacggccgcccccctccgcccccatggccgcctcagcgcaaagcgggggactccgagccgggagaaatcgccacgttccaaaaacatgtccaccacctcaaaatggacgccgggccgcgcgctgccttttaagtgagctcctctcttcggcccccgcagggcccggctctccctgccgcctccgagaacccggctctttctttccaggaaaggggaggggtggggaactttgagaactggagacagacccctctgggagtctgagcgtgcgtcgcccaggctggcactttttagggcgccgccaaagtgcccagccaccctcccgccccatcccagggggggccgcgatcccatcgcttacttgtttgtcgctgagcgcggcgatccgcggctgcctttcgtggagctgcttcttgaggtcgccgttctgcggaaacacggaggagcgggctcaggcaggccacccggggtcaggtgcaccccagcaccgcgggccgcggcaccccccgcccggagccccacgggcggggccggccgcagcgcaccccaagtttcccgggccgcgtcctgcacgcgcggcggccgggcagtgccgcgcggggccgcttacctgtggctgccgcctcatcggggcagctcgcggggcggggcgggggccgaggccacccggcggcgcgccccgagccgtgcaagtttgcaggccggggtgcgtgtgcgagtgagtgtgagtgtgagtgtgtgccgggggaggggggaggaacaaagagccaagtaaacacggcgagtccgtgtcgagcaaagctcataaatattcaagtcgcgtcctaatctccccaacacacacacgcgcacgccgagccccgctcaggctccggccgccacgccgccgctcgccagcagcgatcgccaaaactacttctgcacaccgggcaggttcgcccggggcgcgggggcccgaggggaggccggaagggggcctattcgcactcccctccccgggaccggctcacgaaggggccccctccaggcaccctcccagtcatgcagaccctacatcgcttaagagaagactccaggctcgggtcccacgcgtcctcgatcccgcaaactgtgcaggacagcgccaggggcaggcggaggggagcccagaagggggtccgcgcgtgtgctcactccctcgccccccgcccccgggcaggctccagcctggaagacccagagacccggaagagaggatgctgggctcgggtcccccgaccccctcaccccgcaacacactccccggccccgggcccggcccccggccacctacctggtggcgcgcgagttccacggcgagcgcctcgggccggctctgcagctccatcccggcaacttgggcagcactttgcgctcactttggcccgggctcccgggaagttgcgcggctccgcgggggccagagcgggcgcgggcggacgcggcctccgggctgggttgggggggacacgagccccctcccccacggccgaaagggaagggggctggcgaaggggaagacaggcttccgggcgccgcggcgccgagccctcggctgccccaactcctcaggctgcccggcaagttgcgccgggtccccgggctgccggcgcggcccggagcatggcccccccggcgccgggagccccgcgcagccccgcgcgcgcccgcccagccgccgccgccgccgcctcctcccgcgcgagcctcccgcgggcagggactatatttcctccggcgcgcgcgcctggatctcgttgggcctcggcaaagttgtgcctcggcacgatgctaattcggcagtgcccggatggagcgggccggggcggcggggggcggtgccgggaccctcagcccgccgcgccccgcccccgccccgcccgcgcctgcgcactgccgccccgccgcggcccggcaccccgagcggagaacaaaagtggcggtggacggggacgcacggtcgccggctccggggactgctcgggccgggcgctcggagaggacgactgcggagtcatcctctccgtccccgggccaacccggggaacgcggcgcccccaccccctgcgccgtgtaacgccgggatcaggacactttccgctgggaggctgcgagtccgtgtttccatttctcctcaccctggtcctcggctccctcctttcccccctcctccgcctccctctgatattttatttaaattcttccgtcccctcctgtccataccagcgccgcgacttgggggattaaattagtcgcgtcgccacattcccccgccgcctgatggcctccgtgttgtttaaacagcaagaaaattgatctcttggctcttcctttaatgatttttttttacacgattaaactctcaacagatgtcactggacattttaagactcttgttaagagtcgtaaacaggcccggtcaatgcgacctaaaacaattataattacagctgcggaggtcgcgtttcagaacccccagccgcgcagccaggaggttaatgtcccagagtcactgtcaccacctcggggctgccatcttcattcaggtcggagtgccgggtgccctgttggcagcaaactggcacgtttgaaacacgctggggagaaagggtgcaatcatatgtcaaagtaaacgtttaagctgttaagtcgttttaacttcagattcctctccggcagcacaaaaaatacccaagcaagcaccatcagcaaatgtccctttcaacatatgccaacaggtcacacattgcttttgttggcagaagttattggaattcccccttttctttcttt

SEQ ID NO: 1562897 - DNA, 4001 bp, Homo sapiens
gcgagcgcggggaaggggcgggtgtgcgagtgcggggagggggcgcggcgggggaggggcagcggaggaggggcgggagccagggggcgggggcgcgcggccggccgggctctggcggcggcatctgttcgtggtgctgaaaccccgagcgctgagctcagcgcaactaagtcacaatggacaacttttcctccccggagggggcccggaggggggggagcggtcgcgcctccgacgcgtgggagcttctcaggtgtccccaactacacctaacgcccggagcccaaagttggagcagaactggggagtcccgggggcgcgtttcttttgttccccgggagctggcgtcaggttccaagaataaaaagtgaagctagggaagtggaaggtggtgggggggagggagcctcgaggaacgatttcaaaacgaggtttgccacggaacccagaaatcgcttccaacgagtttggtgtccaggcccccacggccgcccccctccgcccccatggccgcctcagcgcaaagcgggggactccgagccgggagaaatcgccacgttccaaaaacatgtccaccacctcaaaatggacgccgggccgcgcgctgccttttaagtgagctcctctcttcggcccccgcagggcccggctctccctgccgcctccgagaacccggctctttctttccaggaaaggggaggggtggggaactttgagaactggagacagacccctctgggagtctgagcgtgcgtcgcccaggctggcactttttagggcgccgccaaagtgcccagccaccctcccgccccatcccagggggggccgcgatcccatcgcttacttgtttgtcgctgagcgcggcgatccgcggctgcctttcgtggagctgcttcttgaggtcgccgttctgcggaaacacggaggagcgggctcaggcaggccacccggggtcaggtgcaccccagcaccgcgggccgcggcaccccccgcccggagccccacgggcggggccggccgcagcgcaccccaagtttcccgggccgcgtcctgcacgcgcggcggccgggcagtgccgcgcggggccgcttacctgtggctgccgcctcatcggggcagctcgcggggcggggcgggggccgaggccacccggcggcgcgccccgagccgtgcaagtttgcaggccggggtgcgtgtgcgagtgagtgtgagtgtgagtgtgtgccgggggaggggggaggaacaaagagccaagtaaacacggcgagtccgtgtcgagcaaagctcataaatattcaagtcgcgtcctaatctccccaacacacacacgcgcacgccgagccccgctcaggctccggccgccacgccgccgctcgccagcagcgatcgccaaaactacttctgcacaccgggcaggttcgcccggggcgcgggggcccgaggggaggccggaagggggcctattcgcactcccctccccgggaccggctcacgaaggggccccctccaggcaccctcccagtcatgcagaccctacatcgcttaagagaagactccaggctcgggtcccacgcgtcctcgatcccgcaaactgtgcaggacagcgccaggggcaggcggaggggagcccagaagggggtccgcgcgtgtgctcactccctcgccccccgcccccgggcaggctccagcctggaagacccagagacccggaagagaggatgctgggctcgggtcccccgaccccctcaccccgcaacacactccccggccccgggcccggcccccggccacctacctggtggcgcgcgagttccacggcgagcgcctcgggccggctctgcagctccatcccggcaacttgggcagcactttgcgctcactttggcccgggctcccgggaagttgcgcggctccgcgggggccagagcgggcgcgggcggacgcggcctccgggctgggttgggggggacacgagccccctcccccacggccgaaagggaagggggctggcgaaggggaagacaggcttccgggcgccgcggcgccgagccctcggctgccccaactcctcaggctgcccggcaagttgcgccgggtccccgggctgccggcgcggcccggagcatggcccccccggcgccgggagccccgcgcagccccgcgcgcgcccgcccagccgccgccgccgccgcctcctcccgcgcgagcctcccgcgggcagggactatatttcctccggcgcgcgcgcctggatctcgttgggcctcggcaaagttgtgcctcggcacgatgctaattcggcagtgcccggatggagcgggccggggcggcggggggcggtgccgggaccctcagcccgccgcgccccgcccccgccccgcccgcgcctgcgcactgccgccccgccgcggcccggcaccccgagcggagaacaaaagtggcggtggacggggacgcacggtcgccggctccggggactgctcgggccgggcgctcggagaggacgactgcggagtcatcctctccgtccccgggccaacccggggaacgcggcgcccccaccccctgcgccgtgtaacgccgggatcaggacactttccgctgggaggctgcgagtccgtgtttccatttctcctcaccctggtcctcggctccctcctttcccccctcctccgcctccctctgatattttatttaaattcttccgtcccctcctgtccataccagcgccgcgacttgggggattaaattagtcgcgtcgccacattcccccgccgcctgatggcctccgtgttgtttaaacagcaagaaaattgatctcttggctcttcctttaatgatttttttttacacgattaaactctcaacagatgtcactggacattttaagactcttgttaagagtcgtaaacaggcccggtcaatgcgacctaaaacaattataattacagctgcggaggtcgcgtttcagaacccccagccgcgcagccaggaggttaatgtcccagagtcactgtcaccacctcggggctgccatcttcattcaggtcggagtgccgggtgccctgttggcagcaaactggcacgtttgaaacacgctggggagaaagggtgcaatcatatgtcaaagtaaacgtttaagctgttaagtcgttttaacttcagattcctctccggcagcacaaaaaatacccaagcaagcaccatcagcaaatgtccctttcaacatatgccaacaggtcacacattgcttttgttggcagaagttattggaattcccccttttctttcttttcttttttttttttttttcaagtgaggaccccagtgttgttctgctctctgttagggaatttgtaataaattacgtgtttgggacccccaaacacagatggcccctcatcccacaacccagcacctcgccttcagagcacgacagagtgagacttaggatatgagtaactatgcaaaaagcagaggggcatgtagatgacccttactttaacccaaattagttaacagaaacttgcaaacagcgctttaagactccataggaggccggccgggggcggtggctcacacctgtaatcccagtactttgggaggccgaagtgggcagatcacgaggtcaggagttcgagaccagcctgcccaacatggtctcgactaaaaatacaaaaaattaggcatggtggcgcaagcctgtaatcccagctactcgggaggctgaggcaggagagttgcttcaacccaggaggcagaggttgcagtgagccgagattgcaccacagcactccagtctgggcaacagagcaagactctgtctcagaaaaaacaaacaaacaaacagaaaagactcaacaggaggagccactaccctccggccagcatctgcctgaatctgtgtgggccgaagatgacctgaataacctctgttgatttaattacgtaggttaaatatgtgggttacggtaaggatcatatacatgcccctctgtttt

SEQ ID NO: 1562898 - DNA, 4001 bp, Homo sapiens
ttttggccaggcgtgatggttcatgcctgtaatcccagcacttggtgaggctaaggcaggaggatcacttgagcccaggagttcgagaccaacctaggtaacaaaacaagaccctgtctctacaaaaaaaatttagccaggtatggtggcgcatgcctgtagtcccagctacttgggaggatgagatgggaggatcgtttgagcccagggggtcaaggctgcagtgagccttgcacatgatcatgccactgcaccccagcctgggccacagagcaagagaccccatctcaaaaaaacaaaaaacaagaagcaaaaaacaaaaaacaaaacactttttttttttttgagatgggatcttgctctgtggcccaggctggtctttaactcctggactaaagtgatcctcctaacttggactcccaaagtgctgagattacaggtgtgggccaccacgcccagccggatgtcatttctgaataagaataaccacagagacatgaatgagagggctctccaaattgctggtcttgacaaagatttgcttcccttgcattcttccccttgatgcaaaataactgccttttattggactacacccagtttgactcacagaacttgaagaaattataacctagatgactagatgaacacagtaatctccatagaccataggagattgcagtggatggcaaagtgttactaaacaaaaggaggaaaggtcagatggaaagctgtacacttacgtccttctcctggatggtgcactccttacaataataggcatcagagaccccaggtcctccacagatcacacagcgcccctggtaagatccatagttacactcatcacatatgcgcaccagagtgcagggacgcacataggagtcacaaatcacacacttgccatcacctgtaaggaagagaatggagtcatgctcacaagttcttcagtcctctgctatctcctgccatggggaaatatactagtctcctgggaaatacactagtctccttttgacagtgactttagggccctcctcttggcatcacaaaacttggtttccccagtgtccatctcaagcccctcaacacatacaaaagtttaccaattaacatatgtgaagagcttagaaaagcacctcggagatgataagcctgtataattgctggcaaagtgctgtgtgttggggaggggtcatgctactctggcgattcttcccgttgaaaactagagagatacagcgttaaatgtgcaagcggcagtggggagttagaggggcctttggctaaagtgcagcattcagtgttcacatacttccaggcacatctactcaaagccctctttgtggcacttttgctggttccacagaaaactgggagtgggaagggtgggttgttgggacggtgtgttccactcacatttttcacacagtcttccgatggctgcaagatgaaagatggtaaaaagtacaattagaataaaggttttgagaaagaggagaagtacatcctcgagctgggggtagggacatgagtaaggactgcagtgagtgagacctgcggatagccattttatcattacaaatttccatatgaaccaaacctacatccaagcaccctcctgaatctcctccaacgccctgggcaagctcagagtttctctggacctggttcagaccccaccccccgatacctgcctggggctcccagcacgcgcacccccgccctcttctcatcagaggccacaaacctgcgcgctcctacaacaccccgcgcctgagaggcgggaaacgtggcgcctgcgaggcaagcccctaaggaagagacgggaacccccgaccccccagctcctaataccacccctgcccagacagccaggggtagggcgcagtctcaccaacaccagcctgcttgcggcaaaagatcaaatcaggatgatgtttagccatagctcctaactaagccggccaccggaagcttcgggaacttccgtccgacctttaacccccattgttcctgcctccacgtcgctgtgattggttctctaagcttccgtcagtttacaatccttgcaccaggcccgtcttgctctcgcgcgagtttttgtcgctgctgggcggccaggtcctggcaggtgcatgaaactcttaaaaactctcccagatttggatggcggagataactaaaatttgttcttgggtaaaacatctttgtgcttggtatctatttctgcaagtgtctttgggcagtccgatttcctcttgcgtgtctgttcgttgcacgtgagctccgcccattgcgttcacagggttctggcgcctctagggaggcctcgccttcaccgtgacgccccactcttccgggcacgcccctgcccaaaggctttaaaggcgccgtgtgggacgtcactttaatgcgacctcatctttgtcagtgcacaaaatggcgccctacagcctactggtgactcggctgcaggtgagcgagctcagggacctctgggttcacgggggcggggtgcctcctactgtgccggcggctgtgggcgaggcagggcgaggcgggcccaacctggggccaacttctcgtgtacctgtcccggttgtgggcccggcacccgtgcccgcttctctggtgccctaggtcaaggcgtccccggcacagtcagctttcctggccctgtccctgcctcgcaagaagcgtgggcccaagcagcggcggccgggtgaagagcggaggcacctctttcttctttttgaggacagcattgcctgctcccgtggggtgtgtttccattcctcaaggtgaggacaaggtgactagggggcgcggtcgttgttgagtcttctaggcccagttcctgaggcctcacttcccatctcttagcaacagaggcatgacagcatctacggttgccaggcctggagtctggagaagaaactaggaccctgtaccaccttttgaggaccctgcggaacgtggaatgtcggggaggggggcggtcttctgggcccatacgtagtaaataatataataatagtctctcacctttgcacaagatttgaggcctgttttaattcttcataatattatttgattcctgtaatcgtaggaatgaggtggtttttctcatttgatagatgataaagctggtagaaagtaggtgaaagttctgattctcaagagtgtcaccgaagtgctgtggcagaagcatgggccctaccaccactcagttcttgtttatgtcagcctgccctcacagaactttatgaaccacggtgcaattatttctgtttgtcagaatgcagtacgaatattttgagcctcacaataagttgcttgtcaaatatgggaggataaggagactccagtttgaccttgactcccctgttaggagctatctagaaagctgactgactgccagatgattttttcacttctaacttgacagccctgggaaggtgttatactcagaggttcaatgtcaaatgtgtactttgttaataaaaatcaagcaagcatctgtagacattctctgtcaacctttcacatttaactttgtgaattccttttggatcaagtggcgcaactttgataatagaattttacgagttgttatgcgttgtactctcaggaagcttgtggtacttgaacttatttttcatcacattgcttaaatttaaacttgaacttatttttcatcacattgcttaaattgaaaccatatggtttaaagtaaaatcatcatttatctgaaagaaaatatttctgatctcaattccgggctaagggaaaggatttgcacctaattatctctttacatcttttttttttttttttttttttttttttttttttgagacagtcttgctctgtcacccaggctggagtgcaatggcgcaatcttggctgactgcaactctgcctcctgggttcaagtgactctcctgccctcagcttcccgagtagctgggattacaggtgtgcaccaccatgcttgg

SEQ ID NO: 1562899 - DNA, 4001 bp, Homo sapiens
gtgaacatggctgaagaagcaaattgagctcaaggtgcccttttctgagttactgagtggaaagggtgctaccactgctggagctgcaggaccagcttcttaaagatcatccaattcactgcattctcttctctctcctcccagaatccagcaatcagtcataagatatatttgttggctctcctgctaagaagcgaatgtgctgactagctagcatgagtttgattcaataaaacagcactacactccattagtcagactatctaatgataacagtgctcatacattaggtacccacgtgcctttttgttgctcttcacaatactcctatgaagtactaccttgtatttgacagaagatagcaaagtatcagagaagggaactgacctgtctagagtcacactagtgaaagcaagtgatacaggatttaaattcagaggttccattttccaaactcatgtcctttccattgcattgtactccctctttagctagaagtcaggttagcaccaatctgccgggaccttctcaccccgaaggtgcatgataaaatcaaatatgagaaccgacaaggccaaggaccaggtcactctgccaaaagtgcctaaaacagcctttcagcttcatccatcagcagacagccacaaaaccactcccaactgcagcaggctggtctccggtcaccactgtcttatcttgtcggaaaacatcctctctccatgtgccaaaaagttgagtgggaaaataattccatcctttcagagctaaacactgtgctgagtctcatcgcacacgggtgggcaaagaaagttgacatttactgctcacccactctgtgccttgacctgtgcaagatgctttatgctagaactcatttaattctcaagaacaacctcattttacagataaggatacagaggctctaagagttaaatttacccaagaggacatggtaagtaagtgccagtgcagggaacaaattcaggtcccactctaaaatctgtctctttccagatctcaaggcacaccactgagttgcctttcacctttctcccaagatgaggattgctctggcatgacttcacctttctcttctgaagcaattccaagttcacttctctgcccactgacagttcactctcctttccctgccactgtcccttctgcaaacgcacaatcttttacccaacctaacgcccccagcctcgtagaataacactgcgcagttggtttacagtcacaaagcactttcaagacagtgtttcgtctcctggtcaccacagtccggtgaagccggcaaagcagataaaagcatccccattttacaagaaagccatcttcccaaggtcgcggaataaaaagcaggtgaaatcggaagcagaaccccaggtcttgacccctggtcctcggctcatcccactgctccgcacagccgcccacgatccagcctccacctccgcgatgtcacaagatgctccctgggccagcagctcacatcccccacccccatcccacaaccacccacctgcagcggccctgcaggccccgccgacccttcccccacggtccctctctcttcaccagcccctcccactagggcctccttcccccgctagatccctccgctcaggcgccccctcccgcacaggctgccggcgagcccagcctcggcctcccacagaccctcgtcccgcctccacgcttcgtcaccccagcccctcctcctgtcagcccgcggcccagcccgccgacgttaccttctccaaggatgctggtctctgcaccgccagggagcgggccagtgacaggaccgtgttgaaatagaagccccgcgaggcgctggagccggagccggagcagccgccgccgcctccgcctccgcctccgcctccccgggccggggccgccgccatcacctcacgagccgcggcgctgcccgccggctccccgctcctggcccgcgagcgcccgacctcagggcgcaggcgtaggtgcatccggctttcccgccacgtgacctctcagttgctgacactagatagggcgtggctgcggggcgggcccaccgctgcaggggagagaggggatggacagtaggctgcggttgcgcgcgccggatgtgggccccccccagccgacctgcgcgatggtcggctccgagggcggggccacctgcgcgcgacgcgcggaaggagttcgcgcgacgaccgcggggtcggcgggcggggcgaggccctggacggcggcggcagtggggctcctccttctgtttcccagaccgagagccgcgccggcaccatgtcagcttaccctaaaagctacaatccgttcgacgacgacggggaggacgaaggcgcccggccggccccttggagggacgcccgagacctccccgacgggcccgacgcgcccgcggacaggcagcagtacttgcggcaggaggtcctccgcagggctgaggccacggccgccagcaccagcaggtccctggccctcatgtacgagtccgagaaggttggggtcgcctcttccgaggtgagcctggggcagggctggtgtggactcgccggtctctgtgctgtcaaacggagacgagaaatgttttgctcacaatcttttgagaattctcaagttgcctagcatagattcttgcaccttagtgactcgatggtggtaacaatctgttaactatgtaaaggtatgtgcatctggagtacttgaagagggcagtttaccccagaaatcttccttagctattagtctgcttcgttgattttttttttcttacgcctagctcacggggaaacgccagattattttctgtccaggtgagtaaaaattctgaacagcaggtcctaggtttgggaaatggagagtccgtttcttcgacattatttcctgtgcaaaatctggcacagggttttggccattccttccggagtgagccagaaagagaggactatgtgcctgcgagtgtcaggtgataccctgaagcatcagggcaggtggtccacgagttcttcccgcatcattgacatctccacctaaccaaccaatagaggtattgaagtcccttcagcccagacagctgcctagttgaccaaagcctgggtttgattgagtccagggtcttacctttacttcccaaatcctagacaaatagtgtgcgggttaagagtttgttgctccaactcatcttcatcagttcttcccatccttagatttcagagagtagtaccttcaataacaattattctggccgagcgcagtgactcacgcctgtaatcccagcactttgggaggcctaggcgtcggatcgcctgagctcaggagttcgagacccgcctgggcaacatggtgaaaccctgtctccactaaaattaaaaaaaaaaaaaaactagccgggtgtggcggtgcgcctgtagtcgcagctactcaggaggctgaggtaggagaatcgcttgtacccgggaggcagaggttgcagttagctgagatcgtgctgctgcactccagcatgggcaacagaccgagatcctggagggtctttttctttttcttttttttttttttttgagatggaatctcgctctgtcgcccttgcttgggtacagtggcatgatctgggctcactgcaacttccgcctccgggattcagacgattctcctgcctcagcctcccgagtagctgggactacaggtgcgccgccacacccggctaattttttttgtatttgtagtggagacagggttttgccccgttggccaggctggtctggaactcctgacctcaggcagtccgcccgctttggcctcccaaagggctgggattacaggcgtgagccaccataccggtcgagaatgattctttattgtacaccacagtctctcttcagcctgctaatgaaacagttttgtttggacagagaaaaaaaaaggtttaaaaaaatgtataagccaggcgcggttgtacttctgtaatcccaacaatttgtaaggct

SEQ ID NO: 1562900 - DNA, 4001 bp, Homo sapiens
cccaggcacagtcgggattccgctagaaaggaaagcaagctaggctgactctcctggcagaaggatgactggagcgggtgggccctctaaaactcctgaggggctccactggctgcccagctttttctctccctcccttggacaaaacaacattttgtgctggaacatgcacagctcttggagttaagcagatgtgggatcaaaccccagctctgccatttatcagctgtggaacttggtttttttttgagatggagtcttactcttgttgcccaggctagagtgcaatggcgcaatctcggctcactgcaacctccgcctcccgggttcaagtgattctcctgcctcagtcgcccaagtagctgggactacaggtgcctgccaccacgcctggctgatttttttgtatttttagtagagacggggtttcaccatgttggccaggctggtcttgaactcctgacctcagttgatccgcctgcctcagcctcccaaagtgctgggattacaggcgtgagccaccgtgcctggccagctatgggacttgggtaagtcagcctctgtgcatctcaatttcctcatccataaaatgtggatgagcacccttatcagagttcttctaaccatgcatggagggcactaacagcaacccagtccatagcaggcactccataaaaataggtcccccttccctttcatttattcgatctctgagatttgagccaggttctgtccttgtcaccttatcaggcatctatgtagtatgatggccacctactccagggagtcttcctctattaaactgtccacctcccacctctcaactgctcgattacctctcggtttccactataaattagcattgactggtgttttatgataagtactcacgctgattcacttattcattcaaaaaacattcgctaacaacctactgacgtcaagtcccttactaagtgctgagcatagagaaaggcattgcacccactccttgatctgaaagaggatatattctaatgggaaaatctgtcctactaacaacctatgttgggaaggaagggtgtctacaatattcctattcaaccttcaaaacctggttcaattgctacgtcctccatgaagctttccttgaccatcccagcagaagcactgctccatctgctttgctcttcttgtcaccaagtcatgctaatagtgcccttatggcactgagctgtgattatccctttaactgtccacagccccctacaaatagtgagctcctgggagagcagggtccattgctgcttcagtacaacaactgatccaccgctgagaagcaagggtctgtgggactgggaagtccagggaaatgaggaacttggggctcctatactgctggaacttgggggaataaaatactcacagtttatcctcttcgatgtcataatccaagtctgcaaacatggttccgagagttggagtgggctggctaactgcccagctcggtaggggaatggggaactggatccgggagagaaaggagcataggatttaaggaacccaagtgcctaaatgccaacgccacccctccctccaccacctcatacgggacagcagtgccctcctcttccctctggagtgggatgggacagtctccgggtggggggctgggtaggtgattcttactaggtacaaaggggggctccaggccagggcgataggctcagatcccagagtccgccccacgggtctccaggccctggggagctgcctctgtcgctcaccggaagcgttggtcccacagccgggtcccggccaggctggtacctgaacccacctgccgttccacctggcggtggccgcgattgtcacgtcacttccggcaagacgcggaagtcccggctttccccccactggatatttgctccaatccctgcagacaatccttcccttcccggctcccgggacgctcggaaccaagaacgagaacaagtattggcggaagctcgctgttagtaggaacaagcgaaaacagaggaacggtctggacaggctgacagcgtctaaccccgccctttgccctgccgccgccgccatcttgggaagggcagggtttgtcccagcttcctcagctgcactcaggggcccgcgccggcccggcggttgccatggcaacgaaagcatccctgagccggggttacctccggcgaggctcagtggactataaaccccaagacatcatgccctttcaccccttcaccacctgggcctgtgactcccctactagaatggccctttgaggtcccagcccatcccagtttcgccaacttaagtgccaaagagcggggagtgattttgtgcggggccacacacagttggtgtaagatctggatcgtggccctgaaactcccgccgcctagtctagggatctttgaacgtccaaacactaaacagagagccaggagaggtgtattcagtgggtcttgctattaaggacagactggacatgctcccttccctttatgtgcctcagtttccccatatgtaaaccaaggccattgaggtaaatgctttctatggtatatggtgaaaggtttctcacaccccctcctccttccttagtcctgaggagcagcccccctggggtcccagggagggtcacggtccgcatgtacctgaggctcgggaaatgctatcagtgctccccagagtccgaatcttgtctcctcgccagcctctgctgccactgctattgtgtaaagtgggttccctgggggaggttggctctcccagagccacagccaggcatccacctcatccggcagcatggggccaggcccatccagcttgcttccccagctgccccaggagccatggaagaaagatacagaaggatgattatccacatatcccacggccggtggaagccccgccctactctctccttaggtggctaattgagtccggacagatgtgcagaatgccgtgacaataacagccttcccacgtgtccactgctctcctgtgagatcactttcacaggatttgaaagctcaccaccaccctgtgagagaagaccaaatcttgccagccacattgtgcaggcaaggaaacggaggccctgggaagcctcttcctctggtatcatagcggcagggctggggctgggaaaaccaagctctgtttccaggccagaattttggtttcaaaaagcagcagtctaaggccaggtgcggtggcgcacacctgtaattccagctatttgggagcctgaggcaggagaatcgcttgaaaataggagagggaggttgtagtgagccgagatcaggccattgcactccagcctgggcgacagagagagactccgtttcaaaaaaaaaaaaggcagcagtctccaaacccaggtgccttaacatggattgtggctcttccagcccatgaccatgctagctcaggcccaggctctgccattttgtagctgggagatcttgggtgagtcgctgtctcactctgagcctcaggtacgtgtagaatggggaaatgacacctgccaccaggtatttgtgaaagtcaagattaaaaggagaggctgggcgcggtggctcacgcctgtaatcccagcactttgggaggctgaggagtgtggatcatgagatcaggagttggtataagatctagatcatatatctggaccagcctggccaacatggtgaaaccccgtctctactaaaaatgcaaaaattagccaggcatggtggtatgcacctgtaatcccagctactcaggagactgaggcaggagaatcgcttggacccgggtggcggagattgcagtgaaccgagatcgcgccattgcatgccagcctgggtgacagagccagactccatctcagaaacaaaagattaaaaggagaaacaggtgtgagtgctttgtaaacaatttgcatggcacagctgtcactctgacctcaaaaccccctacccactctggcccttcttctcaggttggggaagatgccc

SEQ ID NO: 1562901 - DNA, 4001 bp, Homo sapiens
taaatcgcttaacttctctgaagctcagatgcctcaaacgacttcttcccgcggtgtgtgtcaggggaggttggggagctggggttgtgagcagtgtgggtctagcacactgcagacgctccgcaaacggtcaataaacgctgaggggccaaaagccactcctcaggacgcgcggcggagagacctagcctcaccccagcctcgccccgcgcagttgtttacaagcgctcgcggcggatgagctcatacgagtggcggcggcggccaataggctttgagccccgcggcctggagacagccctggccaatcggacggcgcggaggcggagcggggccggccggcatcgcgcggccgcacgtgcgccacgagtgtctcagccgcttcctgtcagcgccaggagcggggattcccggggtcccgggcaggtacctggacagcgcaggtcctcgcaaggccgtttctcagggacgccggcctcgccactgacgtagcaccagggcccgcgcgggtcctcgtccgggtttcggcagtaactgtgattgccggcccctaagagaggagagaaggaaatgtgtgccggggctggcaccgggaacgcggccgccgcccgccagccccggggccgtcccccggaggacacttacccgacacgggggccgaggccagcccgctctgcgcgtccagccagttgaggcagcggaggcccggcgcgggggaggtctggtcctcccggtacaggtggccgttgtcccagaaacagcctgtgaggaaaagaagcccccggacacagaatagcgggcagcgaacggaagacgcccagcgtggcggacaggggagccgggaccacccgggctgaacctcagcctggttaggggaccccgggccctgctgggcctccctctcctctcgtggcaacacccccacgccccacgcaccccccccccccaactccacgcacacctcagggtgtgaagcccccagcctgtgcctgtcccccagtcaacgctcagagactgttaggttttatttatttttgaaacctggaaagcgctgcagaagtgcaaagcgttgttactcttgaacttgtgaccactttggaggaggagatggagaggaggaggcctggcttagggtccctttgaggagctgggagttttgggacggggggcgcccagacgtgacatttgtccctgtgttgtaatggccacgttacataaactccggtgtttcctccttcacggatacggccaccttctgcccgtttaaaaggcaaatactccctcccaggagaattctccaggagccttgactccgtcaggcaaaagattcaagacagcctcaaacggaggaaaccggcctcatcgctgactggatgagactccaagctcccactcccctctgcaggagaaccacagaaggaggctggggaaggaggaccacaccatgcaaagggcttagaaagaacaggacttggggagtaggggagatgaacccccaagctccatccactcatgagcaaggaaaggcagagagaaagtggcttcttgcctttgttcttaatggcaaagatggagctgcaagcccctgacaaggaaaggaggggtggaaaagctttcacgggacaacagaaaccggctaaacgcttcgtttcctgtcatcctggccctgtttgggaaatagggggctttaccccttctgtttcatgaagttgctgcggaaaggaaagattgtaatctcacctccagatccataggcttctgctaggagcatgttgctgacgaggaatgcttgtacccaggccaacagcatccttgcctccttcgtcttgcaggtgattgaacgaccagtgtttaaccgaggcccccttggcggcggctctgcctcccagtcccagccttgcagtcagacctgcccttgttatgctgttctggtaaacagcctctctttagaactgggagcttcccagctagcttgctgcagcgcgagctgtttttcagctgaaaggcgccccctgggtcctaagcctcctaggtcatgcaaaatctaactgagccaagaaaggaactcagccaagagatatgcaggttgtgcttagcagccgatcagtttgagacctgcgaggccgcatccccagggtttttcatctcttctgtttccatttgtgtgagtacagaaaaaataattctatcaaggggcatcatgggatgtgggaaattataagcactaaaacacagaacaacttagggagctatgcacccaggaggaattcatgaccacataggggggaaaaaataagagtttctggtggggagtggagtaatagtttttttttttttcttttcttttctttttgagacagagtttcacactgtcgcccgggctggagtgcaatggcacaatctcggctcactgcaaccacctgccgggttctcgcaattctgcctcagtctccggagtagctggattttttttttccctcactctataggaaatccatttgctgtaatttatatccatcattaaatctcaccatatccatttgacttaggccttttggagttaggcagaagggcccttcttcctgtttggctgacagctcccaggcagcctcagtaaactgagagagagagcagagtgattcgtcaagactaccttgtgacaggggcacaccaccacaacccagctaattttttgtatttttaatagagacgggggtttcactgtgttggccagactggtcttgaactcctgacctcgtaatccacctgcctcggcctcccaaagtgttggaattacaggtgtgagccaccgcgttcggccgagtaacactttatacccatccttgaaaaagaaaaagggcctttatgaacactgacacttaaaaaaaaaaaaaaaaaaaaaaaaaaaaaaaaacagtgtaacttggccagggtcaaatctgtcacattgctttttcttacatttgaggttttttggggtgttgtatatagtaggactatagaaggagtatctttagttgaaaacacatgttatgcaaacatggaaaaatttgctcagctacattgtaatagtctaccctttctgccagccctaaattgtatagaggaatttaagtaaaatgtttgcttttttttttttccctcaccctataggaaatccatttgctgtaatttatatccatcattaaatctcaccatatccatttgactgaggccttttggagtaggcagaagggcccttcttcctgtttggctgacagctcaagttcccaggcagcctcagtaaactgagagatagagcagagtgattcgtcaagactaccttgtgactcagtcagatcccaaaatagaaatggggaaactctgtttcaatcttgcaggctgtaatttaaggaggaaaacaactaatttttttttgggtgggggggacagagtctctgtctcccaggctggagtgcagtggcaccatctcggcttactgcaacctccacctcccaggttcaagcaattctcctgcctcagcctcccaagtagctgggattaaaggtgtgcgccaccacgcctggctaaatttttttttgtatttttttagtagagatggggtttcaccatgttggccaggctggtctcaaactcctgacctcaggtgatccacccaccttggcctcccaaagttctgggattacaggtgtgagccaccatgcctggccactttactaaataaattttaaaagctttatcagggaagaaaactagtgtcaattcaactaatctgaggtgaatctgaattcactacactcatagaaaggatagagagatacatttaattcactctttaaaatagtttactgataatgtttgatccctttcgtccatttaataagatagattgctttgtttttgcaatcactctcctatctccccacccaagcttctgatcctctgactcttgacttggtctaccctgtgaattacaccctagagtctgtaaatttattcac

SEQ ID NO: 1562902 - DNA, 4001 bp, Homo sapiens
cgccggccgcgggggaggagcaggtcacatgagtaagagctcggctttcacaacaaacagatgcgctgtgaggctacctgggtgggggggggacagcgcgggtcccttaccgcccggcgcgcctgcctgcgggaacggggggaggggagagagggagggaggagggaggggcgggcggggagccccggcttccccaagctccgcaatgcggggatttctgccgccgcgcccccgcgctccgcacgcacgcagctcccgcccccacgcaggggaggccccgccactccaaccgcgccgcgggggcctccaggctcccggcgcagacccagcccggctgcgccctgcgtcacgcacggagactcctccgctaccgcccccagccgggggtctctcgggccggaaggatgtcacgcgcctcccacaccggggcaagaggccccgtaccccccaacgcgatggaggaagcaatattgagcgcgcccctagcccccacccagcacgatcccgctcttgatccctcgctcagccctccccagggtagcgcgtgggcctctgctccccacgagagcagacccagggcgcgcggccgcccaacagtcatcagcccctccatgtgccgcccctgcaggcgttaacccgccggcaaggcccccggaacgttccctgccccgcgcccgcgctcaccgtcgaagtcggtgtagaccgtgtccttgagcagcgcacccgaaccgaagtcgatgagcttgagctctccggagcgcaggtccacaagcagattttcgtccttaatgtcgcggtgcacgaccccgcagctgtggcagtggcgcacggcggccagcacctgcgcgaagaagcggcgcgccagcggctcgtccagggcgccgcgctccgtgataaagtcgaagaggtcctgcgccggctcgggccgctccagcaccagcaggaagccgtcgggccgctcgaaccagtccagcaggcggatgacgccgcgcgcgccgcccgccgcgcccaccttgcgcagcagcaccacctccaggggcacggtcgcgccgccctgggggacacggcggtcagcaaaagccccgcgcccgccccccgccgccgccgccgcccgtgccccaacttaccaggctgccccactcggtcacccgctccttcaccacgtgcttcacagccacctgcggagacgcgggggtcaggccgggccaagcgaggcgcaaggcgcgcgagaaacccgggcccgcccggcggtccgactcaccgggagcccgtcggcgatgcggctacccgcgtagaccgtgccgaagccgccgctacccagcacggcgcccacctggtacgccttctcgaagctctccttgtccgccttggctgcagggaggcgcgggcggggttggtgcggcccggggcgcccccggtccccgccctggccccggccccggccccgccggccccgcgcgtacctggctgcaggatcttcaccgggaggtggtccacgccgccgggcccgcagaggtgcgccagggagccgaacttggagagcagcatcgcgggcgacggcctccccggagccccgagccccaggcgccgaagccgcggccgatccgggcgagcggcgcgccggggacaccggccgtccgagcccgaggcggtccgcgcggcgcagtgggcccggaaggcccgcggggaccgcgtagacgcgcagcaggcggagcgcctcacccgccccggccgcctcgcccgggggttttgggccgcggcgccgcgtatccctccgcgggggcggggcgaatcgggaccccgcccccttccgcccggggcccgcgaggcggcggcggccgggcgctagctggggagacggcggggcagcttggcgcctgtcttcgggcgggcgagggccgggtgcggcgggcgcggggccgctccgggactcgttttcgtagcgcagccgcggaggcgcacggcgtgtcgcgtcggtccgctctccgcgctcacgctctcactccgcgcaggcgcagtgcccgcgcgggtggcggccgtggcgcctcgggcagaacgaggagggactgcacgagccaatggaagccggagtttttaaagaaatccggcgccccagccaatggcggggcgagccgtttcctggctccgcccccagcagtgcctaggaaggtcacccgccggccccgagcagggttcctgggggtgtgggagtgcgggaggcgacctgcgcttgtcccgcggcctcgaggtgacacacgccgccagtctgcgtccccggctgtctgcgcatcccgtcgcgcacgtggccgggcgcgcggggaggtagcgccggctcctctggaagccctcgcagcggcagcgcccccagcctcgcagccccggcgggggccgagagcgcacctggctggagatgcttcctcctcaccctgggctctgacctcacgcccgcagcccgagggccctccctggtacctctgccctgctggccggtgcctggagtggccccgcccgactcctgccgtctgacacggtcctggctgccctccgggctctccagcagctgctgtccacctccaccagggagcccaccttgattgctgcgacagccgcactcaaaggctgaacagccggggtacacattgccctggtctggacttcaccctgtcgtgccccttccctgctctctgtacagaagtctgactcacctgtgtggtttggtgcaaacccacagattgccaacattggtccaaagtcaccggcctgagagcagctcagggttccaggacgtgagtggccacccgccagccccagggctagtgggttgagagttgggggccagagggcccaggggctggtcctcttggcactgccaggcgttctcagtggccctcaggggtctaaatattgtggcagacatccccgggcggtctggtgtgaccgtcagcgcgcacacacacttgcctcggagcttccagcctcccctaagtctgacctctcatctctatacagtcaccatcgctgtccctgcgctgaccactcacacaccactcccctgttcagctcttctgaggctgtggctctcgggactggcccaggcccacctgccatctgggcgccctctggggctcgcttcgtcgcccgctgcctgggcccatgcctgtgctcctgggggctcctctcttgcctagctcatctcttcctgtcccttgggtcctgaggatcaaagccaacgcgacattgtttgtccccaggcccctccccctccagccgctgcttcccagagctctgtccagttctctcccgcagtacgagggcagggttggggctggtgggttagccttcccccacccaccacgcacccagcacagggctcccccgagatcagatccctggtaggatgacaccccaagccttcccctccagcagtatccacacagcacctgcgaaggaggaggggctgctgcccatgtgggtcctcccggggacctacctgagggtccagtggggctgccctcttctgtgctggacacgcagcagaggtgggcagagatgctggagagcacggtaggtctagggggtgaccactacagttgagttcatgtcagtctggaggggcgagggtcctcagcctgacatgtcaggctagtcttccttgagtctgacatgtcaggctccaggccagtcttccctgagtcatcctggccgtagaagaccaggctctggcgggcaggcaccccaccctggctctccctaggccccgggtcttgctctgaaaccctcaagtgtcccttaactaagatccaggaggacttgctccttcagaaagcacggtgtgcctgtcctccacggccctcctcccgctcactccaggtgtgctggagattcctccaggcctccagatgggattcctgccacacaggcctcggtgaaagcctccggagggctcctgcgtgggggtccagcagcctggccctggagtggagggcagggcagggccagag

SEQ ID NO: 1562903 - DNA, 4001 bp, Homo sapiens
gcctcagacctggcttccaacacctcacctctctttccaaaaagtcaacctcacactccggtgggggcaggggtttccaccacaggaaagatgaaataagaggggcttaggtggcagttctaaaacaggaacccaaacttgcgcggagtgaccggccctgtgaataggaaacaatggctgataggaccgtatagggggtaggggaacacctttgtcaggacatgctgttttggggatccataccagagcagtaaggcagtgtccccacccgtccctcaccaaccagggtaaagaccacaacacctgcccccccagtggaatggaacattccaactgaagtcgatgaatgaccccaggccaggcagcagttactacaggttgggttggggcctgcaagattgttgtgcgtgaggggtaggtgcatgtaggtggaagtgtgtgtgcatggaggatacgtgtgcaggtgcaagggtatgtgcatggaggggtgcgtgtataggtgcgaggatgtgtggggtgtgtaggtgtgagggtgtgtgtagggggtgtgtaggtgtgagtgtgttatgcgtataggtggtgtgtgcgtaggtgtgaggttatgtgcctggagggggtgtgcacaggtgcaaggtgtgtgcatgtaggaggcatgtgcgtaggtgtgagggtgggcgcatataggggtgtgtatgtaggtgcgagggtgtgtgtaggtgagggggtgtgtgcctgtagggggcgcgtgcgtgtatgggtgtgtaggtgcaaggggtgtgtgtaggtgagggggtgtgtgtaggtagggggtgtgtgcatgagggtgtgtgtaggtgcaggggtgtgtgtgtgtaggggtatgcgtgtatacacttacagtcctgctcctagtggattctggttcaagccttagcaaggcggagcaggcagtgagggatatggcactgtcacctgcagtctgcagcccgcagccagctctgccggagtatatgtagctttgcagcttgtgtgttcagccaaggaccctgagaactggctcctgctgtctgatgggaagcgcctggaacgccaggaccacccctcttgaagcctcagcagaaacttccagggccccaaatcctgtgtccagtggcctgactgcgggccatgcacttcccccgggggcgagggtgggggcaaggggctgactttctccccagctcagctgaggcctggccaccatgcagcggcgtgcgtctagtggggcgacaaccctgccttccctgcattcctgagctagaagcaggcaaacttcccaagtaggagacggggaaaatggtcctccctgggcgacatggaccagagtcagtggcaggcagcccaggaggccctgggaagagggcaggcaggactcgcaggggtctatcctagccgcccaaagacagggaacctcctctcagacaactctgggtgctgaggggaaccggctctgggcaaaggcagtaagccggccacccgctccctggccctcgggcgccgccctcttccccaggcggcctgcccccaggccctccggcagcaccaaggagacggagctctcagcccgggccccgccaatgccagccggcaccccctcacttcctgcagccgcctcactgcaggcaccccctcacttcccgcggccgcctcacttcccgtacgctcttcacttcccgtacccgcgcccggcaggagataagatgtggaggaagtgagctcacgcagcccgggccgtgcccacgtggggacggaaaaaaagcccacgactcgctcaaccttgtccgcggggctcctcaggccggggccgcgtcgtcacagctgggagagcccacctgcgaccgaaggccctagaagggcacccccacccggcactggccctctgagcgggcagggtggggcgcctccctgagaagtcacctggggctcccggcagggccggggcgccggctccgctcactcacccgcaggtggctccagcttccgggctccgactccctaggggcgctcccggagccgggaagccttggggcgagtgggcggggctcgggctccagccactcagactaccaggggcgggggcaggaggccgaccccagccacccttaaagctgccgccccctctgagccccagtcctgctgggccgtccgcccaacccgagggcccctttaagaggaagggccaaggccagggagaaggggaagggcagcagacaccagctctgcttggtcactgtcacgggaggaccccactcaaccagcaaggtgggcccggctgctcccaagggatgcctcctgtctgtcctcagtctgtccgctggtctgtgagccgcctgtctgcagcccgtggctggcctcccaaagcagctgcctcccctccaccacccgcgacccaacactaggcagactcaggaccccacgtgctgctgacctcactgaggaccagcttcttcactggactgaacagaaagccacccctgctagccctaggaagctccagagaatgcgaaatccttgatccttcccgcatcccatcttgaagctacaaggctgctcccaccccaaccttctgccctccaggcacgcaaaaccctgacaaacagaatgccctgactccaaaactgatgtagaccagcgaacaagggcagccagaaacaaggtccgaccgccccagcctagagcacacaggcctccctgcttcactactaggatgcagagcccatgggatggatgatgcatgctgtcttcccaccccgctagatcggagggccctagtctgcggcttggcagtccaccccgtacccacatggtgccaggcatccgacaagcactcagcccacatgggatcagaccaatcagcttaatgcttttaggggaggggaagggtctgagagggatcaccattcaaccaaagaaaaggtgtggcattaagtagccttgttcacatctgtgggagcaactgagcacgcccattccctattcaatggtgagttggccctagaagtctcagtctcctcattctgagccactgaacaggatacaattccagcggcttctcaccactgagatctttgtttctaaagcaactaaggcatgaaggctcatgcctgtgatcctagcactttgggaggccaaggtgggaggatcacttaagctcaggagtttgagaccagcctggacaacatagtgagacctctttttttaaaccaaaaagaaagaaagaattaaggtttggaacaggaggagagggtctgtagggcttgcggagaaatggtgtgggggccacgcctggaataggacataagggtgtacagtcacagccccatacacctgtcgtccttacctggatccagcccaagcaagtgccacatgacaagccacagccctgggatgcggcagggggaagaagacagatagggtcctcctccatggatttccatgttcttccatacctacaatgcacccatgggaacagggaggcaggggtgaacaaggcacagtgccacccctaagggcctcagcatgtggtacaggggtggcagataccttatacaaagctgctcctaatattctcctgtccagacatcactacgggaggtcctcaaatagtgtcatcataacactgatgagaaaaaaaatctattccagccagggctactgtctgtgtggagtgtgcacgttctccccatgtctgcatgggtgttctctgagtaccctagtttcctccacatcccaaagccatgcacattaggctcactggtgtgtctaaatggtcccagtctgagtgagtgtgggtgtgggtgcaccctgccatgggaagacatcccatccaggactggtttccgccttgtgccctgagctgcccatcggataggggaccacctgcaaccctgaaatggagtaattaggtaaataattatctaactttttattaatcattcataaatgcatgtatagctcacatttcaatggttaatattagaaat

SEQ ID NO: 1562904 - DNA, 4001 bp, Homo sapiens
tctgtaacacttttggagggaggaaatactccaatgaaagaaaaatgactggatctatttaaaatcagttctgcaactcacttgctgtgtaacttggtccaagtcaatttccttcttattttctccatttgttttagtgtctgccacccatctacccacatcatctagaagtcagagtaatgaacacttgtttgatacactgtataaacgacttggaagaaaagttttatataaacccaatattcagtactataaataagctttaattgagaattttcactctaccaaaaaaaggcaaaatgtctcttctcaaaatccctgtcactgaccaaagttatcatttttcatcaattcattaacaaatatttactgagcacctattacatgcgagggactattctaaaaactggggatatgagagtgagcaaaacaaactcatggcccttacatgtaaaaagagaacacaactagtaggagaaaaataataataataaattgtattggcatgttggatggtgataagtactatggagaccgataaagcagggaagacaaataccaccccaaatagtgggaactacaattaggtcttcagaaagggattccctgagaaggtgacgtctgagcaaagacctggaagaaggtgagttagtgtgccaagggaagaacacttcaagcaaagggaacaaaagcaggtggaaaggtcttgaactgaacttattctagagtagcagaggaacagcaaggaagcttgcgaagatggaatgggcaaggaaaaggtagtaaatgagatcagggcaggaaaaaaaagtgtaaagccttgtagctgttgcagaggctttgacttttattctgggtgagacagggagtctttgggaggtattaagtctcagagaagtgcatcagtgactttttaaaggaggtttaagaacactaaaaataaggtgtctgaaaaaagctaaattaagccaaaaatatttctaagaatttaaaatgaagaatttgaaaaccaacgaatgggccatactcgacctccctagctgcccaaaggatgctgacgacacgaaccagctgtgacagacgaacattcagaggcaagcagatttccgtaatgtttacagtccttgccagtaggaaaagccgtgacttttcaacaaaatcacttggccagtcggatgcacctcgaaatccctccatttgacagagcacgtgttaacttctaagaaagtaggtggggcccgggatgtcacctcatcttaaaacatgcggaaaccaaaaagagaaaaggctctcccgtcaagtcagcggagctgcccaggagagcggaggctttccggaatcccggctccaccacgaacttcaaggcgccagcgtcccaccgcgagtcctgacacgagggctgccttcaaccggcaagcccatctcccgctggttaccaggggactccaccccggacgacaaatcacagtcagaaccaacgtgtctctcccaccctcggactgcggctccttcccaccggcgggcctgggggtgggcccagacccagcctgggggtggggggttggggagaaggcgggtcccagcggaaactcccggccgcgccttcccgagccatgcgctcgggccgggacccagccgccttcgccccggggaagggagagggcgtgttaccacggcaatgcctggagggccgaggggcgcactcgctgaggggcttcgaaggggccgggggagggagggggcgcccgcagggaggggctgacacagggctgactccgatttaggaatatcctaccacttctccatcaacaaatctcccatcactgccgtcccacggcctcgctcgcgcccacagacccactcacaattccttgatcagcaccatcttcccggaaccccctcacagctgccgccgataccaccgccgccgccgccgctaccgcctctcacagcgcctgcgcggccccgcctccctgcccccccgagccaccatcgcgcctgcgtgcttacacccttccgccgcgaccagtcgcgtcagcgcgcgagggggcctagctccgcccagtttcgtgccccaccccgggcacacgaggcctccactgcggttgcgcagcctgccgaagagcgtgcggcttctactgcggctgcgcaagctcgacgcgcgcactcttgtctgcttacgagggctcctcccttcagctttggtccctcggggcgtctgggcagcctacgctttccggtgagttttccagttggttctttggaagccgttttgcggtgactggttttctgctctctctcactgctccgagtcagggcccacctccttgaccgacacctcacctccatagtccacataaaagactcctgacaggttctggaggcagccgacgccagcttctgttcccctccccagcccttggcagctcaggttccgcgggaggacgttcacctgcttcgcggtctcgtggaggtccaccgcggcggagaatcctaaacctcacctgtgactcggcaggatgagcggccagcactcccgacggaggccctctgggagaaaagaggcccttggcctcgagacccaggaaagcgggctgttcaggagttggttcgcgcagttacaccgaaagcgccgtgggcctcaaagccgcagcccggaggtcgctggcttgctctgtgtcagacacggttctaggcagtggggatgcatctagaagcagacacagtccctgttctcaagaagctcacagtctagaggagacaactcacttggaaagaaagcagggagaatttggggtggtggggaagtgctatgctatgaatacagtggagtactgggagaagcagaggactcaagacaagggctgtcttaggaggcggtgtttgagcctagcctgttaggatgtgagaggggcattccagttggagggaaatatgacccgaggatggagtaagcctagggtgttcaaggatcagctagagggcagatgtggccagaacatcctaagtgagggtgggaaatgagctgggaccaactggattactaggccatagtaaagaatttgtcttctaagaaccatgagaacctgttgaaaggctattaagacgattaaaatatcacgaaaacatttttgtataaacatctggtgtatctgatagtggaatacatctgtggagttagggctgcctccaaaaaaataacggaaatggactgactcagtgactcccagggactgccttaggagaaagtttctggaatgtcagaacttccagaaactttctcctaaggcagtccctggagtcaccgagtttctcttatgtgtgactagtgctagttattgtgagggcagagatttaaggaaatacacgctctttcttgcaagagttgagaagcttagaatccgctttgttgattggacattggattttatgccaagtactgtgctaagtaatggagatattttatctcatttcacccttagaacattatgagatgtattttagcatgttttaggagggggaataaaatgagattcagggagctatgttaagtgacttgtactagcttgtttgcagagccaggtttcaagtccagattttaaaaacttcaaggtctggtccatttatttcactaatttcctagatgaaagtgaagttggggcgtgcagaccatctttatgacaaataattattctcaattatggaaaggagactaaagtcaaattctagaagatatttagaaaaattaagagattgagtactataaatctgtatgcttagggagtgttctttaaagtctaaggaggcaatattaaaattaattgccaaatttatgtggtatggagtcattgtatgttataatctctccccacatgttatgcttgttgaaaaatataactttttaaacgttgcagataaatttatggttgacatgctttatcattaagaaacatgaggacattttacgtaatttctctaatttttgaagtctcccacaagtg

SEQ ID NO: 1562905 - DNA, 4001 bp, Homo sapiens
cacagtgcgcaaattcccaataggaactgctttccaagagttagcttcatactactcacatactgtcaaagggatctactgaatactgtgtgtctgtaacacttttggagggaggaaatactccaatgaaagaaaaatgactggatctatttaaaatcagttctgcaactcacttgctgtgtaacttggtccaagtcaatttccttcttattttctccatttgttttagtgtctgccacccatctacccacatcatctagaagtcagagtaatgaacacttgtttgatacactgtataaacgacttggaagaaaagttttatataaacccaatattcagtactataaataagctttaattgagaattttcactctaccaaaaaaaggcaaaatgtctcttctcaaaatccctgtcactgaccaaagttatcatttttcatcaattcattaacaaatatttactgagcacctattacatgcgagggactattctaaaaactggggatatgagagtgagcaaaacaaactcatggcccttacatgtaaaaagagaacacaactagtaggagaaaaataataataataaattgtattggcatgttggatggtgataagtactatggagaccgataaagcagggaagacaaataccaccccaaatagtgggaactacaattaggtcttcagaaagggattccctgagaaggtgacgtctgagcaaagacctggaagaaggtgagttagtgtgccaagggaagaacacttcaagcaaagggaacaaaagcaggtggaaaggtcttgaactgaacttattctagagtagcagaggaacagcaaggaagcttgcgaagatggaatgggcaaggaaaaggtagtaaatgagatcagggcaggaaaaaaaagtgtaaagccttgtagctgttgcagaggctttgacttttattctgggtgagacagggagtctttgggaggtattaagtctcagagaagtgcatcagtgactttttaaaggaggtttaagaacactaaaaataaggtgtctgaaaaaagctaaattaagccaaaaatatttctaagaatttaaaatgaagaatttgaaaaccaacgaatgggccatactcgacctccctagctgcccaaaggatgctgacgacacgaaccagctgtgacagacgaacattcagaggcaagcagatttccgtaatgtttacagtccttgccagtaggaaaagccgtgacttttcaacaaaatcacttggccagtcggatgcacctcgaaatccctccatttgacagagcacgtgttaacttctaagaaagtaggtggggcccgggatgtcacctcatcttaaaacatgcggaaaccaaaaagagaaaaggctctcccgtcaagtcagcggagctgcccaggagagcggaggctttccggaatcccggctccaccacgaacttcaaggcgccagcgtcccaccgcgagtcctgacacgagggctgccttcaaccggcaagcccatctcccgctggttaccaggggactccaccccggacgacaaatcacagtcagaaccaacgtgtctctcccaccctcggactgcggctccttcccaccggcgggcctgggggtgggcccagacccagcctgggggtggggggttggggagaaggcgggtcccagcggaaactcccggccgcgccttcccgagccatgcgctcgggccgggacccagccgccttcgccccggggaagggagagggcgtgttaccacggcaatgcctggagggccgaggggcgcactcgctgaggggcttcgaaggggccgggggagggagggggcgcccgcagggaggggctgacacagggctgactccgatttaggaatatcctaccacttctccatcaacaaatctcccatcactgccgtcccacggcctcgctcgcgcccacagacccactcacaattccttgatcagcaccatcttcccggaaccccctcacagctgccgccgataccaccgccgccgccgccgctaccgcctctcacagcgcctgcgcggccccgcctccctgcccccccgagccaccatcgcgcctgcgtgcttacacccttccgccgcgaccagtcgcgtcagcgcgcgagggggcctagctccgcccagtttcgtgccccaccccgggcacacgaggcctccactgcggttgcgcagcctgccgaagagcgtgcggcttctactgcggctgcgcaagctcgacgcgcgcactcttgtctgcttacgagggctcctcccttcagctttggtccctcggggcgtctgggcagcctacgctttccggtgagttttccagttggttctttggaagccgttttgcggtgactggttttctgctctctctcactgctccgagtcagggcccacctccttgaccgacacctcacctccatagtccacataaaagactcctgacaggttctggaggcagccgacgccagcttctgttcccctccccagcccttggcagctcaggttccgcgggaggacgttcacctgcttcgcggtctcgtggaggtccaccgcggcggagaatcctaaacctcacctgtgactcggcaggatgagcggccagcactcccgacggaggccctctgggagaaaagaggcccttggcctcgagacccaggaaagcgggctgttcaggagttggttcgcgcagttacaccgaaagcgccgtgggcctcaaagccgcagcccggaggtcgctggcttgctctgtgtcagacacggttctaggcagtggggatgcatctagaagcagacacagtccctgttctcaagaagctcacagtctagaggagacaactcacttggaaagaaagcagggagaatttggggtggtggggaagtgctatgctatgaatacagtggagtactgggagaagcagaggactcaagacaagggctgtcttaggaggcggtgtttgagcctagcctgttaggatgtgagaggggcattccagttggagggaaatatgacccgaggatggagtaagcctagggtgttcaaggatcagctagagggcagatgtggccagaacatcctaagtgagggtgggaaatgagctgggaccaactggattactaggccatagtaaagaatttgtcttctaagaaccatgagaacctgttgaaaggctattaagacgattaaaatatcacgaaaacatttttgtataaacatctggtgtatctgatagtggaatacatctgtggagttagggctgcctccaaaaaaataacggaaatggactgactcagtgactcccagggactgccttaggagaaagtttctggaatgtcagaacttccagaaactttctcctaaggcagtccctggagtcaccgagtttctcttatgtgtgactagtgctagttattgtgagggcagagatttaaggaaatacacgctctttcttgcaagagttgagaagcttagaatccgctttgttgattggacattggattttatgccaagtactgtgctaagtaatggagatattttatctcatttcacccttagaacattatgagatgtattttagcatgttttaggagggggaataaaatgagattcagggagctatgttaagtgacttgtactagcttgtttgcagagccaggtttcaagtccagattttaaaaacttcaaggtctggtccatttatttcactaatttcctagatgaaagtgaagttggggcgtgcagaccatctttatgacaaataattattctcaattatggaaaggagactaaagtcaaattctagaagatatttagaaaaattaagagattgagtactataaatctgtatgcttagggagtgttctttaaagtctaaggaggcaatattaaaattaattgccaaatttatgtggtatggagtcattgtatgttataatctctccccacatgttatgcttgttgaaaaatataactttttaaacgt

SEQ ID NO: 1562906 - DNA, 4001 bp, Homo sapiens
taggtgggtgcacagcagcatctagtggactagaaggagaactgaagaagtgtcacaatgacatcgggaagagaaagttttaaggctggggaaaaggttggcagagaagtcaggaaggaggcctgcatgtgccgggtgtcccctgtggggagatcagatgaggtaccttaacagttatctggacctcaagcccccatgtgctagctgagggcgtccttctccctccccaggcctccctgggtgctgggtctctgggtcctatgggctcaggggcccatctttttcaagttctgctccacgtgtctgtgtccagctgagggcactgaccccactgccccagtccccagggcttagatgccaggacagtagaaagctgtgtgccagggcataaccaaggtgtcctccactgctctgggccacacattggcagctgggccctgtgtccctctgacaccggatcctagggtttctggctctgccatctctgctgtgatgctccattccaaccatgtggctcagcagggagggcattacacactgtcccttcccccttttccatactcctgccttcctgcatgccctgcacaggaaccctcttcccttctccttttgccaaaagaattcagaagataccaactttctcctcttttcctgtctgcagtggaggtcccggcaggaccccctcctgagctgtgagggttaaatgggagaaggtgtattgagcttgaagcactggcaggtcccacaacgaatgctcaaaaaatggaagcctctgccaccatctgcatcatccccatcaaccacaggagcaaagagcccgccttttctgagaagagcatttacatattgatagaaattccgcggttttatttatcatcacgtcagttttaaggatgtaagtaggtacacatatacatatgtatctaaaatatattaagtttttaaaagtaggttattaaaggatatgtacaagacactctagattttttttttttttttttttttttgagatgggagtctcactcactctgttgcccaggctggagtacagtggtgcgatcttggctcactgcaacctccgcctcccaggttcaagcaatcctcctgcctcagcctcccaagtagctgggactacaggcacccgccactgcgcccagttaattttggtatttttcgtagagacggggtttcaccatcttggccaggctggtcttgaactcctgacctcatggtccagccgcctcagcctcccaaagtgctgggattacaggcatgagccactgtggctgaccaagatgctctagatttttaaaataaatatacatactccacatgctcaaatataagctgaatctgtaacccagcagcttagcagcctaacctcaaaccgcattttaaaactttttttcctttcccctttcctctcttctgctaatctgaagatgtaacttagacaaagtatagacgtgtttcctctcctcttgaaatccagccttggaatgtgctgtgaacctccaccccctttcttttcctgttctatgcccccatgccttatgcacatttatttacctagttgtttggtaagcacacaccatactcacttatctggtcacatatttccttagaagcttcagtagtcagatcctgatacgaaccatgcacctcctccagccatgatgacgccggccacttccacagatggaaaaataattcaggacaagccactggagggggtcacaccacctgacacctcccagtccccctgcctcttttgccttccaaatcctccctttaaaaaccgctttggccgggcgcggtggctcacgcctgtaatcccagcactttggcaggctgaggcgggtagatcatgaggtcaggagatggagaccatcctggctaacacagtgaaaccctatctctactaaaaatacaaaaaattagccgggcgtggtggcgggcacctgtagtcccagctactcgggaggctgaggcagcaaaatggcgtgaacccgggaggcggagcttgcagtgagccgagatcacgccactgcactccagcccgggtgaaagagtgagactctgtctcaaaaaataaacaaataaataaatatcttaaaaaataaaataaaataaataaaaacccctgcgttcatccgagcgcagtggctcacgtctgtaatcgcagcactttgggaggtcaaggccggaggatcacgaggtcaggagatggagaccatcctgactaacgcggggaaaccccgtctctactaaaaatacaaaaaatcagctgggcatggtggcatgtgcctgtagtcccagcaactcgggaggctgaggcaggagaatcgcttgaactcagaaggcggaggttgcagtgagctgagattgcgccactgcactccagccagattgggcgacagagcaagacaccgtcgcaaaaaacaaacaaaaaaaacccctgcgttctttcctcacgtggaagagtggaattgctctctgctcttgcccttgctagcatagattataaaattctttctttttaaatcacatgtcattatcattttgacttctttctacaagcagtgagcagctgggcccttttgctggttacaacatgagtgactggggcaaatacatcaatcaaggtttatcaagccagatttaggttgtttctgggaaaaacacgagccaaacatgcacctgtggctatttttctgaaaaggtttttcaggagatttcctattttttttaagaaactttattttattttattttatttatatctctatgtatttattgagatggagtctcgttctgtcgtccaggctagagtgcagtgatgtgatctctgctcactgcagccttcgcctcccgggttcaggcgattctcctgactcagcctcctgagtagctgggattacaggtgcatgccaccacaccaggctaatttttgtattttcagtagagacggggtttcatgatattggccaggctgatctcaaacttctgacctcaagtgatccacccaccttgggattacaggcgtgagccaccatgcccagtcggggatcagagtttttaaaaatgatttggtgggtatgggctcaggaagtagggagtgcttattggtcgggttggagatggaatcatgggggtggaagtgagttcttgctgatttctcttcctggatgagatcgcaggactggttgagccagattatcagtctgggtggtgtcatctgctgcatcggaattcagggtatgcaaaatatctcaagcactgatcttaagttttgcaacggagattttattcccagaagcaacttggggaggttcagactcttgcggccagaagctgcatggcccctaagccgtaatctctcatcttgtagctaatttgttagtcctacaaaggcaggacagttccccacgcaagaagcgtctttttttcaggaaaggactattatcagttttgtttcagaatttaaactataaacaattcttccccaagactagtttggcctatgcccaggaatgaacaaagacagcttaggcgttagaagcaaggtgtggtcggttaggtctgatctgtttcactgtcataattttctcagttatgagttttgcaaaggccctttcaatggggtgactatagtaagttaattttcctcctctttcttctggtttacccaagggcatgtggagtcatagaactgtccagcaggcactgaaagtaaaaagtctgtgataaaccacctaaatttctagctaggctagtgggaaaggggtctcctgcacatcaaggagtaaggggatcatccttggtttgttttgtttttatctccccagttgcaaagctgtcctgcagcctcagcaatggcagagggacctaaagccctgagaaatcacttggctcactgggcagaggaaaaggaaagagacttctgcatctgaaaagtataggggaaatctctttttgtttcttcctgtacttcacttgaa

SEQ ID NO: 1562907 - DNA, 4001 bp, Homo sapiens
gcggtggcatgcaaagtcacctgagaaaaagctcctagagaatcatagacctgggcatatatcttcaagccatattgactagccaacataccaacagggagaaaggaagggggtactgtggactgaggccccaagtacaggatggtccccagggtgttctcttttactgaactgatttcaccaacactgtgcaaatcagaaacaattattttatatgtaagagggacgtgcttatccctaaaattactacactggacaacaaatttagtaataagtgcaattcctttagctggattaattttgcattctccgatctgagggccatggttaataataaaagaatgcctgaagaccgaggtcactccactccaacatgctagatacagagaaatcgaaaactcagcttccaaaaaatgccgaaaagcaaaagcttttatagacagataagcaccattccttcctgttacagtttcccccatccaatcaaatagcatctcaccacctgaagaagacaaaattgaccatttatagaaatcacggcttgcacaatttgtgcaatttaggaacaaagaaaatctatcagagacaatgaagtttctctcacaattttcgatacatgtgatgtgtgctatggcttttggtccttggagcacgtggaccctcttatcagaaaacgctgtcctagagtccttccgaatcaccattctgaagaaatacacgtggtcgcctttaagtgtttctggcaaaagtgtcagtacagggcccgaggcccagggccatttcagattggcctgctcggggtgacagacttccttgctccccaggattattcgatccccaccgtagtttctgggatctgtggtacagtaccaaaagaactggagtccctgtaacgggctgtccgcatctgggtccgaggacgtggacccgtccagaatcagctgctctgtgaaattagctgttatgttggcatcgccaagcatcaccgcctgcagggaactcctgacgatccagacatagacggcgtccgagtctttcacctcgggcatcttggggttccctgtggtgatggacaccgtgaaattaaacacatacactccccactgtaacgaattattggggatgtgaatgaacaaggggctgttcctgatctcgagctggggcagatccaagggctgcgtccagtcgggcgcctgacccacggcgggcacggagaacacctgccagtactgggcgatggcgcgcgcggccgggcagtccagctgcaccgaggcgttgatggtggcctccgcctgcatgctcaggcgcacgggggcgcccttctggtccgtgttgatcctcacgcgctggatgacgcaggcgtttatctgacaggacacggacgactcgacggctctgtggctggacgagttgacggcctgcaacatcacgcgcgcggggccgtctgtggggcactcggtgcgggccacgaagccctgctggggccgcgggcctggcgcggcggagcgcggggagacgcgggccgcgggggaggccgggcgggcggcgccgggtccgagcagccgcaggcggaaggcccaggccaggcgcccgggcgagcgcggcagccgcacggaccacgtcagggagaggcggccgccgcgcgcggagagctgcaggtcgacgagcgcgagcgcgggcgcggccggccagggcaggcgttgggcgctgagcaggacgcgcaagtcgaggcagtaccagcgccgcccggtcccgccatgggggaagcagaggctgccgcggccgctcaggacagcgccgcccgcccgcaccgcgctgggccgcagactgaggagggcgcggccgccgcgcaccccgaggcccggggcgcccctgaggaggccaccgggcgccccggagacggcggcttgtgccccgcgaggaaccggcggcagcgggaggcggccgacgctcaggctcaggcccacgcccagaaggaggagagcgggcccaggcctcatggcgccggcccaggagaagctgggagaggccgcgaggcgcgcccaaccgccaccggggtcgcggggatagtgagggtcttggggacagtgggggtctcgggcgtcgaagggcgctggcagaggggtcccagggacagagtcccagagagcagctgggacctcggagcttggggtcagtcggcactggggacttcttgggtacctcttccctctccgtccccaagtgtgtgcaggcccagggtcaggatggctcaggagggcagttcagccccgtgcagaccacagagctgaccacggagaaggggcttcagcaggaacccttgggaaagccagtcacaaaatgggagatcaggagggaaccgtgagatccctgggcgcccaggaaggtctgactctcggtttcttactttggggtcgctttgctcttttctttctagttggtttgggggttttgttttttgtttgtttgtttgtttgtttgttttttgagacggagtctctgtcacccaggctggagtgcaatggcttgacctcaagtgatccacccacctcggcctcccaaagtgctgggattacaggcatgagccactgtgcctggcctcattctttaactctgtccatttttgctgtatattttgggacttgattgatggattgaatgattttagagacagggtcttgctctgttgcccaggctggagtgcaatggtgcaatcatagctgactgtaaccttgaactcctgggctcaaggaatcctcctgcctcagcctcccatactacaggtctacaccactacacctgactgatttattttttatttttgtagagatggtgtcttgctgtgtttcacaggctggtctcaaactcgtggtcttaattggccctcccctgtattagtccgttttcatgctgctgataaagacataaccaagactgggaagaaaaagaggtttaattggacttacagttccatatggctggggaggcctcagaatcatggcaggaggcaaaaagcacttcttgcatggcagtggcaagagaaaatgaggaagacgcaaaagcggaaacccctgataaaagcatcagatctcctgagacttattcactaccacagaacaatatgggggaaactgcccctgtgattcagttatctcccacccggtccctcccacaacatgtgggaattatgggactataagatgagatttgggtggggacacagagccaaactatatcattccacccctgccaaatctcatctcctcacatttcaaaaccaatcatgccttcccaacagtcctccaaagtcttaactcatttcacattaactcaaaagtccacagtccaaagtcctgtctgagacaaaggaagtcgcttatgcttatgagcctgtaaaatcaaaagcaactggctgggcgcagtggctcaccctgtaatcccagcacttcgggaggctgaagcgggcagatcacctgagcttgggagtttgagaccagcctgaccaacatggagaaaccccatctctactaaaaatacaaaattagccgggtgtggtggtgcatgcctgtaatcccagctactcgggaggctgaggcaggagaatcgcttgaacccgggaagcagaggttgcggtgagccaagatcgtgtcattgcactccagcctgggcaacaggaacgaaactctgtctcaaaaaacagaaaaaaaatcaaaagcaagttagttatttcctagatacagtggggtacagacattgggtaaagacaaccattccaaatgggagaaattggccaaacaaaggagttatagggcccatgcaagtctgaaatccagtggggcagtcaaatcctaaagctccaaaattatctcctttgacttcatgtctcaaatccagctcatgctgatgcaagaggtgggttcctatggtcttgggcagctccgcccctgtggctttgcagggtacagcctccctcctggttgccttcgtgggctggtgttgag

SEQ ID NO: 1562908 - DNA, 4001 bp, Homo sapiens
aggaactgggtaactctgccctgtccctgagctctgggccctcgctgcctgccaccaacctggtgtcacagtcacagtgggagatggtgtggaatcggtagtttcggatgccatagttgtactgcaagggtgagatgttctgtgggcagcggtcatgttcccggcaacagagatcaggtccctggaagacccctgcagggaggggaggggagagggcaccaactcagcagggtcctaggcatcatgcaccagctatgcccccctggtaggaagagggcagagacctggttctcaccccagccctgacacaaacgccatgagggtcctcagaccagtcactctcccttctgtgggactctcagagtttcaaagctggaaaagagaagccaagctgcagcctctgttgggcaactctaaatgccaggtagcccacccataaatacatggaaaggtcttcctcaggggaattggagtctgcctccagagttcccaagcccacgccccaaataaaactccaaaattatgaatgtgtgtatgatggaatggcaaacaggcagggtgcaacctttctcactggcacaaggaggtgtcgccaggatgccaacctactctgactcaggtgccaagccctcccccaaccctgcacacaaacgcacagacatctgtactgatagtgcaagaaattcatctatgtttattaccatctaaaaaatagcactctttactaagcatttcccacatgcctggcacttcccacatccaggttcacagccagccctgaaagggaggtatcaccttcattttacaggtgaggaaataagtccagagaggggaagtgacttgctcagcttgtatgtgctgagttgggatttgaacccaggcctttcgtctcagcatccattccactgggcaccccgtgcccacaaagcctcctcctgggtaatggctttttggctcagttgaccctggatcctcccccagcctgcccagtccctcggatggcatttaatgaggactcccaggtttgaataagactttccccaaccgtgacctcatttaagcaccccatgatgagattcgtgattgcccccactttacagataaggaaattgaggttcaccatggtcaagtcactcccccagggacacacagcctaggagagtaagggctggggctgaagaaaccttgcttccccgatcggaccccccagcccacacacccctcatggctcacccagctccgaggagttcccagcagaatctccaactccacaccacagtgtgccaggcatggtccatcctctcttctctcgctggtgccctccaccagggactccactctgccctgctgctcgcttcttcctggcccctgctggactctcctcaagcgctcggcatgcctcccactgactctgaagagtggccagtgctctctgcagctcgggtccgggggtgtggatgaaggagccccaggcagtctcatgagcacagagagcaccgtaggctgcggtgagctccggctcatcctcccagctacatgactgcagcctcctatgcgcatcccagcgggcatggatcagggccagtccctgagcatccttggccaggaagctcaggtaccccagtgggttgccagggacggccttggtcaagtggcaggaggtcctgtaccagcggagggcaggggagccccccagggccacccccaggaagcccagcatcccaaacagccctgcctgaacccccattctgcactggcccagtccagtcagacaaagcccctgggatgcctgcccttggtggccccaccaggcggcagctgagcagtggaacggaagcggagcccagcaggcccggtgcggcgggaccaatgaatggagctgcgggaggaggaggaaagaggctggagtatggggtgatcttgggcttgtaaccgaatccaccagccgggcaggacgctgattggctgaggagtgcacttgccagggcccacgcccccattctgcctgccttctcagcaccatccagtcacctgctgccagccctgcctagattgggactatgggagccaaagccctaagctgtgggatggggaccaggctggggctttcacatctccttgaagggaaggaaaagggttcaggagcttggaggagtcccttagaacccacccttctcacccttaccacagcggtggctgccacatccacctccatcaggctggcagggggccatgggcctctgccagggctgggtgaaggaagggctggggctctgaagctaccaccctgggagttcccaaggcttctgggaaagggagtgccacctggggtgctcccctgccaagtcctggttcttagaaaggctctcggcatactcaggggacagagccccagggctccccgcttcctaggactccaagcatgggcctggccttgcagcaaccctcctggtctgataactgggggagacgcagcgggaacaggccttgagagccacacagggcagggctgatgctctggatttgaaagaactatggtccctagagtggcagagagtggcccagggtgtatgtctgtggccacctccatccctggccacctggggggacacagcaggcatcatgtgtgcctcatgagacaggaatctctccatcaggaaggggctatacccaggtattgttcctggatcccaaagcccagcttccaaccatctagtgaggccagggtgcttacacccatagtgcagatgaagaaactgaggctcagtgagggtgggaaaacctcaggtgacaggctccagctggggagggcttagaggatgggaatgcagcgcttggggatctggatgggagtcagggctggccaggacagtgacttgtctgtcttccatctgcccattagcctgctgcttctccagcctccccctgccccaggctccatctgagtctcttccaggggatgagccccagtgaggtaaagccaggggcagagctggggaaggagagctcactgtgtggcagagggggaagggggctgcagggtgggcaggtccatctctgtagcttcagaaccagcctgggcctgtggctcaaagcatcatagctgggaacaatgaagagaagggaaagagggtagggctagtccagggaccaagcgccttcttgccagaggttgagaaagggggtgtggaatacagcgagtggtggcagaggaggtagacctggggtccccaagggcaaggatgtagctgaacaaaggtgagtccttctgtgaagagttgtgatgtttgaaaaatcatcatgctgagacttcctcccatcataggaactgccacccacctctgcccccttttccacattgctgagcccttccctgcccatcacctggggaggctgggaggtaggatacgaggagccaagctttcgaggtcagacaggtccagcttaggtttccacacagaccctaggcttggaaatcttaacttctctgagtcttagtttcctcatctgtatcatgggcataatcacagtagtcactccacaggatgttgggtaagattcccagcacagttcctggcacccaaaacaccatcactaaagcctcaggatacccctggccaggaagcagtttactcaggagaaagcaagtcccaagattttggggccacagcatctgtgatatctgagagctcgggctagatggcaactgtgggaacagtggccaggacactacctgcctgggtcactccaggcttgtccctgtccctttctgggactcagtttcccccactgtacagtgagaagtacagtggagttgaactttgaggtcttttccagtctgggtctcaaagaacatcaggctggggcttgcccaggcctcgagggagggtgtcactgagctttctgtccagactccacccaaaaacaagtcagtcagccacaagacaggctcagagtcctgccttccaccagggtgtccctcagaggccctggagcagagg

SEQ ID NO: 1562909 - DNA, 4001 bp, Homo sapiens
agagtgagactctgtctcaaaaaataaataaatcaataaataaatacttcaagtttgaaaagcctaagtttgaggtgctgagtaagcaactagatttgagtatgtcattccagggaaaggtctggactggactggggatataaatttgtgggctgacagaatagagacggcacttaaagaaataagactggatgagatcaccatccgaaaacgagaagaggcatttaagacatgaccctatcaaaatccactgtgaaagacacagaacatattctcccagggagccaccctctacaaagtgaagtttgtaacacactcttcactacggccccttactccttgcctacctacttcccccagcacacacacccaatagatgtctgcagacacacacacacacacacacacacacacacacacacacacacagagtatttaaatttctcctttctgtatctcttagtgatgtcattctgctgagtaagagggaaactcccttttggggagtctctcatgtaacaagaaagtaatccacggaaggaacaagaagtgtcctaaacagtagcaaaccttacacatcaggacaatcacacaggctctggtgtcagattccagcttcaacctcatcggtgtgacctcaagcaactcatgcgccctctttttctcatgtgaagtgagaatatcattggccacaccaagggtagcctagaacatcagacagtccgtaaatatttgttagataaacgatgactgaatgaatggtgaagagaacatatacagaagagcctgactcacaagaggtgatgaacaaacactgccaaatgatacactgaaagacaagggacctcctgctcatccttctctccttgtcttctcattctagccctttccctttccactcctttcaattctgcctatgacccaacagtaaaatcatgtatttgtacagggccatactggttataaagctttaccttctacattttctcattcaaattttgaacctcatggcagacttacgagggcaggaggtacagttcccctgtcacagatgaggaaactgagacttggacagaaaacaggttccaaactccaggcagaaactctaacaaaaacaatgcattcaaaaacaatgcattcagcccaagggtgcagcctcaacgttgccaaaccgaacctgcctgacatcctgttgggcgggtaagaggcaggtgagggaaagacccagaagctagggggaggtattcgttggggtcatgtgggtagcccattaaaaatacggccacaggtccccttgccctgtgccctccctgtcccacacccacaggcttgccccgacccagtcccatgatcaccctggtcacatgctccctgtcaccagcttccaagtcatctgtgggagcaggaggtggacacaggattaggggtgggagactctggggtggccaggctgaggggaaggagggagcatgtcgggggcaggtctggaggcacgcgagagaggaaaggcaaggaaaaaaagcagggaggaaaggcaggagaagcagggagtgagaaatgagtagaggcaccacgaaaggtggagacggacgtgaagtggggaatcaagtgagcacttagaggagcacaggaaggaaaattaggacggccaatggggcctaaagaggcactgagggtcggggaaagagaagagatggattgactcgggaagttagggatactgagggagacacacggaggagactggggttcaggggagaaactcagggtcgaagctggggtccctggggtccacaagttcgagatgagacacgggcggtctcgggatgggaattggggacgcagggggatgaaaagatggaaggtgggggcactcagggagtcacataagggttaatggaggacatgcctcagaatcggagacacgaggaatatccaaaggagggtccggcggagacttgggagtccggagcgccgaggaagttggggaacggacccccaggccccgcccacccgcgaggtcactcacctcggcttactcagcacttctacttcctcctacttccgcaaacaaacgggcctcgggccacgtgatggcctgaccaccgctctccgccaatcactggtggccctgtcccaggcctcctctaggctccgcccccgcgcccgaggacggcgggaggcggggtccgccattttttttaactgcccaatggaaggggctcccttagccaggaggacgagctttcggcgggagccaatcctcggcggcgaggcgcggccatgtttgtgcggggcagaaggtgcccggcttcttggcagtcctgttgatgagggccaggagtcctaccctagtccgccttccgcctcctaaagcgaccagagcctggagtctgaagttactgttaatgattgctcgtaaagataaaaataaaggcaacagaggcatagggcataacaaggaggaacctgttttgatttttgccaggtagcctcaagccagggttgccagatgtagcatataaaaaatacgggatgttaagttacatttgaatttcagctaaacagccaatacatttttttccgatagaacagaaattgattatagcttttttatttttcacaactaaggccaaattccctaggggaattaccacatgtcctttttttttttttttttgagacaagtctcgctctgtcgaccatgctggagtgcagtggcacgatctcgctcactgcaacctccgcctcccggattcaagcgattctcctgcgtcagcctcccgcgtagctgagattgcaggcgcccgccactacgcccagctaattttttgtatttttagtagagacggggtttcaccatgttggccaggctggtctcgaactcctgacctcaagtgatctgcccgcctcagcctcccgaagtgctgggattacaggcgtgagccaccacgcccggctccgaaatttttaacataagtataatatactaagtttagtattgtgttaaaaatgtgtgcattgttgtctggcaacacaccctgagccagtctcaggaaataccttagcactttcagtaggaacttgggcaaatgatctctgtgaacctcagacccatcatccaggaagtgggcacagtaatacaagattgttgtaatatctagaagtaaattggtccccattcgtgcacatagtgggatttcaataaatggcagttgttagggttaataatgccgataatgaggtattttgcagagaagccaggagactagactttagtcacacatctgcttcggactgagcaggtcatgtcctctcttcagcccactggcttggttggaccttttctttccctaataatcacccaaccctaggtctagatgaatctgccagactgctctccatttacgtgggaagtatagttgcgggtgtcattcttgtgaaaagaagcgtgtaggccgggtgcggtggctcacgcctataatcccagcagtttgggaggctgaggcgggtggatcacttgaggtcaggagtttgagaccagcctgaccaacatggtgaaaccccatctctactaaaaatacaaataattagctgggtgtgctggccatagtctgtagtcccagctgctcaggaggctgaggcaggagaattgcttgaacccaggaggcagaggttgcagtgagccaagatcatgccactgtactccagcctgggtgacagagccagactctgtctcaaaaaaaaaaaaagtgtgtttcctccttagtccgtctaaagatattagtgcctagacagggcagccaatgcaacttgcgcaaggtttagttaagaatcttcacaggttaatgaaattaaccatcttaactaatatctgtacagagctttaccagttacaaagtgacttcacttccatcatatcctcgtgtccccattttacaggtgaggaaattgttccttaaagtaagatttaaaatttgcttaagagtttcagcttgact

SEQ ID NO: 1562910 - DNA, 4001 bp, Homo sapiens
tgctgagtaagcaactagatttgagtatgtcattccagggaaaggtctggactggactggggatataaatttgtgggctgacagaatagagacggcacttaaagaaataagactggatgagatcaccatccgaaaacgagaagaggcatttaagacatgaccctatcaaaatccactgtgaaagacacagaacatattctcccagggagccaccctctacaaagtgaagtttgtaacacactcttcactacggccccttactccttgcctacctacttcccccagcacacacacccaatagatgtctgcagacacacacacacacacacacacacacacacacacacacacacagagtatttaaatttctcctttctgtatctcttagtgatgtcattctgctgagtaagagggaaactcccttttggggagtctctcatgtaacaagaaagtaatccacggaaggaacaagaagtgtcctaaacagtagcaaaccttacacatcaggacaatcacacaggctctggtgtcagattccagcttcaacctcatcggtgtgacctcaagcaactcatgcgccctctttttctcatgtgaagtgagaatatcattggccacaccaagggtagcctagaacatcagacagtccgtaaatatttgttagataaacgatgactgaatgaatggtgaagagaacatatacagaagagcctgactcacaagaggtgatgaacaaacactgccaaatgatacactgaaagacaagggacctcctgctcatccttctctccttgtcttctcattctagccctttccctttccactcctttcaattctgcctatgacccaacagtaaaatcatgtatttgtacagggccatactggttataaagctttaccttctacattttctcattcaaattttgaacctcatggcagacttacgagggcaggaggtacagttcccctgtcacagatgaggaaactgagacttggacagaaaacaggttccaaactccaggcagaaactctaacaaaaacaatgcattcaaaaacaatgcattcagcccaagggtgcagcctcaacgttgccaaaccgaacctgcctgacatcctgttgggcgggtaagaggcaggtgagggaaagacccagaagctagggggaggtattcgttggggtcatgtgggtagcccattaaaaatacggccacaggtccccttgccctgtgccctccctgtcccacacccacaggcttgccccgacccagtcccatgatcaccctggtcacatgctccctgtcaccagcttccaagtcatctgtgggagcaggaggtggacacaggattaggggtgggagactctggggtggccaggctgaggggaaggagggagcatgtcgggggcaggtctggaggcacgcgagagaggaaaggcaaggaaaaaaagcagggaggaaaggcaggagaagcagggagtgagaaatgagtagaggcaccacgaaaggtggagacggacgtgaagtggggaatcaagtgagcacttagaggagcacaggaaggaaaattaggacggccaatggggcctaaagaggcactgagggtcggggaaagagaagagatggattgactcgggaagttagggatactgagggagacacacggaggagactggggttcaggggagaaactcagggtcgaagctggggtccctggggtccacaagttcgagatgagacacgggcggtctcgggatgggaattggggacgcagggggatgaaaagatggaaggtgggggcactcagggagtcacataagggttaatggaggacatgcctcagaatcggagacacgaggaatatccaaaggagggtccggcggagacttgggagtccggagcgccgaggaagttggggaacggacccccaggccccgcccacccgcgaggtcactcacctcggcttactcagcacttctacttcctcctacttccgcaaacaaacgggcctcgggccacgtgatggcctgaccaccgctctccgccaatcactggtggccctgtcccaggcctcctctaggctccgcccccgcgcccgaggacggcgggaggcggggtccgccattttttttaactgcccaatggaaggggctcccttagccaggaggacgagctttcggcgggagccaatcctcggcggcgaggcgcggccatgtttgtgcggggcagaaggtgcccggcttcttggcagtcctgttgatgagggccaggagtcctaccctagtccgccttccgcctcctaaagcgaccagagcctggagtctgaagttactgttaatgattgctcgtaaagataaaaataaaggcaacagaggcatagggcataacaaggaggaacctgttttgatttttgccaggtagcctcaagccagggttgccagatgtagcatataaaaaatacgggatgttaagttacatttgaatttcagctaaacagccaatacatttttttccgatagaacagaaattgattatagcttttttatttttcacaactaaggccaaattccctaggggaattaccacatgtcctttttttttttttttttgagacaagtctcgctctgtcgaccatgctggagtgcagtggcacgatctcgctcactgcaacctccgcctcccggattcaagcgattctcctgcgtcagcctcccgcgtagctgagattgcaggcgcccgccactacgcccagctaattttttgtatttttagtagagacggggtttcaccatgttggccaggctggtctcgaactcctgacctcaagtgatctgcccgcctcagcctcccgaagtgctgggattacaggcgtgagccaccacgcccggctccgaaatttttaacataagtataatatactaagtttagtattgtgttaaaaatgtgtgcattgttgtctggcaacacaccctgagccagtctcaggaaataccttagcactttcagtaggaacttgggcaaatgatctctgtgaacctcagacccatcatccaggaagtgggcacagtaatacaagattgttgtaatatctagaagtaaattggtccccattcgtgcacatagtgggatttcaataaatggcagttgttagggttaataatgccgataatgaggtattttgcagagaagccaggagactagactttagtcacacatctgcttcggactgagcaggtcatgtcctctcttcagcccactggcttggttggaccttttctttccctaataatcacccaaccctaggtctagatgaatctgccagactgctctccatttacgtgggaagtatagttgcgggtgtcattcttgtgaaaagaagcgtgtaggccgggtgcggtggctcacgcctataatcccagcagtttgggaggctgaggcgggtggatcacttgaggtcaggagtttgagaccagcctgaccaacatggtgaaaccccatctctactaaaaatacaaataattagctgggtgtgctggccatagtctgtagtcccagctgctcaggaggctgaggcaggagaattgcttgaacccaggaggcagaggttgcagtgagccaagatcatgccactgtactccagcctgggtgacagagccagactctgtctcaaaaaaaaaaaaagtgtgtttcctccttagtccgtctaaagatattagtgcctagacagggcagccaatgcaacttgcgcaaggtttagttaagaatcttcacaggttaatgaaattaaccatcttaactaatatctgtacagagctttaccagttacaaagtgacttcacttccatcatatcctcgtgtccccattttacaggtgaggaaattgttccttaaagtaagatttaaaatttgcttaagagtttcagcttgactgcgcacagtggctcacgcctgtaatcccaacactttgggaggccgaggtgggcagatcacttgagctcaggagtt

SEQ ID NO: 1562911 - DNA, 4001 bp, Homo sapiens
cttggagggaggctggtccgttagtcaggagctgaatagggagtccgttggggcaggagggccccctgagggaaaccccagtgccctccctagcagcctagcctcgctcctgcctgctcctccctggcacgcacaggtcactggcacagggtgtgtccctgaacttgggcctggagggtacctcagaggctcttcagaccaccattgagacttctcggggcgagggggtccctgggtggggcgagggggtccctgggtgggcccagagctcctcctgttccatggtctcccccagaggggcttgggcccactgcaggctcagcagggcctgctggggccaaccttggggctttctccaacccaaaggtgacgcatcttctccccgcccagtctgggcagctgcagtagaaagtggcagagctgcccggacttgcccgtcctcctcctggggccctcaacccacgtcccggaagtggatccttctcccacgctgcagcctcccgcttcgggtgactggacacggctggatgatccaaaataattctttcttggcaggcagccggtgggggagggggactcacattccaaacccttgtttttctcagtaacttccctcctctactggggcaaggaacccctggccagacctcaggcctcccagaccccccgggacagaggtgggccccccataggtaccgtgggaggactcagatgtgccaggcccacctgcttgcttctcagtcggctctggggatttctatgcaacatgcaaaaagctgactcgccacaaacctatgcctgctggccctgccctccgggagaccctcacctctggacaggaaagggagggctcctcccaccagctgttcagctgttccgtgccagggtcatctgggcatggggcaggctgagagcccccacttcccggcagcctcgctctcccacccgcaaagggctcctgaggaagctcaactttaaagcctcacaggctgcgccgaacctccaagcaagggccgaagtcagacattaagtggggagggcgggggggtccagggaaggtggggcacagggagccctccaggccgccgggatctgccgggtttggggcccaccctcaccctcaccctcaccctcaccctcaccctcaccctcaccctcaccccctgtcctgactctgccacagcccacagtgggcagacggacccctttcttcctttcccagggagcttcgggaagagaaatcaagggcctggcaggaagccccagggcgtccgggctctgagacccccagatgacagggggaggcgggctccccagatctgccgaatagcccgaccaggggcgctggcagggcaggggcttcctgcaggagcagggtgcggaggggcagggtcagcaggggacaggcagggctcgcgcccccgcttctgagactttctgtgtctcggggtgtccacccagacgccactctgggaaccgcgaggaggcccaggcagtggggtctcgccaggtgcgggtgctctccgccctggtccccccgcgccaagcaggccccagggggtgcggggacggcccccgggagctcgggcaaatccaggctcctgtgccgctgagcctggggccggcccggagcgcccgcaccgcgagaccatctccgctcggcgcacggagctcggcggctgaagagtgagaggcaggcgcggaggagggatccgacgcggctccggagggacgcgcagcccccgccgccgggcccgtcccccgagtcaacaccgggaagggagtggggcggcagcggcccgggcctcgccggatggaccgacggacggggcccaggccccgggagccctccgcggagccgcagccgccgcaggtccccgggccccagcgcggcaggcccgggcggagcggcgctgacggcgaagccccccccacgcccagcgagacgtcccccgcagcccagtcccccgagctcggtacctgcacgtccgccgccaaggctcgatggcgcccgggccgcgctcggcgctgcgctctggcccgcgctgctgccatggagacggggcctttgtgtggccgaggaggggccggagcgcgcgggagctgccggccccgcccccgacgagggagaggaggggagggcggggagaacaggagaaggggggagagggagagggaaagcggagggggagaaggagggggagggggaggggggagagggggaggggggagagggggagggggaagagggggagggggagagggggagggggaagagggggagggggaggggagggggagcaggagcggggaggagagggcagaagagaaccggagaggaggggaggggacgggaggggaggggctgggcctgcgctccccgcgccccccacttctcccctgcccagcggccacagcattgtctggtaggttcaggcaccccagttcagacccaggttcagccagggcagcaccctgcccaccatgccgccgtccaggaagcacgagcgcccacagaggccccatggcctgagcacccccacaggaaccccgcaggtctgaggggaggccatggcttggtaccaggggagggcattatgagtgcactctcgcctggccagaggaacgtgagggtccctgccagtcttgagatgtgtgggcaccagactctcactcccagactggaagcataccagtcgctcccctgcggccttcaggggtgggggctgctgggctttggccctttcccaggggtctcaggccctcaacctcccagggtaaactgggacctggagatggcctcccagcacatccctggcctccagcagcaccttgggatgctgcacccgggaccccacctggtccttcagggccaggaggtgggcgggccgagacctctttctgggggttctggtttctgggacagagctggccccacttctggcatcccaggtcccaagtcctggcctcagtgctcctagtgtcccctgggcttgagaagaggtggtgaaccgtctgcagggccagaccttggagcacgcctccactgccctcccggaactggatgtgctgagcaggagacagaagcattccccaagctcttgcccccaccctgggtcacccctccctggggcccgccttccacccagacctgccccgtccttgcagctggtcagcttcctcctgtccccagccaggcatcccctcctcctctgcttcccccacccgggatccgccccgccacatcctgacaaactcccccagcctgacttagttctttcagtctctgccttctcccaccctcaagcagccaggccttgttcctgtccaaaatcttcccttgggccttgaaccacaatccacatcacggcaaccctacccttcactgcagaggaccccaaaattaccaggttctgacaaggttgccaactttttatcaaaaaaggaaaagacaaggtccagtcacaaaaggacattttaataccaaaactgtgggaaggccactgttctagactaaaagggagtctttaaatagccagcaggaagcttgagggtgagcagctgtccttcctgtccctgagcaggccccctgtgtgcaccctcagccccgagccccactccagacctgctcccagcccttcccaccctctaggttctgtggtccctgtccttcgggaggcctgtgaccacagcagtcctcaccctcgccaactaagttctgcccagcaagccctcttgcctgcgggggctggcactctggccaggggtagagctgtctggaccttcctgcctcttcactgactgcccctggcctggagtgcgtggggcggggagggccatggcctagccctggacagaggctcagccaactcagagcggccctgacactgggggggccacaagaggcatccggacagatggagctggcaggtctccacgcccagcccccacccatccaccccaggccacattccaccccaggcctcttctgcacaggtggg

SEQ ID NO: 1562912 - DNA, 4001 bp, Homo sapiens
tgtgctcatgaaaatgtgtacgattaaaaattaactttcaaaaggcactaagcacagaggctggcccgtagacaaattaataggctgttcttattcaggttgttatgtttgtggagcaaaaggtcagagggaggagtcagaactgtgcctaggccctgccacttttgttccagttcttttattcatttatttgtttgtttgagacggagtttcactcttgttgcccaggctggagtgcaatggcacaatcttggctcactgcaacctccacctcctgggttcaatcgattctcctgcctctgcctccccagtagctgggactacaggcacacgacaccacgcccatctactttttgttttgttttgttttgagactgagtctccctctgtcgcccaggctgtagtgcaatggcacattctcggctcactgcaacttctgcctctcgggttcaagtgattctcctgcctcagcctcccgactagctaggattacaggtgcatgccaccacgcctggctaattttttgtatttttagtagagatagggtttcacgatattggtcaggctggtcttaaactcctgacatcgtgatctgtctgcctcggcctcccaaagtgctgggattacaggcgtgagccactgaacccagcctaatttttgtatttttagtagagacggggtttcaccatgttagccagactgatctagaattcctgacctcaggtgatctgcccaccatggcctcccaaagtgctgggattacaggcgtgacccacaagcaaatggcccacctttgctccagtcctgctatcttcctcccggatccacccctgcaggaaggcctccagggcccaagccagggcaacttcaccacagaggatggggaggggcattcgggacctaagagaggaggctaagacctgggttcccatcagccactgcccagtaaagcccatcccactgctcccccacgctaggagacctgttggttggtccttgaggcccccagactggagggtgggttacccacagggagggcatgaatgaagcctgcttactgatgcatccagctggtgagggggcttttggggactcactcacaatgagacccaatgggagaaaaactgagcagaggtaagaggctcaacacagcgagagtctttagaagaaaactagactcttaccctcactattcctcagtgtcctcacagcaaacaggctaggcctggagcctctcacatccgggtgggtagagctcataaacgaatttgaaaagaagccctctctgctccacgactgggggtggaaggtaaagtgggtgatggggcttcagaaactagacccagtcccaggcctgcaaaggtcggggtgggaagactccgagacgccctgtctcccaccagatgatgactgacgcttggctgtgtgcttgtgtgcctggaaccccggttcagaagccagctccgaccactggtgtgtcgtagggctgaactagggtgggatccccagctcaggaggcgggggcgtccgtgagccaggccttagcggcgtgtgacagcctccggggagggagggagctaggcccctgctcgcagcctcctccctccagtactggatccaaccccagcactcccaagcagaacacaggcaaggacgctgcggggtcagtgacgtgagggccaggtcccctcactcccggtgggtggccccggatgtcagggggccgggtaccgccgcatcccacactcggtccccgggtgtccacggtcacgctgctgcagaccccacactcagcctcgggggtgtccgcgtgacactcccggtgggagcttccaatcttcagggtcctacctggcgagccggcgtgagggtcccgtccacgtcaaacaggcagaggacgcgctccttcctgcgggctgcctgggcggtgactgccatggctgcaggtccgcgcgcggggcggagtcccgaagatgcaacggcagaagcagctcagggataagtgctgacggggcggggcattagggggcgggggccagtggactgcctgattggccaaatgaagaaggggcgtggtctaggcgggcggaagcgggggcggggcctgagctgattctcattgctcgtggaggaggggagcgcggcatagggcggagcggagccctccaggttcgattggattgctccaaacaaggcggaggaggggcctgagcctgggacccgcaggaagtgagagggtgaacccggaagacaggggcggggccagaattggcgggttgatagtgattgcaacaggccgattaaggggctgggtcgggcggggcctctaccatgcagtgcagtgtctagtgggccaggcgggactaagagagccgaggtcgctccccatccactctcacaaggtttgtggccatctctttgccttacaaattttgagctgtaggaaatctcctgagccgggcgcggtggttcacgcctgtaatcccagcagtttgggacgtcgaggcgggcggatcaccggaggtcgggagttcgagaccagcctgaccaacatggagaaacctcgtctctactaaaaatacaaaattagccaggcgtggtggcgcatgcctgtaatctcagctactcaggaggctgaggcaggagaatcgcttgattccaaagaagccagaggttgcggtgagccgagatcgcgccattgcactccagcctcaaaaaaaaaaaaaaaaaaaaaaaaggaaagaaaagaaaagaaaagaaatctcctgaaggcctttgttcaggctttggactttgccaaattgccttccccgagccttattccttctgtccacacataagacccagctctcagggtctacctgcttggagaccttcccagattcttcttttttttttttttttttgagacagagtctcgctctgcccaggctggagtgcagtggcgggatctctgcccactgcaacctccacctcccaggttcaagcggttctcatgcctcagcctcccgagtagctgggactgcaggcgtgtgccaccatgcccacctaatttttgtatttttacttacttttatgtttattttattttatttttgacacagggcgatttatttatttatttatttattttttgagactgggtctcactctgttactcaggttggagtgcagtggcatgatctcggctcactgcaacctccgcctcccaggttcaagtgattctcctgcctcagcctcctgagtagctgaaactacagaagtgcgccaccacgcccggctaattttttttttttttctgagacggagttttgctcttgttgcccaggctggagtgcaatggcacgatttcagctcaccacaacctctgcctcccgagtagctgggattattttgtacccactaccacgctcggctaattttttatttttagtagtaattttgtattttcaccatgttagccaggctggtctcgaactcctggcctcaggtgatctgcctgcctcagcctcccaaagtgctgggaatacaggcatgagccaccgttcccagccaaccttcccagattcgattcacaattatttaaccattgcgttgactttggagtcacttccaggttgccttcccagctccaccactatgggaccttggacaagtcacttcacctctcagaggctttgtgtcttcacctataaaatgggatgaacaccacctgctttgtaggtttgcttttcacatgaaaataagtaacaggctgggcgcggtggctcacgcctgtaatcccaacactttgggaggccgggatgggcagatcacctgaggtcatgagtttgagaccagcctggccaacatggggaaagtccgtctctactaaaaatacaaaaattagccgggcatggtggcaggagcctgtaatcccagctacttgggaggctgaggcggaagaatcacttgaacctggaaggcggtggttgcagtgagccgagatgatgccactgcgc

SEQ ID NO: 1562913 - DNA, 4001 bp, Homo sapiens
gtggcggtctaatcctcctggaggccacatttcgtgccctttgctcctctccccctggcttaggggaaggcagacagccaggactgtctaatccctaatccccacctcccagtcagcccaggggctgcccactgctcctacccaatggcagggcttcctctgcccgcttcctcaccactgaacagtcactccctgctggctctggcaggcagggcaaagagtccattgttaaggaagcccagataaaagggggctaatgggggcataatctcctgcctggggacgtctgggtgtcaatagcttcacaatgctacttgccccagcccctgcctactggctcacaaccccctcctcgcctccaggactgtggcacacaaattcccaggaagcataccacaccccagtagttccagctagtgagaaacaaaccctccgtctgcacccccaccacacacacacaggtacccacatggacaaatatttcattaggacaagattcaaatgtacggaatctcatttccaggagtactgagccggagaggggagggtgggcctaggtcagtggaaactagagaagaggatgggattggggggtgtccagggatgcactccagcccccaggaagggtcccaaacactggaggaggaggaggaggaggaaacaactttcctctttcaaggtacccctccccactagactccagttagcctgccctggaggatgcccagggttgcccttctgggaggctacccagcccccagaaggctgggctgcgacccagagagcgtaggcagcagggagcagtggctcacgcctgtaaccccagcattctgggaggccgaggtgggcagatcacgaggtcaggagatcgagaccatcctggctaacacggtgaaaccccgtctctactaaaaaatacaaaaaattagccgggcttggtggctggcgcctgtagtcccagctactcgggaggctgaggcaggagaatggcgtgaacctgggaggtggagcttgcagtgagttgagatcacgccactgcactccagcctgggcgactgagcgaaactccgtctcaaaaaaaaaaaaagaaaaaaagaaaagaaaagcgcaggcgcggggtgtcttgagtccctcaatccccagagggaaggagcccaccgtgggggaccggccaaagccccactctttgtccggcccagggcaaatcggcccctcggcagctcagcccgtccagcccctcccgagaggacacaggggacccggagtccgcaggggccagcactaccctccgccccgggtcccgctccctactccccgtcgctccgagacgctccgactctcagtccggaggtgagggtctcccttcatgcacgggcgcctgatgggggtaggggtggggacgcacgagagtcccaggcttcggcccggaccgctcggggttccaacgcccccttcccgggcccaggaacagcgcccccgcaggaagcatctgcctcggagggggccctcgggatgcaccccgccgtgtccgcgtccgatgcccgctcctccagggccccgcgacccctggggatcccccgctccccggcctagggggcacccactccgcacgtggagcccgggcagcgtccccagacgcacccagcgggataccggagaggacgccgacgcagtgcaacgccccggccgaagcgccgaacaacatgcgcgcgtcgcggaggaggtgcggggcgtgctcgctcaggcagcgggtcgccccgacgtggtagaagcccaggaagccgcagcccgcgaaggacaagctccagccgcgctctgcgtcgtacatggcggcggcggcggggcgggggcgcgggttaggatctgggtcgggatcgggaatcggctcgggtcctgatccgcagcagctccgcccggcgcccgcaagcgctctctaccctgcctcagtgtctcggccagggcattcccagcgcgacgtcagccccgcccccctcggaccatgcaaatgagccggcgggaggcccaatgagcgggcaggacgccctcccgggcggggcttggagggggatgggggtggggacgacgtctggcgggggatgggggcggggaccgggtctgggagggggattgggggcgggggctgggagggcgatggcggaggacctgtgcgggggggtccagcctgggagctccccgcagcgactcgagagaaagcatttttccaaaactccagcagacactgcatgtcctggagagaaacggcttccttctgttttccttgacatctgttaagtcggggggtgggaggggagtcgcagttggtgcccacttgatccttaacatcactttaacactttatcacgtcccttttgacccggggagagccagcctaaagcaggcaccaccacctgaagagtctactctctgcgttgttgcaggctttctgtatgattgccttcaagtgctggggatttttttcattgaatgaaagtaacaggaagtgtccatttcaaagtttcctttgtaagtaaaaaatgtgaatgacgggtgctggggctggggtcggggccctgtaggaactggggagtggggagtgctttgggaagctgaggcctggatgattcctggtcccttagtcccttagtccgttcaggtgcgaaaacaaaacaccttaaagcggaggggcttacaaacaagagatttatttctatctttttccccccaggctggagtgcaatggcacgatcttggcccactgcagcctcttcctcccgggttcaagggattctcctgcctcagcctcacgagtagctgggattacaagcatgcgccaccatgcctgactaattttttgtatttttagtagagatggggtttcaccatgttggccaggctagtctagaactcctgacctcaagtcatcacccacctcagcctcccaaaatgctgggattacaggggtgagccacttcgcctggcttatttctctgtctcacagttctggaggctggaaagcccaagttcaagataccagcagatttggtccctggtgagaggtatggctcgtagaaggtgccatcttgccacatcctcacctctgggcctctttgataagggcaccaatcccattcataagggtgccaccctctcatcaaatcaccttccaaaggcccccgcctccaaagatcatcaccttaaggtgtaggatttcaacagatgacctttagtggggacacaaacatttggatagtagcatgcccttaggagatgcctaagaggccccttgaccttgacctacccctggcactgggtggagcaagcccacagcagtacatggagccaagttagaccttggtccagagctcctcactggaggaccctggtctgccgggccatagcgcccccagctggagtggaccaggaagccctcccccttctccgtgagacctggaggaatgcagagtatgtgagctttggggtcaggcctctgccctctttgtggctcagtgtcctcaactgcagaatgactggtggtgttgtaaaacaggtgacattgctgtcaggattccaaatgtcacctgagaagcacctggattggttgggtggttcatgttcaactgagcttccccattctgctgcagtccttgcttttgccttgcctggaggggtaggggagctgggagcagggctgcctcctttctctgggcaggaatcccagggcatgggagcttcaggccttagtgaatacctgggctgactgcctcatcacatagacactttgtagatggaggcccagagcaaggcagggtcaggtcctaagtcccggggaaggtcaggagagctgagaagcagacagggggtcccatctattcctgacgtgttggctttgctggagaggggcattacctacagtcctgccctaactgccctccacccccacctcacgctcagggctgcggcggaactgaggcttctggaggggacagctggggtcagaacct

SEQ ID NO: 1562914 - DNA, 4001 bp, Homo sapiens
caagctctccaagggaagcagggattggagcacctctgtcttgacacccacctcctctttctgtgggtgtgcagggaaggaggccaggtgcaggctcctgaggaagccagccggggaccccaaagagtggcccagactccttgcctgtgtagcagttgggatggggcctggcacatagtaggtgctcagtacacattagctgccgtgactgttatcagtctgtgggaacaaaactgtcacctgcatctccatctggtcagggccaggatgggttctgcacctcccagagagagttgggacgtttccaagggttccatgagacaaagtcctatattcaaaagtttgcaagctctgggttggtggttctcaactaggagtgattttctcccctacaggacacctaacaatgtcagagacatttttggttgtcacactgtgtgcctgcacttgagcgtgcgcgtacacactattggcaaataatagtgtcagggtgtatgtgaagcatcttttttagacatcctatttcatttcaatactggatggttccttacctccttacttggagatgagttcattatcgataccgcctgccccccagaaccactgagcatagaagccccaggaaggcaagggtttctgtctgttttgctccctgttacagtcacagtgcctagaatagtgactggcacataataggtgttcaataaatgtcaacccaccgccaaaaagcggcgggaggatggagtggggtggaggctggggctagccagctgccctctggaaagagcagtccctgtgggggccctgactcagcagcctgactctgccgggccccagccagacccttctgtgtgcagcaacctggaaagtctccagacccaccctgccgaccctctctgggcctcagtttcctcacctacaaacaggtccacccgccctccctccttccgcccctgcagaaacgtctgacggggaagtacctggatgtcactctggactagatggagcccgcccaccagccaagccctgggcaccccccgccccacacctggatgagctcatcgcaggtggcgaagtcagtgaccaagaagttgcgtccgtcaggccagcgggtcagcgaaatgcccagccgctgggaggccaggacgtgggcgtcggggggcagagcatcctgcagctgctgcttgacgtgctcgatgggcgcgtaggccgggtgcaggatgcttaggctcagccgctccaactgcccaaccatgcccaggaggtgggagcagcagaagtctgcagtgggggcagggaaagggagacctcagcgcccagggatcctgccagtccctccacacccccactgccctcctaggtgcagtgggagcggggtcctccccactccagctcagaatttctgggctcggccccggattcaaatgatccgttcaccttttcactttttgccccgccgacctgggaaacagagtttctggctctgagccacgatccctcctctgcaaatgggggtcacctagtccccagcactcggtgttctcatgggattaaatgaggctgtgccgggggtagagggcgcagagcacagcgccaggcaccagcgtctctgggctcgatccgctttcattaagctgtccccgccccttttcgcccccgcggtccgggactcaccgaccgacttgccgcagacgatgctgactgcgttgagcgccccagacgaggaaccgtagatgcggcgggcgccctggaggaggcgcggggctcgctggcgcaggcattcggtggcgcccacgtggtgggcgcccaggtagccggcgccggagaaggacaggttccatctgccctcctcctctaagaagcccatggcgggtggaccgggcggggtgatcgggacgaggaagggtcactccgtgacccgggatagggccgggatgcagccttggacggggctgggcccaaatgtgggctctggagggagccgggctggggctggtgctggtgctccctgcgccgcccccgggctgcgtcacctgcgccccagccaatgaagtccccgggtcgcgatcagcccccactccagttgtgcgccaggtgtgccccagaagtgcccgcgcgctgtgtatacgctggcgccgcccccacgcgcccgccccggatccgcatcgggtcatagatttctgggtgacacggcaggggagtgggaccaaatcttgcctgatctctggtagtctgggcagatgttattccagtcctcattacgcaaatgaggcaactgaggcgcagcccaggatggtgacagccaggaagtggcagagtcggacccaggacacctggtctttggggtcaaaccaggcttaagtccgcagctgtgctggttccagggagggacttgagggaaagagaggtctcggggccagcctccgctccagccagcaccactgcaccttcccctggctcacccgctctccaagcctcacctaccactacagcctgctcaaacatcccacctcctccctcctcccctaatcaatccattggaaagtgctttataaactgcaaagctccaagaacttgggtttgtagtgattagggctgtctgggctccaattctggctccagaatgtcttggctggtgaccctggataatttaactgatctgtgcctcagttttctcatccatcaagtggggataataacattacttactccataggaccggtaaggattagagttaatgcaagtaacgtgtttggaatagcgcccggcactggataagcacacaaacaatggttactacggtgattgttttaatcaagtggcgcacaatcaatggcaaccgctatgttatttatttatttatttaattttgaggcagagtctcactctgtcacccaggctggggtgcagtggcacaatctcggcttactgcaaccaccacctcccaggttcaagcaattatcctgcctcagcctcccaagtagctgggactacaggcacgcaccaccacgcccagctaatttttgttattttcggtagagacagggtttcaccatgctgctcaggctggtctcgaactcctggcctcagatgatctgcccacctcagcctcccaaagtgctgggattacaggcaggagccactgcgcccatccctgtgttactgctttaatcacatggcacatatcagtgccttctcatgtgagctccttgagggccaggtcctccatctgtgcctggaagaagtgtggcacagtgtttgtggactgaatgctcagcccatggcctgggtgggtcattttcggaggaagaggtgggaggatctgcttctcttagcctcacacctacctcttccttgacctgggagtgaagggcagcttgcccatgggcactgggtgcagaaggcaccctgggacaggccagcccagcctcccctcccacagaggtgggcggtaccgggctttgctgatcccacaccaggggcggcatccttgcctcaaagaccatgggcctgcacagactcacccacctggtggcaggtaccccaggctatctccattgcgggaaggacccagccccagctgcagggggtaattagaagccatgtgctgactctgctccaggagggaaccaggtcacagcaggcacagccaggaacatttcacccacagttgtgactgtgccggaggcagactgagcctccctggaacagtggaccaccagtgtgagttcaggaagggaggagttcaggggctgggagttcagcagggacatgttccggaggtttcggagaaaaagcaaggtttgagcaggaccttggaggtcgatcaagggttcaccacggggagaaagggagatgggcacagagggaagagtttgagcaaaggcaccaggcagggaggagtagggaggagtgagaagccagccagcgggagagagcagtcatggcggtgagggcaggtggtgcggggctgtgggaggaagcgtaaggcctggagccag

SEQ ID NO: 1562915 - DNA, 4001 bp, Homo sapiens
atccagctgcaaggcccctgttcctgtggatccacacataaccaccccccattcctgcagccccacctactgcccaacacaaaactctgcacacactaaaaccaaaaacatagagatcaaatagactacagtgcagtccacctgcagtcagaaactggcggagtgacctcagagagagaagaacctggggtggatcattctgtcgtttccaaaggaacctacaaaacgtggatggacttagaagtggccagaggagccagcaccagcttcacatcagtcactagatggagatctgagagagctttcacagtcagtagttgaggaaacaaatactaatgtgtgcccgttacgaaccacaagccaggtaagtgctggctgcgaattatgaggtggtggtggcagttgtagttgatacaagtgtccaggatggggaaggaggtgagggatacatttcagacatcaagagaaaaacctaaccacaggcatacgggtggtattaataaacatctgcggaatggccgggccggtggctcacgcctgtaatcccagcactttaggaggccgaggcgggaggatcacctgaggtcaggagttcgaaaccagcctgaccaacacagtgaaacttccatctctactaaaaatacaaaaattagccgggcgtggtggtgcacacctgtagtccctgctacttgggaggctgaggcaggagaatcgctggaaccggggaggcggaggttgcagtgagccgagatggcaccactgcactccagcctgggcgacagagcaacaccccgtctcaaaaaaaacataaaaataaaaataaacatctgctgagagaacaaatgtctgagaaaacaatatctaacatatttacatcctggctatttacaaagacatttaaacttaatgtgtgttgggaaactattgggcaaagttctcacttcttcatacagatgaactcagctcacgaaggcttgaaatgactaacaacatttaagggtctaggggaagtttgggagacatgactgcaaatcacctccatggctcctcagccagctcaagcactttcttctccctaaggaaataaccaatctcctgcccaacacaccagtttttcaagcccatgtaggaggccaactcagccagcaattaaatcgcgctcagcccgccgctcagttctccgtggcctcgggcaagtcactctaccacttccagcctcaagttccccatcagtaaaaggtgggtaacatgaatagctagcagacaacaggactgtaaaagattaaatgaggcatcgtgtatatgaaagggctcagaaaacttaaaacgccgcacaaagagaggcgagtgttaacaggggccgcgtgcagggggatttgggcttgcgcctcagcttcggcggtcggagcaagtcacttccccgctactaaacttcggttgtctcaactctaagatgggtggagaccaggcagcgccgagatcacggagcggggcccaaatgccagtccacacaggcaaggaggctgcgccgccgagaccccaggaccccggaacgcgggggccccagggggcagcccctcaggtccacgaggcggcaccctgtccccgccgcggccccgtcggcctcccagggccgccagagggactgcgcctcggccagtgggcgggcggtcggggccacggcggggacggcggcagccggccaatgaggagcgcggctgtggtcgggggcgggcgcacccggtcctccgcgtcgctcccggatcgctacctcccccgcctcgagctccactaggccgaggaccctaaaccccgaagaaaggaaaggcctctcaccgtcctttcgccgccgccccgcgcttcctgatgagttcgtccagggagatgtccgccatcttgctccgccgagcaagccgaaagcagtcgagaccccgcgagcccgccccttcggccgctagggagcgacgaactacttccggcgtccgcggaccaactctcgcgacagccagctcaaagcaggcaagaaccggaaggggcggggacgttccccgtgagccttcgcggtgctggctgctcatctgcatacggaagttcggcacattatgaattatttattttcctcgagggaaaaaattaaatgaaaagcaacaaaatacattattaacaagtgagacaaacttcaatggaactggatcatgacctcaacagtcaactacgatagtcatcatacgcctaatgagaatagaattcattacctaggaaataaactaaaaacgtccttatgccttaaacttatgagtaaggaaaataacgattcggggtgacgcccgaatcctcactgctaatgtgagacgaatttttgagcgggtaaaggtcgccctcaaggtgacccgcctactttgcgggatgcctgggagttgcgatctgcccgaccttattcacgcctaaaaagtagactgactgtggggtggtcgtgttttttgtttcttgttggtaggtggtgaatgcgtttttttcgttgttttctccgttactcaggctgccagttgcttggcagtcttgtcgctggctgtggacgctctgcacttcatcaccgtccccagctgcgctttgagccggtctaaggttgcccacagtattgacgttgggacccacgaaactggcaatttccatgtgtgcggccttacccagttctcccaaacttctgcgtataaccgcttctctgtgcttcagaaagataagtccggccccggcctcacacagcagctcagttcgtgacagcgtttaatatgtaaaatggagcaaataatttatagggcgttgggagagttaaagagactaattcatttacgtgttaaatacagggaatggcttttgcattgatataaccccagcctccagcatgcgccagacctgacgtaggtgttcggcacatattttgtccaatcactctaaaaatacactccatgcccttagaacaggtggggttatgtcctcttggccatcaggcatcaggagctccgtgcagaaactgggtaagaggccaggagcggtggctcatgtctgtaatctcagcactttgggaggctgaggcgggtggatcacctgaagtcaggaggtcgagaccagcctggccaacacggagaaaccccgtctctactgaaaaaaaaaaaaagaaagaaaaaaattagccgggcgcggtggcacggcctgaaatcccacctactcaggagcctgaggcagaagaatcgcttgaactcgggaggcggaggttgcggtgagccgagatcgcgccattgcactccagcctaggcgacagagcaagactccgtttcaaaaaaaaaaaaaaaagaaagaaagaaagaaactgggtaagagcgatcctgcaatcctcctgcctcagcctcctgagtagctgggattacaggcccgccccaccacgccgggctccttcccagacctcttttcctcacccatagaacgggaccattaagcctttcctcccttccaggcgtgccaggaggaacgcgcaagaggtgggaggaggacaggctggccagtggggtcagctgggcagtgtagggcagatgcggaggacaattttatttttatttttgagacggtgtctcgctctgtcgcccaggctggagtgcagtggcacaatctcagctcaccacagcctccgcctcccgggttcaagcgattctcctgtctcagccacccgagtagctgggattacaggcgcacgccaccacgcccggctaatttttgtatttttagtagagacgggggtttcacaatgttggccaggctggtctcgaactcctgacctcaggtgatccacctgcttcggcctcccaaagtgctgggattacaagcatgagacacagcacccggcctcctttcttgttcttttacaactcatttagagctgtgttgatttttaaaattcttcgtataggtaggtgatactgcctgtgaattctgcagcgtaaagggcc

SEQ ID NO: 1562916 - DNA, 4001 bp, Homo sapiens
ccgacttttgttccattttaccccttcaatttttccccatctgcccccaaatattgctagtactcattcatcatcactgtttccctctctactggatcattcccatcagcattttttttttttttgagacaaagtctcgctctgttgtccaggatggagtgcaatggcgtgatcttggctcactgcaacctctgcctcctgggttcaagcaattctcctgtctcagcctcccgagtagctgggattataggcacacgccaccatgcccagctaatttttgtatttttagtaaagatggggtttcaccatgttgaccaggctggtctcgaactcctggcctcaggtgatccaccctcctcggcctcccaaagtgctgggattagaggtgtaagccacagcacccggccccatcagcatttcaacatgtgcttttcctcatctaaaaaaaaaaaaaaaaaaacccttatttctcttctctctccccctatagccctaattccatggtgtcctttgaagcaaaaatgtgtgaaagagctgtccaccctcactatcttcctctcttcccattttgtcataatctcactccaaaaagcctttcaccccaacagctccatcaaaaccactttccaagctcattaatgatctccacgttgctaaatccaatggccaactctccttctcatttagcctgatctatcagctggcacattaggccacttgctctcctcacttgactccaaggacacctcaccctcttggtgttcccccacctccccggcttctcttttcccccaagcactcaatgtccaaatgccctaatgctcagccacgggtcatctcctcttctctactgacactcactgggaatggggtagcaatcccacacgtttcttatttttatcttcagactagctctctttgcacccacatatcccacaggtaatttttgggctctatctttaaaatagtaatatatccagaattcaaaaccagttctcaccacctctactcctaccaccctactataagctactgacttctctcatctagattactacaagcaggccgggcacggtggctcacgcctgtgatcccagcactttgggaggccgaggcgggtggatcacaagctcaggagttcgaggccagtctggccaacatggtgaaacccgtctctactaaaactacaagcaattagcaaggcgtggtggtgcacgcccataatcccagctagtcgggaggctgaggcaggagaatcccttgaaccccggaggtggaggctgcagtgagccgagatcgcgccactgcactccagcctgggcgacagagcaagactctgtttcaaaaaaaaaaaaaaattactgcaaaggaccgtcccagacttttatttaatgccacccggtggagctgccccagaccctcctctggagtactcctatactacatacgtctagaactggggaagctcacgcgaccaccgttacctgcttgcttgcttacttatgggcctgtgaccccttttctagaaagtgagcacgtggagaggcagggacgattgttcattcacctcaatattcccactgcatgatacagagcccggctcgctggaacatttgctgaaggacaccttttctacggatcccctctggaccctcgagcctgggccctcctgtgcctccagccggggctgtgctcctgggtcgcccgcccttcccttcctcggctccgccggccccctcaggaccccagtcccctcagacattgcccctagacgccaggctcctcagccgacccaagccttgcctcatccgccccttccaaggttgccgcaaaggccactccgctcccgcactcacttgtcctcgttgtctgacatgacaccctcgcctcagcgaccccgctgcgccccggtcccgcgcggagacccgcaaacagcgacactacgactcgcgcggctcctagcttatcttgcgcctgcgccgtaacccagaggaaatcacttccgggaggcaggacagagcggggaaagtgcgcatgcgctgactggtgtgtgcgcgtttctatagtagcgagaggcgctagctgccagctccagcagcccagatcgcgcagtatttctgcgtggcaccggtgcggatgcggctgtaaagcagtggtcaccgcctccgggagcccacttctatgtggagaggggagcacccagagagggtcttagggtgaaatttcaattttggcatatcactcagtgggtactgttgtgaccatggctgtgttaacactccctcccgaggagacttccctgccacaggcgctgggtcagaatgaggactgtgtgtgtgtatctgtgtgtctggatgggaggtttgggcactgtcgcaatattaactggcggcatcattctctggctcgatccccgcttccagacttctgggggtgttgggcgtcggggaacagagattagggacaggagacagggggtgtgtcattgcgtctttccctcctcagagtcctcccatggcttcacagaagcagatggaggtagtgaccaaaggaactgggttccggcgccgccccaagaccatcacttacaccccggggacctgcgagctgctcagaggtcagtccgttaaagcagcgatcccagcctttttggcaccagggaccggtttcgtggaagacaatttttccactgacggaggtgtggggaatggtttcgggatgaaactgttccacctcagatcatcaggtattagttagattctcataaggagcgtgcaacctagatccctcgcgtgcgcagttcacaatagggttcgcgctcctatgagaatctaaggccgtcactgacctgaaaggaggcggtgaggctcgctagcctgccgctcacctcctgctgtgcggcccggttcctaacaggccagggactggtaccagtccacggacggagggttggggacccctgagttaaaggatgagagaagaatggtggtagttaccctctgtaactcagttcccccgtacctgacctgtggcttagcactattttcctttacagataaggagcctggggttcagaaagcttcaaaattctactgcatatgccttattcgggggcggggcggggcgggggggaggggaaggttcaaggtgctacaccttgccaaaagtcaaagaactaaaatttttagagtagttaactcctatgcatcctttagatcacactttcaactttcccgaggaagacttctgctcctcaccaccacagtaggatcaactgttatgtgccctcacacattttccttcactgggcttagcacaagctgtagtcagttatttggtgtcccatctatccctccagatcatgaatttcatcaggcaggaaccgtgcctgtttcggcccacaattgtagctccagcccctgaaacatgatgaacaagtattcatgtgttcttttactcaacaacttttttgtttttttccaacaacaacatttttaagtctaccatgtgccttagactctgttttaggtgctggggatacagcagtgaaagaaaatgaggtggctcaaaccggtaatcccagcactttgggaggccaaggtgggcagatcacctgaggttaggagttcacgaccagcctgaccaacatggagaaacccagtctctactaaaagtacaaaattagccgggcgtggtggcgcatgtctgtaatcccagctacttgggaggctgaggcaggagaattccttgaacccaggaggtggagattgcagtgagctgaggtcgcgccactgcactccagcctgggcaacaagatggaagctccatctcaaaaaaaaaaaaaaaaaaaaaaaaaaaaaaaaaaagagaaagaggaaaaaatatttaacagagggcagaaattttattaaaccagcaaaaattcttatcatacagctaatatagaaggataacaataaaataaaatatatagaattttaggtggtcgtaagtgctataga

SEQ ID NO: 1562917 - DNA, 4001 bp, Homo sapiens
cacttcaccatcagatctcaccttcaaccccacctcctcaacaaagctgcaggtcccctcattccaggggacgttcctttgttccacaggtgtgtgaacacctgtccctcataacatttacctcaatttgtcaccaaacactcaactgtggacccttctcattcatatctgctttcccaccacactatagcacagagccttgtctctgtttcattcattcagtcaacaaatggccgggcacggtggctcacacctgtaattccagcactttgggaggctgaggcaggcagatcacctgaggtcagaagtttgagaccagcctggccaacatggtgaaaccccgtctctactaaaagtacaaaaattagccaggtgtggtggcaggtgcctgtaatcccagctactcaggaggctgaagcagaagaatagcttgaacctgggaggtggaggttgcagtgagccaagatcgcttcattgcaccccagcctgggcgacaagagcggcactcttgtctcacacacacaaacacaaaacagaaaattatgggacatctactcccgccaggctttggctaaatgaggggatacttcagggaagaaggcagataaggtccctgctctcaaggagagggaaaggaaaaagtctaagaaggaaagagagtgatgtgacacagaatacctggaaagggaggactgtcaaagaaacggcagtgggaagacctctcagctggtactaaggcacacaggcacagcacagagaaggcgcacaaatattggctgctggaatgaagggatgaacctcctgacagttaattctgtactactagaactctccatcttcacgaaaacaatgcattgacccgaggcgatggcgcacacctgtaatcccagcactttgggaggccgaggcggggggatcaagagatcgagaccatcctggccaaaatggtgaaaccccgtctctacgaaaaatacaaaaattagctgggggtggtggcgcgcgcctgtagttgtcccagctactcgggaggctggggcaggagaatcgcttgaacccgggaggcggaggttgcagtgagccgagatcgcgccactgcactccagcctggacgaaagagcaagactccgtctcaaaaacaaaaaacaaaacaaaacaaaacaaacaacaacaacaacaaaaacaatgcatggctggaaggacagcaatattttatccccattttaaaaatggaaactgaggcccagaaggggtcagtaacttgcctgcaattgcaaagtaatttagaattgtggaatctaacacttccagttacaactccctttttcaagcccattttcttttgatccccttcaatatctcctttcacggtgaagaaaagttctgagacattaagctgcttgcccacggccagggcttggcatgaccgaggccgggcctgcggccagtgggcggcgctcgctctcccacgccaaggcctgcccgcgagccgtgggcccagtaccttgttggccaacttcttgttcagctcctcggcaatggagtcgttgagcttcctctcaaactgccaaggggggatccggacggtgtccaccatttccaccaggacgaacatcccggcctgcgctgggggctctgggaacaggagggtcagtcacgcaccagggccgggggcagggagaatccccgagccccttggtcccgtcccagtcgctgaggcccccaggctggcggtgaggttgcacggggcggtctcgggggcccggtccgggccatgctccgctactacaacatgaggaaactgaggccagagggaggcactctccgtccacagctccgggtgcgcgcccgcgccgcgagaccccgccacgccacgccactccacgccacgccactccacgccccgcacccgcgccacgtgccgccgctcgtatcacgcaccacgcaccacgcaccgcgcacagccgctcgcgcttgcgcgactgcgggcgagattccgaatccatcgcttccggaaaactcaccaataagaaacctctgtccacccccaccccgccgaggcggggcggggctgcctgtgtgctcgcgcacagcgtggggcagagagagggcgaggagagggcggggcctcctcctttcacaggagcagagcggttcccccgcccccgacagcgctttctgttgctaggcgacctccgtgcaatcccgcctgattatccctcgcctggcctgtgctttacccgcattgctgtcctctgctcggcagccagagtgatcctttggaaacgcaaacatatattaccacatctaagttaaaaaaaaaacccaccgcaaacataacatgcttagcacccttaagtgttccggagacaaggagaattagcaggaaaggggcacttgggactgttctgagatgatggaaatgttctgtattttgttttcggtggtataacattgacgtatataattgtccaaactaattgaactcggcaagatttttgcatttatttgtagacattatgttccaattgaaaagttataataaattggaacaaaaaacacaacccattgaacttagaatactagatccaagccgggcgtggtggtgtacacccgtagtcccacctactcagaagcctgagacagcagcatcgcttgagtccaggagtttgaggttgcagtttgaggttgcatgctgcactctagcatgggtgacagtgacacctcatgtctaaacgaaaaagaagaagaaggagaggcggaagaagaagaaagaagaaggagaagaagaagaagaaagaagaaagaaaagggaaagaagaaagaaaagaagaaagaaagaagaaaagtccaaaacctttatggtagttcacacggccctgcaagatctgaccatacccccctcctatagccccatcatgctctgtctcgctgacattccagtctcattcatcttcacgtgatagcatgggctaagagaatttggtagcttacccaagatcacgtgttgacaagtggtagaggtgggcccagtctgaacctcactaccctgcctctaaaaattggtggggtgtagatgtatactgtagtgggtttttttgtttgtttgtttgtttgagacggaggatcgctctgtcgcccaggctggagtgcagtggcgcgatcttggctcactgcaagctccgcctctcgggttcacgccattctcctgccttagcctcccgagtagctgagactacaggcgcccaccatcacgcctggctaatttttcgtatttttttttagtagagacgaggtttcaccgtgttagccaggatggtctcgatctcctgacctcatgatctgcccacctcagccttccaaagtgctgggattacaggtgtgagccaccgcgcccgggcttgtagtgtgttttaaccaaaataacaatttaggtacttacaaaagatacttggggtaaatgacagaggcacttggaaatgtatggtgccttaatttgctgatttcacaagcatagtgatctctcagtgacactggctgcagtgatgctaaatgtggccttccctgcatctatgattttatttttaggtgtgcttctataggatttgaggtacttgaggacagcagcaaatgctacttcagctctttattcccacaatcccctaacacattcctaggaagcattgagtaaaggtgtttagggattaccattaattcttcctctcaaatgtttcctcttcattccactcccactgctattgcttcggttcaggccttttcttttttttttcttttgagacggaatcttgctctgtcgcccagactggagtgcagtggcatgatctcagctcaatgcaacctccacctcctgggttcaagcgattctcctgcctcagcttcccaaatagctggaattacaggtgcccaccaccacacttagctaacttttgtatttttagataagatttcaccatgttggccaggctggtttcgaactcctgacc

SEQ ID NO: 1562918 - DNA, 4001 bp, Homo sapiens
ttacctcaatttgtcaccaaacactcaactgtggacccttctcattcatatctgctttcccaccacactatagcacagagccttgtctctgtttcattcattcagtcaacaaatggccgggcacggtggctcacacctgtaattccagcactttgggaggctgaggcaggcagatcacctgaggtcagaagtttgagaccagcctggccaacatggtgaaaccccgtctctactaaaagtacaaaaattagccaggtgtggtggcaggtgcctgtaatcccagctactcaggaggctgaagcagaagaatagcttgaacctgggaggtggaggttgcagtgagccaagatcgcttcattgcaccccagcctgggcgacaagagcggcactcttgtctcacacacacaaacacaaaacagaaaattatgggacatctactcccgccaggctttggctaaatgaggggatacttcagggaagaaggcagataaggtccctgctctcaaggagagggaaaggaaaaagtctaagaaggaaagagagtgatgtgacacagaatacctggaaagggaggactgtcaaagaaacggcagtgggaagacctctcagctggtactaaggcacacaggcacagcacagagaaggcgcacaaatattggctgctggaatgaagggatgaacctcctgacagttaattctgtactactagaactctccatcttcacgaaaacaatgcattgacccgaggcgatggcgcacacctgtaatcccagcactttgggaggccgaggcggggggatcaagagatcgagaccatcctggccaaaatggtgaaaccccgtctctacgaaaaatacaaaaattagctgggggtggtggcgcgcgcctgtagttgtcccagctactcgggaggctggggcaggagaatcgcttgaacccgggaggcggaggttgcagtgagccgagatcgcgccactgcactccagcctggacgaaagagcaagactccgtctcaaaaacaaaaaacaaaacaaaacaaaacaaacaacaacaacaacaaaaacaatgcatggctggaaggacagcaatattttatccccattttaaaaatggaaactgaggcccagaaggggtcagtaacttgcctgcaattgcaaagtaatttagaattgtggaatctaacacttccagttacaactccctttttcaagcccattttcttttgatccccttcaatatctcctttcacggtgaagaaaagttctgagacattaagctgcttgcccacggccagggcttggcatgaccgaggccgggcctgcggccagtgggcggcgctcgctctcccacgccaaggcctgcccgcgagccgtgggcccagtaccttgttggccaacttcttgttcagctcctcggcaatggagtcgttgagcttcctctcaaactgccaaggggggatccggacggtgtccaccatttccaccaggacgaacatcccggcctgcgctgggggctctgggaacaggagggtcagtcacgcaccagggccgggggcagggagaatccccgagccccttggtcccgtcccagtcgctgaggcccccaggctggcggtgaggttgcacggggcggtctcgggggcccggtccgggccatgctccgctactacaacatgaggaaactgaggccagagggaggcactctccgtccacagctccgggtgcgcgcccgcgccgcgagaccccgccacgccacgccactccacgccacgccactccacgccccgcacccgcgccacgtgccgccgctcgtatcacgcaccacgcaccacgcaccgcgcacagccgctcgcgcttgcgcgactgcgggcgagattccgaatccatcgcttccggaaaactcaccaataagaaacctctgtccacccccaccccgccgaggcggggcggggctgcctgtgtgctcgcgcacagcgtggggcagagagagggcgaggagagggcggggcctcctcctttcacaggagcagagcggttcccccgcccccgacagcgctttctgttgctaggcgacctccgtgcaatcccgcctgattatccctcgcctggcctgtgctttacccgcattgctgtcctctgctcggcagccagagtgatcctttggaaacgcaaacatatattaccacatctaagttaaaaaaaaaacccaccgcaaacataacatgcttagcacccttaagtgttccggagacaaggagaattagcaggaaaggggcacttgggactgttctgagatgatggaaatgttctgtattttgttttcggtggtataacattgacgtatataattgtccaaactaattgaactcggcaagatttttgcatttatttgtagacattatgttccaattgaaaagttataataaattggaacaaaaaacacaacccattgaacttagaatactagatccaagccgggcgtggtggtgtacacccgtagtcccacctactcagaagcctgagacagcagcatcgcttgagtccaggagtttgaggttgcagtttgaggttgcatgctgcactctagcatgggtgacagtgacacctcatgtctaaacgaaaaagaagaagaaggagaggcggaagaagaagaaagaagaaggagaagaagaagaagaaagaagaaagaaaagggaaagaagaaagaaaagaagaaagaaagaagaaaagtccaaaacctttatggtagttcacacggccctgcaagatctgaccatacccccctcctatagccccatcatgctctgtctcgctgacattccagtctcattcatcttcacgtgatagcatgggctaagagaatttggtagcttacccaagatcacgtgttgacaagtggtagaggtgggcccagtctgaacctcactaccctgcctctaaaaattggtggggtgtagatgtatactgtagtgggtttttttgtttgtttgtttgtttgagacggaggatcgctctgtcgcccaggctggagtgcagtggcgcgatcttggctcactgcaagctccgcctctcgggttcacgccattctcctgccttagcctcccgagtagctgagactacaggcgcccaccatcacgcctggctaatttttcgtatttttttttagtagagacgaggtttcaccgtgttagccaggatggtctcgatctcctgacctcatgatctgcccacctcagccttccaaagtgctgggattacaggtgtgagccaccgcgcccgggcttgtagtgtgttttaaccaaaataacaatttaggtacttacaaaagatacttggggtaaatgacagaggcacttggaaatgtatggtgccttaatttgctgatttcacaagcatagtgatctctcagtgacactggctgcagtgatgctaaatgtggccttccctgcatctatgattttatttttaggtgtgcttctataggatttgaggtacttgaggacagcagcaaatgctacttcagctctttattcccacaatcccctaacacattcctaggaagcattgagtaaaggtgtttagggattaccattaattcttcctctcaaatgtttcctcttcattccactcccactgctattgcttcggttcaggccttttcttttttttttcttttgagacggaatcttgctctgtcgcccagactggagtgcagtggcatgatctcagctcaatgcaacctccacctcctgggttcaagcgattctcctgcctcagcttcccaaatagctggaattacaggtgcccaccaccacacttagctaacttttgtatttttagataagatttcaccatgttggccaggctggtttcgaactcctgacctcaggtgatcccccccatcttggcctctcaaagtgctgagattacaggcatgagccaccgtgactagccaatatctggtcatttaaaagtatgtggcggggccaggcgtggtggttc

SEQ ID NO: 1562919 - DNA, 4001 bp, Homo sapiens
caaaaaaaaaaagaaatttatatatatatatatatatatatgtatctgcatatgtaaataggcacttgtgttttcttctggtatgtttctctttttgtatatttaaaatttttaatctatactctgatttttgtgatataaacatctagctagttttctccaaaaatgaattatgaacaatccatcttttttaaataatacaaaacatcaccattatcaagcgctaaattcctacatatatttcggtatttctaaatttcctgttctgttttattcattgatgtcttttcagctgttagtaaacaatttgtggaaataaataacatgcacattttgacatctggaaaagcaagcctttgtccattctgctacaaaaaaattaacttagcacaataataaaagacagcatgtgtaatttaaaaactctaaaactgctatttttatttggcttaagtaaaagtgataaatagaaaaagctcacttttttttttttttttttttgagacggagtcttgctctgtctcccaggctctactacagtggcgtgatctcggctcactgcaagctccgcctcccaggttcacgccattctcctgcctcagcctcctgagtagctgggactacaggtgcctgccaccgcgtccagctaattttttttatattttttagtagagacggggtttcaccgtgttagcaaggatggtctcgatctcctgaccccatgatctgccctcctcagcctcccaaagtgctgggattacaggtgtgagccaccacgcccagccaaaaagctcacatcttcagaaaattcaatcttcctattcaagcacaagaaccatcttcccatttcagtttccttctaagattactcagtaaagaacatatttacatagtgtacattgatataaaatccatactggattttatttgaagaatatttagccctgaagttgatgtgttatggggcttcattcttagttctcaatatacacttttttaatgtatagaacattgttttaaaatctgtacattaaaaataatctgctgcatcgacaacgttgcgagttaaatcacttcaaaacagtctattcgtgttctaggaaggaaattatgatttgattggaaatcagctaaagttttgtttttgtgttgctgctcataaaggggcctgtgccctgaactctctgaggtttccacatccagggtggtgtgaggcctgtggaggcaagaaaaccaggctcccctcctccccggccaggagggtatgtccccatcatcctcccacatcccacctcctcccagcccaggcctggttacctcttttgcttgtccttcttgttcatgtcagtgtccttgagcatgacgatgagatcctttctggggactttaccccaccaggcagctctgtggagcttgtccagatcttctcgacggacgtggtacctcggctccatgaaagcgctgtcgtcgtagtctccccaagggcccactttgttcttgccgctccccctgcagcaggggaagcagtggcagcaccacttgcccatcttgctcctgagtgtcttcatagcagagtcgtcgtggtctccagaagtgcccacgttgctcttgccgctccccctgcagcaggggaagcagtggcagcaccacttgcccatcttgctcctgagtgtcttcatagcagaatcgtcgtggtctccagaagtgcccacgttgctcttgccgctccccctgcaccaggggaagcagtggcagcaccacttgcccatcttgctcctgagtgtcttcatagcagaatcgtcgtggtctccagaagtgcccacgttgctcttgccgctccccctgcaccaggcgaagcagtggcggcaccacttgcccatcttgcttctgagaccaaatggcttcttcacagaggaggcagccggcattgaaccagcctcagccaccatctgcttttaacagccagggaaggccggtagtagccagcagatcgcgtctaccaaccagtttcaccaactggcagataactccgggtttctaatctgtttgaagagaaaagtcccgaccaaaacctgccaaccccagcaggggagcccagcccaccccacccagggaaaacccacacccacctggggaaagcccacacccacgctgggcgaccccacgcccaccccaggaagggccaaccccaccccccaagaaaacacccggcccacccaagggaatgccaaacccagaagagaaaaggtcaagtccagcaaagtaacgtgacagaaaaaacgtcagtccaaggaagaaatgtcaatccaagcgacaaatgccaagccaagcaaagaacgcaaagccaagccaagcgctacaggccagccaagccgttacgcacgtgcagtgtgcgcatgccgactgttacagaccagccaagccgttaacgcgcgtgcagcatgcgcgtgcaagccattacaggccagccaagccattacgcacgtgcggcatgcgcgtgcaagcagttacaggccagccaaaccgttatacgcgtccggcgtgcgcgcacggcatgcacgtgcaagcccttacaagccagccaagccactgccacgcgtgtggcgtgcgcgcgcggcatgcacgtgcaagccgttacaagccagccaagccactgccgcgcgtgcggcgtgcgcgtgcggcgtgcgcgtgcggcgtgcgcgtgcggcgtgcgcgtgcggcgtgcgcgtgcggcgtgcgcgtgcggcgtgcgcgtgcggcgtgcgcatctctggtggtgtcagtacacgtggcacagacagttgcggatgcgtgcaacctgcataagtcttggaaccacaaatgtcactgacagcctggtgttcccggcaaacttcctgggagtcagccgagctttcaggccattgagaagcctctggtgaaagaaaaagcttcttgaagcaggactggggctaagtggctggaacttgaggatgctgacagcctcctctgaagaaagcccccaggacactcctggtggtgctgttgtgcatggccgctgctgcagctcagagcaccggctggcggagctggctgcaaatggcctcaaaatcacggagcatgttctcactcacaggtgggaatggaacgagaacacacggacacaggaaggggaacatcacacaccggggactgttgtgtggggggaggggggagggatagcattaggagatatacctaatgctaaatgacgagttaatgggtgcagcacaccaacatggcacatgtatacatatgtaacaaacctgcacgttatgcacatgtaccctaaaacttaaagtataataataataaaatttgaaaaaaaaaatcatggagcacaagacgcccaccgagcccagcacctgcctgaggtgccttcgatacctgctcctccttgctccacacccagaacacgaggccatcagcgagggggcatttggggccacaggatcgcagccagctcctgccccggtgccccctgcctgtccaagccagggccaacatctgtggggcttctggcctggggggctctgctccactggcatgcaatagggtcaaggtgcaggccgctgtgtccaggccagcaagagggggcttggaggagcacctaccactgatggggagatgcagaaaggcaaccccatgtgcagatcctgagaaaaagacactgagcctccctggtgctggcctctgagctggaccagggcagtggcacttcaacgctcctgccaggactctcctgctgcaaagctttatgcagccaggctccagtctgcttcacccaaaccacaggtgctttggtgtgggaggaaaaatggattctgagcctggacaccaacctgctcttaccaaaagaagtagaggaaaagccaatcacaagtgcaaaaaaaaaaaaaggtactattttgtaagtgaaatcttgcctgatatgcagggttaagctaaagctcctcttgcttgatactaaattaaattttgaa

SEQ ID NO: 1562920 - DNA, 4001 bp, Homo sapiens
tactcggtaccagtcagtgtggacatcccaagggtctagtaagcactcacgtttctcaaagttaatgtcatcaagttttaaattatacaaaacatgcctgccacgaagcaatgaagttcctagcaaaagtcacacaataactcagaacttcaaagtgaatcctaggccaggcacggtggctcacgtctgtaatcccagcactttgggaggaacaggtggatcatgaggtcaggagttcaagatcagcctggccaagatggtgaaaccccgcctctactaaaactacaaaaattagctgggcatggtggcaggcgcctgtaatcccagctactcgggaggctgaggcaagagaatcgcttgaaccccagtggcagaggttgctgtgatctgagattaggccactgcactccagcctgggcggcagagcgagactccgtctcaaaaaaaaaaaaaaaaaaaaaaaatgaatccatgcacatgtattttactttcagtctgaaaacgtatctaaccttgcatcacaaagtaataacccccagattgctggtctgtagtgcaacagaagtaaacactgaaaacacttaaatatttccatctggaaacagtaaattaaaccttctatttacctgtggtgacagcttctcagttctgagcttgtcttgccacaaactgttgagtccacagagcagacagggccctgagcttcagcctggcagtaagaaggtgaaggaggaagtgattacggttgttctctggatgccccccaactcttcaccttggaagaggaaagtcatgctgaccctgccccgcaacgacacgggtgtcgcagggtccttcccaggaaaatcccgtgtccttgccctgacccagttccccaaggcacccttatcccaaggaggctgggagaggaggggcctccctggtttcctggcaggggtcggctgaggctgacgtgggcgtgcagccccggaggtcccacgaagcccaggccattggacaactgtgggtttttcttggaaagaatcctgacacttggagcacacttcctctcttttaacttttaaaaaagacttcagaaaagcacaggcgtgcagttgtgcccggttggggtgcgtgagggggcagggccgaccctcctgacttccactggcaccaccccgcgcccctccagcttcacccgcaccacgcgggccgcgcagcccgggactccggaaagacctgggcgcccgaccctcagcggccccgaccgggagcgacgtggcgcggcttccgcagagaagccacccggcccagcgcagcctgtccggggtcgccccgccgcgttggggcacaaagtgggaaccgttcctcaaaggtggtcgcagctggaggaacaaacacgcgcgtctccgtccgacggcagaagccgggcgcacccacccagggtcggtctgtccggggcccgggtttcctcgcctcggagatccctggaggtctcggaaagcaccttctgagtcggcgacgccccagctccgctgcgccgaggaaagggcaagtcccgatgtccccgcccgtgggccctccctccgaggggacaacccgaagacccagagtcgctgcggtccccagacccgacctccgcgcagcgccaaaccccagggacagccgcggactcgggttccgggcaggcccccagcgctaggagggaggccgagctgggccccgagatccctcgcaagagtcctcggtgtgtgtcctcgctcctcgccctcaggtccccagccgcgcaccccgggcccccgggtccccgggacccggagaccccgagaccccgggccccgcgcatgcgccgcccagcccctgcccctcccccgtccgccgccctccgggtcccgggacctgggaagcccggaccgcggacccccgcgcgcgttcccgcccgcccgcccgcccgcccccgggcacctgggccgcggtccgccgcctgccggtccgtggggcgaacgccgaaggaggcggcgccgggcagggcgctagcggccgcctccgcccccgccgcccgctgcccccgccgcggggccgccgcgtccacggcccatgcccggcgccgcctccgcgcgtccgtgccagccgcgcccccgcgacacgcaccgcccctcggcccgccccctgccccggtccgcgcgagccagtgtcccgaggcccgacccggaagccccgcccgccccgcgcgccctccgggccccgggcctcggccccgggacacaccccccggagggcggcgcccgattggctgctcgcggtgggcggggccccgggagcgctcagcggctcccacctagcgccccgcggccgctgcagccaagggaaactgaggccggagaggtggagggaccgtccaaggtcaccgatgggacaccgctgagcgtcagcgcccctccagcccggcgcaccggggcggggctgaattcgaggcggggacgcgcggccgcggggcgggtggaggttcccgccgggcgcccgtgccacgctggcgagcccctcctgcctcctcgatgagcccggctctgctactctgtgcgatgagccggtctagacccgggacccgggaccgggtgcccttgaggctcagaagtgcgtagggtgggaggcggcccgggagggaccttgtccctggaaccccaggatgcaaaataaggagaaggggaaggcgagctgggaggacaaggaaacaggtggcgggaggtgccagggcggtgtggtgggcgggggaacgaggagggtgaagggcaacgcggacgggctcggggaggcgccgccagctccgaccccacaaccccacccctctccagcggcccaagagccatgcccgcccctacttcatgcgctggggggtgaggggctgactttgtgcctacgcaaggcgctgggactctgccagagcaaggagaggtcgcggcccggtggccaatggcgaggagtaggagagcgccctgcaaagccgctttgttcgggccgtgacgctcgagctgccggagcggaatgcacaaagcccctgggtgccggcacatcagggctcccctcctcgggaacgcaatgtgtgctatgcccgctccactgcctgccctccgctgccagctgtgcctgccactgtgctatttgtggcagcgggcgcccaggaggacccactccggaaagcaaacccagatctcattaggcaggggaactggagatcaggcgggaactggccctttcacaaacttctcttaaactcacccttgttgattagccaggcacctatggtgaactttgccccaccctccagacacccacatatccttcccactggcacacggcaacctcaccttctcttgcacatgttagccagcaatagctatcatttatgttgtttcagagtttatagggtgacctgtacacgtaatatcctgcatatctcgtggggtgtgcaggcagccacatccaagcttgtcatcctgttgtgtttggtgagggaagctgaccctgggctgcccacgcagagctcaggggctacatcctcatgaggacctccgggctcaaagacattacctggcatacccatatcccagactctcaaggaccagggtccacacaggtgtgtgacccagatgcaccacccaggtcaaccaggtgttgaaagacctagtgaacattctcatgaacaaggacaaaggctatgtgggggtgtgcagagtggtcacgtacactcagcagacataggaaagtgatattcttgggttttttggggctcccaaggttttagggagagaaaacttgtttttcatccatgtgtcccagaaataagcattttcaatcaaatgctgtcagccagtctcccgcaggcgtcctgagggtagaagcaagttcaggactcttctcttgggagtatcctggccagaaacagccccatatccatgcttcccgggggtggtaggtttcttctgggaaaccacgctcagatgagagagatgaagcaattttct

SEQ ID NO: 1562921 - DNA, 4001 bp, Homo sapiens
accaacatagtgaaaacctgtctctactaaaaatacaaaaattagcatgggcatggtggcaggcacctataatcccagctactggggaggctgaggtgggagaattgcttgaatgtgggaagtagaggttgcagtgagccaagacggcaccattgcactccagcctgggcgacagagcaagactccatctcaaaaaaaaaaaaaaaaaaaaaaaaaaaatttgagatgtctttcagtcctccagtggagatattaagtaagccactaactacacaagactggggaaagcagcttatagatgactgggaaattatatcacccacagagaatgtttatggaaaagaaacgtatgagatctgagagaagggaggagggtccagaaaggagactgggaaaagaaagaccgctgaagtcgatggaaaacaaagagcatgtgaaatcccagataccaaagaagggcttcagaaggagggagtggtcaacagtgggacatactgttgagaagcccaacaaaatgaggactgaggctgcccagacgcggtggctcacgcctgtaatcccaggactttgggaggccgaggcaggtggatcacctgaggtcaggagttcgagaccagcctgaccaacatggagaaaccccttctctactaaaaatacaaaattagctgggcatggtggcgtatgcctgtaatcccagctactcgggaggctgaggcaggaaaatctcttgaagccgggaagcggaggttgcggtgagccaagatctcaccattgcactctagcttgggcaacaagagcgaaactgcgtctcaaaaaaaaaaaaaaaaaaaaatgaggactgaggattgaatactatatttagcaacaagaagtcgctgggaacctgaaaagagaggccgctgaagtcgagagaaaacaaagagcaggtgaaatcccagataccaaaggagggcttcagaaagagggagtggtcaacggtgtgacatactgttgagaagcccaacagttctggggtcgaaattctgacttgagtggtttcaagagactcagaaaacagcatgaagccactagtctctcacttgttcttaagagaaacaacacggcggcagcgggaggggaacgtgggacgtggggcacggggcacgggtggatttttaaattttatttattatttttgagacagcgtctcgctctgtcgcccaggctggagtgcagtgacacgatctcggctcaccgcaacctccgcctcccgggttcaagcgattcccctgcctcagcctcccaaatagctaggattacaggcgcccgtcaccacgccccgctaatttttgtatttttagtagagacggggtttcaccgtattagccaggctggtcttgaactcctgacctcaggtgatccgcccgcctcggcctcccaaagtgctgtgattacaggtgagccactgcgcccgacctggtttgctttaaattagaaggctctgcagcacgtttgcaggctgataggcatgaaccagaacacagcgagacgtgaagtacggaagaggtagagactactcattcaagggcgaaactcgcgaacagacgggggacggtccgggcagaaccagagtaaggaaaaccgggctgcgctcgagcccgcagctgacgtcatcggagccgcggccccgggagagcgcggcggcccgagggtcattaccctgactggagacagggcggcagcttccgggaggaagtgacctttgggctgtgctctggggagtagctgagagggaaggcgagcggcgcgcagtgcgggacaggcggttcactgaggcagagtggagcgccgctcccgactgcggctcaacttacattttgtccttttggtgctgtcgcttccccatggcggagcggcggcggcgactagcgagcacgaaaaaacaacggctgacaactcagaccatggagccgcagccgagttccgtgaccacttccgggttccgcggcgcgccccggaaacgggcgcctggcgtgctgggaattgtggttcgctagcgccaggtgctcatgctcggaaggatcgcctgcccagtatggggtcctagctaggtgtgccatctcccgcaggcgtcttttcggggccgagctccctcagcctcgaagccccatcttcttgaggggtctgtctggaccgccttgtctacccccctagccacggctcagggccattcccatactgggttctcaggtcttatttatttattttcgagacagggtctcgctctgtcgcccaggttggagtgcagtggcacaatcacagctcactactgcctcgacctcccaggctcaagcgattctcccacctcagcctcccgagtagctacgggcacgcaccaccacacccggctaatttgttaattttttgtagagacaggctcttacaatgttgcccaggctggtctggagctcttgagctcaagcagtcctcccgccttggcctcccaaagtgctgggattacaggcctgaggcttcgcgcccggccagcgctcaggtctttttcaacgtcctcctagagcttcaagtctcatgagcctccaccccatcccttcccgcctccgtggcagatgccttcaaagccatgtaccactctcgttctactcgctcacttctcattctctctgcatattcggtccccaccgcctccaggcccctcggaggcccagcagcaggtggccatcaagcctagaggtccaaagccctacctgatcccttccgtctcttctgccagacccttcccttgggtcagatcagtaccttgggcccctagctacactcaggcccagggtaatcttgcctaggctcctaattttaaatgccatttgtatcccatgactcccagtactaagtcaccagcactccaggttcctgatctccacttgggtaaccactgatctgaaatgtaacatgtctggatgggcgtggtggctcacgcctgtaatcccagcactttgtgtgtgtgtgtgtgtgtgtgtgtgtgtgtgtgtttagtagagacggggtttcaccatgttagccaggatggtctcgatctcctgacctcctgattcgcctgccttggccttccaaagttccgggattacaggcgtgagccaccacgcccggccaatcccagcactttgagaggctgaggcaggcggatcacttgaggtcaggagttcaagactaacctggccaacatggcaaaaccccatctctactaaaaatacaaaaaattagcctggtgtggtggcacacacctgtaattccagctacttgggaggccgagacagtagcttgaactggggaggcagaggttgccgtgagccaagattaggccactgcatcccagcctgggtgacagagtgactctgcctaaaaaaattaaattaacatgtctggtcaaagtagaattttctttttttttttctttttttttttgacatggagttttgctcttgttgcccaggctggagtgcaatggtgtgatcttggctcactgcaacctccgcctcccaggttcaagcgattctcctgcctcagtctcccaggtagctgggattattacaggcatgcgccaccacgcctggctaattttgtatttttagtagagaaggggtttctccatgttggtcaggctggtctcgaactcccgacctcaggtgatcctcccgcctcagccctcccaaagtcctgggattacatgcatgagtcaccgcacccggccataaagcagaattttcaatcctccctcttctcccagtccccactctgctgagcagtaccaccatccacccagtcaccgaaagccagctatctttgccttatttcatggctggcttcttattctctaggttttaacataagtgtcacctccccagagagaccttccctaaccacccacttccatgcatctcccataaagtctgtcacaattcctcacaatttgtaatcctgtgtaattcagtctgtgtcccggttta

SEQ ID NO: 1562922 - DNA, 4001 bp, Homo sapiens
cctcccaaagtgctgtgattacaggtatgagacaccacgcctggccaacctttttctaccaaaagagattcttatttctttattcataactactaatactaataatagttagatgtaaatcctagattttttttctacatatataaattttttttattgttgtaaaatatacacactatgtatccttttaaccatttctaagcgtacagttccatggcattaagcatagtcacattgctgtgcaatgaccatttctttctacaggcctgactttcttgatagactgtaagctccctgtagtcagggagcccacgatggccctttgtgtacagcaggtggtaagtgtgatggcagagggaagagtgactggcgggtggcatgggctgaggaagctacaccactctgaagggtgcagtgggcagcagcgccaggtcttaaaagactcggttggcttcaggtcagatggtatcctttttttttttttttttttttttgagagggagtttcgctcttgttgcccaggctggagtgcaatggtgggatctcagctcactgcaaccttcgcctcccaggttcaagcaattctcctgcctcagcctcctgagtagctaggattacaggcacctgccaccacgcgcggctaatttttgtatttttagtagagatgggattttgccatgctggtctggaactcttgacctcaggtgatatgcctgcctcggcctcccaaagtgctgggattacaggtatgagccaccgcgcccggccttcagggggtatcttaaaggaattccacaaatgaacttgtgtagaggttcatggctttcagaaatgcattcgttttgtttacctctcacaactacgctgagaagtacatactgtcaggctacactgcagatgaagaaataggttataggagggcaagcacccatttaaggtctcacacaggtgaaagggcaaagcgaactcaatcaaggtctctggatgcccaatgcctttggtatttccacctcgcgtgcaggaggaaaagagcgaaatttgacaacagaagagactggagatggcctcagagtgctggccggccccactttctatcccccgtggtgagagctcagctgggcccagagaacttgtcccggggaatgccaccacgacatgtgtgactctgtcccgcagggtggaaggcttcgaaggagcccgccaccatgcagtgggcctcactgtgtgtcaagcgctgtgccgaaatccctgcagccggagccagttcttcctgttgtacagacaggttcaggggcttgcctgaccgaacccagcggcaatgtgcccggcctccgcgcctgaggctctggctcacagacctgtggctgaagcagctgcagcccgagcacttgtgcagctgacgctcgcttcacggacgcttgggaggccgcggagccgggggccatcaggcagactgggcccctgaaggtgcagggactggggggatatggggcaacgtgccggcccagaggctcctggggggtggggagaggccaaatctcggaaaatggggcgcgtccccctcagcacccgattctgcctcatagccctcggtccctaccaggccctcggctcggccacacccccgcctgccccccagttctgcccccttggctccccagccccccaactcccagcctcgggttcctcatgtccgcagcggcccctcttgctcctcggccccccgcactgcacccccgcaccctttcggtgcacccatgtgagcctcgtctcggcctccttgcctccccagccctctgattccacccctccggttcctcggtcccatttcacccctgtgcgccttgggcgctcgcctgaccctcgtcccagccccgtcagccctctaatcccgtcccccccggcctcctcacccctggtctccgcgggcctcagctgtctcctcgcggctccgtgtcccgcaagctgctgccggccggccccgcccacttcccgtccctggccgccgcgggcgccgcgggcgccgcgcaggcgcagtcgggcctccaggctggcggggccggacctctgctgccccctggcggctacgtggacggtgactgcggccctttagtggtaggcgaactgcggctccacctgggctccggagccgccccagtcaccagcctcttgcttctcttctgcagctttgggtgggcggctggatggggaaagcaatccctaggtcacagcgcccagaaattaagcaacttctgccgtcaatagctggtaagtgacagagcagggatgcaaacccagactgcccaggcaggctcatccgtccgggaaggaggcacagtcccaggctcattatgagttgtttgtttccacaaacgttgaggcttttgttatctttccgttctggaggtcagaagtccacttagcctcagtgggcgaagatccagggatcgccagaatgcgttcctttctgaggattctaggggagaaactgttcccctgccttttccagctcctaagggctccctgcataccttggctcgtggccccttcctacagcctcgaagccagcaatggccagttgagcctttctcacactgccacctctggttccctcctctgcttccttctgctacttctaaagaccctcctgatgccattgggcccacccagatagtccagcatcatctctctaaatcagttgattagcaaccttaattcccctttgccccttattattattattatttttttttgacacggagtctcaccctgtcacccaggctgtactgcagtggcatgacctcgactcactgcaacctctgcctccctggttcaagcgattttcctgcctcagcctcccgagtagctgggactgcaggcacgcaccaccatgcccggctaattttttttgtatttttagtagagatggggtttcaccatgttggtcaggctggtctcaaactcctgacctcaaatgatctgcctgcctcggcctcccaaagtgctgggattacagtacaggcgtgagccactatgccgggtctgccatgtaatctaacacaggcacaggtataggacatgaacatctctgaagggccatttttctgccaacacagaggctcttgaaaatattctttttctctctttttagagacaagctccttctctggtgcccacactggagtgcagtggcatgatcacagctcactgcagcctcaaactcctgggctcaagtgaccctcccctcctgcctcagccttcctagtgtctgggaacacaggcaagcaccaccacgcccagctgattaaaaaaaatttgtagagacagggtctctatgttgcccaggctggtcttgaactcttgggctcaagtgatcctcctgcctcagccttcccaagtgctgggattataggtgtgaaccattacacctggccaaaatattttattttaaaggcagaagaaagaaacctttatgtcaaagaaaatgttttaatatatgatattaatatattcacctttataccaatgccgttggaaagtataattttttaaatggaggatggggcaccagatcttatgtggctctgcccacctgaccttcaggtccgcaggcctgtgtccttgccaggaatgaatgtctctgggatgcttctctaacaggaggaacctggagtgagaccaggaacctggagaactagcagctgggtgactggaaaggaaaccatctggggtggggttgggtctgcaaggcaggaggtgtctgggcagagaaagcagggctggggcggagggtcctgcctcatcccattctcctgctcactctttcctagatccctgtcagggcagtaaccatgagcaaggcttgaggctacttcttataaacagtggccctgggcacattccttagctcacctgagcctcagtttcttgatgagaaaaaatcgggacaatagcaaccaacctatctcagagggctgctgtgagaccctgagccactgttt

SEQ ID NO: 1562923 - DNA, 4001 bp, Homo sapiens
ggggggggaactgactggagggggcactgactgggggaaactgactggaggaggcactgactgggggggaactgactggagggggcactgactgggggaactgactggagggggcactgacttgggggggaactgactggagggggcactgactggggggaattgactggagggggcactgactggggggcactgactggggggaaactgactgggggggcactgactggggggaactgactggagggggcactgactgggggaaactgactggaggaggcactgactgggggaaactgactggaggaggcactgactgggggaaactgactggaggaggcactgactggggggaaactgactagagggggcactgactgggggggaactgactagagggggcactgactgggggggaactgactagagggggcactgactgggggggaactgactagagggggcactgactgggggggaactgactagagggggcactgactggggggggaactgactggagggggcactgactgggggaaactgactggaggaggcactgactgggggaaactgactggaggaggcactgactgggggggaactgactggagggggcactgactagggggaattgactggagggggcactgactggggggcactgactggggggaaactgactgggggggcactgactggggggaactgactggagggggcactgactgggggaaactgactggaggaggcactgactggggggaattgactggagggggcactgactggggggaattgactggagggggcactgactggggggcactgactggggggaaactgactgggggggcactgactgggggggaactgactggagggggcactgactgggggaactgactgaagggggcactgactggggggggaactgactggagggggcactgactggggggaattgactggagggggcactgactggggggcactgactggggggcactgactggggggaaactgactgggggggcactgactggggggaactgactggagggggcactgactgggggaaactgactggaggaggcactgactgggggaaactgactggaggaggcactgactgggggaaactgactggaggaggcactgactggggggaaactgactagagggggcactgactgggggggaactgactagagggggcactgactgggggggaactgactagagggggcactgactggggggggaactgactggagggggcactgactgggggaaactgactggaggaggcactgactgggggaaactgactggaggaggcactgactgggggggaactgactggagggggcactgactggggggaaactgactggagggggcactgactgggggggaactgactggagggggcactgactggggggcactgactggggggaaactgactggggggaaactgactgggggggaactgactgggggggaactgactggagggggcactgactgggggaactgactagagggtgcactaactgggggggaactgactggagggggcactgactgacttggggggggcactgactccgggggcaccgactggggggaactgactggagggggaactgactgactgggggataactatctggagggggcactgactgactcggggagaagtgacttggggggcactggcagactgggggccgggtctgagcggcgggcggccgcactcacctgccctgcgggccgggcgtcgcggcagctcttcggaggcccgtgtggaggcccgagcggaggccagggcgctggtggaggcaaagcccgggcggcctcgggcgggccgcacacacatgggcccggccgagggcgcagcgcctacggacaccggcacggccggccggcggctcgagaccgactcggggccgcgggcggcactccgatcgctccaaaatggcggcggcggcgcacgggcacgcgctccgggggcggggtctccgcttggggcgcgcacgctcgcggccgggggcggggccgcgcgggtgggcggggccgggacctgggccggctctccgggccccctggagtggggcactcggtgaaacccgcgtgggagcacgagggcttgggtgtgctgactgctgccttggagtgggtggggtaagagtgcgtctttccccttttacgtttccctttgaggtattggctaaagttttgtgcaagcatagttaattttgttgtagccacaaaacaatcctcgcgtggcccgacgcagcatttgagagacacacacctggggcaggggtttcccccgtggcccaggaaagggcctgttctcccgggcctccctcctgccacaggcccctcccagaggccgcggggcgtggacgccccgagcagcaggagcgggctcagccccgggcgccaggcctggcccctccccgtcccgcgtcctgcctggacccggagtgcctgagccgcctccagacagttttctccaggtgcgctacgggttcttgcacggcgttttgcaaattaagtatgtgcctatttaacaagtgctggaattgtttaattccatcaaaataatttcaaaaatgattactattatttcagatgttagagcgagccgtgggtaaatgttgggaaaacatggagcacttaagggatctctaaacgttttttccagttgtcagtgtattgcccaggattcaccgatgctctctgcgaaagcgtatctgggcggctcaaatattcggtatttctcttttgccagctggcgctgttaggctttgtcggtagagggcgccagagacgttgcaggagaaaagggcttggccctgcggctggcggccccgggcttccccgacgcctgtcccctgccctggtcagcagcaccctcctcgccggttttatagcagatgcctctggcgagcctttccccagcaaaagcttttcccctagcatcctaaggggcagatttctggcaggttccgttgagggaacttccaggaagtgggggtgaaaaagcctcagcctcacaacctagagaagagacaccctgcgttcagcaggctatgcccttctcctgccctcaccatggtctcctttgcaggagcgggaggtgctgctgagttgagctacggaatggggactggggccaggggcaccagatgcaggagatgctcctgctgccgtgagcacgtgcaactctgcctgatcttgatacccctcctgtgctcagccagtgcaactggggtgagcaggagcccctctcctcctcttttttttttttgagacggagtctcgctctgtcgcccaggctggagtgcagtggcgcgatctcggctcactgcaagctccgcctcctgggttcacgccattctcctgcctcagcctcccgagtagctgggactacaggcgcccgccaccgcgcccggctaatttttgtatttttagtagagacggggtttcactgtgttagccaggatggtcttgatctcctgacctcgtgatccgcccgcctcggcctcccagagtgctgggattacaggcctgagccgccgcgcccggccagccctctcctcctctctcacccacactggattcatcactgcaacatgtggtagctccactaccaacattctggttcaaaaccagtttctctctcctgactcctgagacctacaggggccccctgcttctatcctggagtacttgctgtaggtcagcttgctgtaatcagcaaagcacccagaggggtccagttaaaacagatccgattgcctgggcacggtggctcacacctgtaatcccagcacttcaggaggcctaggcaggaggatcgctggagcccaggagtttgagaacagcctcggcaacaagtggggcccctgtctctacaaaaaattaaaaaactagccaggtgtggtgatgagcctgtggtcccagctacttggccgactgaggcg

SEQ ID NO: 1562924 - DNA, 4001 bp, Homo sapiens
tgttctccctgatctccccaggtggcacccaaggatgaggcagtgcaatcttgttgctcacttcccaggaccgacacttacccctaatggcccaagcccatggggcagtgagatcaaagcctcctggagctcatactctctgacaccactggaagtgtgggcttttgcgtctgattaccccggggaaaggttctgaatgtaatcgtggctttggcaataaggtccacaatgcattaagattttttttttttttttggaggaggagtttcactcttgttgcccaggctagagtgcactggcaccatcttggctcactgcaacctccacctcctgggttcaagcgattctcctgctcctgtctcagcctcccaagtagctgggactacagatgtgggccaccacgcccagctaattttttttctatttttagtaaagacaggatttcaccattttggccaggctagtctcgaactcctgacctcaggtgatctgcccacctcggcctcccatggtactgggattgggattacatgcatgagccaccatgcctggcctagggttaatttttatttttggagacggagtctcgctctgtcgccaggctggagtgcagtggcatgatcttggcttactgcaaccttcgcctcctgggttcaagcgattctcctgcctcagccacttgagtagctgggactacaggtgcatgccaccacgcccggctaactttctgtacttttagtagacgcggggtttcacagtgttagccaggaatggtctcaatctcctgacctggtgatccgcccgcctcagcctcccaaagtgctgggattacaggcatgagccaccgtgcccgaccctagggttgactctcatacaaagacagcacgggaagtgaaatgctcttttgtggaaatgaccagaaacaataaaagcggctcctgcctcttcgtctactgtgagggacctcaggatgcagctcccatctggctcgagtgacaaggacagaggggaacagggcttctctgagcacctcagacagctcaggggaccttcttacccacaaacgccttcgttccattttgaagcgacttaggctggcctcaggacctccaacgcttggatttctaggtctcagtcacttgttgccacgcacgtctgagagtaataatcaaaatgctccaaaaagaagaatacatgtataatatttacgaagcaacggcctcctgtgaaaacctccgcaaatactgctgaggaaactgacaactggcgactcaatcccgccctttcagtgcaaatctctggctccaaacctgagcaccagtgtttcctgggctgaaccagggggcaggaggaacaacagaccatgtggttggtcacaagtgacccctgtggtcaaggaccctgactacggtcttgcagcgacatttctgcctctgctcccgccttcctaggacgcctacgccactgcctgggccgtccccaacccccagcaccttcagaggggccgagtcccagagcatccaccgcattacaaatgcgcacccaccctggagagctccaaccacgagcaccgccgcctcggttcaaggcatccttacagccacaactcctcaactggggccaattttccggggcaggcggcccggggtgacccaagtggcgcacattattttctttggtcttcaacccatttccagagagaaaacagggacccgggacaggggtggtgctgggggcacaagcccaaggtcaccctgcggggaagcggaggaatcagggctcgaacttacgtttttcctcagagagttcaccacaccgcgaagttgctggaaggaaagaacgagacaatggctcagctaagcgccctagccgctgcgtggggcggggggggcggcggtggggaccggggggctgggcagcctggtctgaccaatccccgtttctcagtccttccagggcaaaatctcacgagatccagtgaggtcgcccagagagtcgagaggggcttgttttcaaagactgggaggaggaggggcagtgggggaggggcagtggggggaggagcagaggagaagggagcaggaggaggggaaaaggggagaggaagttggagagcagaggaggctgggggtggggaggagatgggggtggggaaggaggggagatgggggtggggaagggggggcgggaggagggttaggaatgggggaaggaagacagggtgggggaggggtgggcatgggggaaggaagacagggtgggggaggggtgggcatggggaaagggagacagggtgggggaggggtgggcatgggggaagggagacagggtgggggaggggtgggcatgcgggaagggagacagggtggggaaccgagaagaaagacagtggggggggatggaggaaggaacacagggtggggtggggggtcgggatgggggaagggaaacaaagagtggtggaggcgtggggattaggaacggagacagagggtgggggaggggtggggtgggggaagggagacagggtgggggaggggtgaggatggcggaaggtagacaaggcgggggaggggtggggatgggggaagggagacagaagggggggaggggtggggatgggggaagggagacagaaggcgggccagggcgggaatgggggaagggaaacagggtgggggtggggatgagagaagacagaggttgggggaggggtggggatgtgtaagaaaaacaaagggttggggagggggagggaaaagaggcagagagtgggggagggggtggggatgtggaaagaaagtcagaaggtggggggtgaggggtggggatgggtgaatacgtgatggctgcggcctttcccaccagacagtagggtgggggcagggtggaaaaagggggtgcggtgggcgaatggagaggcagtggggaggcggggggctgactgggagtgtgggacggggtgttctgggatcacggagacgtccaagtctggactctgtcctgggtctgtgcttctggcgacctcccttttcttcagtgggatgcggggtgcaggggccggttccagggtcccctgagctcaagttctcgccccaccccgccccgcaagtctagaaaagatgcccctggccttggctgggtaatctctggatttacctacttctgtaaccccccgggctgaagagaccaccccccgggattcaattaacttactctctggagcgcgcgttcctccctgctcccgggagtcggtttcccagaactttctgaggcccgcgcatgctcccctcgactccccgtgtttccactctccacagaaatccacgcattcacgcccctcccctcccccgagcctgcagaggactccgccctgctttccctacattcagggctgctccttttgtcgccaatacagacctgttgacaggtcacgcctgggaagcgggtggggtgtcccggagcggtgctgaggcgctgcaggcccggcttctggctgcgggggagctgtaccctgaagcctcgccggaactcgcgtctggggccagcagggggcactagagtcaacagggactgtatgcaaaacccacttcctcccaggccctctagggggatggtcaggcttctgcagagatggggaggatcctttcctggtaaggggagagggacgggctaggagccaagcggaaggaccccgtgttcaaggcccttcaagggacgggacaggcgaggaatctctttgagtcttttgaattgttttatcagtcaggcctgggaagtactccgcctccacaaactctgttttcctgaaaggggtcggggggggggaccccaacatctcctgccacaggctatgatgggcatggtggctaagagcaacaggccgcgtggtgaggctggctttttgtggctctgccctgccattccccgaggcatccccatgccagtgaacagagctgcgggttcccagctgcacagatgaatgcacgaacaaaacatag

SEQ ID NO: 1562925 - DNA, 4001 bp, Homo sapiens
tcctcaactggggccaattttccggggcaggcggcccggggtgacccaagtggcgcacattattttctttggtcttcaacccatttccagagagaaaacagggacccgggacaggggtggtgctgggggcacaagcccaaggtcaccctgcggggaagcggaggaatcagggctcgaacttacgtttttcctcagagagttcaccacaccgcgaagttgctggaaggaaagaacgagacaatggctcagctaagcgccctagccgctgcgtggggcggggggggcggcggtggggaccggggggctgggcagcctggtctgaccaatccccgtttctcagtccttccagggcaaaatctcacgagatccagtgaggtcgcccagagagtcgagaggggcttgttttcaaagactgggaggaggaggggcagtgggggaggggcagtggggggaggagcagaggagaagggagcaggaggaggggaaaaggggagaggaagttggagagcagaggaggctgggggtggggaggagatgggggtggggaaggaggggagatgggggtggggaagggggggcgggaggagggttaggaatgggggaaggaagacagggtgggggaggggtgggcatgggggaaggaagacagggtgggggaggggtgggcatggggaaagggagacagggtgggggaggggtgggcatgggggaagggagacagggtgggggaggggtgggcatgcgggaagggagacagggtggggaaccgagaagaaagacagtggggggggatggaggaaggaacacagggtggggtggggggtcgggatgggggaagggaaacaaagagtggtggaggcgtggggattaggaacggagacagagggtgggggaggggtggggtgggggaagggagacagggtgggggaggggtgaggatggcggaaggtagacaaggcgggggaggggtggggatgggggaagggagacagaagggggggaggggtggggatgggggaagggagacagaaggcgggccagggcgggaatgggggaagggaaacagggtgggggtggggatgagagaagacagaggttgggggaggggtggggatgtgtaagaaaaacaaagggttggggagggggagggaaaagaggcagagagtgggggagggggtggggatgtggaaagaaagtcagaaggtggggggtgaggggtggggatgggtgaatacgtgatggctgcggcctttcccaccagacagtagggtgggggcagggtggaaaaagggggtgcggtgggcgaatggagaggcagtggggaggcggggggctgactgggagtgtgggacggggtgttctgggatcacggagacgtccaagtctggactctgtcctgggtctgtgcttctggcgacctcccttttcttcagtgggatgcggggtgcaggggccggttccagggtcccctgagctcaagttctcgccccaccccgccccgcaagtctagaaaagatgcccctggccttggctgggtaatctctggatttacctacttctgtaaccccccgggctgaagagaccaccccccgggattcaattaacttactctctggagcgcgcgttcctccctgctcccgggagtcggtttcccagaactttctgaggcccgcgcatgctcccctcgactccccgtgtttccactctccacagaaatccacgcattcacgcccctcccctcccccgagcctgcagaggactccgccctgctttccctacattcagggctgctccttttgtcgccaatacagacctgttgacaggtcacgcctgggaagcgggtggggtgtcccggagcggtgctgaggcgctgcaggcccggcttctggctgcgggggagctgtaccctgaagcctcgccggaactcgcgtctggggccagcagggggcactagagtcaacagggactgtatgcaaaacccacttcctcccaggccctctagggggatggtcaggcttctgcagagatggggaggatcctttcctggtaaggggagagggacgggctaggagccaagcggaaggaccccgtgttcaaggcccttcaagggacgggacaggcgaggaatctctttgagtcttttgaattgttttatcagtcaggcctgggaagtactccgcctccacaaactctgttttcctgaaaggggtcggggggggggaccccaacatctcctgccacaggctatgatgggcatggtggctaagagcaacaggccgcgtggtgaggctggctttttgtggctctgccctgccattccccgaggcatccccatgccagtgaacagagctgcgggttcccagctgcacagatgaatgcacgaacaaaacataggtccatgcaaaggaagtcattgcattgatccagattcgacctgggattgtcgcataaaacagggctgataaaaaccgttgtgttttcaccttcgaaacagagactcagcctccccctctctgcttgaggcattcagcaaaggttcgtccttgagtggctgtggatgctcaaggacttacgatttctgactttataaagtttagggtgaaaacaaaaaacaaaataagaagaccattgttttaaagtggccgttgtagctaattatctcaagaaagcaaacaggctggtactgaaagttacacaggcgggcggctccctgggagggttgcccagctctccttttctgagacctgagcagggagcagccagaggagcttgaagggatggtgttcagggcatgggaacaggctgcacacatcttcacggagtacggtgcttgtccagtttgagaagggaaagaaactggggcagagggctgatgagaaggcagcagatggatagtgcgggattgaaaaggggatccatttgaagactggccaccattatttattttcatcatctgattgctgttgctccattgagatcgatgcgtggagaacaagttggggagtggaacaaatggcagggaggggagagaagtgagtgaacatgaccctggtccagcctcataggacagagcgtggtcatgaagtccacagaggaggacaggtagggaggaatcatggcatggccaggttgtagggcaagaggcagagaggagagaggattgtggaggatgcctgcggagtgccgactgtcagtcgaggctggtcctttatttatttatttttttttttgagacggagtctcgctcttgcccaggctggagtgcagtggcgcgatctcggctcactgcaagctccgcctcccgggttcatgccattctctcgcctcagcctcccaagtagctgggactacaggtgcccgctaccatgcctggctaatttttttgtttttaatagagacagggtttcaccgtgttagccaggatggtcttgatctcctgacctcatgatccgcccacctcggcctcccaaagtgctgggattgcaggcatcagccactgtgcctggccaaggctggtcctttcttttatggcgatgggtgtttgaaagttgcacataccaaaataaactcactatttgttgacccaaagtaaaaccctgagggtatgaaagggaagggctcatgcttacatggctgagataaaagctgtctcaggaagctgggtgtggtggctcacccctgtaatcccagcactttgggaggccaaggttggaggatcccctgaggccaggaattgaagactagcctgagtgatatagcaagaccccatctatatttttaaaaagggttggctgtctcgggacttttcgaaatagccctgcaagacattcctgttttggaatcacaacaatttagataagatgcttttgaaagaacacctgcctaggcacagcgtctccaccaatgaactgatgccaactgtggttttgagtcttcataaccggtgaactgtttgcaagcagcttatttaaatctctttttttgccaatacaaccttccct

SEQ ID NO: 1562926 - DNA, 4001 bp, Homo sapiens
ctctggatgccctgcctcttccaggtactcacagcaccatccctgagccctggcacttgcctcaagaaggcacccaagggacagcggagccaacagtttcctcccacagtcacggaacagcacctggcattccccgcagcagactgggcaccaaaccccacacccagctctgctggcttctctgtgcaacaacttgtcttgaatctagacaagaaaccttagggctgtgcctacagaaacctgacctggtgccttcctagccccctccccatcccagccatgcttagggctgtgcctacagaaacctgacctggtgccttcctagtccccactccatcccggccacaaggtgggcatggcttctgcacgactggccccagctgccacctagcatgcccgtccttgccctgggcagggacctgtggctggccactccctcccctggcatttctgccctgctgcctcctcctcctattgcagcaccaccagcactggctcctcttttgggatgccccttagatgtgggcactccccaaagcctccacatcgccgtccctcaccttgccagttcctctacctgggatgtcccttctcgccctcctgtctccttggccggggctctctatgaccaaaacttgaccttaagacatccttgtgtgcacacacagcaatgccctcccagagccctccatctgtccagttcagctccttcttcctccaccatcctccgcactcccgccaccacgggtcctaggctgaccttggcgctccccatgggattcgggccaacagcatctgactctgagttcgtggatccctgccctcacctcgcacccgccgaggcctcacctaagctcaactgtggctcggtgcttctcatctgacaccgtcccccgccttcccccgcctcctgttgaggccaggggtgcagcccccgacctctgtacagtctcacctgagaaatcaacaccaccagataccctggcgccaaaaagcggaaccttgcaaactcttcccagggtcacctggagataaccgtcatctctagtacccctaggctgatgcggctaaaacagtgttctgcttgttgccccccaccaccgccaccaaaagccctgacactttttaaagctaccatgggtgagttcaaagctgggcgtttgaggggcttcccatttttccccaacagtgttctcagagtggccgtgtctgggaagctgctgggtcccggggtttgaattccggggttccaggctatgagccctacaccaggattctcttgtctcaacatgaagaatactccattttaaattccaagtgataactctgtattcccacaagtggtatatatcgtaaatatgaaaacgaccattgtttttagttggtagacatcgacaaataggaaaatttgcgaggtccgagagggactgcaggaaacgcctcccttcctggcttcccttgctccaggagatgcttgggaggcacccgtttcaggccaggaagctccgtaaaggctcccgggaccggcagaagcccccgcgcccccgcctgcaccccgcgcacctgctcgtggcgcgccagcagcgcgggccaggcgcacaagcgcagcaccagcaggctccgcgccagctcccaggttcgccggctgcggtacgcctcctgcgcgttgccgaagtccacggcgggcaccggcggccgcactgccgtggccgacccacctcctggcacggccgctgggcccgctgcgggctgctcgcgggaggccggcgccgtggacagcgggacgaagcggggaatgcaggggcgcagcgcgggcagggcgcgcctcagagccatggcgggacggcggtacccgcccgggccgcttaagtgtgcgctgttggtcccgccccgccccgccccgccccgccccgccccgctcggtcccagaggcctcaccctatattcctgacaaatgccagacaagggcttagacttcacaagcaccctggcacttcagctgcatggtggggaccctctgccggcagggctgaggccaaggcccactggcttctcaaagcctctgctcctgctctccgtgaagacagcaacagagtgagaccctgtctcaaaacaaaaattatgtattttcagatagcttgaaggagaatattgagtgttcgtaatgcaaagaaataataaatgtttgagatgataggtatgctaattacccttatctgatcactatacacgtacagaaacatcactacgtaccccacaaatatgtacaattattatgtgtcaactaaaaaataaaaatagccgggtgtggtggctcacgcctgtaatctcagcactttgggaggccgaggcaggaggatcttttgagcccaggagtgccagagcagtctgggcaacatagtaagacctcgtctctacaaaaaatagaaaattaaccaggcatagtgttgcatgtctgtaatcccagctactcaggaggctgaggtgaggggattgcttgagcccaggaggttgaagctgcagtgagctgattgtgccactgaactccagcctgggcaatggagggagaccctgtctcaaaaataaaagtgaattttttttttttgagatggagtcttgctctgtctcccaggctggagtgcagtggcatgatctcagctcactgcaacctctgcctcccgggttcacgccattctcccacctcagcctccagagtagctgggactacaggcgcctgccaagcctggctaattttttatgtttttagtagagacggggtttcaccgtgttagccaggatggtcttgatctcctgaccttgtgatccgcccgcctccgcctcccagagtgctgggattacaggcgtgagccaccacgcccggtgaatttttttttttaaagaaagattccggacacaaacggccacaagttgtatggttcgttttatatgaagagttcagaatagacaaatcgatagagacagaagtcacacgaagacaagcccatagtggagcctggtgagtatggcactggcagtggtgcctggaggtggaggacgggaggagtgggaggggctgccaaggcccacggagtttctttggggtccggaaatactctggggctagagagtggtgatgtttgctcaaccttgtgtatagactaaaaaaccattcaatatctcaataaagctgttatatttttttaaaaaagcaaagttctagcatttgcttcaaggaagcctgtggccctgcacagaggcaaaggtgggcaggggctgccaggggcagggctgcagagagggcagggggagaagcgaggggtgcagggatcacagagatcaccactcacgtccagaccatagcagagcaggcctagcgctgggtgcccaggcccacgggagagcccacctgtgagggcacctgtgggaacaaggctggcctgaaagtcactggctccatgtgacaatcaatgaaacaaccgagtttcacaggagctctgtaaatcctaggaagcaggtcttaggctcagctggggacccttggcaggtggctaccctgagccagctgatggctttttttttttttttttttaagagacagggtctctctctgttgcccaagctggagtgcagccatgtgatcacagctcactgtggccttgaactcctggtgtctcatgtgtccctgtgaagggaccaccaaccagctttgtatgagcaacaaggctgtttatttcacctgggtgcaggcaggctgagtccaaaaaaggagtcagcaaagggtggtgggattatcattagttcttacaggttttgggataggcagtggagttaagagcaatgttctgggggcaggggtggatctcacaaagtaccttctcaagggtggggagaattaccaagaaccttcttaagggtgggggagattatgaagtacattgatcagttagggtggggcagaaacaaatcacaatggtggaatgtcatcagttaaggctattttc

SEQ ID NO: 1562927 - DNA, 4001 bp, Homo sapiens
cccacagtcacggaacagcacctggcattccccgcagcagactgggcaccaaaccccacacccagctctgctggcttctctgtgcaacaacttgtcttgaatctagacaagaaaccttagggctgtgcctacagaaacctgacctggtgccttcctagccccctccccatcccagccatgcttagggctgtgcctacagaaacctgacctggtgccttcctagtccccactccatcccggccacaaggtgggcatggcttctgcacgactggccccagctgccacctagcatgcccgtccttgccctgggcagggacctgtggctggccactccctcccctggcatttctgccctgctgcctcctcctcctattgcagcaccaccagcactggctcctcttttgggatgccccttagatgtgggcactccccaaagcctccacatcgccgtccctcaccttgccagttcctctacctgggatgtcccttctcgccctcctgtctccttggccggggctctctatgaccaaaacttgaccttaagacatccttgtgtgcacacacagcaatgccctcccagagccctccatctgtccagttcagctccttcttcctccaccatcctccgcactcccgccaccacgggtcctaggctgaccttggcgctccccatgggattcgggccaacagcatctgactctgagttcgtggatccctgccctcacctcgcacccgccgaggcctcacctaagctcaactgtggctcggtgcttctcatctgacaccgtcccccgccttcccccgcctcctgttgaggccaggggtgcagcccccgacctctgtacagtctcacctgagaaatcaacaccaccagataccctggcgccaaaaagcggaaccttgcaaactcttcccagggtcacctggagataaccgtcatctctagtacccctaggctgatgcggctaaaacagtgttctgcttgttgccccccaccaccgccaccaaaagccctgacactttttaaagctaccatgggtgagttcaaagctgggcgtttgaggggcttcccatttttccccaacagtgttctcagagtggccgtgtctgggaagctgctgggtcccggggtttgaattccggggttccaggctatgagccctacaccaggattctcttgtctcaacatgaagaatactccattttaaattccaagtgataactctgtattcccacaagtggtatatatcgtaaatatgaaaacgaccattgtttttagttggtagacatcgacaaataggaaaatttgcgaggtccgagagggactgcaggaaacgcctcccttcctggcttcccttgctccaggagatgcttgggaggcacccgtttcaggccaggaagctccgtaaaggctcccgggaccggcagaagcccccgcgcccccgcctgcaccccgcgcacctgctcgtggcgcgccagcagcgcgggccaggcgcacaagcgcagcaccagcaggctccgcgccagctcccaggttcgccggctgcggtacgcctcctgcgcgttgccgaagtccacggcgggcaccggcggccgcactgccgtggccgacccacctcctggcacggccgctgggcccgctgcgggctgctcgcgggaggccggcgccgtggacagcgggacgaagcggggaatgcaggggcgcagcgcgggcagggcgcgcctcagagccatggcgggacggcggtacccgcccgggccgcttaagtgtgcgctgttggtcccgccccgccccgccccgccccgccccgccccgctcggtcccagaggcctcaccctatattcctgacaaatgccagacaagggcttagacttcacaagcaccctggcacttcagctgcatggtggggaccctctgccggcagggctgaggccaaggcccactggcttctcaaagcctctgctcctgctctccgtgaagacagcaacagagtgagaccctgtctcaaaacaaaaattatgtattttcagatagcttgaaggagaatattgagtgttcgtaatgcaaagaaataataaatgtttgagatgataggtatgctaattacccttatctgatcactatacacgtacagaaacatcactacgtaccccacaaatatgtacaattattatgtgtcaactaaaaaataaaaatagccgggtgtggtggctcacgcctgtaatctcagcactttgggaggccgaggcaggaggatcttttgagcccaggagtgccagagcagtctgggcaacatagtaagacctcgtctctacaaaaaatagaaaattaaccaggcatagtgttgcatgtctgtaatcccagctactcaggaggctgaggtgaggggattgcttgagcccaggaggttgaagctgcagtgagctgattgtgccactgaactccagcctgggcaatggagggagaccctgtctcaaaaataaaagtgaattttttttttttgagatggagtcttgctctgtctcccaggctggagtgcagtggcatgatctcagctcactgcaacctctgcctcccgggttcacgccattctcccacctcagcctccagagtagctgggactacaggcgcctgccaagcctggctaattttttatgtttttagtagagacggggtttcaccgtgttagccaggatggtcttgatctcctgaccttgtgatccgcccgcctccgcctcccagagtgctgggattacaggcgtgagccaccacgcccggtgaatttttttttttaaagaaagattccggacacaaacggccacaagttgtatggttcgttttatatgaagagttcagaatagacaaatcgatagagacagaagtcacacgaagacaagcccatagtggagcctggtgagtatggcactggcagtggtgcctggaggtggaggacgggaggagtgggaggggctgccaaggcccacggagtttctttggggtccggaaatactctggggctagagagtggtgatgtttgctcaaccttgtgtatagactaaaaaaccattcaatatctcaataaagctgttatatttttttaaaaaagcaaagttctagcatttgcttcaaggaagcctgtggccctgcacagaggcaaaggtgggcaggggctgccaggggcagggctgcagagagggcagggggagaagcgaggggtgcagggatcacagagatcaccactcacgtccagaccatagcagagcaggcctagcgctgggtgcccaggcccacgggagagcccacctgtgagggcacctgtgggaacaaggctggcctgaaagtcactggctccatgtgacaatcaatgaaacaaccgagtttcacaggagctctgtaaatcctaggaagcaggtcttaggctcagctggggacccttggcaggtggctaccctgagccagctgatggctttttttttttttttttttaagagacagggtctctctctgttgcccaagctggagtgcagccatgtgatcacagctcactgtggccttgaactcctggtgtctcatgtgtccctgtgaagggaccaccaaccagctttgtatgagcaacaaggctgtttatttcacctgggtgcaggcaggctgagtccaaaaaaggagtcagcaaagggtggtgggattatcattagttcttacaggttttgggataggcagtggagttaagagcaatgttctgggggcaggggtggatctcacaaagtaccttctcaagggtggggagaattaccaagaaccttcttaagggtgggggagattatgaagtacattgatcagttagggtggggcagaaacaaatcacaatggtggaatgtcatcagttaaggctattttcacttcttctgtggatcttcagttgcttcagcccatctggatgtatccgtgcaggtcacaagggatatgatggcttagcttgggctcagaggcctgacacctg

SEQ ID NO: 1562928 - DNA, 4001 bp, Homo sapiens
ggccctcagaagctcacaacactcttttcaccttgagaaaggggctttcttttccaaagattcagacattgtagccattccctccaagagggaatttggagaatgggcctcttcttgagaaacaaagaaagaagagttttttaataaaatcccaagacaaaccaaaagtgaggcagggaagttcatacactaaacagggcaagcgcttcaacatggagcgtgcagaaaatctctaaagcatcaaggactatttcccatttcctccctttaataacatccagaaaaaggatccctgtctccacgtaaggagtgaaactggaaaatgctcctgatttctactgacagaggcttcctgtataaaagattttcctctgttttataaaggaaaaggagaaaagaaacaatctgtgtcattttccatatacaagagggaagagatctctcctcaaaggtatagagtcttcattttcttgggagagcaaaagacaggaagaatatggaatcgcccacttgggggggtgggaaggatgtgcagatggaagattttttgtcactacagtaagtcagggaagtgggagagggcatctctaaccagtcaggaagaagtgataccttctgtggacaaaggaagtgctggcgtctggcatcaggtctcactttctcttaagagcacagacctgtttccaaaagctaagtcttttttttactgattattttcagtgaggccctctttgttaatttgggaaagtattgaacagcaggatctaaggggactggaagtgtctctttctctaacccctaagtgggagggagtcttccactccagtgagaaaggatggttgaacacttgtgatggaggctgcgaggggcatgcatggaaaaatatgcttctctgtgcaagatattagttttcttttttaacagattaagtaatagtaatagcaacagcttaccaaaagcttactatataactagtatttacacaaatgctcccttagcccgcatgacaattctaagaaaacagaacccaaattggagatggactgagattcagacaagttaaacaaatagtcaaggtcacaaagacgttaagtgagagacccaggtttgcaacgattacactccaaaagccatgctcttaataatgcaagggaaaggagctcactgcacaccaagaggcttaaagggaagaagagaagcgagggtctctctgtggacatcacgaggggagagggagaaaggttgatttctgataccataaagtaaaatttcaaggtcttcctctccgtatcttggggtacaggcgaaaaataaaggaggaaggtaagtctctttcttactgggaagaaagatcccctctgtcactttcaggcaagttgggtctcactcttcacctgggtgacgctgaccaaagttgggggaaaggtctcatttaggggttatcttttactcctcctcaggataagttcagaatccccctcgaaccctgggagtgggtctccctctgctgaccaacggatgagcgctaagaaagagcgtacgcctccgataaggggcgtcgtcctctccgaggagataagttgggggatccctgttgtatcgaggttgaagaggagtctctctcccgcgtcggagccatgactcggagaagccgcttttctctagcgacgcggggcctggtctcctccctctccctgggtcgttccgccgcccacagggcagccttggttcctttccgcgccccgagagggcggggggcctggactcccctttagcagcaccacccggcggagggtccctttagggcggagtggggcggggcggctacgcccgaagccttccagtcccggcctcttaccctgagacctcctccgcggcccgcgcttgcccagccagctcagcccctgcagctgcagccccgtcgtcgccaggtctacctgagcctacggagccgacagaggccgggggcgctccggccgccgccacctcttcgtctctatggtccccctgcacttcctcatccggggcccgagccagccatgcggactcgcccaaatcccgcccccgcaccgcgcgcgcgcactccaagggaaggctcttcctgattctgacctcccgccctctgctagccccagcctccctcaaccccgcccctgcggctcaaactcttaaagggaaacacaacttttggttctgctcctgctgagccacaggacccagtgccggccttcgctgctgtcaccctgttccagtccaccgtttttctagtctggacggctacaattctaagggcctgcctgcttccactctggcagcccgagagatcttattctactggaaagagtgttttgggtcatgacactcctctgcttcttctaatcacactgaccactaaataaatggcacctctgcctccagttggttacagaaccttgttttattttcttcatagctttaacactagctgaaatttctatgtctcatctctttattgacttgtttatcatttatcttcctccaccttgtctgttttgttcatcacttaatgctcagcaccaagagcagtgtccggcacaaaactagacgctcaatggacatttgaaggaaggaagaaatgtttatccagtggaagaattgaggtccagataatgaaatcgacttgccccaaataatacggctttgtgttaaaaaatagaaatcgaccaggcgcggtgtctcacgcctgtaatccagcactttgggaggcgaaagcgggagaagcacttcagcccagaagtttgagaccagcctgggcaacatagtgagacatcgtttctgccaaaaaacaaacagctgggtctggtgatgtgtgcctgtaatcccagctactctggaggctgaggcaggaagatcacttgaggctggaaggttgaggctgcagtgagcagtgatagtgccactgcactccagcctggatgacacagcaagactctttctcaaaacaaaacaaaaattgctcaggtgttgatgcacctgtgctcctagctactggggagcctgaagcaggaggatcgtttgagcccaggagtttgaagctgcattgagctatgatggtgcccccactgcactccagcctgggcaacaaaacaagacactgtctcaaaaaaaaaaaaaaaaaaaaaaattgaatgcttcaaagtttcgtttctttctttcttttttttttttttgagacggggccacgttctgacaccaggctggagtgcagtggtaggatctcggctcactgcaacctctgcctcccaggttcaagagattctccagcctcagcctcctgagtagctgggattacaggcgcatgctaccatgcccagctaatttttgtatttttagtagagacagggtttcaccatgttggccaggctggtcttgaactcctgacctcgagtgatccgcctgcctcggcctcccaaagtgctgggattacaggcgtgagccaccactcctggccttcagagtttctttatgagagttgccaaattaaaaagttaaaatatttgccttttggccgggcgtggtggctgaagcctataatcccagcactttgggaggccaaggcgggcggatcacgaggtcaggagatcaagaccatcctggctaatacggtgaaaccccctctctactaaaaattataaacaattagccaggcgtggtggcgggcacctgtagtcccagctactcgggaggctgaggcgggagaatggcatgaacccgggaggcagaggttgcagtgagccgagatcgggccactgcactccagcctgggcgacagagggagactccgtctcaaaaaaaaaaaaaaatttgcctttttaagatgtcccattatggacatctctcaggagaaggaatcaaattcccttgagggctaagaagagagaatcctattagcttccccagggatggaagaatgtcccatcaaccaccattgctaaagacaaaaactatcttgggggatctag

SEQ ID NO: 1562929 - DNA, 4001 bp, Homo sapiens
actttggtgtgatctcaggtatgctcctgaactctctatgcctgagttcccccagctgtaaaggagggggtgataataatgctgcccagaccccagaggacccctaggaggctcttgctgggcagctggtcctgccccagagccctcccactccacacacccctgcatacgctcaagggcagatgggccccccacaaccaagccaggcctggtggccctaggacactcttggccacaagaattcagattattttctcagcaaatttctgaccagtgtcctggggcctcagcaggggcagggctgcatggtcctgggtctatctggacttgttctggctcagacctcagcccaccacaaggacaacgagtctgggaactcgggcaggctctctgccaaccaggagctgctcttgctcgccgggaccccacagggcaggaatagtgggcattcatatcattcccattttgcaaccaggcagaccgaggcccagagaggccagataacctgcctcaggccacacaaatggcaaacaataaggccaaaccttggtgatggccagactctaaatccggggccacttcttgccttaggaatatagtctttcctggcactcacttagccaaaaatctttctagaagggtggcaggccttcctgccccactcccggaacaggccggctgctttcagggccagaagagccagccctttggaggaggaggcttgtgagagtggggatgggccgcagagcctccccaggcagggcagcgttgcagcttgcatgtggcagggatgtagggtgaagctgtgcagggcaaaagacaggtcagttcccgctggaagtgccccactggggggcctcggtgtgtctctttccccagcactggcatggcacattttgacctgagcaatggtgagctgcccggaatacgaacaggaggaagagaaccttccccaggcagcatgtgaggctggggtggcactcgacacaggacagcaggcaaggacatgccgccctccaggctgagggtcttgggagcctcccctcccagcccctgctgtggcctccccctgggccctggcatgggaggagttaagctgccgcgggcaccttggcacattgcgctgcccagagtgtccggctccccacccccactgcttttcttcctttttgcctttttccttcttaattaatcatacgctgctgcccaatttaaatatggaaatgcccaggccgaggcgatgcaattattcatgagggccgggcggctgtccggggctctcgggctgtggggagtaccgtggcatcgcctccgttctgatgtgtgtgaaattatgtgcacaaaaggcgcctccttatctgggagtgtgaactaaataaataaataagggcttttgtttgtttgccggctcctgcacatggctgctgggactcaagcgctcgtgttgtctgcgcctctgtgggactctggggacgggaggcaggggaggcccccgcaggccggccaggggctgggggctgggggccgggggccggccgccgggcacctggggccctctccctccccaggcaccaccctcaccccgcagctcccccccatacacaccctcgctggaaagttcgccctgcccgggctgggctcccaggcagcctggcaccgtgccaggctcgccgccgagctcgggcagcagggtggggcaaacgcggagcacggaggacggggccgggcgacctgggcaccagcaggacccgaggccaggagccaggggcccagaaggtgagggcaccccgggtgggcgcagggtgggcgctctgtgggcaacgggccctgcggccgggcccaggagcaggcctcgttgcggggttggggggggaggttggagcggaggctggcagaggaggcaggcacaaaggagggcagtgccaggcagctgtggccgacgcaggcatcgctgcccgcctgcccctagccggcctccccgccgaggggaggacgcgtgtgcaggggcccgggcaggagcggcagacaccgagccgcggccacagggccagccgcacagtcggaggaagggccggagcgaggcggggcccggggctgtcaaggagaaaaacatcccaaggcctgcaaattgctgctctcagcttttttcccccctcctcctgcttcgcggggtgggggggttggggggggggtggtggggggagaaagcagcgcttcctctggaggcggatgcaaaaaggatgcagaattttaaccatctcctgcaccggcccgtccttcctgagcagggtttgggcccaggcctggcgccgtggctccctgggaagggaaaggccagagcagccgatgccggttctgggggacgccggaaagcccagcctcctctgcacctccatccagaaccgggggccccgcagcacctgcagcaggggtggagggtgggaggcagaaggggcctggtgctctcggaggctgcacctcacggtaccagtcgctacccagagcagcacgcctgtttgctggcctgctcttgggtgttaaacatggtgtccaggtccccggttggagaccccagccctgtaccgggtgagggtcttagctcccactgacttggggccttcaaccacactggcatcccaggccttcctcctgactgacttctgttttaaaaataatgtggaacgttttctggcatctggtgagggattcacacactgtttactgagggcaggacttaaggaatgagttcagaaggtatctatctggtcactggacaaacggcaggcaagccccctgtgctcctcgctgggtgagactcaggggcatgggtttgggcatgggagctcagagggatggtctgggcccacaagcccacgaggcatagagcctagggcccatgaaatgttttcattttaatttcttttaaaatcagaagaaaaaatgactataaaaataatgaatatacgacaatgaattcgacctggttttattggcctttagtctgatgtagtcataaaatagaatttttagtatttatggaggaagggaaccaggaagccaaaagtgccccggcccatggaaggcgggtgtggcctgggttggtcctgtctgtcccaggacaaagggtcagatgtctgggtccagggggggtttggagggcatctgggtgccctgtgaatctggcttccacgaaggctagctgggacaggttgctccagcctgcggtggacaggagccagggctgtgtatgtctgtgcgtgtccgtgtatgtgcacgtgggtgtgcaggcatactcgtgtgcatgccagtgtttgacaaaggattcctagacacctgcgtgtgtaagtcccaattctcaaaacggggaatgcaaggccagggtcaggagacagtgtggctgcaagggcctggtattcctgacaatgatgggtagggagtgccattgtctccctaggagaaagcagccttcaaggtcccagcacccccaaacccacgagctcacacaaaacaacgcgagccacaaatgcaagccacatctgtcatttaacaccttctaatagccacattttcagaaagtgaaaataagcgggtaagattcactttagtactaaaattcattttaatctaatataaatttccaaaatcctatttcagtgtgttgctcgtatgaaactgtgaacgggatattttgccattttttccatattcgatttggcctctccccatttcaatggctcctttgctgcgtgtggagcagctaccacggcggtcacgtaggtttagtaggtccctgtgccccccacttccccacccagagtaggggagactggttttctgcttcttttttgctggtggcccttcctggccagggaaagggatacttccactggctcatcagcccccagcaaccctgagagctgaaagaatggatgttggggctgcaggttccagaatgaggggggctgctggaaagggttcttcggctgtgctcccagacgcca

SEQ ID NO: 1562930 - DNA, 4001 bp, Homo sapiens
tgcttgcgacgtggggtaccacacttctttggacctccctgactgcccctgtgggtggatgagtgggggtaatatgatgatcgccagttttcaggtgagtaacccaaggaccagagaagcaaagtgacttgtccagggccacacagccagccagtgctggagctgggatcctgactcaggcctgccggacttcacagcaatccccgccccacgatttaaacaaagggctcagaatcccagactgtttggcaggaaaggtccctggggaggccataacctcctctgactgctgggggacttgggctccaagaggggagcggcttgcccagggacacagcaaagttgtagacgccaggatgggcccttcttggtcctcttcgctgtccgccagccggaggaaggtagatgactttgtccccctcatccgatgttaacaccaagcggtgctcacacctgaatgtgcattagaatgacgatgggggacttacaaaatgcagattcctggtgcccccttaccagctcaggacagggaccaggaattgacattttatcaagcactgtcatcaaggaggatgatctgggggtccaggacctcacttggagagccccagcttacccccaggattctggaggctgcgccgagtgcagaaggccggaggggccacagggaggcgccctcccgcctccagatccagtccagggaatgggactcaccactctcccaccaagagcatcactcatcaccttgcagctaggccaccccacacggtcctcatggcctctgtccacagatgtcactcccacccatgccactggtagggaagtggaggccgcttggaggaagtgacccagtcgctgggaccacatcttgtgacctttggacatgggaccctcccccagccttctaccttggctctggtggaaaaaatcttagaaagcgtcaggctctgcttatgggaacagggtctagaaatccatctgattaggtcagaggcgcagacccgtggccaggcagacctgcccagtatccccacctgccaagggatggtgagggtgtctccccaggttctgaccttacagaccactaagcgctccagccctggagtctctgtcccggggtctgcctgctgcctccacctgcccccacccactctgcagggccagctaccagccaggaagtggctggaggcccaggccagaggccagagcggtgggggccacaggctgagccaggacagggctcagaaaggaagggtcccccatcctcgaccatctttgtttgccctattagggggagcaatggcgagggaggggagagctgccatggggagagagcggtgtcggggaaggagatggggacacggggcggctggacggagacccacccacagagacgcggacaaactcagagatagagggaagggggcggggcggggggcgagcgagagaggctgggagagaacgagctcgggaggtcccgggaggctggggtgggagaggctggaccttcacccaagggggccgcccctgccccgcagattccgtccgacccctaccccaccctagggccccgcagtcggcgtcgcgcgcgcgcgcacctacgcgcgcacacacacgcgcgcgccgctccgccggcaccgccccggggcccccccttccgcagggtcgcgcgtgccgccccccaaccccagccacccggtcccctctccggccgggcctccggacccgtagccgccgctcacctcggtccccgcgccgccgccgccgctgccaccgcgcagagccagagccggagccggagccggagcccggggccgggggagggggccgcggaggccccgccccgccccgctccgccgcgtcccgcccctcgggcccgcgcgggggcgcccgcagccgccgcagcccccagggactcggggcgctgcaggggagactcgcctaagtgcggcaagcgggtccgcgggcacgcccacccgggtccgccggagctggggggctggcgcttgggccccctcccggcctccgcccctgagcactgcgcaggctgtgggcggcgcccgccggggcagggggcgtcccgggtcacccggcggcccggatcggcccgtgacgccctcaccccacccctcggcgggccgcaaacgtccagagagcgccccctccccaagccccgacctgagcggggcgctagaagccgggaggacaaatcagacggtcagactcagtccctgtcccggggatcggggtccagccgcgggcggagcggggagggaggggaagacgaatgggcctggcaccaaaaacagcccagggctgtggttctcaaagtgtggcctccgttagtgcagagtccctggccccaccccggacctacagaagcaaaactcggggttgggccccctattttaacaagccttctgggtggttccagagttcagtaaagtttgagaagaactgccctggtggaaacatccagcaccccacatcctgcaccccacaacccacatcccacaccccagtgtctcgaaaagggcttcttttcactcttcacttaaacagcctcaccctgtttaagtacctctccgttggtacgtggctgtggtgggggcagtgggcggggagcagtggtgtctgtcccaggaatccccgaaaggattgacagtcagtgcctggtagaagccgcaagtcctgtaccagaggccaggctgtgggcattcgggcggtgatggttatggttattgtgttttggtgtagtgattgttttaatgttttagaatgcaattgtgcaaatatttgtgtccatattcagttgtaaagctttttttttccccttccatcattgtgcttgtttgacgctaagccactcatcccccagaaacagtgttgacatgaggcagatcagatggccggccttcctggtgaccagatttcaggacagcaagcatcccggccagaccccaggtactctaatggggtccatagggccctgggagtgagcagctctgcctgaactgcaggatggggcatcctagagggaggagagggcatctggacagaggggcctaaagtgtctgggtggcatctagactgggcagacagtgcctggatcgagtactggggtggggctggaaacggcccaagaggtgccagaaggaggtggagctgttctgagccccgtgctgccaagagggatgtcctggccttggagggacctttgaggtcatctaatccagcctcttggtgtgtgaccactaggacctcccccacttctaattaaactttccttctttctttcttttttttttttcttgagaccgagtctcgctctgttacccaggctggagtgcagtggtgccatcttggctcattgcaacctctgcctcctgatttcgagtggttctcctgcttcagcctcctgagtagctggggctacaggtgcctgccaccatgcccgactaatttttgtatttttagtagagacagggtttcactatgttggccaggctggtctcaaactcctgacctcaggtgatccacccgcctgggcctcccaaaatcctgggattacaggtgtgaggcagcacgcccagcctaaactttcttattttgagataattgtagattcacatgcagctataagaaacagtagagatgtcttggacccagttttctccactggtaaaatcttgcaaaattatactacaatatcacaaccaggatattgacatagatgccatcaaggtacagaacattccatcagcaaaggacccccccgtggactttttatgtgcttatctccctccctcctccctcctggcaagcacttatctgttctccatttctgtaattttatcatttcaagcatgttatataaatgcagtcatacagtatgttaccttttgagattgcttttttcactcagcataaatccctgaagattcttccaggttgctttgtgtttcagtagtttgttccttgctattgtggagtggtcagca

SEQ ID NO: 1562931 - DNA, 4001 bp, Homo sapiens
caggctgtcggggagacctgggaacagggcagagaagctctgtatgacaagcgctggcccaaaggcatgagcagagcccagggtgagatggcactgagggggccgtgggtccgcctggcctgcggtgaacaggaggcagccaggaagactttctagagaaggatgccttccagcagcggcttaaagaactagcaggcagggcgcggtggctcacacctgtgatcccagcactttggggggcagaggcgggtggatcacctgaggtcgggagttcgagaccagcctggccaacatggtgaaactccatctccactaaaaatacaaaagtaagccaggtgtggtggcgggcgcctgtaatcccagctacttgggaggctgaggcagaagaattgctggaggcagaggctgcagtgagccgagattgcgccatcgcactccagcctgaacaagagtgaaactccatctcaaaaaaaaaaaaaaaaaagagccagcagaagcccagcaggtgaaggacgacaaaaaaaaatcagactaggcataggaacagcaggaggaaggcccagaggagagaaggctgagagtgagcaggaacagactgcatgtccgggcaggtggtgagcgggtgcaacaagggcccagccaggactgggcattggagatgacccgaccatccacagggttcccatcaagagcccgcatgcagcccgctccctctcacagctgctgcacgcgtgactctgggtaccagcacttcccttcagaactctaagcaccttaggcaaaacttccaccttaaaaccagctggtccttgaggcccccagcaccagctcccggttatttcctggatgagccaatgcaaagcctgccagggcctctctggaaactggagccggtgcaaaggatgatccgtgcccacaagctttggtggatgtgaggccgtgagaaagaataaggacacaggtgtgatccttgcttgctcagagaaaaagccaagtttatcctgaattcacaaattagagaccgaggctcagagaggtgaagcaacctgtccaaggtcacacagcatgtgagcaggcccaggcactgagcccacccctctgactcccctcaccgtggcataagctcccctagggaaggtccatctgacatgtcccccgctggtccctggagccttgagcgctggcccgtggccagggcacccagaatgttttttatgaatgagtgaacaaaagaatctgaaccccctgcccttcgtcccaccccatgcagcagtaggaagaagccatctgctactgttttttgttattgctgctactctaaaaatcgaaagcacaaacccaaagtcacagcactgtgtcacatcagggcggacagacaccctagtcctgattcagggctgaaacggagtggggctcctccggggcaggggcacacagcagggtcttggactcagacagaccagggccaaacctctgctcggccgctaagctatgagacccgacacgccgcaccccctctccacgcccaggcgtccccaccgctaaaaccagacgcaaagagtgcctaccttgctgggtgccgagaggactcaggaggtgggatgctgccagggtgggcacaggtggaatcccagcccacgggtctcctctgctctgcgaccttggctgaggtctgcaccctcctgggggtgagctctgaaaccctgctcagcactaagcacactggatgcctggccttgggggcagccgaatggcttacacattaggaggcgttcacatggccaaagggcagagggggcccaggagcttgagggcaggcggctcactgggctcccccatgactcagcagaactcaggctgcaggctcgggtgggagctgcccccgactgcaccctatgcagggaagcccagctgctggctgataaatattttatcactgctcacagagcagtccccaggaaggcgcctgcatcctccaagcccacagagcaccccttcctgcccggacagaaggaactggccaggtccaaggtacagggtggggtcaggagcccagacagctcattcctgccctgccgacttcaggtaagctcagcacacgcccctgagccccacccacactccactctgccctatgttgggtgctgggctccgactgctatgccccttggacagcccccctcctcctcttcaccccgcctagaacaccaaccctctgcctgttggcccagtcgaaccccccatcctgctggcccagggccattgccgcctcctttaggaagcattcctggatcctccatttctgctgtgtgactgtggggagggccatcacactctctgagccagttttttcttttttcttttcttttcttctcttctcttttctttctttctttttttttttttttttttttttttgagacagggtctcactgtgttgcccaggctgaaaagcagtggcgcaatcacagctcactgcagccttgacctcccgggctcaggtgatcctcccacctcagcctcccgagtagctaagaccacaagtgcatgccaccatgcccggctgactcattttttttgtacttttaatagagactgggtcttgctatgttgcccaggtttggcttaaactcctgggcccaagtgatctgcccgccttgacctcctaaagtgctggggttactgacatgagccactgcgcccagccttcttttttgtttttgatttttctttttcttttcactttcccaggttcagtaacttgcccatctgagccagtttctacaatggagctaaggatccccgctcatgggggacaaaatgagattgtgccaatcaagttctcccagcacctcgcccacacagagactcattctatttgggggaaaccgaacatcaggaatcaaatcataaacatgactgatcgtggctaggagtggggcacaggactgcagagaatctggctcctgtctgcaaggatccacaatttaattaggatatgtgacctaagtaataataataataataataataataataataataacaacagcaacagtaacaacagccaccgagttttaagccccaccacatgccagacacttcacatcccatctcctcgtttactcctcccagaacccctaggatgtgggttgcttcttgctcccatttgacagcagagcaggaaactgagatgcagggagggtgagagccctgcctggggtcacacagctttccacgtcattgtgcatgtggaggccccactgaaaggcgggctccaagacaaatgacagaacagccatgggacagatactgtgcagctgctgaaaactcagcatgactgctcacgagctcctgggctgcttagggacagggaagatgctcacgatattacaccgagtgaaaaaagcagaacaggccagacgtggtggctcatgcctgtaatcccagcactttgggaggccaaggcaggaggacagtttgagcctaggagttcaaaaccagcctgggcaacgtggcaaaaccccatttctttctttcttttttttcttttttttttgagacagcgtcttgctctgtcacctgggctggagtgcagtgacgagatctcggctcacggcaacctctgcctcccgggttcacgccattctcctgcctcagcctcctgagtagctgggactacaggcgactgccaccacgcccggctaattttttttgtatttttagtagagaaggggtttcaccgtgttagccaggatggtctccatctcctgatctcgtgatccacccgcctcggcctcccaaagtgctgggattacaggcgtgagccaccgcgcccagcctctttctttctttttttttttgagacagcgtcttgctctgtcacctgggctggagtgcagtggcgagatctcggctcactgcaacctctgcctcccaggttcaagcaattctcctgcctcaccctcctgagtagctgggattacaggtgtatgccacca

SEQ ID NO: 1562932 - DNA, 4001 bp, Homo sapiens
actgcgtgagtctggggttgagctgtgaggtacagaggacttactatgtgctaagcactgtgttgagggctttattttgcatgttcaaatttcatccctacaacagccccatgaggtgggcactgttatctgcccgttttatggataaggaaattgaggacctgacttgctcaagaccacagagtagggaagaggcagagttgggatttgaaataagtctatttaactctttcctctaaatcacggcagagattcaaggacagagagatggctttcatctcaatactggaggagaacactgctcttctttttttttgagatagggtcttgctctgtcaccgaggctggagtgcagtggtggcatcatggctcatggcagcctcgacttccctggctcaagtaatcctcccatcttggcctcccaaagtgctaggattacaggtgtgagccgccgtgcctggtggagaacacagctcttaagacactgtgcagtcgttgggtcagggagatttcccaacaggagtccttccttcactgttcccacaccagccctccccacagggaggaatgcgaatacccactgacggagagggaaacggaggcaggcatgtgacagccctctagcagtttgcaactcagagacagaagagaccacgtttgaagagggtctcgctggcagccctgagcccaccatgacgctcacaatgcattcaatgaactgaaaataacgtgtgtccaagtgacagccgggttcccggtggccaagaccacagccggtggagcatctggcaagattttactgccaggtgtgggcgcgagaggggcaacgtccacagcctcccccgaacagtgtccacagcctcccccgaacagtgtccactgcctcccgcgaacagcctgcctcactttctcctgcctctcattttcctagggagcagagacgctggggagttccactaaataaaccgtctcttttccagatcccggacttgctcctcaaacaaagctgggagaaggggcttcccaggcccctgcttgtctgggaatgacccctggaggagagtcctctaaagaatgcctcgcagctgccgcaccccctgctgacagctggaggacagggggcctctcaagggaaagccgaagggagcttaaagagacacaggaagcctgcgcgacccacccactgagccccgaggctcccgtgctcagccgcaaaatgggaaaaatacttcctgctccgttagcctcccaggttgtcacgagcaccgcagtggagacgtggaaagaccccgggtaggaggcgggcacgcggcttcccggcccaccccgccgcccacccgccgggcgcttctgggccagccccgggcgctggcgggcctcgctcccttccctgggttctggaaccacgctgcactgaactttcctccaggcccgcaccactccggcggggcaagttctttgcaaactgtgaagcgccgcgccgccttcggcagcgttcctggctcggggcggcccctagcccgcggacggctcaggggtcccctcccccggctccagggcctccgggtggccgggagggcgcggccttacctgttccaggtggcgttggcgcaggcccggcgctgctgcgtgccccgctcgtccgcggcggcggccggctctctcttgcccaggtcactgaggctgggcgaactcatgaacttcaacctgcggagagtcctcatggtgacccgggccgcctgcgccgcgcccacgcgcgccccacgccgcgccctgcgccacgccgcaccaagggccccgggccggcgatgcgccctctacgcggaaactccggcgagagcaggaagccgagcggtcctgcggggtcccgccccggccccgcgcctccgtctcgggtcccgcgccggccgccccgccgggttaatcattgcacggagaggctcagcgtggagcgccaggcgcgcggccagcacagacccggcgcaaacggaggccgggggcggacccgggggcgggcccaggggcgggtctcggcgccccggggggcggggcggggaagggggcgggggcatcgcgggcggggcggggcctcaggcgagggggcgtgtgcaagaggcggagccggcgtctccgcggccgcagctgccacgacgcctcgctgggtctgccctctgaggacgtgctcaccctcctcccctcttccgagggccccacgtgcccacaggaaaccaacacgcacaggacgcagggcccaagcccaagcgcccgccccccgcccagcactgcggtcgcgcccacacgatgtccttcgaccccggccccggaggtctccctccacagccctcctcgcaaaggctgtgccacagaggtgcctccgtacccctcacctgaacacaggctcccccacccagttctcatgaggactttgggtagaggccttcagtcccctccaggcaccttggcccaagaacccactccacccgggctcagcctagacccccttggacagggacttcagcattgcctggctgcctggaggatttgctggagtgagggcttgaagaagtagagggtttgctccttatctcccacccccaggtctcttggatggtaaaaccaagcagtttcccaagtccctgtggtgggggcagagtgatcccagtgaaggcagggcacagccggtgcttcctgcctgcttcgcagagcacttttagatgtctgatttcacatgaactaacatgaactacttccgtgaggtagagattattcttctccccattttccagttgaggacattgaggctcacagagtgaaataacttgcccaacattgtgccaacattgtgcaatcaacaaatggtagagttgggcttcaccacagggagcgtccagccccttgaacagggcccttcccagtccccagcttctgggattcccacaaggctcacctgacccctccatcagatggggggtgacagccacagctccaggagctgggagggccccatataaaatgtaagagagaggtgatggctcatgcctgtaatcccagcactttgggaggccgaggtgggaggatcacctgaggtcaggagttcaagaccagcccggccaacatggagaaaccccatctctattaaaaatacaaaattagctgggcgtggtggtgcatgcccgtaatcccagctactcaggaggctgagacaggagaatcgcttgaacctgggaggcagaggttgcagagagctgagatctcgccactgcactccagcctgggcaacaacagcaaaactccgtctcaaaaatcatcatcatcataataaaataaaataaaaagtaagagagcctcatgaagagtctttgtttagtgcaaatcaaccagtgtctcctgagtacctcctgtgttccagacataaataccatcgtctttgggagacagagacataaacagacaaacttgctcatcagtaaagcgggatggaacggttcatctcacaggcagcttggggcccacaggcagcaacaggtgctttataaactaactgtcaagtgctgtacacgttttcttttctttttgagacagagtctcactttttggcccaggttgaatgcagtggcaccactgtggtcactgcagcctctacctcctgggttcaagcaaccctcccacgttagcctcctgaatagctgggactacaaggcatgtgccaccatgcctggctgattttttgcgtgtgtgatggcgtttcgctcttgtcgcctgtggagtgcaatggcgcaatcatggctcactgctaacctctgcctcccaggttcaagtgattctcctgcctcaatctagtgagtagctgagattataggcacctaccaccacgcctggctgatttttttatttattagtagagatggggtttcaccatgttggccaggctggtcttaaactcctgacctcaggtgatcctcccacctcggcctcctaaagtgctgggattacaagaatga

SEQ ID NO: 1562933 - DNA, 4001 bp, Homo sapiens; identical to SEQ ID NO: 1562932

SEQ ID NO: 1562934 - DNA, 4001 bp, Homo sapiens
taggccctgctccctttctctctccactcctacctcagcctctgctctggtctgtcctggatgcaaatttatgctgcaaaatctgagcgctgaggtcctgaaacctgacccacccgacgcagggaggaggtggcagggacagggacagggacaggcaggagctgctggggcccacttcgggtgccccatcccacatctggccagggatgcatattctaaaacctgatttgatgttttacttttattttttatttttttgctggcttgatttttcgaagaacacttctcagatctctactaactacttgctttcctggtctcctgggtcctggcatcatgggtccagactccccctactcctataaaccttttttgggcagagtagggtgggagagtccgcttggaattgctatgctccctcccagaaagccccatatgtgtttggaagaagggtagcaccttcagaccacactttctagacaacctaagcaggtgtaggggtctgaacttcacctctggaaaaatgtcacggtgcctatctgtatgcagccagagacccgttgtgttcttccccatggttcccaaggtttcaagctgcaaccagctgcttctagagtgtgtgagcgctggacagggagtcaggaggcctgggttctagatcctgggctgcactaagtcccagtgtgaccttgggttgtgaccttctctgggcttctgtctccttctgatgtgttgatgacgtcagtggtcccatgtagtgggacctggggactgcaacttaaggtattggcaggtaggcagggccttgggctgtggtggccctgggtggtggggaccagggagagcagctgtccagctgcccagtaactcaagttccctgacatcgctgtcaacattgtctcctgcagctcagccctggatggctgcccttcctggaaaccttaggatacctctgctggctccagctgccccctccctgtgagtcagctccttcaagccacagcccgccagatggcttccaaggcaccaaggatgcagctcctgacctgatgcctctcagctccaggacttcccaggacccctcagctgccctggaccctgctgctactgccgtcacctctgcaccttgtccccagctgggctgctgactcagatatgccaggctcctatgctatcatttcaactcccaggctcagctcactccaggagcctagttggagaatggatttccccagctgaaggacgcttcagctataccagtggagaaacggaggcacagagtccgtgaatggtctaaggacacatggtaaagcaatagcagagcagggtacacccctggactcactcgtgtggagttcagtgactctctgggtgatcctccctggtgcctgggacccagctctatcaggtcccatacatctcagccacacactggctcctggtgagcccctaagcagctaccctgtggcaaaggctgcagcctcaacaggggcccactcttcttccatctccttcctccatctctccctgctgctgagttctcctatcaacttgacaccccctccgggactgagccctcccagccagagcatcaatgtcattaggtcagcccatcagccctgggtagtcctcctctgccctctgggtcctctctgatggcatcaccagagtccacagatgtctgactccagccctctcgttctaaggctggggaatctgaggcccagccacggggggcggtgggtggggggagtttgccccaggccacaccaggagtctgggtggagaagcaggaatgcatgctctcagccctacattccacagctgccctgcctccagcacccccaccgcacccccctccccgggtcactacggacaggggagatgtagctctcccttccagctggctcatcctgctgcatccctctatcctccaacctcggtagctgccactcacctcgggtgggggtggagggctggagcctgcactgaaaggctgggctggtgggaagtcctgtcgggaagtgagcctggaggtgggatggccacctatataggcttctgctctggctattttgggaggtggcactccccgtagccccggccccctccccttccggtgtcaggtactccccaaccgtggtgctgggtgtctgtatcacattcagcctccctgggcccatcaggccaagactattaataactcttggcccctgcttccctccagcacccaaaattgaggcccaggcagggctcgcctcttccatgaagccttccgtgaccactgtagatggcagcgatgcttccttcctccatattctgccaggaaaggaagagaaacagcaaggaaaagaatgaaacaagaactgtcctctgtgcatggggctgagccccattcctatgctgatatgatctctcactacagccttgccaggtagacatagctgctctcgcacagatgaggaaacagcataaagacgttagatgttaagtgacctgctgctcaaagccacgggcctggggttgggagcggactcagcacttttgtgcgaggatctagtgcctggtagaaggaaatgttccgcatattctcagacaagtcccttcctctctctttctcagtctttccacctgtaacatgagctcaatcagaggtaaactgtgccctatagatggtctagggcgaggggaagatggaccccctgaaattgtatgcgtgtgacattgaggcacaaaggcccaagcccttcatgatttgcaaagagatctctgacattgtctgttttggattggagaggaccagctgagggatgtgttttgagaagcatgaatgaccaaatgaattcaataaatacgtagtgaatatctaatctgaccaccatgaaatgttcctctcctcatccctaacctgaaaagaatctccagggcacgaagattgtcaatggtggggtctagttcttcacagtgacacgaggaatcccaggctccatgcaaaggctgtttggaagctccatggatagaaagggccgagggcaggctgcatgggggaagctgggactggggcctccttgaggtgtggtgctggggcctgagctaggttgctggtggtggcaacaggaaggagtgtgcagataggggagcacctcttggagagaagcttccagaattggggctgtggcatgaacaagagggacaaatccaagctgaccctaaatattcaaggtggggtttgctgaagaaggaaggtgttgactttgaaggcagggagtgtagggaggaggtagtgctcagtcgaagggatgatagagtaagtggtgttgaatcctaggatgttagggctgggacagcctccgtggtgatcggctacaaacttctacaaatgacatcatgttatagatgaagaaaccaaggccagggtgacttacccaaatcccccagagagtagtggaagagccaagagctgatgctgggtttaggggacctgaaggacaccctggcggagatgtgtctgaactctggagtgaggtcagggctggaccctgggggctttgtcatcagagaagtcaaggagttgatctcgtcaagtcgtgggcatggctgagctcagggagccgggatgcaggagaaccttgaggatgaacccttgaggaagatcgctggctggggcctgggaaaataattacacttgtttgttgaacagtgtgctgggttctgtgtgcacagcatcgcactttgattcttgtatccccttaagaggtaggcaaaaccctctcttttttactaatgatggaagaacaaggctcagagagattgggcaacttgcctaagatcacagaatggaggtaggatttcagccccggttctctgactccaaagcacttgctcctttctaccacactatcctgcttccagaataagaccggaagacgggagcagcacctactgtgggtgaattctcaggagcccagatggccttcctctttgtccccataggtcttctt

SEQ ID NO: 1562935 - DNA, 4001 bp, Homo sapiens
aatggctggatcttagagggcagggtcatcttctatattggtaaatattgtccactgccccctatggaggttgtactcaatttgtattccctgctgcaattaatattggattttaatacagacacaagagagctgtgagttttcaagctcatagaggcggaatggcaagaggagagagccctggatttggggtcatggaactggaatgctgttttgataacaacaacgatgatgagaacaacagcaactatgactgcaggggagctcctgcataccatgagccaggcacccaatatgagaggaattaccttcatgtaacagtggctctgagaggttgagtaatttgcccacagccacacagcttaatgacagaatcagaatgaaggattcacatcaaggactgtctggctgcaaaatcccagcccttataacctccaggccacactgctgcccagtgtcaccattaacttgcggtcccaccttgggcagtcagtgaccagtctcccagctcctcaaggtaaatctgacaatggacagacctccttgattcacctgctttacttctaggcatgagtgtagagtggggagagctgatgtggctgcagggccaggagagcactgcagacgtaatgactctctaccttagggaagctggcgatgacacggtcgcggctcacagggggccccaaaggtgtcagggaggacctcattcttccacagtcctgtggacccaaccaggagaaagacagttaaggagctgtgcaaatacctggggattcacccatgagtttccacctaacttttcatcagatccaggctgggtgcagtggctcatgcctgtaatcccagcactttgggaggccaaggtgggaggatcacttgggcccaggaggttgagaccagcctgggcaacaaagtgaaacctcagtctctacaaaaaaaaaccaaaaaaattagcagggcatggtggcctgtgcctgcagtcccagctacttgggaggaaggtgggaggaatgcttgagcctgggaggtcaagggtgcagtgaaccgtgaaggtgccactgcactccagcctgggtgatagagtaagaccttgtctcaagaattataaataaaaccagatccaggcttccctctctgtcaggaatatggggcagaggccatttctctcaatctgcatacagcaggcagcatggtatgggggaaccaggcctgccccaccctgcctgggagtcagaagacctgggtctccccttgacaggtgtctaccaaggaggagctcccctctgagcttaccttactgggctgtgaggcatggcacagctcaggcagtggaagtagagtggggaggggtctcctgctcccagtctgcaaaggacgaaggctctaggtgggcctgggggccttaactttcagccaactaggccttttccctgaaaaccctcacttcaccaggcctctgactcctcgagcctcctcaacagcccctctgtctcctttttctgtccggactcctctccaggctgggctggggtggtcctggcggagtccggttgtcttcccgcatctgacctggctctcctccacaaccagcgcgggcctggcccagagtttgcgctccggaaatgaggacgccccggggccgcaggccgctttcaagttataggggcgggaagtgggcgcggacgctgtgccctcgcggccctggcctcgggatgtgccagcacggggttgggtgaccgggagggtcggacagagtgggcgagctgactcaccagcgatggctgtgaaagctggggctccgcgcggcctggtccgcctgagccagcggcggcgatcaccatggcaacgagagccacgcgggacctgcgggctacacgaatcgtcgacgtcgtgggcggggtctgcgttggactggcagcggcgcgtccaagcatccagcttgcaccggcgatcaccatagcaacgagaacctgcctggagtctgggcggggctggcagcagagagactcctggacaccctggagagccggagatcaccatgacaacaagggcggtgctggatgggtgggcggtgggcggggctatggaggcccgggggcggagcctgagccctgggtggggctgaccgtggagagattcgcgcaggttctggtgatcagctcggctgggagaggttgggcggttatggcataagagctcctgatgtggtattgatgtttaattggagtcaagcaccctgcagctgcagaagatagacctgcctaccatctactgaccttagtctgcatagttctgaatccagtgctgtctgaatatcatatgcctggcttctagagctcacggtacaaaattaatttccttaataaaaagctgacctgagtcagtgatttcctctgaactagtttcggtttggaaagttagctgttttgggctagatggcctcttgtggcccttataaaaccgtggaaccagcttcgaagtccggggttcagtttgagaacctacttaattcagctccttaacttttctgcatcacaatatggaagccttggtacacagatctaactcagtcatcttcaattcaaagctaagtgtgctggaggctggtgtttgatgtcttttttttttttttttaaagagatggagtcttgctatgttgtccaggctggactcgaactcctaggctcaaggaatcctcccgcctcagcctccccagtccttgggactacaggcaagggccaccacacctggctctgtttaatgtcttttagtgagtttcactgctaaggttgaggcttagggggtgaacttaggtgagttgttccaccttccgcacctcagtttactcaactataaaataaacgcaactatctatttcaatggatcacctgagatggtgaaagtgcttttatactgtaaagcttgattcaagtccattaactattcatttgtcctacatgtactgaaagcttcctggtatatgcctagcactggggagacaaggaaagagaacggacatggtgtccaccctcagggaaattggagtccactgcgggaagcagagaagtaaatagagaattaggggaagggagtgtgccaatgggatttaggagaagggaagattaagctgtggggtcacttactaatttggatttggggatttggcaggagctagagatcaccctgaactcctcctttagctgttttttttttttttttttttttttttttgagatggagtctcactctgtcgcccaggctggagtgcagtagtgtgatctcggctcactgcaatctccgcctcccggctcaagcgattctcctgcctcagcctcccgagtagctgggaccacaggtgcgcaccaaccatgcttggctaatttttaaatttttttagtagagatggggttttgccatgtgtgccaggctggttttgaactcctggcctcatgtgatccgccggccttggcttcccaaagtgttgggattacaggcgtaagccagcacacctggccccaatcctcctttagctcttaagtgggctctttgcctagatctagaaaccaaactgacactgggcagattagcaagagaaaagcatacaagtgttattagttttacatgcgcatggggatctttaccagagtgaagtctagagaagtggccaaagcaagatgcttttatactttttagacaaaggatgacaaatttgagaagaaatggcaggacaaaggggatctggctagggcagtaaattctaggggattcactaggagataatatgaggggcataaacttagtggaagacagggttaagtatatttattcaggtccattgcagtccccaattcttagtctcaggtgacaagggctattttcttgccctggtacagtgagggtaccgctcctagaggaatctttatggcttgctgaatgcagaaagaagcatatctgtttgccttttcttgtatctttttttaaaattatatctatttatt

SEQ ID NO: 1562936 - DNA, 4001 bp, Homo sapiens
gtctcatggagacaagctggcagcacggcagagcctcccttcacctctccgggtggcacgtaggcaccgaaattcattacaagaagaagccagtcttcacaatgattatagtcaatcgtcagttctacccagttttctctatttcagagagtccctccaagaaagcatctttaccacctttacccaatctgtcacggtggcatagtcacttttgtctttccattcccactccccgcccttgccatccctcagcccacaaaccacatacaatgtcctcagttgctccacacgttctctcagggctcagaggaaacattcaaattcctcagtccttatgacctgccccctccacctgacacacacaacggctcacgtgattcccctcgttcccccatgaacatctgggctccagccaagactgctccttcaccagccccaagaagccatgctcctctgcctctggaggactttttaaatgacctggaccctctctggggctggtatttattccctaatctcccaacatacttggatttgcccactgcgctgtctcccaggcagatgatcttcacgttgtcatcagcatcatacttcccttggtccaactcactcggtttggttttgtcttctgccattggctcctagctgtagagaggggtccagcccaagggaggggagggtattgtcactgtctgggaagatcaacaagaggctgttgtcagagataagtcccctcaaccaaatctccagctgtacctccctccagactgcttccctcagtgccagactgagatatggtatgcaattgactactagacttggagtagcagagtatgacacacaggcatcaataatatgttatacacaaatagttaagtcctgcgcaccccaaatgctgctcctcacgttacccatttgcacaagacattcaccaggcatccagtgccaaaggctgtgtgcaacattatgtctagctctgttttactctcctcacacctaaatatgactttgcaaacattcctgagaatgtaaccacagtccagactcttagctaggggggcacatagaaatgatatgatgatgagacagcagcaataggtgagccttactgggcattcaccatgagcagaccttgcacagggttcagaggatggaagacacaatgatagcagagtctactgtggtgagagctacgacagaagtatgcacacgggtcaggggtagaaaataccaacagggcccccgagttttcctgactgtgccaccacacagctactgcttctgcacagccagggacttcgccttgtttatccagggagacaattcctgggaagtggcagatgcctggaaagcatgatgaggggtctgccccctttcacctgtaccctgtagagagagcgacagaaagccaaatccagcttcatggctccatgcttgaagacgttctttcttttgtttagagatagggtctcactctgtcgcccaggctggagtgcggtggcgcgatcacggctcactgcagcctccaactcctggactcaagcgatcctccctcctcggcatccctggactataggcgtgagccaccgcttacgggcgaagacttgcttgtccgtgtccttgccatctaagtgggtaagctatctttcgataaatgtttttggccaccaaccatgtccaggcatcgccaggctgcccgtcccgccccccacaacagcctcgcgaagccacctttccgtgcttcccccgacccggacgccctctcgcccacaccgctagggaggcctcggaggggctgtccccgcgtgctaagccagccaccggggcggatttgccctcacgtgcggttccgagtgagggctggagagaccagggacgctgcgggtcggcccctcgggccctgccgccagtctggactctgcgcgctctcgaaccacgcccgccggcccagctcgcgccgcagcgcactccacttccggctcggcccgcgtcctcgcagctgctacgcaaccgcacaaggaccccgagggaggctgcccggccgaaggcctgaaggaccccgccggggcgctggctgcccagcgcggcgcctggcgggagggccgcagggagtgcgcatgcggccgagtgcgggactggggctcctggctgtgggtgtggtaccgaggcttcagcgggtgccgcccgcctagagggagtggagcggtgagcacgtcaggggtggggggcgcaggtcaagctttcaccagtttttaattctttgatggggtaaatttgagcaattttctcgacttgtcgacattcgttattaactgagcaggaatcaggagaggaacccggtcctctccacacagcccagcaggtacgccgcccatgtgcctgtggagaagagaggttcctgtggggcagacaggtgtggaccaagtagctgcgaaatttcttctgaagaaaacacacaagggggaagcgagtgagctcagtggaggaggggcgctaccccaggggacgtccccatgcatgggcttgtgaacctcgaatatgtgagacggtctcagtcaatttagaaagtttattttgccaaggttgaggacgcacgcccgtgacacagcctcaggaggtcttgacatgtgccaaaggtggccgggacacagcttgcttttatacatgttagggagacaggagacatcaatatatgtaagatgaacgttggttccctcgggaaaggcgggacaactcgaagcagggagggggcttccaggtcacaggtaggtgagagacaaactgttgtattctttcgggtttctgaatagcctccgcaaaggaggctatcacatattaacctatctcagtgagcagaggggtgactttgaatagatggggaggcaggtttgccctaagcagttcccagcttttttccctttagcttagtgattttggggcccccagattcattttcctttcacaggctagacagctttaggaactgaaaggttcacgaggctgtaacgaagagtcgagttgctccaggtgagcctgggccacaacagcacgcaggacctgggcgcccacgaggggctcctgggagggtttgggaaagggatgtgtgaaccctatctgagatggtttcaggtaatttagaaagaggtgcacccgtgacacagcctcaggaggtcttgacgacatgtgcccaaggtggtcagggcacagcttggttttagggagacatgagacatcaatcaatatatgtaagaagtacgttgcttccatccagaaagctggggacaactggaagcagggagggggcttccaaggtcacaggtaggtgagagacaaaggttgcattgttttgagtttctgattagcctctccaaagcagggaatcagatatgcacctatcttagtgaggagataggtgacttggaatagaaagggaggcaggtttgccctgagcagttcccagcttgacttttcctttagcttagtaattttgggtccccaaaattttcctttcagagagcctacgactagatttgcatctttacgtcctgcgcggaggctgctacacacatgcagaagtcatgctggtggcctggacagtgaagggagagaagtggatttgggagacatttaggaggtaagattgctaggaccttggtgatagcttggacatggagggtggaggaggaggggtgtctagcagataatgctcttaggttaccacctgggatattagggagagtgagcaggctgttttttgtttcttaggcagaacttggttttgcggtgcagtagggtgcctggagccgaaagcctgacttcctcatacaggccagaccccacatgtgactgccaggccactttgaggctgagagagatggttttgtctggcctctgtcctgcacgtgtttacggatgacctctgtgttggcagatttgggggtccgccagataggatcctgtgaagagacctcaaaggtctttagtccaatctataaaacatt

SEQ ID NO: 1562937 - DNA, 4001 bp, Homo sapiens
caaatcctgtgaggctttgggcaaattacttagcttccctgaactttcattttcccacctgtaaaatggacctattaggtttggtgagaggataaatagagaaggctagattaaccccagagctggtacataggaaggaagtgataacgcgcgcctcctccaccctcagcatgcgaggctgggagcgggtgcaggtagctcagccgaagcccagaggccaagggacagctctgggccttcccctgccctgcgtggttttgtcacttcctgctcagagaagacagctcatcctctcctcctaccatcgccctcccctgggcctgccaccgaggtaattttgaatgactggaacgttaacccttgacttccgcccgcccctcctccgatcagatacaaagcagaagtgaacagggctggggcaggcgagggcagataaggagccatgcatcagaatcagctgaggctggtggacaaatgggcccgcccccacctagatgggtcacagccaaagtcggggccacagggcccaggccaggagagctgagtctctcaaagccttgggctgctcctctgtagaatgggaaggctggacaggaggcccccttccagctagaacatgctccagggtgagcctgtaggctggaccctaagatgtggctgctggcaggcatgacagattgacaaattggacctgtccttttattttgtgtttttttaagagacagcgtcttgctctgtcacccaggctgactgcagtggcaccattatagctcactgcagcctcaaactcccgggctcaggcgattctcccacctcagcctccccagtagctgggactgcaggcgcatatgccaccactcctggcttaaaaaaatttttttatagacataggttctcgctatgatgcttaggctggtctcaagctcctggcctcaagcaatcctcccatcttggcctctcaaaatgctaggactacaggcatgagccactgcacctggcctggacctgtcattttacagatgaggaaactgaggcccccaggggacaagacagcctgaagtcactgggatctgacaactgagaagggtctcagcccagcctgcccctcccctgccgaccccacaatcaccctcccatcctttagcctcctccttccctctctgtctctcaatgtccccttgcctcttctgctcctcacccacatcccccacacatcctccccaacccggtaggctgaggggaggggagagaaagtggagggggtgctagaaggcacatactacaagcaagacagccactcagcttatctcaagcgaccccacagcatccccagggcataggcctcctcccagatgaataagctgaggttcagagaggtgctgtgacttgcccaaggccacacagcggcaccaagccagtgacgacagcccaggtcagcctggggacaaaggctgaatttcaggtttcccacttccctcctgcatccacagagtaaagactgaggcttgcctccgtgggagacctgcccccagcttttggggtgcaggtgaggagccctgggcactctcacccatagtcctgcaccctccaccgagatggcttctggggtggggtggggctgaagagggtgaagctcccctcagcccacccccgggtgctccctgtgggccctcggagaaggaagcgtcccctccaagctgccttccagggacgcctagttctgcagggccaggggcttccccaggggcaccagggcggaaggatctcagggcatcccagttgggggctgtgaggaagtccagccaggtacctacccatctcccaccaccacacacttgatggcctgcatcgtgtccggagcctggagagtgtcggtggtgacagctcagggccaggcgcgtttctgcgggcgcaaggggtgtggaggctggtgaggcgcctgctgaggagcagcggtggtggggcaggaggaaacggaaggggaacttactcaagctgctctccccacggtcgtttgcagggggcggagcatgcggtctggcagagcagctggtgggaggggcgctcaggtgctgggctgagccctggccatccccacaggccccctgcgtggaggctccagcaggagacctgggggccctctgtgctgggaggctcacttcctgtccacggggcgggcccagaggctgttctccaagaacttgagggttccaagaattcagtgcacttcaattctaagcagagcatttaatgagtgcctgctgtgtgccaggcacagtaccaggtgctggtgatcccaggatgcaagagacagctggtccctggagtttataccctttgcagagagggaggcatgacttcatcatgggagatcataacagagacaggaagtgattgaggcaacgggggaatctacagagaggacctcagggttaccgagatggagagctgggggcctgcaagctagcattggagctggctcttgaaacgtgcgccctaaagagggaactccaggtggggggagattgcttgagccaggacccagaggctcccccaggcaagggcctgtgtgggagtccctgggtgggaggatgtggggcgatgaggcaggaagggaaggtggggtccgctgatggagaagggcacattgaggggaagtggcgggcagtgccccacaggagccaagcctattctgaggccgccctgggggaccaggcaccctggagctagaactgtggcccatttccctgatgcgaaaactgagggtctgagaagtcatttgaccacctagcctgaaaccagccctaggctcaggtgactccaagctcttctccaagctgcagctattggctccggctgctgtttgaagggacaaaacctgagttctgcagcttgcagggcgctcccttcgccacgagggctctccacgtggactcgggtgaatattcgaccaccccagttggcaccaagttcactgttcattgctatcactccccacccacacacctttccagctccggggggaagggacggaggggcggggagaggaagagccactggtcacccaccctggactcgtcactcgggacaagccaggaactccaaaggagggtgcagagggccagggcctgctggctggcagagcgcaggattcccaccaggcacccggaggctgaaccttttcagagcaattcacacaagttactgggttcacaacattgacttttacagaaagggaaatgcaacttcctcaagcgctgggcaagtcaactgttaaagctaccagcaaaccggtgtctttcctctgcactttgcatacgctgtgctgagactgtgggtcagagaggccaggtgtgccccgtgaccaccctggggcttcctccctcacaggccacctgaggactttgttctggatacttctctatgcccctttctttttccatccactgctagtccacggggcaacctctgtgttaatttaaataataataataatgtattaaatgcagtgcggtaccccagattagaacctggaacagaaaaagaacatttgtggagcttcagtaagacagaaagagtaagttctggtgtcctgttacacagtagggtgactacagcaaatctcaatctcgtgcatatttcaagacagctggaagggaaggtttcaaatgtcgcaacaaagaaatgataaatattaaaagtgatggatgtgggaattacctggatttgattgatcattatacggtgtatacatgcattggaacatcacattgtaccccataaatatgtacgattattatgtgtcaattacaaattaaaaatttttaatacattttttaaaagaattcatttctagttcttgaagggggaaaaagaaacaagtgtttcatctataaatgcagcttcttgaagcaatttaaacgattaaattagctttaaaaaaaaaagaacatcaggccgggtgtggtggctcacgcctgtaataccagcactttgggagg

SEQ ID NO: 1562938 - DNA, 4001 bp, Homo sapiens
gtggcgacggccgctccccaacccaccccaaggtcacgcgggggccctgcagcccccaggcctctgcagagcctgcacccccaaacgccccaactccgcaggcctcgagcccccaaaccccacgcgccccgactccgcgccaccgaggcccagcagacggccgagcctgcaggccggcggaggttggtggcggcggcgcgggccgcccacgtggccgctgataacggccccggccccgcccgcccaccctgtccccgcttgggcccggcggcaccttggcggccgccatgggggcgcggcggcggcggcggctcggctgggtcggtcgtcgctggctccgcggcctctcggcggctactcgtagctccttccctccgcgtctggcgccggcgcctcccgcccgcccgctcttccctccgccccacgacccgaacctcgacccctgaccccagcggcgggaaacgcgccgcgattcaaaaccagtacagctttattggctcaggaggcggacactctcattgtccggcccgccccgcgcttcccgccaaaacgcccgcggcgcatgcccggcccgcccgtcagccagaggagcgcgcactcccggcgacacccgcgcgcacttccgtcccggccacgcgcgcctctagagctggctaaagtggttgggggttggatccggcgcgtgacgatgacgttgccagaagccaggatcatagagacgctcggcctccgccgcacgcgctggcggactaagagtggctggcgaagcgagcggccggcgcgggcccctggcgggcgggcggtacagccccaagcctgagacccggacctgagcatcgcaggttcgagtcccgccccgcctggggcgaagccgggggtggcggcgacctcgcggcgttgcaccggctctgtgagcacctcccctctgagcacttcccttgtgacaggccacttcccttgtgacaggcccaggacgaggtggccaggcggcccccatggcgtccctggtctaggcggagaaccgcctgggcgatgagtgagaacctcgacaacgaggtagagtgcggggagacgctgggtagagacggggatggggtgggaggaggcggggtgggtcaggaaacctgccagagaataggtggggacgaggcaggtgcgataggggaggaaaggagacgggaatggggtcgggagggtagactgggggaggggcagggctgagtgcagagtgcaccgacggaggtctgggtgtcccataaggaagcttggggggccaggcccccagggcctagtcctcaccctagcaccccatctgtccccacacagggcccgaagcccatggagagctgtggccaggagagcagcagtgccctgagctgccctaccgtctcggtgccccctgcagccccggcagccctggaggaggtggagaaagagggcgctggggcggctacagggccggggcctcagcccgggctctacagctacatcagggatgacttgtttacctctgagatctttaaactggagctgcagaacgtgcctcgccacgccagcttcagcgacgtccggcgcttcctgggccgctttggtctgcagccccacaaaaccaaactctttgggcaaccaccctgcgcctttgtgacattccgcagcgctgcagagagggacaaggccctgcgcgttttgcatggtgccctctggaaaggccgcccactcagtgtgcgcctggcccggcccaaggccgaccccatggccaggaggaggcgacaggagggtgagagtgagccaccagtaacacgagtggccgacgtggtgacccctctatggacagtgccctatgctgagcagcttgagcggaagcagctggagtgcgagcaggtgctgcagaaacttgccaagtgagtgtgggcgcaagacgcccctcttggccagggctctgcccggcctgtgcttcctcagcctgtccatgcaccagttgggaggcccagcacaggatctggcggcccctttgggagctagccagcaagacacccacgtcacagtgggcacaatgacatcccaaaggaggggtcaggagcctggacatttggggagtggcctggcatgggtcgggggcagtaggtggagtccaaccaccgatctgctcctcttacagggaaatcgggagcaccaaccgtgccttgctgccctggctgctcgagcagaggcacaagcacaacaaggcctgctgcccgctggagggggtcaggccatcaccccagcaggtcagactagacttcggtggccacaaacccctatcctgggttttgaaaaactttgcttttgctcacccttcctgttgatctccctgctttgtgttttcttctggtaacatcacatagttgtcagctgttcctcttgtttgactgccagcccctgtggggaaatcagggtttccaggcccaagcgctgggcagccagggtaaggtgcagctctctctccctgcagactgagtatcgtaataagtgtgagtttctggttggcgtcggggtggatggggaggataacaccgtgggctgtcggctcggcaagtacaagggcgggacgtgtgctgtggcagccccgtttgacaccgtgcacatccccgaagccaccaagcaggtggtgaaggccttccaggagttcatccggtgaggacctgtgacggggctcccgggaagtcctatgcggtgtgggagcagagggtggtgatcctgccccgggaattctggagtgcctgccatttcagccagatgaaggaaggtgtggccagaggagagagcagggggactgcttgcccagttgtgggcacttgggccagctcgtgattcccacaggtccactccatactcggcatacgacccagagacgtacacaggccactggaagcagctgactgtgcgcaccagccgccgccaccaggccatggccattgcctacttccacccccaggtctcaacgggggccctgctgggggagggtgcctagcctaggtgggcctcagcacagcctgatgggaacttttcaccacttactccagaagctgagccctgaggagctggcagagctgaagacctccctagcgcagcacttcacagcagggccaggcagggccagtggagtgacctgcctctacttcgtggaggagggacagcggtaaggagcccgagtggggcggggcaggtccctgcagggactgtgacactgaaggacctgcaccttcgcccacagaaagactcctagccaggagggcctgcccctggagcatgtggctggggaccggtgcatccacgaggacctgctagggctgaccttccggatctctccacacgccttcttccaggtagccatgagtccctggtgggcatggggacatgttgagggaggcctgacgcaccatcaggacgtgatgggaacagtgggctcaggcggtgagatttgggggagtatccaggcaggtgagccacaggggagggtgaagtaagaaagaggttggtcatcactgatttgactcgggataacctagaggtacacacggcagtggcccttgtcacagggaggatgaggagtggccctcagtgcattaccacagggcactgctctgggctcggcaggagggaggccatggtggcctctgggctgggaaatactgtttcactgtttgctcactgctgcaggaaggctgtggggacctggagcggccgtttttggagacaggcctggcaggacctcctggagggctaggtgtgggggtgggagctgcagttgggtgattccaggggccccggtgtgagttgtgggaggcaaagcccccttgctggggcagggaaggtacagcctattggcctgcggggcctcatgagccctcaaccaagtggggcaaggaggaggctgtgcttagcacgggcttggcttttaaagccaggggctggatgagggcatcagcaaggctggtccaaggtggggtcagggaagacgt

SEQ ID NO: 1562939 - DNA, 4001 bp, Homo sapiens
gccagtggcaaaaaagggcagtggggccgccatgccagtggacagagcagcaagatgggatgcccttcatgcaactggctgcagggcagcaagggcatctggtgaagattcatgaaaggaacgggttaaatttccacatgggattagtcaccaactttaggccctttctttaagcagcctcagtctgattaaaagtcaggccaaaacctggacacccataaaagttgtaacctcaaccttaaagagtcctatttctgggacatcagcctacttacattttaaaaagttcctcttcatcttcttccagtgttttaatttcttgctcaggaagagaaactattggctcaaactgagggtcatggttggactcgtctgtattctcagtggaagtatcatggtcctcatgagtgtcctgtggagatacaaagaggttacactgctggcctatggatctggctcacaaccagagcccaaccagtgcctgcagtggtcagccctccgacaatgaagggacttcagatacaaggatgggcccaaccccaaagcaagaaattaggcccactcttccacactaggaaagctctgcgtttatgcccagctccatgtgagcacagagtgagacaccagaacttggggcccctcccccagattcacagacatcaatcagatctgtgcacagactgatgggggaccctacaagccgccaacacttgcagagagtggcctggcagaaactgcctcatctctttgagcatcagtttcttcctcatccataaaatgcagatgatacctgctgtgtgaagatcaaaggacacaatgatgggtcgaaatagattttgaaatattactttaaagcaaaatgtaactctttcagttttgactaattaggaaatagttgtgctcttgcttagtaaaacgaaaaaagtcgctacaggactgctagtatttacactggattcacagctctgccagcaattttttcacagttcagaaaactaagttaataactagataaattgtaccggtgaaagtcatgaaatcctggcccaatttagaggataagagagcaccaataatcatattttaggttcgagtcttccagaacacatgccttggtcacccagaagtccgtaagagacccaagacttcaccactagactcaaactggaaaagaaaacataagcttttcgctgctcttcactgttccccacagcactgcggctctgcagcggcccgcactcaaccagacaccgcagccaacaaagccgccgcctgggtcggcgcatctaggacctgtgccccacgctggaacgcgagcttctgccacagaggccagtggcggttccagacgtaagaaccgaatgaatgaagtgctgcgtgggcgacggaaagaataaatgcaccgtactagtggggagccccaagtgggccgagccggaggaaacccgccgcccgcaccagttcctggaggctggggccgtcccgcgtggcgacggccgctccccaacccaccccaaggtcacgcgggggccctgcagcccccaggcctctgcagagcctgcacccccaaacgccccaactccgcaggcctcgagcccccaaaccccacgcgccccgactccgcgccaccgaggcccagcagacggccgagcctgcaggccggcggaggttggtggcggcggcgcgggccgcccacgtggccgctgataacggccccggccccgcccgcccaccctgtccccgcttgggcccggcggcaccttggcggccgccatgggggcgcggcggcggcggcggctcggctgggtcggtcgtcgctggctccgcggcctctcggcggctactcgtagctccttccctccgcgtctggcgccggcgcctcccgcccgcccgctcttccctccgccccacgacccgaacctcgacccctgaccccagcggcgggaaacgcgccgcgattcaaaaccagtacagctttattggctcaggaggcggacactctcattgtccggcccgccccgcgcttcccgccaaaacgcccgcggcgcatgcccggcccgcccgtcagccagaggagcgcgcactcccggcgacacccgcgcgcacttccgtcccggccacgcgcgcctctagagctggctaaagtggttgggggttggatccggcgcgtgacgatgacgttgccagaagccaggatcatagagacgctcggcctccgccgcacgcgctggcggactaagagtggctggcgaagcgagcggccggcgcgggcccctggcgggcgggcggtacagccccaagcctgagacccggacctgagcatcgcaggttcgagtcccgccccgcctggggcgaagccgggggtggcggcgacctcgcggcgttgcaccggctctgtgagcacctcccctctgagcacttcccttgtgacaggccacttcccttgtgacaggcccaggacgaggtggccaggcggcccccatggcgtccctggtctaggcggagaaccgcctgggcgatgagtgagaacctcgacaacgaggtagagtgcggggagacgctgggtagagacggggatggggtgggaggaggcggggtgggtcaggaaacctgccagagaataggtggggacgaggcaggtgcgataggggaggaaaggagacgggaatggggtcgggagggtagactgggggaggggcagggctgagtgcagagtgcaccgacggaggtctgggtgtcccataaggaagcttggggggccaggcccccagggcctagtcctcaccctagcaccccatctgtccccacacagggcccgaagcccatggagagctgtggccaggagagcagcagtgccctgagctgccctaccgtctcggtgccccctgcagccccggcagccctggaggaggtggagaaagagggcgctggggcggctacagggccggggcctcagcccgggctctacagctacatcagggatgacttgtttacctctgagatctttaaactggagctgcagaacgtgcctcgccacgccagcttcagcgacgtccggcgcttcctgggccgctttggtctgcagccccacaaaaccaaactctttgggcaaccaccctgcgcctttgtgacattccgcagcgctgcagagagggacaaggccctgcgcgttttgcatggtgccctctggaaaggccgcccactcagtgtgcgcctggcccggcccaaggccgaccccatggccaggaggaggcgacaggagggtgagagtgagccaccagtaacacgagtggccgacgtggtgacccctctatggacagtgccctatgctgagcagcttgagcggaagcagctggagtgcgagcaggtgctgcagaaacttgccaagtgagtgtgggcgcaagacgcccctcttggccagggctctgcccggcctgtgcttcctcagcctgtccatgcaccagttgggaggcccagcacaggatctggcggcccctttgggagctagccagcaagacacccacgtcacagtgggcacaatgacatcccaaaggaggggtcaggagcctggacatttggggagtggcctggcatgggtcgggggcagtaggtggagtccaaccaccgatctgctcctcttacagggaaatcgggagcaccaaccgtgccttgctgccctggctgctcgagcagaggcacaagcacaacaaggcctgctgcccgctggagggggtcaggccatcaccccagcaggtcagactagacttcggtggccacaaacccctatcctgggttttgaaaaactttgcttttgctcacccttcctgttgatctccctgctttgtgttttcttctggtaacatcacatagttgtcagctgttcctcttgtttgactgccagcccctgtggggaaatcagggtttccaggcccaagcgctgggcagccagggtaaggtgcagctctctctccctgcagactgagtatcgtaataagtgtgag

SEQ ID NO: 1562940 - DNA, 4001 bp, Homo sapiens
tggtacccaccactgtagccagctcttaactgaaagcgtcaagaagcacatgtacagaatttttttaagtggttttaataactaaaccatcacctattttcatgtgttatcgcaagcatcatgttgtatattaagggtgggccgggcgcggtagctgacgcctgtaatcccagcactttgggaggctggggtgggcagatcatgaggtcaggagatcgagaccatcctggctaatacggtgaaactccgtctctactaaaaatacaaaaaattagctgggcgtggtggcgggtgcctgtagttccagctgaggcaggagaatggcgtgaacctgggaggcggagcttgcaatgagccaagatcgcaccactgcactccagcctgggcgacagagcgagactccatctcaaaacaacaacaacaacagacaccgggtgggggatttataagcttcacgatgccaaagaagtctatgctgcaaaaacttaaaaccccctgctcaaccaagggactccctggatcctcagaagccagtggcaaaaaagggcagtggggccgccatgccagtggacagagcagcaagatgggatgcccttcatgcaactggctgcagggcagcaagggcatctggtgaagattcatgaaaggaacgggttaaatttccacatgggattagtcaccaactttaggccctttctttaagcagcctcagtctgattaaaagtcaggccaaaacctggacacccataaaagttgtaacctcaaccttaaagagtcctatttctgggacatcagcctacttacattttaaaaagttcctcttcatcttcttccagtgttttaatttcttgctcaggaagagaaactattggctcaaactgagggtcatggttggactcgtctgtattctcagtggaagtatcatggtcctcatgagtgtcctgtggagatacaaagaggttacactgctggcctatggatctggctcacaaccagagcccaaccagtgcctgcagtggtcagccctccgacaatgaagggacttcagatacaaggatgggcccaaccccaaagcaagaaattaggcccactcttccacactaggaaagctctgcgtttatgcccagctccatgtgagcacagagtgagacaccagaacttggggcccctcccccagattcacagacatcaatcagatctgtgcacagactgatgggggaccctacaagccgccaacacttgcagagagtggcctggcagaaactgcctcatctctttgagcatcagtttcttcctcatccataaaatgcagatgatacctgctgtgtgaagatcaaaggacacaatgatgggtcgaaatagattttgaaatattactttaaagcaaaatgtaactctttcagttttgactaattaggaaatagttgtgctcttgcttagtaaaacgaaaaaagtcgctacaggactgctagtatttacactggattcacagctctgccagcaattttttcacagttcagaaaactaagttaataactagataaattgtaccggtgaaagtcatgaaatcctggcccaatttagaggataagagagcaccaataatcatattttaggttcgagtcttccagaacacatgccttggtcacccagaagtccgtaagagacccaagacttcaccactagactcaaactggaaaagaaaacataagcttttcgctgctcttcactgttccccacagcactgcggctctgcagcggcccgcactcaaccagacaccgcagccaacaaagccgccgcctgggtcggcgcatctaggacctgtgccccacgctggaacgcgagcttctgccacagaggccagtggcggttccagacgtaagaaccgaatgaatgaagtgctgcgtgggcgacggaaagaataaatgcaccgtactagtggggagccccaagtgggccgagccggaggaaacccgccgcccgcaccagttcctggaggctggggccgtcccgcgtggcgacggccgctccccaacccaccccaaggtcacgcgggggccctgcagcccccaggcctctgcagagcctgcacccccaaacgccccaactccgcaggcctcgagcccccaaaccccacgcgccccgactccgcgccaccgaggcccagcagacggccgagcctgcaggccggcggaggttggtggcggcggcgcgggccgcccacgtggccgctgataacggccccggccccgcccgcccaccctgtccccgcttgggcccggcggcaccttggcggccgccatgggggcgcggcggcggcggcggctcggctgggtcggtcgtcgctggctccgcggcctctcggcggctactcgtagctccttccctccgcgtctggcgccggcgcctcccgcccgcccgctcttccctccgccccacgacccgaacctcgacccctgaccccagcggcgggaaacgcgccgcgattcaaaaccagtacagctttattggctcaggaggcggacactctcattgtccggcccgccccgcgcttcccgccaaaacgcccgcggcgcatgcccggcccgcccgtcagccagaggagcgcgcactcccggcgacacccgcgcgcacttccgtcccggccacgcgcgcctctagagctggctaaagtggttgggggttggatccggcgcgtgacgatgacgttgccagaagccaggatcatagagacgctcggcctccgccgcacgcgctggcggactaagagtggctggcgaagcgagcggccggcgcgggcccctggcgggcgggcggtacagccccaagcctgagacccggacctgagcatcgcaggttcgagtcccgccccgcctggggcgaagccgggggtggcggcgacctcgcggcgttgcaccggctctgtgagcacctcccctctgagcacttcccttgtgacaggccacttcccttgtgacaggcccaggacgaggtggccaggcggcccccatggcgtccctggtctaggcggagaaccgcctgggcgatgagtgagaacctcgacaacgaggtagagtgcggggagacgctgggtagagacggggatggggtgggaggaggcggggtgggtcaggaaacctgccagagaataggtggggacgaggcaggtgcgataggggaggaaaggagacgggaatggggtcgggagggtagactgggggaggggcagggctgagtgcagagtgcaccgacggaggtctgggtgtcccataaggaagcttggggggccaggcccccagggcctagtcctcaccctagcaccccatctgtccccacacagggcccgaagcccatggagagctgtggccaggagagcagcagtgccctgagctgccctaccgtctcggtgccccctgcagccccggcagccctggaggaggtggagaaagagggcgctggggcggctacagggccggggcctcagcccgggctctacagctacatcagggatgacttgtttacctctgagatctttaaactggagctgcagaacgtgcctcgccacgccagcttcagcgacgtccggcgcttcctgggccgctttggtctgcagccccacaaaaccaaactctttgggcaaccaccctgcgcctttgtgacattccgcagcgctgcagagagggacaaggccctgcgcgttttgcatggtgccctctggaaaggccgcccactcagtgtgcgcctggcccggcccaaggccgaccccatggccaggaggaggcgacaggagggtgagagtgagccaccagtaacacgagtggccgacgtggtgacccctctatggacagtgccctatgctgagcagcttgagcggaagcagctggagtgcgagcaggtgctgcagaaacttgccaagtgagtgtgggcgcaagacgcccctcttggccagggctctgcccggcctgtgcttcctcagcctgtccatgcaccagttgggagg

SEQ ID NO: 1562941 - DNA, 4001 bp, Homo sapiens
gtgggcggatcacgaggtcaggagatcgagaccatcctggctaacacggtgaaacccgtctccactaaaaatacaaaaaattagccgggcctggtggcgggggcctgtagtcccagctactcgggaggctgaggcaagagaatggcatgaacccggtaggtggagcttgcagtgagctgagattgcgccactgcactccagcctgggcaacagagcgagactcacctcaaaaaaataaaataaaataaaataaaataaaaattaaccaggccgggtgcggtagctcacgcctataatctcagcactttgggaggctgaggtgggtggattacctgaggtcgggagttcgagaccaccctggccaacatggagaaaccctgtctctaccaaaaatacaaaattaaccgggcgtggtggcacatgcctgtaatcccagctactcaggaggctgaggcaggagaatcgcttgaatctgggaggcagatgttggggtgagctgagatcgtggcattgcactccaacgtgggcaacaagagtgaaactccgtctcaaaaaaaaaaaaaattaaccagagtcgggtgtaatggttcactcctgcaatcccagcatttccggaggctgaggtgggcggatcgattgagcacaggagttagaaaccagcctgggcagtatgccgaaaccctgtctccactaaaaatacaaaaactagctgggtgtggtggcaggtgcctgcagtcccagctacctgggatgtaaggtgggaggatcacttgagccccgtaggtggaggctacagtgagctgagatcttgctgctgtacttctggagaccctgtttcaaaaaataaattaaccagaaaccagcccagtgcaataactcacacctgtaattccaacattttgggaggctaggcgggaagatcactttagaccagggttcgagacaagcctgggcaacagaatgagaccctgtctccacagaaaaatttaaaaattagccaggtgtgatggcatctgtagtccccatgacttgggaggttgaggtgggaggatcgcttgagcccaggaagccgacgctgcagttcagcggtgatcgttccactacactccagcctgggtgacagaaggagaccgtctctaaaaagataaaaaaatttaaagaaaaaccaacaaaaaaattaacctgaaaccccagcatctcttgcagttctgagatgggacaatttgagggtaaaaggtggtggtgaagcctccagatagaatagggacagaacttctcagctgaacgggggcccattcctcagtccaagagagagcgagacagagatgcacccctccacactcactttataaaccaagaaactggagcacagaaacgtaaattgatttgtccaaggtcagcaaaggatcagcgccagagcaaaagcaaagggctaatagagaaacatcctctccccgctccgcagcaacgtcagagactttctgaggtgagatgcatgctcctgcaaagcgtcagcagtgactcacatcgattccagggacagcggcgccagcccggggcccccgcgggcgtgggcctgctgggaggtggctctgcgggagcgacgcgcgaatacaggccgcaaatgataggcgggcggcgcaggagccccatctggaatccccggcggactcgcaccgcctccggttgacaacaatgctaatatgagacgccactgctagcagctgcaggctgagctgctctggcgagtcagacgccctttaagcctcagtttccccatttgtgaaaggagccagcgccgctcaacaaccccactcccaccgccacccctggggcgctcggccgtcgaaggctaagtgaagaaggccgagggggcaggcagaaggcgcacacgggcgccacgccctcctcgccccgcacccctgttccaggcaggtgacggggaaaggaaagggaccctgactctaccgtaaacaggcggcgccgccgcgtggggggaatcgagcgcgcgcctccgccctctggggcggggacggatttagggtccgggtcaggccggggtcgccacctccggatccagcggtccagatgtccagccggctagtctgttagctctctcgagctcccggcctcacgcgcttccagcaccacctgctctccgcaccgcggcggatgatggcggaggaggaggattttgaaagccggcagtttctttgcttcgatttgatttgttcgaggccccggccggcttgccctcgccccgctcgcgcggcctctcgggtagagtagtccggttccccatctgggagcgcgatggggcgcgcaccgcgaactacccgtcccatggcgcaccgcgcgcagagcgtcctccaccgccctcctcttcgccctcccctggtggcttctggctctttctcgcagagaccgcagggaggtgttcagccgggagcgcccagagactacaattcccagaatgcgttgcacccaggtccctcagctcttccggaaaggttttgttcgcgtaactttgttgataacaggtactgctggctgctgggtctcttgggcaagacacaggtatccatttcccgaaagaaaagactcttttccgtcccatgaaactgaaagggcattcgaaggcttccacataaatatgcacaaattacctgataattaaaaaggggaaatagtaactatcgtagagaagctccgcagacaccacttgaacggccacgttaacatcaacagcaggacaagctgacattcatcgcacgctttctgtgtgatgcactgagaaaaacacggcgtcaccgtccggtctataatgcatgaccttagtctaatcatgagaaacccaagctgagggacatggtacagaataactgatctgtacccttccggaaatgtctgtattatgtaagacaaagaaaaactgaggaactgttgccgattacaggaaacgaaaaagacaactgaatgcaagacatggtcctggatcggatcctgggtggggattgctataaaggacaatactgaaacagcaaaacttgactatattagataatagtattgtatcaatgttaaatttattaattttgattatggtacagggttatgtaagagactgcccttgttcttggaaaaaaatgctgaaataattagggacaaaaaggacatgatgtctgcaacctttatggttaaaagaaatatacctatacatatacatagagaaagcagagacacaaatgtggcaaaatgttaatcagttaatctggttgaagaatatgggagttctttgaacatttttgcaacttttctgtaggtgtgaatttaagcataaaaacacaaacagcgttttttttttgttttttttttttgagatggagtttcactcttgttgcccatcttggcctcccaaagtgttgggattataggcgagagagtgtgagaccagcctgggcaacatggtcaaaccctgtctcgacaaaaaatacaaaaattagttggacgtgatggtgcaagcctgtagtctcagctaagggcctgaggcaggaggatctggagcctgggagcttgaggctgcagtgagccgtgattgcaccactgcatttcagccctggcgacagagcaagaccttgtctcaaaaactgaaaaaagaaaaaaaaaaaaagttaaacagatcatgcaggctgggcgcagtggctcacacctgtaatcccagcactttgggaggccgaggcgggcggatcacctgaggtcaggagtttgagaccagcctgaccaaaatggagaaaccccgtctctactaaaaatataaaattagctgggcatggtgacgcatgcctggaatcccagctactcgggaggctgaggcagaagaatcgcttgaacccgggaggcggaggttgcagtgagccgagacgcaccattgcactccagcctgggcaacaagagcgaaactccgtctctaaataaataaataaattaattaattaattaac

SEQ ID NO: 1562942 - DNA, 4001 bp, Homo sapiens
ataaaataaaataaaataaaataaaaattaaccaggccgggtgcggtagctcacgcctataatctcagcactttgggaggctgaggtgggtggattacctgaggtcgggagttcgagaccaccctggccaacatggagaaaccctgtctctaccaaaaatacaaaattaaccgggcgtggtggcacatgcctgtaatcccagctactcaggaggctgaggcaggagaatcgcttgaatctgggaggcagatgttggggtgagctgagatcgtggcattgcactccaacgtgggcaacaagagtgaaactccgtctcaaaaaaaaaaaaaattaaccagagtcgggtgtaatggttcactcctgcaatcccagcatttccggaggctgaggtgggcggatcgattgagcacaggagttagaaaccagcctgggcagtatgccgaaaccctgtctccactaaaaatacaaaaactagctgggtgtggtggcaggtgcctgcagtcccagctacctgggatgtaaggtgggaggatcacttgagccccgtaggtggaggctacagtgagctgagatcttgctgctgtacttctggagaccctgtttcaaaaaataaattaaccagaaaccagcccagtgcaataactcacacctgtaattccaacattttgggaggctaggcgggaagatcactttagaccagggttcgagacaagcctgggcaacagaatgagaccctgtctccacagaaaaatttaaaaattagccaggtgtgatggcatctgtagtccccatgacttgggaggttgaggtgggaggatcgcttgagcccaggaagccgacgctgcagttcagcggtgatcgttccactacactccagcctgggtgacagaaggagaccgtctctaaaaagataaaaaaatttaaagaaaaaccaacaaaaaaattaacctgaaaccccagcatctcttgcagttctgagatgggacaatttgagggtaaaaggtggtggtgaagcctccagatagaatagggacagaacttctcagctgaacgggggcccattcctcagtccaagagagagcgagacagagatgcacccctccacactcactttataaaccaagaaactggagcacagaaacgtaaattgatttgtccaaggtcagcaaaggatcagcgccagagcaaaagcaaagggctaatagagaaacatcctctccccgctccgcagcaacgtcagagactttctgaggtgagatgcatgctcctgcaaagcgtcagcagtgactcacatcgattccagggacagcggcgccagcccggggcccccgcgggcgtgggcctgctgggaggtggctctgcgggagcgacgcgcgaatacaggccgcaaatgataggcgggcggcgcaggagccccatctggaatccccggcggactcgcaccgcctccggttgacaacaatgctaatatgagacgccactgctagcagctgcaggctgagctgctctggcgagtcagacgccctttaagcctcagtttccccatttgtgaaaggagccagcgccgctcaacaaccccactcccaccgccacccctggggcgctcggccgtcgaaggctaagtgaagaaggccgagggggcaggcagaaggcgcacacgggcgccacgccctcctcgccccgcacccctgttccaggcaggtgacggggaaaggaaagggaccctgactctaccgtaaacaggcggcgccgccgcgtggggggaatcgagcgcgcgcctccgccctctggggcggggacggatttagggtccgggtcaggccggggtcgccacctccggatccagcggtccagatgtccagccggctagtctgttagctctctcgagctcccggcctcacgcgcttccagcaccacctgctctccgcaccgcggcggatgatggcggaggaggaggattttgaaagccggcagtttctttgcttcgatttgatttgttcgaggccccggccggcttgccctcgccccgctcgcgcggcctctcgggtagagtagtccggttccccatctgggagcgcgatggggcgcgcaccgcgaactacccgtcccatggcgcaccgcgcgcagagcgtcctccaccgccctcctcttcgccctcccctggtggcttctggctctttctcgcagagaccgcagggaggtgttcagccgggagcgcccagagactacaattcccagaatgcgttgcacccaggtccctcagctcttccggaaaggttttgttcgcgtaactttgttgataacaggtactgctggctgctgggtctcttgggcaagacacaggtatccatttcccgaaagaaaagactcttttccgtcccatgaaactgaaagggcattcgaaggcttccacataaatatgcacaaattacctgataattaaaaaggggaaatagtaactatcgtagagaagctccgcagacaccacttgaacggccacgttaacatcaacagcaggacaagctgacattcatcgcacgctttctgtgtgatgcactgagaaaaacacggcgtcaccgtccggtctataatgcatgaccttagtctaatcatgagaaacccaagctgagggacatggtacagaataactgatctgtacccttccggaaatgtctgtattatgtaagacaaagaaaaactgaggaactgttgccgattacaggaaacgaaaaagacaactgaatgcaagacatggtcctggatcggatcctgggtggggattgctataaaggacaatactgaaacagcaaaacttgactatattagataatagtattgtatcaatgttaaatttattaattttgattatggtacagggttatgtaagagactgcccttgttcttggaaaaaaatgctgaaataattagggacaaaaaggacatgatgtctgcaacctttatggttaaaagaaatatacctatacatatacatagagaaagcagagacacaaatgtggcaaaatgttaatcagttaatctggttgaagaatatgggagttctttgaacatttttgcaacttttctgtaggtgtgaatttaagcataaaaacacaaacagcgttttttttttgttttttttttttgagatggagtttcactcttgttgcccatcttggcctcccaaagtgttgggattataggcgagagagtgtgagaccagcctgggcaacatggtcaaaccctgtctcgacaaaaaatacaaaaattagttggacgtgatggtgcaagcctgtagtctcagctaagggcctgaggcaggaggatctggagcctgggagcttgaggctgcagtgagccgtgattgcaccactgcatttcagccctggcgacagagcaagaccttgtctcaaaaactgaaaaaagaaaaaaaaaaaaagttaaacagatcatgcaggctgggcgcagtggctcacacctgtaatcccagcactttgggaggccgaggcgggcggatcacctgaggtcaggagtttgagaccagcctgaccaaaatggagaaaccccgtctctactaaaaatataaaattagctgggcatggtgacgcatgcctggaatcccagctactcgggaggctgaggcagaagaatcgcttgaacccgggaggcggaggttgcagtgagccgagacgcaccattgcactccagcctgggcaacaagagcgaaactccgtctctaaataaataaataaattaattaattaattaacagatcatgccatatccttttacacacagctcatttaatcttcaccaccacaagggaagtgggcatcattaccacccttcccagcacagagatgagaaaactgaagctctagacagagtgtaactctcccagttctcaaagttcctgagatgtggatcctctttccaccttccctctcctttttacctacaaggcccatgtcaaatgctacttcatgagtctctccctcctgcag

SEQ ID NO: 1562943 - DNA, 4001 bp, Homo sapiens
acaggtatctgaatgcacatactgtgactactgaccccatcacagggccattctgaggacaggtggaagccagaaagttcccagagcagagatgaggggacgccatcctgggggcacagtaaccacagccaggaaggcatccatcagcccacttgactgatggggacactgatgctcagagaggttaagtcacttgccccagttcacacagcagatgactagctgggctgggatcagaaccaggctgtttggcttcaaagtctgggctcttaactctatgaaaacccacccccagccaaaactggtcttttccaaaacactgtctgtctcagtgaagcctcagctggcatcaggcggggggatgacgccgagacatactatattctcactccctctctccctgcaggcagcggagcggaaagggggcaggcacctcccaggattctcccctaaccctgccagccacctctgagcaagtgcacctgtggattcaccacttctcccttgagcctctctcccagggcctgcctgaaagatgaaggggtcacacgggcacaggcagcaggacaagagtctggacgtgtcctcccggtgtatgccccagagcctgtttcactgcactgcccctcctccacacccccatgcctcctccatcagtgcacactcagcctctttggacacgcacattgccatcactggcttccagctgccactctgagagtccgggagcttggcaaagccaaccccaccacccttggcagctcaggtggtagaaggtaggcaggcatccacttctggcaggccaactctgcctctcaccagcccggcagccctgggcaaatgacttggcttcctggggctcaggttattcctctgttaatggtaagacataaaccccctgtgtggccctgggtttccaataagtctggaggctgacccagctcttgacccgcagcaaacctgaacacatgctgggttcttttcttcgtggcactttatcttggcagtcgtggggctgcctagagcagcctggtgaggctggactggaatgcaggcgcaggtcttgcagggaccccatcttgtctctgacaccacaggaggcttgattcactggctcctgacctggctgctccctcccagcctggcttcccaccttccatgaggtcttggacaacatcccctgtcatcctcctggtgctggggacaaggggaggggagggcacagagaggcctccagagctgccttccgggccctccaagacagctaagttacaggaaacccctcctgggaagggaatcatccaggaaactcactctgcaccaacccagaaaaagctcaagaactctggataacgaaggagcttcttaatcttccttccccacctccaggtaatgcaggctgcagccagctccagaagagggacaggagtgtttgtggtagttgactcgtcttccctgagcccccgtttcctcctatttaaatgggctattactctagctctttaaatgcaaagcctgtggcaccaaaactagcacatagtagaagctcaataaatctttctttcctgggattaagtcaagggtatagcactcagtttgacacatacagtaggtgctcaacgaatttaattctctctaggtatgcaaagttgccagacgatcccggcacatagtaggtgctcaatcaatttcactttctctggtcatctaaggaatcactgagctttcctcctccaagcctctaccctttcttcccggctgctccacttcccccagatgcccagctctgttggggcgtctcctacctgggaatggcgggccgggcctctggcacggctcagagagctgcctggaagcgccgggagctgcggggagctgcctgctgctccagccgccgagcctcccagagtctgtggtggctcccgggtcactgcgcggggatcctcccctgcgctgctcgggacgccgggctgggcgcggccgggcaaggaggcgcaaggggcaggtgccccatgggtgggctccgagggctcggcggggcccgggcagggggcgggctccggctcgccgccgccggccctgccctgccccgagccgggggcctcctgctgagccaggtgcccggaggcttggggacgtccgatccgggggtccccgcctggggctctcgggctgggggcagagaggtaggggcgactccagtgatgaaggagcagctcctagagacttggggagggggggtcctttggaggtgactgtgggtgcgtgtcccaggtgggcgaaccctcctggtcgcctatgccaccttctccgcctgccccaaagggggtcgctcggatggggggtatcgggctgccgggctcggccgcggcctccttctctgcccgcggctctgcagctctcccagcgccggagggacggcttctttctccccgcgcggcgacgccagcagctgaaggaggagcagggcgctctgctctgcgcgcgtgtgggagggggccttgaacgccgccccaaggtttcgcagctccaagttagcatcaacccggctcctcctccttcacctcctcctgtccccagatgaggagaactttgtgtgtggccctgggttctccctccttccccctctcgcaggcagatgccccactgtcacccgcagggcgaagaggtcgctgatccctccgaaaggtggcagaaccccaggctcctgatgacggtcccagcggcaccctcccgcgcccctgcgagcgtcgcccacctgctccttcggccccccgcgagccgcgcctcccgccgcccagcgccagcgtctgccccccagagcccgctcgccccgccccaccccggcgccccgcctcgccccggcgcccggccaatgggaggcgggtcccgcggcccggccccgcccatccctttcgcggcctccggggcgccgcggtctgcggttccgcgtgtccgggcgcgtggggccggggccgctgggcgcgcgcaccttgcccagaaggcggcccgggcctcggaggctgacgtctgcgcacgcgctcacacgcacgcccggcctggccgcaggtgacccgcatggggtccggccgcctgcccactcggccggggtctccagcggcttgcgcccggccaggtcgagcgcgccacggttccagcgccctcctccttcgcggaagtccccgggtgccctcccaggtgtccaacctgcctgtcccagccgccgcctccctcccgagctcacggtgcccacgggaccctgcggactggcacatgggccatgcacgtgtcgcccagaggggcggggagtcacctaggcttagtagccagaggtcttcgaggcatgcgagtctcagagaccacggccgacggggacacaccaggtgccttgagcattgcgtctcctgcctgcattctccctccccacctttaaatgaggggcttgacctaggccagacatcgggccttctcactgggccatatctccacaccacttattacttaatatattttttaaaatatcagatccactttccccaccccttaaacacgtttttttagagaatcattatatcactgccttaaatgggaaatcagtatcacttgccataaatagaaagtaagagttaaaataagcacagtgaaaacaaagcaaggttattaaattccagctggaaaccgtggcctgccaaggcttgagatgtgtgccctcagtgaaaaagggagattggcaaggtttggagaggtgttaaatacccattagcacctaacagagactttctccttcacatatcaggaggcttaaaagagaatgttctcgttgtgtgatacagcaaagggatgggatgctgtgtctgtgtccctcagttccagatccctggacctcagggatgtctgccagcctcacccccaacccagatctggcctccctacctcatgagaggacgcaggggtctgggagggcacctgaggggtcagctccattggctgagagactggcg

SEQ ID NO: 1562944 - DNA, 4001 bp, Homo sapiens
cctaagacccggcccacgacgttgggagaccctacacactctcctcaggcaaaggccctgccagacctgtcctagctccccaccgccagaactgccgggcccctacctggtctccgcgatgcgctgccgcagggccttcacgtagtcgaaactgtccgggctgcagatgtcgtagacgagcacgaaggcgtccgtgtcctgcaagctccagtccttagcgtctggccactcctggggacaggaggccagggtttgcggaagcctcctttccactcttccgctctcgaaccctctgcaggggcctggacgctaatcctcaggccaacatcacccccatacagacctctgtgcccctcccccaagctttccgggccgtctcctcatgaccaccagggtaaaattttccaaatcgtgcctggagcctgtcagccagcctccttcatccttggtctcccctctgtttaccccgaatcttcctcttttcagctttccccaactcggctcaggccgctctcctccctagatgctctcggtgcttaccacggcctctaagactaattccaaagcccttggcccgagtcccgtggtccaccacgcccccagattgtcagctgtaaccgtttatgaccgtagcgtaagcacctgctggtctttccacctggtatgtttttgccacttcctttactcagaacttcactcggtcttccaggttcagctcaaatgccactccctccaggaagccctgcttaatcctgcctgctctttcctcttcactgctctagggtcggaggtctgtcctttactttgcacaaattactaaacgagtcttcgctccaggggacaaaaatgatagggcagagaatgaacccctccaccagcccccgtagaaagtacacccctgctcctgaccccagtctctcccattgtagctctgctcaaggccccaaacacaaaacgccacactctcgggaaggcaccgttatgcaccaccaagagctgctccacacccccagccgaggcaggcaaaggtggaggcgctcacaggagcaagggaacgcccctgggcaaaatcgcccggcctccagcctgggcttgggcgtctccaggtcggcgggaagggctgaaacgcaagtatcccaggacgcacacacatccctccatcccggagcacagccaggcgcccgaggcctccacgcggacacgcacgtgtgcaccgagcacgcacacccctcacactgtcacacgcccctgcccgctcctcgagccgctacctccggacccccggggctcgagccggggccagcgacgtcgccgtcgcggatgctcaagtcgtagacggcgccgtcgagcagcaccgcgggtcggtagaggcgcggcccgtccgtgggccggtggcgctcggggtagtcaccgaacaggaactggcggatgatggccgtcttgcccacgcccggggcgcctagaacggccacccgcaggctaccccccatggccggccggcgctgtcgctccccgcgctggaaagcctcatgggccggcgccgcaccgtgcgcccccaggccgtgcgccccgcgcgccctgcccggtgcgccacggccccgtcgcgcttctcgtcgcccctcggagcaccgagaccggagagggcaggcccgaggcaggagctggcggcgggagggcagacagacagccgagtgggcagacaggtggcgggcgcgcgagcggctcgggcgggtgccgaagctcgagagagagcagagccggagcggcgctcagacaccgcctccgccccgcagcgccaacccaggcgccggcggacgcgcgaggcgccgaagtccgcccctctcgcggcgcgggtcccgcagcggtgcggggcgcggggggcagcgctgcctcccggagcctctgtgcctctatccttctctcgcttccgcgcctggagtcgccgccccagccgccggcgcgagcgagcggggcctcccggaggcggcgatgaggtaaccgcccgcccctcccaccttcccccaccgcccaggacgcccctcccaggaagggtcgcaggaaggtgactgggggacagagatcccggagagggcctaccccttccttacctcctccgcgtgtcccgctcctctcacccgctccaaaatagaagccccttcccacccactgccgcggccgctcttccaaacactgctcgcccccacgctggctcccgacaagccccggcccccggagtcaggccgcccggggtccgaattggggggggcggctgtgtgaccttgggcgaatcgccgcactgcgctgggtctgcgctccgcatccatcacaggcagactcctcaagaggctccaaccttttcttgagagcctactatgtgccaggcccattacctacgtgattctcgaacctacagcctcagcctggcatcgctggttgagagaagaggaaacaggcccgagaggggaatctgcaaggttagaagggcagtgggggggcccttgaagtctcctttgaagtccctcctaccttcctcctgcccacgggggtaaatggcccacactagacaatattcaaacagccgtcctcgaggggaagtggggacagagggtgccgagaccacagcagcttagccccagatccctgtcccagcaaggctggaggtgactaaataaagatccagaaattggcccactccacctccatcactactaaggtcacctttcctgcgtgagttgcaacccgtagcgcccctcaaagggatgcaacctccaaaacaggcgcccagagcccaagttccccctccctcgagctagtggagaagctcctgccccatcacagcttggaaagcctgggttagcccagcccccccatcctccgcctctgctctcctccccgctgtgtgggggctcccacgtctctgacctgcacatggcaatgctcaagaaatggcggcaatgctcaagaaatggccgcaatgcacagatctctgcactgactaaggagttcatttatttatcccctcaacaaatattccaaatcttattgcttgtcaggaggctgagatagatttaaaaaacagaaaacaggaaaaaaaaaaaaagttctgctttgggagagaaggttctagaacacatgggatctagggactgtcaaagcacagacaatgtgcccacaccagcccaggggaagtagaggagctaaatcctgaagggggaggaggcacatcctccagggagcctgtataatgacaaccagaaagtgtctccagaacaatggctgtgctttcatcctcccatgctagatcgggggctggggtccgctttcactcctctcctcagccactaggaagctcagaaccacctctgtctagtgttccaggtcttctagctcagtgagtggggactgctggcttcatctttctttcctaccatgatttttcccttcacttgatgtcctctttcacgttgtaacttttcagacttctgggttttgttgtttgagacaaggtcttgctctgtcacccaagctggagtgcagtggtgtgatcttagctcactgcatcctcaacctcctgggttcaagtgatcctccttgcctcagtctctcaaatagctgggactgcaggtgtgtactacgacatccagctgatttatttttattttttgtagaggtggaatctcactatgttgcccaggctggtcttgaactcctggcttaagcaatcctccctcctcagcctccaaaagtgcgaggattacaggcgtgagccaccacatctggccaaacttctgggtttttgacttttcaggcttctgggttttgtgagctgcttcaattccttcggggaacaaggcaaggagtaaataacaaggcactcagcaacacaacaacaaaacccagaagtctgaaaagctgacaccaggacggtcttttgtttgtttgttttgagatggagtctcggtctgtcacccaggctggagtgcagtggtgcgatcttggct

SEQ ID NO: 1562945 - DNA, 4001 bp, Homo sapiens
ttggacctctgcctcatctttcttcttttgcgcttcagcctgcgcattcgcttcttcctccacttggctctcatggcacagaggtttccaaaaaaatggcgctaaggccgagagcataaagcagtatttcaaaagaggtaattagactgatgatgaggggataacacatggaagagaaacatttcaaaagcttctccgcttttccaaaagaggaaggagtttgttgaaattttctaaactcagatttggtgaaaaattactttgaaaagatatatttgaaacttctttcctctgggtcccaatgggaaaatatccctacaggtttccctccttccaaacagcactgcagggcattatataactaaacaggattccagctcctaaaatgatgcctccatcctgataactagctggctctctcgccctccggtggttactgggagaggaagagaagagagaacacaaaaaaagggcaacctccttaaaaggaaagcactgtccagtgatgaaatttccacagagcatagaaacctggagtgaaactgatcttaagtctgagactaaaggatttgaatgtcctacagtgtaaatgatttctcattgataaatcagagcctcatcatttcctcttaacctatacataaaggaaaaagggtaatggagcgtacagaaggatgctaacaagaaaaattgccttgccagggagaactgtggaagagcattcacctttccatttgtcaggaatgacttgctaaaatgcagattagatattgcctggcataaccaaaaagaggcagggagaaagaggggaaaaggatgaggagagaaagggggattgagggggttgggggagagagtgagtgggagtgggagagagagaagagaagagagaaaaacgagaggggagacagagggaggagaggtatcttccatttcctactctctctccttcaaatgtattttaaagcctgtgtgattgtgatttatacattcagattcgttctcctgtcaaggagggctctacctgcctctgtcacacctgaatgctcctactgaaaattttctttgccagtaacaaaggcatgaaaatgaaacattcttttctaaccttcatttttaataagcagtttagagtaacagcaaaactacaattccatagccaatcctgagaaaccaaagtgaacaaggaatcagatttccctataacacaaattcttctgaaattcttaaaaggaatcctgctcccctctttttggcagtctacaagaatctcttcctacctctgcagtctttctctccctccctcttctcagaaccaagacaaagaggtagacaaatccccacagggtctttcctgagctacagctgcacagtacaggaaacaggaatctgctatggagttgagggagggggaagaaaggatacggatacataacacacacataaacggactcaacagacacagacttttcagctgataacaataaatctggtctgttctaagaagacaataatgattaaaactcttcttactatactccaccctcaaacctttatttagatcccagagaggagaaaagaaacatgccgaggaagcacaaatcttacctgagttaccattttctttttctccataaaccaaacggatagatgataaacctttcaaagcagccgtgctggggcacacctccacagctttcttttccacccccctccccccccaatctagctatttaagggtgggtaattgatctctctttataccgttttccttcctttttctttctaatgtttcttcctttcttttctcttcctctctggcagtctctccccctccttctttctccagctccctcccatatctcaggcagatggctgaaggaagccccacccctgaatgcctaaggtaattaatcagagtagagccccacctcttcctcctccccccaccccctcccagcaggctgacatctcccaactccagaagcaggcctgctggagaatggcagtttggtgtacgctgtgcgcacgcgtgtgtgcgtgtgtgcgtgtgtgtgtgtgtgtgtgtgtgtgtaggggggaggaggtagggaggggcaagcgccatgtgctggcatattttaaggatgcgatgatggaattaattatatagcactggaagcattcatagcagcttactatagttcatacagatttaagagattccagccatgaatgtcaaataagaaatgaaacaaaattatttttaatattaataaaacatttttactgatgtacagtttatagatgcagtggatttaacaagaaagatgtgaagaagtgaaaagctattacatgaccactaactggaaggtttttcaaggaacaggaatatgcaagaacttgcttgtcctggaagaccaaaccagcctagtgagagcaaaggactaaaagagaggacacaggtaatgagaggtaatttaaatgatttttttcctactataaaaaatacctggagactctgaaaaaggtgtctacaaatatgactgcttaagaaacttaagagatacacaaaggtgcatgcaaatttgcttaaggcttccagcttcaataaaattttggttaactgaaaattcaccttttgttttctccagccttctatgtttcagcctttattgaaaaaggtaaatcctttcttatatataccctagaaatttgtgtcattattgtaaatagtaattgttatagaatgctgtagctacaggtttaggagaatactgacaataagagtttctttaaagttctcttattaaaataatataattaaaaaatgcatcaaagatgtggttcagtccagaagttggtctaattctgccctttactagtgatcttggaaaaatctttaacctctgaatataaacttcataatttccctattttatattatcacacattcaaataaaacaatttataaaatgatgagtttatcagttgtctcataaaattaagattttctaattttttacagcattctaataaatagctcattctgaaggatttatgagatattttagttatgctatgtatttttaggatatactttctaaaagactacccaaaggttaaaaagattaattccaaaattaagcttcccatttttaatttttatctatttttattttttacaagcccacggctaacaacacgagctctccatttaaaaaataaacatctacagaaatctaaattcaaaataacaaatcacactgagaatacatagttttttgctgtctccataaggactgtttggcaacatgcagtaccaggcttttaaaaatgttctgtattggccaggcgcagtgtctcatacctgtaatcccagcactttgggaggttaaggctggtggatttcttgggcccagaagctcaagaccagccaaggcaacatggcaaatccctatctctattgtgaattcaatttttaaaattttaaaattaaaaaaatgtgttgtataacaccattggctggcacactgccaatacaacatcattacacccgctcctaaattaataatcattttaacaattctgaaaggaacacaggaaatacaggaccatctgtggaacctggagaaactgatgtaacatagtatatcaggctctattctgtgcattttacagatatctgtatacttgtggcataatccatagtaataattttaaaaagaatgagatcttcaaatattaggaaaaacgctgagtaaagtaatatagataagtactaggcctgttcttatttaacactttttagaagtgacctggaacacagaatatatagtactctctgaatttgcaactgaaaagccaatcagaaggagataaaaagcagtcaaattttctaaagacaaagtgagtaagcagaaaatgggcaggtgagtttcactggaagcaagagcaacccagtgtatttttggaaaaaatcttgaatcatactaatgggataactgtgttttcagttctaa

SEQ ID NO: 1562946 - DNA, 4001 bp, Homo sapiens
acatacacacacacacacacacacacacacacacaccaagtagaacctgctcaccagcacctacatccagtcttccctccttatcatccaatattagctcacctcacctgaagtctcccacattcctgtcttttttgccatggccctgagcttttacttctcacaatccctctgcctgacagagttctaatggaaaataaaagcaggcaaacaaaacaaaagaattcaaaaataaacaccaagagggtcactttacctaaatcaacagaagtaacagggtaaactctgcaaaggagaccaagaagcatacaacaaacatgctaggcttaagtacagctctgtccctaacacaggaagtcaggcagaggcttgaaaagcagggagcagagcacaggaagtcttttagcactgcagagatttccaagagtggtgtaatggagacagcacaggaataggaattagaagaccaggcttctagttctagttttactattagctaactgggtggccttacccaagtcaccatcttctctggacttctgattccccatctataaaataaggtggttaaaacaagctgggacttgaatctcctccaaaaaaaacaaagatgaaaactattgactctcctccaccaaaaagtgcacatcacctactatgagtaagaatcttccaagtcttcccaggttaagaacccctggaaaagatgatgtctagtcctcctagcatccctctaacatcctatgactccgagagaattaggcacaagtctgcacaactgttggtaggtgagactcatcatgtcatagcagtattttctgggcaaagaccaaatcgtaaaacctccaaaggtttcaaggtcttcttcaaaactatgaagtcagctgacatcaatacctttcccattccctacccaaattaaccacgtttatctttcaatccagaattgagaatccagtcttctaatagccctataaaaaaattttttttatagcccgggacattaaagagctattttgtgtcctggtgatgtagaatgcaattggcaaagaacaggagggacatgtctagtgtctcccttcagactcattagtatgctccacaaagtaaatgagactgagcaccaccgtgtccccataacattaccaaactccttgtacttctcacactctgtgtgatttaacccacaatctcagccacatcccctcggggctctctcgaggagttttcttttcactcctctcattgaaatgccacttctcttccccatcccagcgtgtgcccagggctgccaaaaggtactccctcttctcgggaggtttcccaccagatctccttttcctcgactcagtccagagaagccaggatttcccggcttccactccaccccaaggcactaaggaaggatttgaaaaaatggaatccatctcaaccttgttcgatttccccccaaaacctatccactcgtcgtgcctcctggcccctcaggaatcaggaccctctcgggcacaccaggttcagtcctgcaaccttcgttcctagcccgagctcgccccaccttccaaccaggccccgaatggccccccatcccacctccaacccaggactcccggaggccctccctctctccaagccggggagcccggtgtcgaccctcacgcccacccccgcaataactgggcgccccgtcccgcgcggtcacctgcatcccgccgccaccgtcggccgccgcctcctcagtgcgcggccgcttgctcaggccgggatcggctccgtctcctcccgctccgggcaccggcagctccagctccgactcccgcttcatgccccgggcggcggcgccgggcccgagctgaggcggctgatgcggctgggcgccctccgccatccgcccgcgcccccctcgcctccgggagccgggcgacccgcgacaggccacctccccctgggcctcggccccgactgtcgcgacaggcgggcgcgcgcctgcccccgcccccgcgtgcgtgcgtgcgtgcgcgcgagcggactccgcgcccctccgcgcctcgcggccgccgctccttgcctgaccgcttgctccccgcccgcccgcccgccgggttgtcggcgcggggccactggcgggtcgtgatgagcactcgctcgcgcccccgcacgcacacgcgaaacccggcccggcccgccgcgccgccccgcctctcgcactcccggagctcgcccaccggccgcgctggctcacactctccctcacagcacgccggccgagggaggaagggggcggtccgggctcccgaggcgtggggagggctgtttattttggggggaggaggggcgcgaggcaggaacgagctgactggccgggatcctccgacccgccactgtggcagcaccgggaaggcggggagagagaaagagggagggagggagggaccgggatgtagaactccagcccgcgcgggaggctacggcgaggggggcggtggcggcccgcggggggggcggggccaggccccctcggcaatctccgtagtctcctcgctggctgcccgagggaggccgggaagcgatcggggaagctcgggaatctccggcacgggcctgggattgtcctggaggcacagcgcggctggagtgcggggcagcgcggggggggcggggtctgtctcctttctgggcggggccgtatcctggagcaggcggggcttgagagacccgaaggccagggagtggctcctgcttgcggtactagttgtacagagttaagtcctgagtttactcgcctgagcaccttggttcccggagagggaatgggcactctgtgagaggcaggctatttgcctgcttcccctcccgcagaagaaaaaatgtctcaaattggaaggtcgaggaatgaagccacccctctatggttcaccccagttctgagagcttttactctaatataactcacattcctaatgaagttagtaataatacccgatgtttgtaagagctttagagtttgcacaatgcatccacagacccgtttcaaactggtgatataagtagataccatgatctccatttcattgatgatgaaactgaaccttagttaaatcctgcagcaaaaaagtggcagatccggaattcagaacacgagaacatattctctttcttcgtaccttgctgcctgaggagcactttatgacttaccaacttcgtggagatagagatatctgtgcaatagattctctcccctaccagactgtgaggacaaggactgcagtgacttcctctgagttccatatcgtgccctgtacgttatagaaataaaaggatattgcgtgaataacctggattctaatcttggctttgctaactagcttaaacaagttacttcatctctttggacctcagctccatcatttgtaaaatgagatggtttggatcagtggctttcaaccaaggagaaattttgccattccaccacctccactcccacatttgtcagtgactgaaggcatttttttttttttttttttttttttttttgagacagagtctcgctctgtcgcccaggcttaagtgcagtggcgcgatctcggctgactgcaacctctgcctcctgggttcaagcgattctcctgcctcagcctccccagtagctgggactacaggtgtgcgccaccaactaatttttgtatttttagtagagatggggtttcaccatgttggccaggctggtctcgaactcctgacttcaggtgatccgcctgcctcggcctcccaaagtgctgagattacaggagttagctgccgcgcctggccgactgaaggcatttttgattgttacagtggggaggtgctgctggcatctagtgtgtagaagccaggaatgttgcttgacatcctatcatgcacaggacggtccccccaggagagttatccaaccccaaatgtcaatagtgcggaggttgagaaacgctgggttagatgatttccaaggtcatttccaacca

SEQ ID NO: 1562947 - DNA, 4001 bp, Homo sapiens
acacagaaattaatgtcatcttttaatttgtttcctatagtttaaaataatttagtctggccgggtgcagtggctcacgcctatagtcctagcattttgggaggccgaggcgggccgatcactgaggtcaggagttcaagaccagcctggccaacatggcaaaatcctatctttactaaaaatacaaaaattagccaggcctggtggcgggtgtctataataccagctgtttgggaagctgaggcaggagaatcgcttgaatctgggggacggaggttgcagtgagccaagatcgtgccactgcactccagcctgggcgacagagtgagactccatctcaaaaaaaaaaaaaaaaaaaaaaaaagggcacaaacttgaatttctgtgcaggttttggtggcagttgcagaagagctcaaaatctgaataagtatctgctctacacagctctggaagcatgagcaatgaagtgaaagctagagaacagaatgaactaagataatgactggatcataaaatgggtaatcatgggataagctggataattaaatacccgtgtcagtacacagaacaaggtcatcacttaaatcttagattacttcataacaaattctacaattcactagaattttgattcttaccataaaataaactgatgttctcaacttttatatgtttagactcttctattaagataataattccagtaagagtttaacagaatttcattcattcaactctggcttcctcaattacaaatactcccaaaccttcttcgctttcaaaccccattctcagtgcctagtaacttctttaccacttttcacatcacagcttcaaggtggaggaaaagcccctacttctattatttttcaatatggctgctggctgtaactgagcagcagtggccacaatgagacaccaaaaagcactaggacgggggatattgtcagtgtttagccagatgttctaggaatatcttccctattttagaatctccattttgaacagctttcatgttaggtgagaatcgatactgttctcccaaactgtggcaaaccactaaaaggcatttcatgcaaaaagacacgttccatttttgctttcccacgcttaccaagtcgttcgcgactagtactcaaccctccctaactgccacaggatttgggctcggattttcttaacaagttccaccatgctttttattattattttggaagggggagattctggacgtgacagagaacccaagagtggggtggttgtgtgaaaagccaacagacgtctcagaagagccaagcattacactccagactctaaccaggcagtgtgaggcctcggttcagcgaggatccctccaagtgagaggacccctccaagtgagaggaccccaagcttcaaaaaggggcggagcaagatcaccaaggggggtcctcagaggcctctaatgcggtaggacctcaggttccaggctctcgccgcactgccccatcctccaccgccgcattcgcttcgactccccattccacccaccccaccccaccctaccctgtccttcccccacctctcaaccactccagtgacagctcaagcgcttggctcccgccgccaagtcgcaaccccgcgtatctcaataagcagctctgtgattggccccttagcctcacagcgaaaccaacacttcccccaacagtgggccgccgtcacgccgatcaactctaagacccgccccccggcttcctttcgtggtacccggtcccaggaacgccctgaaatgaaaccctttactccgcgcctcgaccatcctcgggcctgccagccagatccgcgcctctctagcttccctgaggaaggcgctggcgagacccaacctttttcacttcaaagcgcttcttgcccgcgccgctgttggtgccgctcggggtatccacatccatcgctgccgccattttggaaacacacggtctgtcgtccgaccaccgcgcctgcgcagcagcgcacacttcgctccccccacctccccggcacctcctcccgcaccccaccccttactggcgcgcgaggcggaggtgggggcggagcacgtgaccacgcctcttaaaggggctgtcgcaggtcgccccacccgcgaactgtaggccggggagggggcggtggccggagtgggtggggcggggccgggcggggccgggcggggccgaggctacgtgagctagccgggtggaaacgttcgaaagggctcgacgtcgccgcctcctctgggaagcccccggccgcactccgtcagctggggcggcggctgcttcctccgcctgagccagacctgcgccgcagtcctgtcctgcctgccgggctcgccgagtcgccgcgcggctcccggtgctggcgtgggtgggcgcccgcggcctgccccgaaacccaagagtcctcgctggtctttcgcagactctgacccgcttccgagccaggcccaaggtgcagtccccgtgggagggctggggcccaggcaccgtctggtctccgatttctgttcgggaactgctcagggattcgatggggagagaggagacccccgaagttcctccctaaggccacactgagcaggcccccagccctgcctttactcgcccgccaagcctggggggtggcctctgcgcccacatagtcgcagtcctaggaccgcctttggtcgtggtgcacggtttcaccgtaacgtgtgtcagtccccactccgcattcctcagttgtcatctttgtagggtgatttctccccgatctgtgtcctttttccgctgcttgtgctgtagtgaaaccgacccatctgcagtcgctgtatttcttgaatttttgtgaggcattcttttttaactcttgttgcccaggctggagtgtaatggcgcgatttcggcccactgcaacctccgcctccaggattcaagcgattctcctgcctcagcctcccgagtagctgagattacaggcgcccgccaccacgcccggctaattttttgtatttttagtagaaacggggtttcaccacgttagccaggctggtcccgaactcctgacctcaggtgatccgcctgcctcggcctcccaaagtgctagagccgctttttttttttttcttttttaatttttttaaaaaatagagacaaggtctcactatgttgcctaggctggtctcgaactcctgggcccaagtgatcctcccacttcggcctcccaaagtgctgggatcacaggagtgagccatcccacccgacccaagcacctgtactttgtcactctcccatttctggctagaccaggactccctttgacatctctaaccttgcagaggtgtgactctgccagagcactcttagatgtcgtacaggtgcatttgaagccttgtattttctcttaaaagataactggcgggtaatggagcgtgctgactctattgctaaagagaaagaataggctgggcgcggtggctcacgcctgggagccactttgggaggccgaggcaggtggattacctgaggtcaggagtttgagaccagcctggccaacatgacgaaaccccgtccctactaaaaatacaaaaattagctgggtgtggtggcacgcgcctgtagtcccagctactcaggaggctgaggcaggagaatctcttgaacccgggaggtggaggtggcagtgagccgagatcgagccactctactccagcctgggtgacagagcgagactccgttcccccccaaaaaaaataataaaagagaaagaactgagatttgtttgttagttataaacagcaacaacagatccgggaaaagaccaccacagctttatccagacttggaaagaaaaattgtgtgagaccttaaagggctacaagaaccctacaaagtttttcttagcccaagttttaatgactttgttaaaatttctgttgttaatttgttgtgtgcctacaggccctgacaggaatactagaaacccattgtaaattaagg

SEQ ID NO: 1562948 - DNA, 4001 bp, Homo sapiens
taaaaaaaaaaagaaagttgttcgtcataactgactgatcgtagagaataagggcagtaaatacaaaggtcaataatttaatgcattgggtatgtggttgataggtgaagctgccaattctcatggaggaggcagtgtgatctggcctaaagaaaattaattgtccagagcattctgaaaaaaaaatctacagaacatatgatccttcaagtcaaaaaactgatgatcaccaatatagattttatagattacagtaagacttgaggagactgattgctgtttgatggtgaattagggaatgaaatgagatgagtggacatggacaaggaaggaggaagagggttccaaacatgacttaggcagggtgaatctgtcctccatatttcagcagagacacagtcaggtatgggtaggtggatgagtagagatcatgggtgtcagggcagaagccaccaccatttataggtgtaattctttgcccaggctgaccataacctcttcatttaaatgtccctattccccagagttatggagagtgatagtattttctgtagccaggacccctgttgaagtccatggcacaccgatgaggagaccagcgtctgcaactcgccccactcacagaaacaaacaccataggtgctccattccaaactcttcccaaccctggggtgaggttgtttggtacagtgggtgccaatactcactgtgcattagaattaccaggcccatttaaatgtcagagtcctgggaacctttgctagagagaaattcaaattaagttgctctgtgtttttgctactcagcaaagtccccaagccagcgggatcaatcctgagacttcccagttcagcatctgcattttaacaagatccccaggtaatctgagcacactaagtttagagaatcccttgtctaacccatgacatagacatcaggtttttttttttgagacggagtctcactctgtcacccaggctggagtgcagtggtgcaatcttggctcactgcaagctccgccccccccaggttaacgccattctcctgcctcaacccccaagtagctgggactacaggcacccaccaccaagcctggctaattttttgtatttttagtagagacagggtttcaccgtgttatccaggatggtcccgatctcctgacctcgtgatccacccgcctcggcctcccaaagtgctgacattacaggcatgagccaccatgcccagccagccttttttttggagatcaccaggtgattctgtatgttgtcagggctgagaatctgatgatgaagaagcatctcaattttaggtgccagacagcagctaatccccatatggaatgaggggccagttgcacagatgatttttcctggtctggtcgtaggaagggggcagtgtatacagatccctcaccttggaacttccgcatccttgggttcatctgcagaatcttcttcagcttgggctccagttccttgatgtgggaagccagcctctctagctgccaactgggcctgattttgttcttctgagagaccatggaacagcaacagcaaagtagatcctccccatggggctccttctgcagtgaattgatgcacttgaagcagacagcgcatccacactccagggacattggtttctctagatagtctgagcagacgggacagctgcttgcttcttggaagagtgcagccatgtccactgccaggggaaaagtgcacaagggaagaaaatttccgtgaggtgaaagcctgttagttgtgacaagtgacaaccttttcatgcataaaggtattgtgtcccagctttgtcacttctagaacaagaccatgagtacaaacactcaagcacatccccccaccccccgtcttcagagatttgaagttctattgggaaagaaagtcacgaatcatcactgtgctctgaactgaggtggaggaagggtccattctactggtgacccagcaactgagcctgagccagtgacacggcagcacccatgtgaggaacagcgagctggggtcatttcacctcctcctaggggaaccccagcaagagattgattgatgaacataagaattaggggctgggaggccgggcgtggtggctcaggcctataatcccagcactttgggaggctgacgtgagtggatcatctgaggtcgtcaaaagttcgagaccagcctgatgggtgaaaccccatctctactgaaaatacaaaagaattagccaggcgtggtggcacacgcctgtaatcccagatacttgggaggctgaggcaggagaattgcttgaacctgggaggcaaaggttgcagtgagccaagatccagccattgcactccggcctggacaacagagtgagacaccatctcaaaaaaaaaaaaaaaaaaaaagagagggactggatgcagtagctcacatctgtaatcccagcactttgcgaggccaaggctggaagatcccttgagccaaggagtttgagatcagcctgggcaacacaggaagaccccctctctacaaataatagaaaaattagcagtgagcagagatcacaccaggtcactccaacctggacaacagagttaagaccctgtctcaccaaaaaaaaaaaaaaaaaaatcacatccttctccagccttggaaatgaataccaaattgactgccaccactcctagactggagatctggggatccagggtgactggttttcaactctgaggcagcactcagacagcctttgttgaattcattaattacgaatttctctcattcatcccccaaggcataacccccatttctaggcatctaaggaggaaaaacacacacacaggcatgggctcacctcttctgctggaagctcctctgtcctccagctgcttccactgggcgctcaggtcttgtgcggaaggggcacatgagggcgttttattggtgagattcccacctcccactgggtcatgcccttccacaccctctaacctaatgaggctttgatttaattataacagggaattaggtttttactggtgatatatctccagttaattgtaactttagtaaatccttcatcctgacagtgtatttttctttcatatgaagataagattaaattgcctttatattaaattaggcttaatgtactaacttcaaaagcttattttagagatgtttccatcagttgtcagtaaagataattcctgtaatatgttgtaggcttcaagctttgcttggaaacctgaagtattaagtatgattggatttgcaattttacaaaatggtttaaattcatatacatcagactcaaaggtaataggggcatgcattccattgaggaaattctagggaatttttatttattttcattggtttatttctggttttgaaaaaatttcataattcataggaaaaaattggataattactattttgacaaatgaccattaagcttcttggaccttgagtacttcacacagtgttaagataaaagtcacaatttaaaaaaaaaagatgattttcttgtgaaacttgtgttctcaaataaaaattgttacccgtgaagtgagttgtgctttcttccatttgaatcaaccccgaatcttttcattttcatgcctttctgtgtagtgggatctttactgctttgttttcaaatttcaaataatttgaatataatcttatcattttccctattccctttggcacatattaaaggaattttctctttttgcataattaaaaataaagacctaattttggtcggctttaaatatgattcctcatgggattagaggactctgagacactcaggtcttgttttggtttacttttttttcctctttactttcagttgacatgtaataattgtacatatttatggcacacagtaatattttgatacatgcataaagtgtgtaataatcaagtcaggataattagcacactctaaacatttctttcttttttttttttttttgagacagattcttgctc

SEQ ID NO: 1562949 - DNA, 4001 bp, Homo sapiens
tctctgacacatgcacaggtgacctgtgtctgtaagtgcacctacagctgcctggcagctctaggacatggcgattctctcaggtacttggcacagaaagtcactggccttctttggaggacgcatcatttatagaaacacttctttattggatcctgggtctcgggtggaaaaccaggtcccacatcaggactttctctgtgaggctcccaggttctggggctccagctgctctctgagaggaaggtgtggagacagagaacatagcccagccccacccagcccctcttgcattgtccctgctctgtagggagttagaaaactgggggcatcagcagcagcaggcctgtgtcactgtgggtggggccagggaggggccgaggggcatcctgggtgagtctctcccacggctcctgtttgacttgcccatggccactgtcacaaatgacccctaatttagtggcttaaaataacacacatttattctctcccaggtatggaagtcagaagtccaaaatgaggcctgagctgctaagatcagggtgccagcagggccgggctccttccgggggctctgagacaaatccatttccagaacttttccagcttctagaggacgcccccagctcctggccctttcttctaactacaaagccagagctcagcatcttcagatctctctcctgatcttctctccccccactttctgtcttcctctccctggactcccctctccttctctctccctccatccccacatctcctcctctcactgtgaccctcctcctgccttcctctttcccttataaagactccaccctggagcaatgcggaaaacccagaattgtctctcacctcaggctccttatcaccatcatgtctgcaaagtcccagtggccacacaatacagcacatagacagatcctggattgggacactgcagtctctgggaagcctaattcagccacctccatcggaggcaaatcatggtgccacaggctctagcctccagcccgtggcatgtagctccttctcagggcactgggcatccgggcagacaaagccagaaaagcctagaacaggatgcagagtggtaacattagagcgcaccttgtcatgctggccactgggtggcaggggccggtttcagcgaaggtactcacacccacacttcaaagtccagcctctccttttagcgcaagctggccaggaactgcggcctggagtggggactgcagacaccacagtgcccgggcttcccactccacaggaacagctgcagccaccctggctgcactcctcgggaagcaggagcagcagaaactcaaccccagccagccctccccacccaagtgccggttcccgttcctgatgcctcctccacccacagggccctgtagcctcctcgtgtccactactgcgtgccccggggtcccaggcggtctctgcaacacagagcaataggaggcgggtccaggaagcaccacggggctggggcccctgccgcgctcaggaaatgctgtgcgcccgccgcacttgagcaagaacaggaggaggtggccgggaagaggaggaccgctcctctcttgcagaccaccgctgtcactgacacctccaccgcccgccaccggcagtgcagtcccagatggcgcccctaactcatccgtgcctagtacatgcagcacccaatggcgctggcagcctgccccctgccacgggcagcgcagcccgggataactccccaaacccgctctgtgctgtgggcagtgcagccacggataccaccctcaaccagcccctcgccacaggaaatgactcccgggatagcgccccaaatcagcccccagcctcgggcagtgacgcctggagtaggtcacccaacccaactcctgcgcgggcagtgcagcaccagatagcgcccctaaaacgcctcccgccaccggcggtgtagcccaggatagcgccgccaacccggtactcgccgcggcagtgtagcgatagggcacccaatctgccacccaccgccggcagtgcaaccccagatagcgcaccgaactcactccctgctgggcagtgcaaccccacatagcatccaacccgcctccccacccagccactggcagtccgcccccgataatgtcccatacacgctcctggctgtgggcagtgcagcccatgggtagcgcccccaaccagcccccagccatggggagtgatgcctcggataacacacccaacaagttccccaccatggcactgatgtcccaggtagcgcccccaatccttgcccctcagcgaccagtgcagccatggatagcgccctcaacaagcccctccactgacccccgccgctgtgggaaatgacgcccgggataacgcacccaaccctcccccgccatgagcaatgcaacacgcactactgctccttacacgccccccactacatgcggtgtagccaacgatggcgcccccatctccccctcgcctcgggcagtgtagctcccgatagtgcatccaacccattccctctgcccctctcctcccaccgagtcaaccaccgccggcagtccaaccccaaatagcgcacccaatccactccctgccaggcagtgaagccccccgatagcacccaacccgcacccccacccccgccactggcagtccgccccgataacgccccaacacgctcctggctgtaggcagtgtagcccatagatagagcccccaaccagcccccagccaagggcagtgacgcctcggatatcacagccaacaagttccctgccatgcgcactgatgtcccagatagcgcccccaacccgtaccccagcgcgaccagtgcagccacggatagcgcccccagcaagccaccccgcggctgcgggaaatgacgtccggtaaagcacccaaccttcccgtgctgtaggcagtgcagcacccaatactgcccctaacacgcctcccaccaccgggttgtagcccacgatggcgccctcaatccgcccccgctcccacctcgggcagtgcagctccagatcgtgcatccaacctgtccccctccccgccccctgccgcaggcagtgagccctggatagctcatccaccccgccacctttctacattctggctgcggtctagtctccctcaccgccaccaacggcagcgagccgagccatgctgctgcaggctttcaagcctccagcgtgggacaggtgactcctcctctaacctgggcatggagcagatgggctggcagacgcagaagtgcctggaatggcaagaacccctccccccacagaccgaggttatgcaagtaaggtttctggactacatgttcagattggatgagagaaaaacctctaggtctactctgattgtgctttattttcacgttctgactggatgacagcaagtcttaggataaccaatcagaacaagataacaaagcccgatcagagtaggcctagaggtttctctcatccgatcagactatgtagtcgagaaacttcatttgcattaaactcagtatataaaggatgccaagaggggtggcttgcccttccaggctcatctgcgtcggcctgcgtagctgctctgtgcccggcttagaggagaaggaggaggagccacttgccgcgcatgccagaggctagagtcatctaccgcgcatgctggaggctggagcctacagtggctcacctcgctgctgcggttggtggccgcgagggtgactacagcgcagccagaatggtgaaaaggtggcagaataggttcgttatcccaggccgtactgcctgtggcgtggggggcgggttgggggccctatccagggcgtcactgcccgtgttggggggctgcttgagtgtggtacctcgggcgtcactgcccgctgaggggagtggggtgggggcgctatccgggggcgctatccagcctatggctggagatgggttggggcgctatccgaagctgtaattcctgcggcagtggggagttttggg

SEQ ID NO: 1562950 - DNA, 4001 bp, Homo sapiens
gcttcccactccacaggaacagctgcagccaccctggctgcactcctcgggaagcaggagcagcagaaactcaaccccagccagccctccccacccaagtgccggttcccgttcctgatgcctcctccacccacagggccctgtagcctcctcgtgtccactactgcgtgccccggggtcccaggcggtctctgcaacacagagcaataggaggcgggtccaggaagcaccacggggctggggcccctgccgcgctcaggaaatgctgtgcgcccgccgcacttgagcaagaacaggaggaggtggccgggaagaggaggaccgctcctctcttgcagaccaccgctgtcactgacacctccaccgcccgccaccggcagtgcagtcccagatggcgcccctaactcatccgtgcctagtacatgcagcacccaatggcgctggcagcctgccccctgccacgggcagcgcagcccgggataactccccaaacccgctctgtgctgtgggcagtgcagccacggataccaccctcaaccagcccctcgccacaggaaatgactcccgggatagcgccccaaatcagcccccagcctcgggcagtgacgcctggagtaggtcacccaacccaactcctgcgcgggcagtgcagcaccagatagcgcccctaaaacgcctcccgccaccggcggtgtagcccaggatagcgccgccaacccggtactcgccgcggcagtgtagcgatagggcacccaatctgccacccaccgccggcagtgcaaccccagatagcgcaccgaactcactccctgctgggcagtgcaaccccacatagcatccaacccgcctccccacccagccactggcagtccgcccccgataatgtcccatacacgctcctggctgtgggcagtgcagcccatgggtagcgcccccaaccagcccccagccatggggagtgatgcctcggataacacacccaacaagttccccaccatggcactgatgtcccaggtagcgcccccaatccttgcccctcagcgaccagtgcagccatggatagcgccctcaacaagcccctccactgacccccgccgctgtgggaaatgacgcccgggataacgcacccaaccctcccccgccatgagcaatgcaacacgcactactgctccttacacgccccccactacatgcggtgtagccaacgatggcgcccccatctccccctcgcctcgggcagtgtagctcccgatagtgcatccaacccattccctctgcccctctcctcccaccgagtcaaccaccgccggcagtccaaccccaaatagcgcacccaatccactccctgccaggcagtgaagccccccgatagcacccaacccgcacccccacccccgccactggcagtccgccccgataacgccccaacacgctcctggctgtaggcagtgtagcccatagatagagcccccaaccagcccccagccaagggcagtgacgcctcggatatcacagccaacaagttccctgccatgcgcactgatgtcccagatagcgcccccaacccgtaccccagcgcgaccagtgcagccacggatagcgcccccagcaagccaccccgcggctgcgggaaatgacgtccggtaaagcacccaaccttcccgtgctgtaggcagtgcagcacccaatactgcccctaacacgcctcccaccaccgggttgtagcccacgatggcgccctcaatccgcccccgctcccacctcgggcagtgcagctccagatcgtgcatccaacctgtccccctccccgccccctgccgcaggcagtgagccctggatagctcatccaccccgccacctttctacattctggctgcggtctagtctccctcaccgccaccaacggcagcgagccgagccatgctgctgcaggctttcaagcctccagcgtgggacaggtgactcctcctctaacctgggcatggagcagatgggctggcagacgcagaagtgcctggaatggcaagaacccctccccccacagaccgaggttatgcaagtaaggtttctggactacatgttcagattggatgagagaaaaacctctaggtctactctgattgtgctttattttcacgttctgactggatgacagcaagtcttaggataaccaatcagaacaagataacaaagcccgatcagagtaggcctagaggtttctctcatccgatcagactatgtagtcgagaaacttcatttgcattaaactcagtatataaaggatgccaagaggggtggcttgcccttccaggctcatctgcgtcggcctgcgtagctgctctgtgcccggcttagaggagaaggaggaggagccacttgccgcgcatgccagaggctagagtcatctaccgcgcatgctggaggctggagcctacagtggctcacctcgctgctgcggttggtggccgcgagggtgactacagcgcagccagaatggtgaaaaggtggcagaataggttcgttatcccaggccgtactgcctgtggcgtggggggcgggttgggggccctatccagggcgtcactgcccgtgttggggggctgcttgagtgtggtacctcgggcgtcactgcccgctgaggggagtggggtgggggcgctatccgggggcgctatccagcctatggctggagatgggttggggcgctatccgaagctgtaattcctgcggcagtggggagttttgggggcactatctggggatgcactgcccgcggccggggggcgggggtgagttagtagaactatcaggtgctgcaatgccctgatgcccttgttggggacaggttgtggggggctggtgggtgcaacactgctggtggcgagggtgggtgctgctatccggtgctactctgcctgtgggggacgggggcgggcgtgatatccagggcatcattgcctgcatctgggagctggttggggacactatccatggctgcactgcccacagtggggagcgggttgggggcactatttggggctgcaatgctggtggtgggggacgggttagggtcactatagggtgctacactgctggcagtggggagggggttgttgagggcgctctctgggggctacactgagacaggtagcggggggttgttgggattggtaccggggctggactgcccatggagagggggtgggggcgttggttgggggcgctattgagggccgggtacactgcctgcggtggaggggtgggttgggtgctatcaggggtctgtactgcctagcagggagcgggtgggtgtgctatctggggctgcactggctgcagcaggggcaggttgggtgcactatagggggctacactgcccttggcagggggtggtttaggtgagctgtctgtggccgcactgcccgaggtggggagtaagtttgggtgctatctgtggctgcactgcctggaggcaggaagtgggttgagggtgctatcctgggctgcttctcctggtggggagcaggtaggggcactatccagggttgcactgcccggggtagggggcgatttgggtgccatatcggggcatcactgcccacggcaggggtctggttggggtcgctacccatggctacactgtctacagccactgcctacggcagggagcgggttgggggcgctatcccgggctgcgctgcccaaggcagggggtgggttgcgggtgccattggtgctgcagtgtccgaggcaggggcgggttggggttgccatctggtgctacactgccagctgtgggggagggtcgggggcgctatcgggggctgcaccgtccccctggtggtgggcagcggaggtgtcagtgacagcggtggtcagaggaggtgagagggactccagtctctagagggccatctccttctgctcctggccagcacacagcatttctgcggggatcctgagcacggcccggcccctagacctgctgtggttcccaggcg

SEQ ID NO: 1562951 - DNA, 4001 bp, Homo sapiens
aacacctctctctccattctctctcctctcctcttcctccttgcagcttggcccccaattgctgcctccttcctggatgaagctgtccctggctgaaccttcagatgcaccctctgtccctaccttggtcaagactgtctacccacccaccacggcctctgtttctttagtcttgaaatcctattcttggcctggtgctccactgcccctgacccctggaatgccctcttttctctctgcccagctccccagccctgaaagccgggctgtccaggacactgcagcaccatcaaattcatgaggtctcacgtttggggcccgcctcgattcttcaccttacagcaggttcagaggcgtaaaaaattgggaggaagtcaggacggaaacacacacaaaaggccggcaggtggctcaggatgcttgtgaaagatagtatctgagctccgcaggaaacagtgcaaggagggtaataggtgttcccttatttccttttttttttttttttttgagacagtctcacactgtcgcccaggctggagtgcagtggtgcaatctcagctcactgcaagctctaccttccaggttcacgccattctcctgcctcagcctcctgagtagctgggactacaggcgcccaccaccacacctggctaatttttttgtatttttagtagagacggggtttcaccatattagccaggatggtcttgatctcctgacctcgtgatctgcctgcctcggcctcccaaagtgctgggattacaggtgtgagccactgtgcctgacaagtgttcccttatttctatgagaatatgcaaagcatttggtcaaggagagttggttttctcaatgttgaagccaggcatgttttcacaactaaaagcgaggacccgtcttaaccaaggcctcaatattgatgggatttggtctctgacacatgcacaggtgacctgtgtctgtaagtgcacctacagctgcctggcagctctaggacatggcgattctctcaggtacttggcacagaaagtcactggccttctttggaggacgcatcatttatagaaacacttctttattggatcctgggtctcgggtggaaaaccaggtcccacatcaggactttctctgtgaggctcccaggttctggggctccagctgctctctgagaggaaggtgtggagacagagaacatagcccagccccacccagcccctcttgcattgtccctgctctgtagggagttagaaaactgggggcatcagcagcagcaggcctgtgtcactgtgggtggggccagggaggggccgaggggcatcctgggtgagtctctcccacggctcctgtttgacttgcccatggccactgtcacaaatgacccctaatttagtggcttaaaataacacacatttattctctcccaggtatggaagtcagaagtccaaaatgaggcctgagctgctaagatcagggtgccagcagggccgggctccttccgggggctctgagacaaatccatttccagaacttttccagcttctagaggacgcccccagctcctggccctttcttctaactacaaagccagagctcagcatcttcagatctctctcctgatcttctctccccccactttctgtcttcctctccctggactcccctctccttctctctccctccatccccacatctcctcctctcactgtgaccctcctcctgccttcctctttcccttataaagactccaccctggagcaatgcggaaaacccagaattgtctctcacctcaggctccttatcaccatcatgtctgcaaagtcccagtggccacacaatacagcacatagacagatcctggattgggacactgcagtctctgggaagcctaattcagccacctccatcggaggcaaatcatggtgccacaggctctagcctccagcccgtggcatgtagctccttctcagggcactgggcatccgggcagacaaagccagaaaagcctagaacaggatgcagagtggtaacattagagcgcaccttgtcatgctggccactgggtggcaggggccggtttcagcgaaggtactcacacccacacttcaaagtccagcctctccttttagcgcaagctggccaggaactgcggcctggagtggggactgcagacaccacagtgcccgggcttcccactccacaggaacagctgcagccaccctggctgcactcctcgggaagcaggagcagcagaaactcaaccccagccagccctccccacccaagtgccggttcccgttcctgatgcctcctccacccacagggccctgtagcctcctcgtgtccactactgcgtgccccggggtcccaggcggtctctgcaacacagagcaataggaggcgggtccaggaagcaccacggggctggggcccctgccgcgctcaggaaatgctgtgcgcccgccgcacttgagcaagaacaggaggaggtggccgggaagaggaggaccgctcctctcttgcagaccaccgctgtcactgacacctccaccgcccgccaccggcagtgcagtcccagatggcgcccctaactcatccgtgcctagtacatgcagcacccaatggcgctggcagcctgccccctgccacgggcagcgcagcccgggataactccccaaacccgctctgtgctgtgggcagtgcagccacggataccaccctcaaccagcccctcgccacaggaaatgactcccgggatagcgccccaaatcagcccccagcctcgggcagtgacgcctggagtaggtcacccaacccaactcctgcgcgggcagtgcagcaccagatagcgcccctaaaacgcctcccgccaccggcggtgtagcccaggatagcgccgccaacccggtactcgccgcggcagtgtagcgatagggcacccaatctgccacccaccgccggcagtgcaaccccagatagcgcaccgaactcactccctgctgggcagtgcaaccccacatagcatccaacccgcctccccacccagccactggcagtccgcccccgataatgtcccatacacgctcctggctgtgggcagtgcagcccatgggtagcgcccccaaccagcccccagccatggggagtgatgcctcggataacacacccaacaagttccccaccatggcactgatgtcccaggtagcgcccccaatccttgcccctcagcgaccagtgcagccatggatagcgccctcaacaagcccctccactgacccccgccgctgtgggaaatgacgcccgggataacgcacccaaccctcccccgccatgagcaatgcaacacgcactactgctccttacacgccccccactacatgcggtgtagccaacgatggcgcccccatctccccctcgcctcgggcagtgtagctcccgatagtgcatccaacccattccctctgcccctctcctcccaccgagtcaaccaccgccggcagtccaaccccaaatagcgcacccaatccactccctgccaggcagtgaagccccccgatagcacccaacccgcacccccacccccgccactggcagtccgccccgataacgccccaacacgctcctggctgtaggcagtgtagcccatagatagagcccccaaccagcccccagccaagggcagtgacgcctcggatatcacagccaacaagttccctgccatgcgcactgatgtcccagatagcgcccccaacccgtaccccagcgcgaccagtgcagccacggatagcgcccccagcaagccaccccgcggctgcgggaaatgacgtccggtaaagcacccaaccttcccgtgctgtaggcagtgcagcacccaatactgcccctaacacgcctcccaccaccgggttgtagcccacgatggcgccctcaatccgcccccgctcccacctcgggcagtgcagctccagatcgtgcatccaacctgtccccctccccgccccctgccg

SEQ ID NO: 1562952 - DNA, 4001 bp, Homo sapiens
acttcatgaggtaacttccctgactagttcaaattctcataggtatgctttgtggcaatacctgacccttattcacagtagcaattcttattttactttatgtcatgtgtttgcttcattggccttttcttcgtttagagtggagggtctttgaaggcagacaccatgcccccctttctaccaccttgatgcatgaacaaataaatgataagacaatgcaagtggtcgatattaaatgatgtttgtttccacatttttttgcttcaatttaaatagtatctagagcatgagtccaggcctttgttttccatgtttgtaaacaaattaatcgtgtacagttctgacagaagatggaatatctctgcagctgacggtgtgatgacagaggaaggaggcaatgtgatctggcctagagaaaattaattgtccagaacattctgaaaaaaaaaaatctacagaacatatgatccttcaagtcaaaaaactgatatgatcaccaatatagattttatagattacagtaagacttgaagagattgattgctgtttgatggtgaattagggaatgaaatgaatggacatggataaggaaggaggaagagggttccaaacatgacttgggcagggtgaatctgtcctccatatttcagcagagagacagtcagttttgggtaggtggaagagtagagatcgtgggtgtcagggcagaagctaccagtgtcggggacatcataggggcccaccaccatttataggtgtaattctgtgcccaggctgaccataatctcttcatgtaaatgtcccttttctccagagttatagagatgtatagtattttctgtagccaggaccactgttgaagcccatggcgcatggatgaggagaacactgtctgaaactctccccacactcacagaaacaaacaccataggtgctccattcccaactcttcccaaccctggggtaaggttgtttgtacaatgggtgccaatattcaccgtgcattagaattaccaggcccattttaatgttagagtcctgggaacctttgctagagagaaattcaaattcagttgctctatgtttttgctactcagcaaagtccccaagccagtgggatcaatcctgagacttcccagttcagcatctgcattttaacaagatccccaggtaatctgagcacactaagtttagagaatcccttgtctaacccatgacatagacatcgggtttttgtttgtttttgtttttgacatcaccaggtgattctgtatgttgtcagggctgagaatctgatgatgaagcatctcaattttaggtgccagacagcagctaatccccatgtggaatgaggggccaactgcacaaatgatttttcctggtctggtcttgggaagggggcagggtatacagatgccttaccttggaacttccgcatccttgggttcatctgcagaatcttcttcagcttgggctccagttccttgatgtgggaagccagcctctctagctgccgattgcgcctgattttgttcttccgagagaccatggaagagcaacagcaaagtagatcctccccatggggctccttctgcagtgaattaatgcacttgaggcagacggcgcatccacactccagggacattggtttttccagatagtctgagcagacgggacagctgcttgcttcttggaagagtgcagccatgtccactgccaggggaaaagtacacaaggtaaaaaaatttccatgaggtgaaagcctgttagttgtgacaagtgacaaccttttcatgcatagaggtattgtgttccagctttgtcactccgagaataagaccatgagtacaaacactcaagcacatccccccaccccccgtcttcagagatttgaagttctattgggaaagtcacgaatcatcactgtgctctgagctgaggtggaggaagcgtccattctcctggtgacccagcagctgagcctgagccagtgacatggcagcacccatgtgaggaacagcgagctggggtcatttcacctcctcctaggggaaccccagcaagagactgattgatgaacataagaattaggggctgggaggccgggcacgatggctcatgcctgtccagcactttgggaggccaaggtgggtggatcatctgaggtcgtcaaaagttcgagaccagcctgaccaacatggggaaaccccatctctactgaaaatacaaaagaattagccaggcgtggtggcacatgcctgtaatcccagatacttgggaggctgaggcaggagaatcacttgaacctgggaggcagaggttgcagtgagccgagatcctgccattgcactctggcctgggcaacagagtgagacaccatctcaaaaaaaaaaaaaaaaaaaaaaaagaggggctggatgcagtagctcacatctgtaatcccagcattttgcgaggccgaggcaggaagatcccttgaaccgaggagtttgagaccagtctgggcaacacaggaagaccctgtctctacaaataatacaaaaattagcagagagcagagatcacgccaagtcactccaacctggacaacagagttaagacccgtctcaccaaaaaataaaaaaataaaaaaataaaaaaaattacatccttctccagccttggaagtgaataccaaattgactgccaccactcttacactcctagactggggatccagggtgactggtttccaactctgaggcagcactcagacggcctttgttgaattcattaattacgaatttctctcattcatccccccaagtcataacccccatttctaggcatctaagaggaaaaacacacacacaggcatgggctcacctcttctgctggaagctcctctgtcctccagctgcttccactgggcgctcaggtcttgtggggaaggggcacacgagggccttttattggtgagattcccacctcccactgggtcacgcccttccacaccctctaacctgatgaggctttgatttaattataacagggaattaggtttttactggtgatatatctccagttaattataacttcagtaaatccttcatcctgacagtgtatttttctttcatatgaaggtaagattaaattgcctttatattaaattaggcttaatgtactaacttcaaaagcttattttagagatgtttccatcagttgtcagtaaagataattcctgtaatatgttgtaggcttcaagctttgcttggaatcctaaagtattaagtgtgattggatttgcaattttacaaaatggtttaaattcatatacatcagactcaaaggtaataagggcaggcattccattgaggaaattctaggtactttttatttgtttccattggtttatttccggctttgaaaaaatttcataattcataggaaaaaattagataattactattttgacaaatgaccattaagcttcttggaccttgagtacttcacagagtgttaagataaaagtcacaatttaaaaaaaaagatgattttcttgtgaaacctgtgttttcaaataaaaattgttacccgtgaagtgagttgtgctttcttccatttgaatcaaccccgaatcttttcgtcttcatgcctttctgtgtagtgggatctttactgctttgttttcaaatttcaaataatttgaatataatcttatcattttccctatccctttggcacatattaaaggaattttctctttttgcgtaattaaaaataaagacctaattttggtcagctttaaatatgattcctcatgggattagaggactctgagacactcaggtcttgttttggtttacttttttttcctctttactttcagttgacatgtaataattgtacatatttatggcacacagtaatattttgatacatgcatgtataataatcaagtcaggataattagcacactctaaacatttctttcttttcttttttctttttttttgagacag

SEQ ID NO: 1562953 - DNA, 4001 bp, Homo sapiens
ttttattgctccaattcagtatatagagcatgattccaggcttttgttttccatgtttgtaaacaaattaattgtgcacagttctgacagcagatagggtatctctgcagctgacaatgtgatgacagagatgctggtcctggacattaggaggctctaaggccaggtggaggagggggaccttttagatgaaagaatgttttctatcctacatggaaggtgagaccttaagcaaaacaatggtaaattttggagccaagagaaaggtatttgaaagttgtctgtcataactgactgattgtagagaataagggcagaaaatacaaaggtcaataatttaaggcattgggtatgtgactgacaggtgaagccgccaattctcatggaggaggcagtgtgatctggcctagagaaaattaattgtccagaacattctgaaaaaaaaaaatctacaaaatatattatccttcaagtcaaaaaactgatatgatcactaatatagattttatagatcacagtaagactaccctagtcaagactagggattgattgctatttaatggtgaattagggaatggacatggacaaggaaggaggaagagggttccaaacatgacttggacagggtgaatctctgtcctccatagttcagcagagagacagtcaggtatgggtagatggatgagtagagatcatgggtgtcagggcagaagctaccagtgtcagggacattataggggcccaccaccatttataggtgtaattctttgcccaggctgaccataaccttttcatttaaatgtcccttttccccagagttatggagagtgatagtattttctgtagccaggaccactgttggagcccatggcgcatggatgaggagaccaatatctgcaactctccccactcacagaaacaaacaccataggtgctccattcccaactcttctcaaccctggggtgaggttgtttggtacaatgggtgccaatattcactgtgcattagaaataccaggcccatcttaatgtcagattcatgggaacctttgctagagagaaattcaaattcagttgctctatgtttttgctactcagcaaagtccccaagccagcgggatcaatcctgagacttcccagttcagcatctgcattttaacaagatccccaggtaatctgagcacactaagtttagagaatcccttgtctaacccatgacatagacatcgggtttttgtttgtttttgtttttgacatcaccaggtgattctatgtgttgtcagggctgagaatgtgatgatgaagcatctcaattttaggtgccagacagcagctaatccccatgtggaatgaggggccaactgcacagatgatttttcctggtctggtcttgggaagggggcagggtatacagattccttaccttggaacttccgcatccttgggttcatctgtagaatcttcttcagcttgggctccagttccttgatgtgggaaaccagcctctctagctgccgattgggcctgattttgttcctctgagagaccatggaacagcaacagcaaagcagatcctccccatggggctccttctgcagcgaattgatgcacttgaggcagacggtgcatccacactccagggacattggtttttccagatagtctgagcagacgggacagctgcttgcttcttggaagagtgcagccatgtccactgccaggggaaaagtacacaagggaagaaaatttccttgaggtgaaagcctgttagttgtgacaagtgacaaccttttcatgcatagaggtattgtgttccagctttgtcactccgagaacaagaccatgagtacaaacactcaagcacatccccccaccccccgtcctcagagatttgaagttctattgggaaagtcacgaatcatcactgtgctctgagctgaggtggaggaagggtccattctcctggtgacccagcagctgagcctgagccagtgacgtggcagcacccatgtgaggaacagcgagctggggtcatttcaccacctcctaggggaaccccagcaagagactgattgatgaacataagaattaggagctgagaggctgggcacgatggctcatgcctgtaatcccagcacttcgggaggccaaggtgggtggatcatctgaggtcatcaaaagttcgagaccagcctgatgggtgaaaccccatctctactgaaaatacaaaagaattagccaggcgtggtggcacacgcctgtaatcccagatacttgggaggctttggcaggagaatcgcttgaacctgggaggcagaagttgcactgagccaagattgtgccattgcactccggcctgggcaacagagtgagacaccatctcaaaaaaaaaaaagggggctggatgcagtagctcacatctgtaatcccagcactttgcgaggccaaggcaggaagatcccttgagcccaggaatttgagacgagtctggacaacacaggaagacctcatctctacaaacaatacaaaaattagcagtgagcagagaccacgccaggtcactccaacctggacaacacagtaagaccctgtctcaccaaaagaaaagaaaagaaaaaaaattacatccttctccagccttggaaatgaataccaaattaactgccaccactggtgggcaggggacaggctcggaggttccctgaatgacagagagttgttttaggaacctcatgtcacacccttctgagacactgtggaccatgtctgaggggtcctacactggcactgagggggcctgacccctcttcatacactgaggtcagggggctcccaggtacacaacaggatgctgacctcctgccgctcgcccacccacaggccagcccaaggccacccccttggtcactctgttcccgtcctcctctgaggagctccaagccaaaaggccacactgctgtgtctcatgagtggcttctacccgggagctgtgacggtggcctggaaggcaaacagcacccctgtcacccagggtacggaagtcaccaagacctccaaacagagcaacaagcacacagccagaagcgacctgagcctgacacccgaccagtggaggtcctgcagcagctacagctgtaaggtcacacacaagagagcactgtggagaagacagtggcccctgaagaatgttcttaggtccctgaccctcaccccacccatgggggcctggagctgcaggatcccagaacagagatcccctcccaccccaaatcatccagcccctctccttgtaccagtaaacccttaataaatatcctcaccgtcaaccagaaatcctgctccctctcttcatttcttagctaacatataatttgacactcaccctgggttcttagtgtgtgtaaggggggattacttgcaccctgttggatagcagcccgggggagaggctcccagactcccaggggtgtctcctgaggaaacaggccaggccaggcatttgatcactgaacacctctctctccattctctctccccacctcttcctccttgcagcttggcccccaattgctgactacttcctggatgaagctgtccctagctgagccttaagacgcaccctctgtccctaccctagtcaagaccctctacccacccacagcctctgtttctttagccttgaaatcctactctgggcctggagctccctggcccctggaatgccctcttttctctctgcccagctccccagccctgagagccaggctgtccaggacactgttgcatcgtcaaattcatgaggtcttacatttggggcccgcctcaattcttcaccttacagcaggttcagagatggaaaaaaaaatgggaggaagccaggaaggaaacacacacaaaaggccagcaggtggctcaggatgcttgtgaaaggtagtatcccagctgtgcaggaagcagtgcaaggagggtaataggtgttcccttatttctatgagaatatg

SEQ ID NO: 1562954 - DNA, 4001 bp, Homo sapiens
gggagctgtgacggtggcctggaaggcaaacagcacccctgtcacccagggtacggaagtcaccaagacctccaaacagagcaacaagcacacagccagaagcgacctgagcctgacacccgaccagtggaggtcctgcagcagctacagctgtaaggtcacacacaagagagcactgtggagaagacagtggcccctgaagaatgttcttaggtccctgaccctcaccccacccatgggggcctggagctgcaggatcccagaacagagatcccctcccaccccaaatcatccagcccctctccttgtaccagtaaacccttaataaatatcctcaccgtcaaccagaaatcctgctccctctcttcatttcttagctaacatataatttgacactcaccctgggttcttagtgtgtgtaaggggggattacttgcaccctgttggatagcagcccgggggagaggctcccagactcccaggggtgtctcctgaggaaacaggccaggccaggcatttgatcactgaacacctctctctccattctctctccccacctcttcctccttgcagcttggcccccaattgctgactacttcctggatgaagctgtccctagctgagccttaagacgcaccctctgtccctaccctagtcaagaccctctacccacccacagcctctgtttctttagccttgaaatcctactctgggcctggagctccctggcccctggaatgccctcttttctctctgcccagctccccagccctgagagccaggctgtccaggacactgttgcatcgtcaaattcatgaggtcttacatttggggcccgcctcaattcttcaccttacagcaggttcagagatggaaaaaaaaatgggaggaagccaggaaggaaacacacacaaaaggccagcaggtggctcaggatgcttgtgaaaggtagtatcccagctgtgcaggaagcagtgcaaggagggtaataggtgttcccttatttctatgagaatatgcaaagcatttgctcaaggagagttggttttctcagtgttgaagccagccatcttttcttttctttctttttttttttttttttttgagacaaagtctcgctgtgtcaccaggctggagtgtagtggcacaatcttggctcactgcaacctctgcctcccaggttcaagcgattctcctgccaaagccaggcatcttttcacgactaaaagcaagtacctgtcttaaccaaggcctcaatattgatgggatttggtctctgacacatgcacaggtgacctgtgcacctagggctgcctggcagctctaggaaatggcaattctgtcaggtacttggcacagaaagtcactggccttctttggaggatgcatcatttatggaaacacttctttattggatcctgggtctcgggtggaaaaccaggtcccacatcaggactttctctgtgaggctcccaggttctggggctccagctgctgtctgagaggaaggtgtggagacagagaacatagcctagaagagcctggaactgagacttccccttaccgaggttatgcaaatgaggttcttggactacatattctgattggatgagaagaaaaacctctagatctactctgattgggctttatttgcatgttctgattggatgagagcaagtcttaggacaaccaatcagaacatgataacaaagtccaatcagagtaggcctagaggttttcctcatccaatcagaacatgtagcccaggaacttcatttgcataaattctcatatataaatgatgccaagtggggggagttttgtcattccaagctctcctgcgtcagcttgtgtagctggttagtactggcttagaggaaaaagaaaacgagtcacttcctgagcacactggagtctggaagcttagaggaaaaggaggaggagcaacttcattagcacagtggaggctggagcctgccgtggctcacctcgctgctgccgttggtgcgggccagggagactagagcgcagccagaatggtaaaatggtggtgggaaaagttcgccatcccaggccgtactgcctgtggcgtggcgtggtggggtgggttggaggccctatccagggcgttactgcccgtgttaggaggctggttggatgtggtatctggggcctcactgcccacagaggggagtgggttgggggtgctatcgggtgtgcgctgcccgtggctgggggtgggttggagcactatcccaagctgtactgctagcggcagtggggagttctgggggcactatctggggatgcagtggccgtggccggcgggcgagttggaagaactatcgggtgttgcattgcccttgtcaggcacgggttgggggcgctatcgggtgctactctgcctgcggtgggcgggacgtgttatatccagggcatcattgcctgcgtctagaagctggctgggggcattatccatagctgcactgcccacagcagggagcaggttggcagcactatctggggctgcagtgctgtggtgggggacgggttaggctcattacagggtgctacactgttggcagcagggaggggggtgttgagggcgctttctggggcctacactgagacagagatagcaggatttattgggagtgctactgggggccagactgcccgtgtagagggggtgggaggctggttgggggcgctattgagggacgtatccactgcccgttttgggagggggcgggttgggtgctatcagaggtctgtactgcgtgccagggagctggtgggtgtgctacctggggccacattggttccggcggggcgggttgggtgcgctatcgggggctaccttgcccgcgcagggggtgggttgggtgcgctatctgtggctgtactgccggaggcagggagtgagttggggcgtctccctgggttgctgctcccagtggggagcaggttggggcactatccggggttgcacttcccgcagttggggggcggtttgggtgccatatcagggcattactgcccccagcaggggtctggttgggggcactattcgtggctacactgtgtacggcagggagcggattgggggcgctatcccgggctgcactgcccgcggcagggggcgggttctgggcgccattgggtgctgcagtgtccgaagcaagggcaggttggggtcgccattggatgctacactgccggtggttgggggtgaggtgttggaggcgctatctgggggctacactgccggcggcgggttaggggtgctgttgggggctgcgctgcccccctggtgctggtggtgtcagtgacgggtggtcagaggagcggtcctcgtctccccggactccagactctagagggccatctcctcctgctggagcgcggcggatgcacagcgtttccgcggggatcctgagcacaatccgtcacctagaccagccgtggttcccaggcccgcgccctctatgtgttgcggaaactgcctgggacccccgggcacgcagtagctgacactacggggtgatagggccccgtgggtggaggcgtcaggaacgggaaccagcactagggttgggagggctggctggggttcagtttttgctgctcctgcttcccgaggaacgcagccagggtgggcccagcggttctagtagagtaggaagcccgggcactgtggtgtctccagtccccactccaggccctagttcctggccaacttgggccaaaaggagaggctggactttggagggtgggcgtgagtgccttcgctgaaaccggcctctgccatccagtggccagcatgccaaggtgaggctctaacgctaccactctctgcatcctgttctaggctttcttggctttgcctgcccagttgtttcatgccaggaggaggagccgcctgctggaggctggagcttgtggcaccaccgctcgcctcgctgtggttggtggcggccatggagactaaagactcagcg

SEQ ID NO: 1562955 - DNA, 4001 bp, Homo sapiens
tccagcactgtccctggagggggcccttcccctggtgctggtgctggccctggtgctgaatgtagatatcctggtggacccagggctgcaggtgactctggctccagagcaggccccaggtccgccagcagtggtggtgctggctccagggccggcattgttaatgcgtgttgcccaggacgtggagcaggatctggaaaaggagaaaaggtcaccacaccagtcatttttcactgggttttccaagcacagaaatgaccgggtggaatttaagggaattgtagccccaaaacaccacccccggaaagtcttgcagactgcaagccccctcaccatctggcttggcctcgttgggctccggaagcaccaactggcctaggacaatttcctgatggtcctccaagcccagtccaggccaggagaggttcctgaaggccagctttatccggaaagatgaccgttgcgggggctgatagtaaactgaagtgttttcggggggccagttgaacaaaatggaggtgatggtgctggtgatggagtagacagctgagtcagaggcctggccttctcccacacaaccctccagggcacccctgcgtggttctgggtccctggcctgttgctgccagtgtggaggacagccccaccctaccgtaagccatcagtgctgtcctggaaggggcagacctggccatacagcagggctgtacagaccctcgtgcgccctggcgtcccacagacattctcttcccaaaggccctggagcacagcactgtacacctgggcactcaagactgcagctgcaggcagatttgtgagcagcttcctcatcaaagctccagatctgggtcccctggtcctggggttaggagggaaggggcagatgtcggggggaggaggacagggagagctgggaagccacggtgctgagggggatgggtctctcagtggccagctgtgaccccagcctcccctctgctttgcaggggacctaagtctccatttacagaactcactatttgcctcttgtgggggaagtccccagatgtcagccttctcgtgggaattataagaagtatgagccccagagctcctttagtctctccccagccagagtccacatattttcccccatgttttgtgggtgaaaaggcccttcagaaccctaaatccacccagtttatatttgttgctgggctgcgtcattctagtcagaatctgggaggatgccaccatacgtagaggaggccatgagggtctcacctgtaacattctgtagatatgacttgtttattctgtctactgtgagtgcctgactctgagtagaatcaaggccgggggattgtcatctgctttgtttatgaaattatgccaagccccaagaagagcgatgcacaaatgaggtgttttgaatgtatgtgttgaatgagtgaaccccaacctttggagaaccccagtgagcctctccagatgtctgagtgggcctgtggctcctttttcagcaccaagggacccctcttctgtctgtgtcaaggagaaagaccagccagaaggaatctcagacatcctttaccagtgccatcgcagacttggtttctatgtgtttttccaaacagtgagtgatacaggccattgaggcagaatgctgagagctgcttcaagtgagggggaagagaaaagtaacaaacatgaatcacagcacccccagcagattttccagagttttaggctctagggacccctttgtttgctgtgtcttagatcattgagtccctacaagaaccctgtgaggttcgtcttctcactactccctgttccagaggagccaaccgaggctccgagaggtgcatcttcaagacagagccagtaggggacagaggcacctctgtgtcttggagggggatggacactcaccttctaaccagtagttccaaaaagtgtggcacagtgataaagtcccaggaggggcccaggcaggtggcataggaggagatgggtttagttagaaaggctggaaccagggactcccaacagcttctccccagtgccgggctggaaagttagcatcctgcagatctcattttcatactagggggacaaggagggacatgggagtcagtggtaacaccatggaccaccagaggatcgggatctggaactcacaccaagaagcaccaacccttcagggacttgtgcatatggagaacctgggtgcccatggtgaaaagcgttctaggctttcaaagtaacattgcatgtgaggatggagaatgataaaacgattcctgccttcaaggcatcgtcccggtgtttgtcagctgtggggcaacagcaccctctgtgtcagcaacctgcatgaagagcatcatccctgcaagtcctcaaggcctggggaggcctcatcccctcctcatttcagcaacagcacacaggacaatacgctctagaagaactctttgacttaaaggtatatgattgtttttgttcctttaacatgaacgtgagtctggagaaacagctacggccatcccagccctggccaaggggaaaatgccggaagactccagggtgggaggaagcgcgtcccaaggcccaggatctgcgaggcgacttggggaaaacgcaggcaggtattgaacccgtgaaaggttacgcaaatgtatgtttgaaagtggaaatgaaacaaggattttctctgccacacagacagcaggttggcgaaaagttaaaagcgtgttagtattcaggggaggctgcgttcagagaagcagctaccttcagaggctgctggtgaccgtgtgaccagctggagcccttttggaaagtcaactagctagagctgttgaaagttgatatctgcatatcctttcacccagatatccctttcctgggtgtctgtctgctgcaggggatttgtttattttatgggttgaattgtgtccccttccccaaatgtaactgtttctattctcaaccccagagactcagaatgtgactgtgtctggacacagagtactccaagaggtaattcaggtgaagtgagttcattagggtggcccctaatttaacatgcctggggttcttacaaggagagggggtcagcgcacagagaagttcaagagaagaccctgtgctgactgagatagaagtccgccatctccaaggcaaggagagaggcccagagaaaccaccccaggctgacagtttgacgttggacttccagtctccagaattgtgaggaaccagatttctgtggttaagcccttcagtcagggtgccgtgttatggcagccctggcaaactgctccagcctattaggacacgcataggattatgctccttgtagaaaggctgcctcgaaagggaattttatcatgacaggctccaccagcactgagaggctgacccgctgtggaaaatggcctcccttaaggaatgttacaatgacatgcgagggtacaactcctgcctgatggggctgcagggatgagttctgtgagatgacactttaaagactaatgcatagagtcgcttcaccttcttttgttgtaatcaatgcaccccccccacccccaccccttgtttgtgcaaaagtgttggattttaagtcctggaggaggtctggcagggcagcggagctgcctgcctgttgccggagatccacttagggtggggagttaaaatgataacagtgtgagtattttgctgcaatgttaccattgtactcaattcttaaagcaacatgccgagatactcctggcatagcctaaagtgaaaacagaaggattttctctggtcttcctctgataggtgaaagggactttgcctgtaaccaagttgccactggggactaatggcagccagattcctttgggagaggacagtgggtcactcaagtgggaacgccctaggatggagcttagggagtccccatattcgtgtctgagtcctgggcccaccttggttttcacaagtcctgtctgtggagacccttctgtgcc

SEQ ID NO: 1562956 - DNA, 4001 bp, Homo sapiens
caaaaagaggggttcaggccctcaccccccagggcgaattcagggccatctctagccctcttctgtcctcccccttccctcagactactacctccctccttcctcccctcccctgttcccagccttaatgctccagatggtttcagttgcccttgaccctggggtggggccagacaatgggcaagccgacagggtaaggggtagggcagatgggcagaagtcccacatcttgagccatactcagagacctgcgactgagacatcccctttgagggtgaacccatccactgtaagcctcctcctgcttccttactggcacagcccctctggccctggctcccctttccacaggaagggtacagtatgcgctccacctctttctgctctgtgtcctgaggcaagtttccaacctcatctttttacagatgagcctcattttacagatgagcctctcctttctcatctgtaaaatggaaattcataaattcttttcctcagagtatgatgaaataaaaaggaataggctaaggcaggccctggcccacaactcttcctccataaaccatagcaatccgcactaatcatggcaggcgtctgtagccaccaactggcccatcgagaaggcctcaatatggaggtggctgctccagcctagctggtcccagctttggccctcaaacatggcctttccctgcccaccaaagcaaggccttctcccccgtgctgttctcttgcatccagcctgtcctccagggcctgtaggtcttcacccctggtcaggcctctcggtcccaggactcccactgagctgattcagggcaggaagcaggatcccagagagacaagaaggctgcctaatttgctcccctgccaagcgccttctccacatctaccagtttcctgcaggaaaaatgtggaaagctcctctgcctgcattgtccttccctccattttgccagcaggcaaactcctatttcacccttggaagcccagctcaaatatcccttcccctcctctggccccctaacatcatggatcttatccttaggagcacagcttggccagtctgtctccctaggcaggtggtctgagctcatggctcctctgatccaaccccacattccccagggtattcacagcacacagccagtgctttatatatgttcactgaaaaaaggacactagcttggctcctggtcctgccgagggatttgaaggtgaaccctgcccttcgcggacccgggcatccacctagggggctggggctagaggtccaggaaggtgggcagggtcagccttgcctggaggcagggtttggggccaaggcacccaccgtaaacctcctcctgcatcgacacctcacaaccattccccagctctgggcaccttagcaagggtgaagggcttacccgtggacactcggaactgggacttgagccccctggacctcactttcttcaatctatgaaacggggcagtgcaccaccaggccctgcctaccttactgggaagccgggagggcagaatggaaagacaaggacggagattcttccggtggcggatagagtagggggtcccaggatctgtctggttcgaactcagctggtgactttgcagagatactcaatttccttgggcctcagtttccccttctgtagaaacaaggatatcggatgagggatgattaaagggcctgctccacctcgaccgttaccggggatagggtctcggggccaggcacggcgttcgaggcctcccacccagccgaccggccttggggacccttccccgctggcccgggccacgcgtcccgggtactcactgcagagcgcgcccggcaaccccgaaaggccggtcggggaccccggctgggagtcaggactctagctcccgggcgcgacccgagaaccctgaatccattccgcgcacacccggccgcgtgacccctgccgaccggctggcgcgccacccattccccgcggcccgcggattagtcagcagttgttctagtccgggtcccttcccccagccctcccgccgatctccgtctccctgcagggccgactcttcagcgaccgtccctagagccagcggacggaaccattccaaacagcctagtctcgtgctgagagcctctccggtttcacgctgagacccgctcacccccgctctggccccttagatgctattttggcccgagtgtcacgtcgggcgctctttagagaggactgggacaagagttgcggacgcgaagaacgagtaagcggtggttcatccctcctgaccccacccccgtggcctggcccgatggtcgcgcccggggttgcgagatttgcgcctgcgcagtgcggcgcctagagggaaagcgagagggagacggacgttgagagaacgaggaggaaggagagaaaatggcgtccacgggtgagtatggtggaactgcggtcgcgccggcggtagccggaacgcccaaactgggggtcgttcgtctctgggcttggctgggaagactgagtggagttgccgagagggggttgaggcacccgccgcggcccgacgagctcggggatccgcattcctctcccctcccccaaccgggcgggccggttctggaatcttccggcgcccgtggcgcgcggggggcttgctgcggcgggggcgcgcggggcccgccttggcctccattgtgtggcggtcctcgcgccctgagctccgggcctcccgccacgtgggcggggcctgcggccttcgaggccctgcgtgaaggggaggatttggccaggcctcaagccggtcactatgaaaccgccggggggcccgcaggctgctgtccctgtgaggcctccctccccgttttcagggtttcctgagaaaccaggggaaaaagcaaataaagataccgtggatttgtgggccgaggggtgccggcctatgagcgggagccccgtcatccttaagacccagtcggctggggcgtctggcgctgccgagctgccccctctgtggcttccagccccaagccgaacttctgctcgcctgggctttagacagaatgtgcttccctcctccagggcccccagtttgccgctttcttgggcttctccatttttatcgttattaatccacgtcctcccctcccccaaaaccaattaagtggcttcccagggccctttttctgcaaacgccgagggacatccgttgtataataaggccagcctgggtcgagagacgagaaacgctaccagaaagatatttctggtctctctgacctaggaggaacaaaaggccgagccttcatttgaattatgtttcagcagtggcctcgcacgtttattcgcctgcgttaggccggcaggcctgttgatttcgtaggtcgacagaggagaggggaaaaaaggccagtagaagcaatcttaaaggcacttgcaagcaagccccggttgggaactccaaaatgggagtagagtggtccttgatggaaggagcgtttaagagtgtcgcctagccatcacctgcagttcgcaatctgtgggtacactaacccgcgaaaattggcagggtggagcatttttgccccgggggtattctcaggccacctggttccaggccttagagacagtgggagaagatgagaaggaagacaggaaaagttctgggcactccagagtttttggagtccagaatccagcaacttaaggacagtttaagaattctccccatctgtggtcaataaacaggtaagtgttggctgttcgtgccgggataccaaagagtggataccaaagagtgccggtagaagagaggactgaaataccacagctaacctcccggtgggaagtggtttcctaggtgccctatccaccctcttctgctctgcaaaagcctgaaaaggcaaaacgtgtgcgttgacatttttgcgtggctggacgtgccttttttcagtcaactttgttcaaaccttgttcaccagtaactaccatgtgctgtactgtattagaatt

SEQ ID NO: 1562957 - DNA, 4001 bp, Homo sapiens
gaatgataaacacttctgaggagaaaggaggggaaaattaagaggtagggggcagggcagtgttgttatatatatatatatatatatacacatatataaaaaacacaattctcaaaaaacactgaagatatctgaagccaatctggcaaaatgttaacatctagtctgatggtgggtacatatgtacctgtcacattgtttttgtaagattgaattacctcataactaaaaatattaataaaaaagataaaatgtttagaacatacagaacagtataaaggagaaaataaagtttactcataattctatccctccaacattaccctgctaacattttggcatatttcctctcttcttcttctgagcatattttaaaatattttaaaaacataacagcccattgtatgtacaattttgtatcctgcttttttttctattataaaaatctttatggtgtttaaaaacactgaaatttcttttttttttttttttcaatttattttttgtagagatggggtctcgctttgttgcccaggcaagtctggagctcctggtctcaagtgatcctctagttttagcctctcaaagtgtgaaatttcaacaattgttgaaattgttggacacgataggggaaaataagttgtatttgaagtggaataataataccttgaataacagtattcaaggtacttgaatactatgatttgaatcatgtctgtctctgagtcagcttgagggtgtgagcccggacatatgtgttgtctggtataaacagctgtccttcatagacggtcttaaacttttgagcagagcaagtgagtgtgtgtgtgtgtctttctgtgtttaaggcttttcctatccagttttttaagaaaatgaaggaaaacatacatatacccttaaaatctatttcttataatccacattcgaattcaatagctgtttttaagagaagaatcagtgcattaagttaactgggcacaagaaattgtgaaatttaaaaggaagaagagtgtgaaaatgacaactttttatatatgtgaagaaaggagggctgggtaccgtggctcatgcctgtagttccagcactttgggagactgacgtgggaggatcacttgcacgcaggagttccagaccagcctgggcaacatagtgagaccctatctctattaaataaaaaaaataaaaaataaaaaaaaaaaggcggggcagggggacggtggggaagactggagtctaaagccacacaatcctaaaccaatagataagcattcaggaaatgctcaccaaaggtttcatgtctagctttttcagtagcttcttttatcttctggtcatgaacttgaacatcccaggcttcagtgtctccctataaatggaaaaacagaggagaagggttagagccagatcattttattcagtaataacaatcctacttattattatttttaatctctgccccactgtaaacgagttgtagaaaatctggctcaggggaggagaaccgttggtgactccaggcgagctcgagagggagcattattggccctgcaggaggccgtttgctgcctcctggctcagatgtttcatcctagaactcatctcctttccccctccacgcagcccctcgcccgcatctgccgctctaaccccgtcccggcccctgccctttcaccccaattatcctgtttctggcgttgaagacccgcttctgcctgcacagctccgcgtgcctcctctttgccaggttggcgtcctgccgcaagtccctgggcagcgccaccgccatggtctgggaacccatggaaagcctaaggggtttttagaacacgcaggatcaggagaacaggcgacgaaaataaggaagctgtagcgcaggcaaggtcggctccttcggtcgggcaggggaaagacaagcctttagcgcagttttccgtcgggctcccagtgacgccgcagaggtacagacgctcccgctctctcggaaatgtcaacaactcgttgctaaggaacggctccgcgcttgccgcgtctcgctctcttctcgcgacacttggcgaatcccttcccgcgctttttccgcgggcgcttgataacgcgggtgaggcgtggagggcggcgccatggcccacctggagctgctgcttgtggaaaatttcaagtcgtggcggggccgccaggtcattggccccttccggaggttcacctgcatcatcggccccaacggctctggtaactgagcagctcagggcgccaccggagcgcctccgccgtcccaggcgtccaggccacacgtggcctgtggggtgtgggcgtctgccgcgggcgcctggccggccttccccttccagtcccggagcctgaccgcgaccggatcccggcctggccctggcccagcccctgcccatcaccccacctcagccccggtcctcgccgtccacctcaggggtcccgacccttgtccctccgccccacctcggaggtcctgacccttccactcggccccgcctcgggccccgctctcgccctccacctcctggctcccgaccctcctccgacaccctgagggaccccaccccacctcagctccggccctcgcccttcatctcaggggctcccaaccctcgccccccaccctgggggtcctgacgcttcctctccgccccggtcccgccctgggccctgttctctgccctcactcctgcttcggggactgctcttgcccttggccctggtcactcgcgtcccttttcccttctcatccgaagttgaagtgagagggagctgtcgaggaggtaatgggttccaagcagccagaaccaccatttggatccaagggagctttgacccaggaatgtagtgatgatgacccagtttactgagcttttcctaagttcctggcgacaccgtctttggttagccatggcgcatggctgctctccccattttatagttggggaaactgaggtctggagaggccagaggacctgcggaggtctctactaataataccaaaattagctgggtgtggtggcacacgcctgtaatcccaactactctggaggctgaggcgggagaatcgcttgaacctgggaggtggaagttgcagtgagccaaggacacgccattgcactccagcctggcaacacagtgcgactctcgtctcaaaaaaaaaaaaaaaaaaaaaaaaaaggctgggcgcggtggctcacacctgtaattccagcactttaggaggccgaggcgggtggatcatgagatcaggagttcgagaccagcctgaccaacatggtgaagccctgtctctactaaaaatacaaaaattaatcgggtgtggtgacatgcacctgtaatcccggctactgaggaggctgaggcaggagaatcgcttgaacccgggaggcagaggttgcagtgagccaagatagcaccaccgcactccagcctgggtaacaagagcgagacttcgactctaaaataaaataaaataagataaatataaaataaaattggccgggcgccgtggctcatgcctataatcccagcactttgggaggccgaggcgggcggatcaccttaggtcaggagttagaaaccagcctggccaacatagtgaaacccctgtctgtactaaaaatacaaaaattagctgggggtggtgtcacgtgcctgtaataccagctacttgggagactgaggcaggagaatcacttgaacccgggaggcggaggttgcagtgagccaagactgtgccactgcattccagcctgggcgacagagcaagactctgtctcaacaaaaaaataaggcctgacatggtggcccacacctgtaattccatcactttgggaggctgaggcaggcagatcactggaggtaggggttcaagaccagcctggccaacatgatgaaaccccatctgtactaaaaatacaaaaaagcctggcgtggtggcgcacgcctgtagtcccagctactcaggggactgaggcaggagaat

SEQ ID NO: 1562958 - DNA, 4001 bp, Homo sapiens
gcagggacccgaggcgacacgcgcctgcaggaggtggcactcctgccgcagctcttcgatctgcttgtccttggccagcggcgcgctcgcctgctccgacaggtcccgagcgcgctggcgggcaaagacttggcacagctccaggccggcgcaactctcgccgggtataggcgcgctcacggcccggaggttggtctcctgcagcttgcgggcgcggtcagctaggcgccgcgcgagcccggtcagctccgcgcgctttaccttgagccgcttcaccttctcgtctgcctggtaggggcagcctgcacgccgcagctgcttgttctccgcttgcagggtataacagcggcgcgccagcacccacaacgccttggccagcagccagttcagctttatcagctcgtggtggcccaggcccgggggtgagggagtcaggacttcgcagggctggctctcagagccttctcctccccgcgggttgctgagtttcctgtgggctgacggtggtggtggcggcgggagtggcgatggtggcggcgagagcctccgggagccaggggtggaggtgtctggtgaggagggccgctcctcggatttggaggccttggggaggctccgggtgctgtcaagcgagcgggaacacgcaggtgcgaagcaatcaagggagctggcgtgcgtggagagcaggccgtctggggagctggagcacgcagaggacaccaggcctagcgagcgggagcgcacaccgacttcagcactcaggctgtctagagatccgagttggcaggcgggtttgggggcgtggcaagagccgctggaggtctggggcagcggttcttccaaggaatgcacagcttgggggtccggtgatcccgacaaagccgggtgcccgcggaagtgcgccaggatgtacttgaggaagagctggcgctccacctccagcgccgcctgcagatagcggatgcgcgccgcctgctcgccgtcagtctgccagcgaagctgcgccaacacttcctgcaggcgacagcggcactgcgccgcggaaacctcggacgcccccgggcggctacagtggccgcggttcaccagctcctcggccagctggcgctgcagctcccgggcttggcgcaccacgccatcgcgctcccggtgcagcagctgctgcagctgccgctgctcggcctccttccagcgcagcagctgccggatctcggcctcgcgttcccgctgcatctcctcttgcagctgccgcaactcccggctgcgctgtgcctcccacttggagcgcagacggtcagccagctgtcgccgctcccgctcggcctcctcacgcagctggcgctcccgggcagcgaagcgccgccgttccgcccgccagcctgcccgctccgcctccagctccgcccgtagcttctccagctcccgcctctggttctccagcactgccgccgccgggctggagcagcccggcttcttgggcgacgcgcccaaggggctgggcgagtccttggccattgcggccgcggcccggctggtctccagacttcgcctggcaggcctcagctcgccaacggccgccgccgaccgcccggcgcgccccttccggcgccccctgggggtctccgcgtgccccttccgcctcttggcatgttcccccgcctcctgccgcggatgtctggcccaggcgcctctccacctggcaaggccagggctggactcccacacccctgctcaaactggcccatgtcccttccaggatgcacgggggcttttccggtccctacacttttcctgcttctagcaccaagtcccttgtgaccctccccaggcaccctcccaggcactgtgcagtcccaagcaggccgcggtgccccgagggaagtctgggctgctgctcctgtacttggagaaaggggcagggtgtgtgtgttaaggccacccatggggtgtgggcatacctggtcgtgggttcaggtggtgtatttgggtcaggtggctggaaaatgcagcaggataggcctcaacttggctagacctggactccccaggacccttcagccccctaacagccctgatcacccaactggtcatccaccttttgaggaaaggatgtgcctgatacacatttgtgttactgcgcagagtcggctcagaggaggtgtaagcgaaaagaccctccccagcaaggtggcatagggacccagggccagataggcatgaggggcactgcccaaactggccatctggcctgtctacctcccacatccaggtaccacctggtgacaaacactggagccccagtgtctgggctactcattggcatcttaggtagaggcctcaggatgggccaggagtgagggtgaggcttcagcagaaatgttggaggcatcctgagctgcagaagaaacacacacacacacacacacacacacacacacacacacacagctgcagaagaaacatacacacacacacatactgagctgaaggaatacacacatacactgagctgcagaagaaacatacatacacacactgaactgaagaaatacacacacacacacacacacacacacacactgcctctctgactggtggccacctgtgtggcttgggagctaagaagccctgcttcagtctggctcctctttgcccttcctgtctgctcctggtgccaagtggcttttgggagacatggatggacacctgatacctggcagtctgcatcgagacattgatttttttttttttgagatggggccccactctgtcgccaggctggagtgcagtggcgcaatcttggctcattgcaacctctaccttccacgttcaagagattctcctgcctcagcctcccaagtagctgggattacaggcttgagccaccatgcccagctaattttttgtactttttagtagagacagggtttcagtatgttggccaggatggtcttgaacttctgacctcaagtgatccacccgcctcggcctcttaaagtgctgcgattacaggcatgagccactgtgcccgacaagaccttgatattgaagtcacatcagaggcccctttgcttcttggtctgtcgtgtctccctgtccccaggaagcacctgggacctctcacaactgctgtgttcactcagcttatggccctcctttacaacactcaagtttttcaaatcagtttccccggaacccacagaacatgcctttaggcagtgtcaagtaacaagaacatcgggaattatggctccagatgttcttttttttttttttttttttgagatggagtctcgctctgtcgcccaggctggaatgcagtggcgcaatctctgctcactgcaagctccgcctcctgagttcacgccattctcctgcctcagcctctcaagtagctgggactacaggtgcccgccaccatgcctggctaattttttttgtattttcagtagagatggtctcgatctcctgaccttgtgatctgcccgcctcagcctcacaaagtgctgggattacaggcgtgagtcacggcgcatggccctttattttattttattttattttattttattttattttattttatttgtgagacagagttttgctctgtcaccaggctggcatgcagtggcacgatttcggctcactgcaacctccaactccctcgttcaagtgattctcctgcctcagcctcctgagtagctgggattacaggcatgcgccaccacgcccagctaatttttgtatttttaatagagacagggtttcatcatgttggccaggatgatttcgatctcctgaccttgtgatccgcccactttggcctcccaaaatggtgggattacaggcgtgagccaccgtgcccagcccagatgttctttatgagaggtgaggcagatgtagtgtgtatgtgagaggaaggggaggtgagatgcagggatggccttagccttgaactggtgctgggctcctgggcatggtagccacagggaggactatct

SEQ ID NO: 1562959 - DNA, 4001 bp, Homo sapiens
cttccgcacccagtcggtcttggcctgcagccgcccattctcctccgccagccaggcgtttttgagcagcgccgcctgcagctgtgtctcggcctcctcgccacgtcgccgcgccggggccgcctgcgtgcccagctcctggcactcgcgccgccgctggtccagctcgcgctccagcgccagcatctgccgtcgcacctcctcgcaggttgcgctctggccgcccgcctcgggccaagcgccaccgttgccctgctgaagcatcaactgcctctgcaggcgcagcacttcccgctgggactcgcgctgcaggcggtctaagtctctgacgttgagccactgggtgcaggggccgccccttccagtatgcaggtcgctgcagggacccgaggcgacacgcgcctgcaggaggtggcactcctgccgcagctcttcgatctgcttgtccttggccagcggcgcgctcgcctgctccgacaggtcccgagcgcgctggcgggcaaagacttggcacagctccaggccggcgcaactctcgccgggtataggcgcgctcacggcccggaggttggtctcctgcagctcgcgggcgcggtcagctaggcgccgcgcgagcccggtcagctccgcgcgctttaccttgagccgcttcaccttctcgtctgcctggtaggggcagcctgcacgccgcagctgcttgttctcctcttgcagggtataacagcggcgcgccagcacccacaacgccttggccagcagccagttcagctttatcagctcgtggtggcccaggcccgggggtgagggagtcaggacttcgcagggctggctctcagagccttctcctccccgcgggttgctgagtttcctgtgggctgacggtggtggtggcggcgggagtggcgatggtggcggcgagagcctccgggagccaggggtggaggtgtctggtgaggagggccgctcctcggatttggaggccttggggaggctccgggtgctgtcaagcgagcgggaacacgcaggtgcgaagcaatcaagggagctggcgtgcgtggagagcaggccgtctggggagctggagcacgcagaggacaccaggcctagcgagcgggagcgcacaccgacttcagcactcaggctgtctagagatccgagttggcaggcgggtttgggggcgtggcaagagccgctggaggtctggggcagcggttcttccaaggaatgcacagcttgggggtccggtgatcccgacaaagccgggtgcccgcggaagtgcgccaggatgtacttgaggaagagctggcgctccacctccagcgccgcctgcagatagcggatgcgcgccgcctgctcgccgtcagtctgccagcgaagctgcgccaacacttcctgcaggcgacagcggcactgcgccgcggaaacctcggacgcccccgggcggctacagtggccgcggttcaccagctcctcggccagctggcgctgcagctcccgggcttggcgcaccacgccatcgcgctcccggtgcagcagctgctgcagctgccgctgctcggcctccttccagcgcagcagctgccggatctcggcctcgcgttcccgctgcatctcctcttgcagctgccgcaactcccggctgcgctgtgcctcccacttggagcgcagacggtcagccagctgccgccgctcccgctcggcctcctcacgcagctggcgctcccgggcagcgaagcgccgccgttccgcccgccagcctgcccgctccgcctccagctccgcccgtagcttctccagctcccgcctctggttctccagcactgccgccgccgggctggagcagcccggcttcttgggcgacgcgcccaaggggctgggcgagtccttggccattgcggccgcggcccggctggtctccagacttcgcctggcaggcctcagctcgccaacggccgccgccgaccgcccggcgcgccccttccggcgccccctgggggtctccgcgtgccccttccgcctcttggcatgttcccccgcctcctgccgcggatgtctggcccaggcgcctctccacctggcaaggccagggctggactcccacacccctgctcaaactggcccatgtcccttccaggatgcacgggggcttttccggtccctacacttttcctgctactagcaccaagtcccttgtgaccctccccaggcaccctcccaggcactgtgcagtcccaagcaggccgcggtgccccgagggaagtctgggctgctgctcctgtacttggagaaaggggcagggtgtgtgtgttaaggccacccatggggtgtgggcatacctggtcgtgggttcaggtggtgtatttgggtcaggtggctggaaaatgcagcaggataggcctcaacttggctagacctggactccccaggacccttcagccccctaacagccctgatcacccaactggtcatccaccttttgaggaaaggatgtgcctgatacacatttgtgttactgcgcagagtcggctcagaggaggtgtaagcgaaaagaccctccccagcaaggtggcatagggacccagggccagataggcatgggggcactgcccaaactggccatctggcctgtctacctcccacatccaggtaccacctggtgacaaacactggagccccagtgtctgggctactcattggcatcttaggtagaggcctcaggatgggccaggagtgagggtgaggcttcagcagaaatgttggaggcatcctgagctgcagaagaaacacacacacacacacacacacagctgcagaagaaacatacacacacacacatactgagctgaaggaatacacacatacactgagctgcagaagaaacatacatacacacactgaactgaagaaatacacacacacacacacacacacacacacacacacacactgcctctctgactggtggccacctgtgtggcttgggagctaagaagccctgcttcagtctggctcctctttgcccttcctgtctgctcctggtgccaagtggctttttggagacatggatggacacctgatacctggcagtctgcattgagacattgattttgttttttgagatggggcctcactctgtcgccaggctggagtgcagtggcgcaatcttggctcattgcaacctctaccttccacgttcaagagattctcctgcctcagcctcccaagtagctgggattacaggcttgagccaccatgcccagctaattttttgtactttttagtagagacagggtttcagtatgttggccaggatggtcttgaacttctgacctcaagtgatccacccgcctcggcctcttaaagtgctgcgattacaggcatgagccactgtgcccgacaagaccttgatattgaagtcacatcagaggcccctttgcttcttggtctgtcgtgtctccctgtccccaggaagcacctgggacctctcacaactgctgtgttcactcagcttatggccctcctttacaacactcaagtttttcaaatcagtttccccggaacccacagaacatgcctttaggcagtgtcaagtaacaagaacatcgggaattatggctccagatgttctttttttttttttttttttttgagatggagtctcgctctgtcgcccaggctggaatgcagtggcgcaatctctgctcactgcaagctccgcctcctgagttcacgccattctcctgcctcagcctctcaagtagctgggactacaggtgcccgccaccacgcctggctaattttttttgtatttttcagtagagatggggtttcaccatgttaaccaggatggtcttgatctcctgaccctgtgatctgcccgcctcggcctcacaaagtgctgggattacaggcgtgagccaccgcgcatggccctttattttattttattttattttattttattttattttatttttgagacagagttttgctctgtcacc

SEQ ID NO: 1562960 - DNA, 4001 bp, Homo sapiens
ttccgcacccagtcggtcttggcctgcagccgcccattctcctccgccagccaggcgtttttgagcagcgccgcctgcagctgtgtctcggcctcctcgccacgtcgccgcgccggggccgcctgcgtgcccagctcctggcactcgcgccgccgctggtccagctcgcgctccagcgccagcatctgccgtcgcacctcctcgcaggttgcgctctggccgcccgcctcgggccaagcgccaccgttgccctgctgaagcatcaactgcctctgcaggcgcagcacttcccgctgggactcgcgctgcaggcggtctaagtctctgacgttgagccactgggtgcaggggccgccccttccagtatgcaggtcgctgcagggacccgaggcgacacgcgcctgcaggaggtggcactcctgccgcagctcttcgatctgcttgtccttggccagcggcgcgctcgcctgctccgacaggtcccgagcgcgctggcgggcaaagacttggcacagctccaggccggcgcaactctcgccgggtataggcgcgctcacggcccggaggttggtctcctgcagctcgcgggcgcggtcagctaggcgccgcgcgagcccggtcagctccgcgcgctttaccttgagccgcttcaccttctcgtctgcctggtaggggcagcctgcacgccgcagctgcttgttctcctcttgcagggtataacagcggcgcgccagcacccacaacgccttggccagcagccagttcagctttatcagctcgtggtggcccaggcccgggggtgagggagtcaggacttcgcagggctggctctcagagccttctcctccccgcgggttgctgagtttcctgtgggctgacggtggtggtggcggcgggagtggcgatggtggcggcgagagcctccgggagccaggggtggaggtgtctggtgaggagggccgctcctcggatttggaggccttggggaggctccgggtgctgtcaagcgagcgggaacacgcaggtgcgaagcaatcaagggagctggcgtgcgtggagagcaggccgtctggggagctggagcacgcagaggacaccaggcctagcgagcgggagcgcacaccgacttcagcactcaggctgtctagagatccgagttggcaggcgggtttgggggcgtggcaagagccgctggaggtctggggcagcggttcttccaaggaatgcacagcttgggggtccggtgatcccgacaaagccgggtgcccgcggaagtgcgccaggatgtacttgaggaagagctggcgctccacctccagcgccgcctgcagatagcggatgcgcgccgcctgctcgccgtcagtctgccagcgaagctgcgccaacacttcctgcaggcgacagcggcactgcgccgcggaaacctcggacgcccccgggcggctacagtggccgcggttcaccagctcctcggccagctggcgctgcagctcccgggcttggcgcaccacgccatcgcgctcccggtgcagcagctgctgcagctgccgctgctcggcctccttccagcgcagcagctgccggatctcggcctcgcgttcccgctgcatctcctcttgcagctgccgcaactcccggctgcgctgtgcctcccacttggagcgcagacggtcagccagctgccgccgctcccgctcggcctcctcacgcagctggcgctcccgggcagcgaagcgccgccgttccgcccgccagcctgcccgctccgcctccagctccgcccgtagcttctccagctcccgcctctggttctccagcactgccgccgccgggctggagcagcccggcttcttgggcgacgcgcccaaggggctgggcgagtccttggccattgcggccgcggcccggctggtctccagacttcgcctggcaggcctcagctcgccaacggccgccgccgaccgcccggcgcgccccttccggcgccccctgggggtctccgcgtgccccttccgcctcttggcatgttcccccgcctcctgccgcggatgtctggcccaggcgcctctccacctggcaaggccagggctggactcccacacccctgctcaaactggcccatgtcccttccaggatgcacgggggcttttccggtccctacacttttcctgcttctagcaccaagtcccttgtgaccctccccaggcaccctcccaggcactgtgcagtcccaagcaggccgcggtgccccgagggaagtctgggctgctgctcctgtacttggagaaaggggcagggtgtgtgtgttaaggccacccatggggtgtgggcatacctggtcgtgggttcaggtggtgtatttgggtcaggtggctggaaaatgcagcaggataggcctcaacttggctagacctggactccccaggacccttcagccccctaacagccctgatcacccaactggtcatccaccttttgaggaaaggatgtgcctgatacacatttgtgttactgcgcagagtcggctcagaggaggtgtaagcgaaaagaccctccccagcaaggtggcatagggacccagggccagataggcatgggggcactgcccaaactggccatctggcctgtctacctcccacatccaggtaccacctggtgacaaacactggagccccagtgtctgggctactcattggcatcttaggtagaggcctcaggatgggccaggagtgagggtgaggcttcagcagaaatgttggaggcatcctgagctgcagaagaaacacacacacacacacacacacagctgcagaagaaacatacacacacacacatactgagctgaaggaatacacacatacactgagctgcagaagaaacatacatacacacactgaactgaagaaatacacacacacacacacacacacacacacacacacacacacacacacactgcctctctgactggtggccacctgtgtggcttgggagctaagaagccctgcttcagtctggctcctctttgcccttcctgtctgctcctggtgccaagtggctttttggagacatggatggacacctgatacctggcagtctgcatcgagacattgattttgttttttgagatggggcctcactctgtcgccaggctggagtgcagtggcgcaatcttggctcattgcaacctctaccttccacgttcaagagattctcctgcctcagcctcccaagtagctgggattacaggcttgagccaccatgcccagctaattttttgtactttttagtagagacagggtttcagtatgttggccaggatggtcttgaacttctgacctcaagtgatccacccgcctcggcctcttaaagtgctgcgattacaggcatgagccactgtgcccgacaagaccttgatattgaagtcacatcagaggcccctttgcttcttggtctgtcgtgtctccctgtccccaggaagcacctgggacctctcacaactgctgtgttcactcagcttatggccctcctttacaacactcaagtttttcaaatcagtttccccggaacccacagaacatgcctttaggcagtgtcaagtaacaagaacatcgggaattatggctccagatgttctttttttttttttttttttttgagatggagtctcgctctgtcgcccaggctggaatgcagtggcgcaatctctgctcactgcaagctccgcctcctgagttcacgccattctcctgcctcagcctctcaagtagctgggactacaggtgcccgccaccacgcctggctaattttttttgtattttcagtagagatggggtttcaccatgttaaccaggatggtcttgatctcctgaccctgttgatctgcccgcctcggcctcacaaagtgctgggattacaggcgtgagccaccgcgcatggccctttattttattttattttattttattttattttattttatttttgagacagagttttgc

SEQ ID NO: 1562961 - DNA, 4001 bp, Homo sapiens
tgcagggacccgaggcgacacgcgcctgcaggaggtggcactcctgccgcagctcttcgatctgcttgtccttggccagcggcgcgctcgcctgctccgacaggtcccgagcgcgctggcgggcaaagacttggcacagctccaggccggcgcaactctcgccgggtataggcgcgctcacggcccggaggttggtctcctgcagctcgcgggcgcggtcagctaggcgccgcgcgagcccggtcagctccgcgcgctttaccttgagccgcttcaccttctcgtctgcctggtaggggcagcctgcacgccgcagctgcttgttctcctcttgcagggtataacagcggcgcgccagcacccacaacgccttggccagcagccagttcagctttatcagctcgtggtggcccaggcccgggggtgagggagtcaggacttcgcagggctggctctcagagccttctcctccccgcgggttgctgagtttcctgtgggctgacggtggtggtggcggcgggagtggcgatggtggcggcgagagcctccgggagccaggggtggaggtgtctggtgaggagggccgctcctcggatttggaggccttggggaggctccgggtgctgtcaagcgagcgggaacacgcaggtgcgaagcaatcaagggagctggcgtgcgtggagagcaggccgtctggggagctggagcacgcagaggacaccaggcctagcgagcgggagcgcacaccgacttcagcactcaggctgtctagagatccgagttggcaggcgggtttgggggcgtggcaagagccgctggaggtctggggcagcggttcttccaaggaatgcacagcttgggggtccggtgatcccgacaaagccgggtgcccgcggaagtgcgccaggatgtacttgaggaagagctggcgctccacctccagcgccgcctgcagatagcggatgcgcgccgcctgctcgccgtcagtctgccagcgaagctgcgccaacacttcctgcaggcgacagcggcactgcgccgcggaaacctcggacgcccccgggcggctacagtggccgcggttcaccagctcctcggccagctggcgctgcagctcccgggcttggcgcaccacgccatcgcgctcccggtgcagcagctgctgcagctgccgctgctcggcctccttccagcgcagcagctgccggatctcggcctcgcgttcccgctgcatctcctcttgcagctgccgcaactcccggctgcgctgtgcctcccacttggagcgcagacggtcagccagctgccgccgctcccgctcggcctcctcacgcagctggcgctcccgggcagcgaagcgccgccgttccgcccgccagcctgcccgctccgcctccagctccgcccgtagcttctccagctcccgcctctggttctccagcactgccgccgccgggctggagcagcccggcttcttgggcgacgcgcccaaggggctgggcgagtccttggccattgcggccgcggcccggctggtctccagacttcgcctggcaggcctcagctcgccaacggccgccgccgaccgcccggcgcgccccttccggcgccccctgggggtctccgcgtgccccttccgcctcttggcatgttcccccgcctcctgccgcggatgtctggcccaggcgcctctccacctggcaaggccagggctggactcccacacccctgctcaaactggcccatgtcccttccaggatgcacgggggcttttccggtccctacacttttcctgctactagcaccaagtcccttgtgaccctccccaggcaccctcccaggcactgtgcagtcccaagcaggccgcggtgccccgagggaagtctgggctgctgctcctgtacttggagaaaggggcagggtgtgtgtgttaaggccacccatggggtgtgggcatacctggtcgtgggttcaggtggtgtatttgggtcaggtggctggaaaatgcagcaggataggcctcaacttggctagacctggactccccaggacccttcagccccctaacagccctgatcacccaactggtcatccaccttttgaggaaaggatgtgcctgatacacatttgtgttactgcgcagagtcggctcagaggaggtgtaagcgaaaagaccctccccagcaaggtggcatagggacccagggccagataggcatgggggcactgcccaaactggccatctggcctgtctacctcccacatccaggtaccacctggtgacaaacactggagccccagtgtctgggctactcattggcatcttaggtagaggcctcaggatgggccaggagtgagggtgaggcttcagcagaaatgttggaggcatcctgagctgcagaagaaacacacacacacacacacacacagctgcagaagaaacatacacacacacacatactgagctgaaggaatacacacatacactgagctgcagaagaaacatacatacacacactgaactgaagaaatacacacacacacacacacacacacacacacacacacactgcctctctgactggtggccacctgtgtggcttgggagctaagaagccctgcttcagtctggctcctctttgcccttcctgtctgctcctggtgccaagtggctttttggagacatggatggacacctgatacctggcagtctgcattgagacattgattttgttttttgagatggggcctcactctgtcgccaggctggagtgcagtggcgcaatcttggctcattgcaacctctaccttccacgttcaagagattctcctgcctcagcctcccaagtagctgggattacaggcttgagccaccatgcccagctaattttttgtactttttagtagagacagggtttcagtatgttggccaggatggtcttgaacttctgacctcaagtgatccacccgcctcggcctcttaaagtgctgcgattacaggcatgagccactgtgcccgacaagaccttgatattgaagtcacatcagaggcccctttgcttcttggtctgtcgtgtctccctgtccccaggaagcacctgggacctctcacaactgctgtgttcactcagcttatggccctcctttacaacactcaagtttttcaaatcagtttccccggaacccacagaacatgcctttaggcagtgtcaagtaacaagaacatcgggaattatggctccagatgttctttttttttttttttttttttgagatggagtctcgctctgtcgcccaggctggaatgcagtggcgcaatctctgctcactgcaagctccgcctcctgagttcacgccattctcctgcctcagcctctcaagtagctgggactacaggtgcccgccaccacgcctggctaattttttttgtatttttcagtagagatggggtttcaccatgttaaccaggatggtcttgatctcctgaccctgtgatctgcccgcctcggcctcacaaagtgctgggattacaggcgtgagccaccgcgcatggccctttattttattttattttattttattttattttattttatttttgagacagagttttgctctgtcaccaggctggcatgcagtggcacgatttcggctcactgcaacctccgactccctcgttcaagtgattctcctgcctcagcctcctgagtagctgggattacaggcatgcgccaccacgcccagctaatttttgtatttttaatagagacagggtttcatcatgttggccaggatgatttcgatctcctgaccttgtgatccgcccactttggcctcccaaaatggtgggattacaggcgtgagccaccgtgcccagcccagatgttctttatgagaggtgaggcagatgtagtgtgtatgtgagaggaaggggaggtgagatgcagggatggccttagccttgaactggtgctgggctcctggacatggtagccacaggg

SEQ ID NO: 1562962 - DNA, 4001 bp, Homo sapiens
gcagggacccgaggcgacacgcgcctgcaggaggtggcactcctgccgcagctcttcgatctgcttgtccttggccagcggcgcgctcgcctgctccgacaggtcccgagcgcgctggcgggcaaagacttggcacagctccaggccggcgcaactctcgccgggtataggcgcgctcacggcccggaggttggtctcctgcagctcgcgggcgcggtcagctaggcgccgcgcgagcccggtcagctccgcgcgctttaccttgagccgcttcaccttctcgtctgcctggtaggggcagcctgcacgccgcagctgcttgttctcctcttgcagggtataacagcggcgcgccagcacccacaacgccttggccagcagccagttcagctttatcagctcgtggtggcccaggcccgggggtgagggagtcaggacttcgcagggctggctctcagagccttctcctccccgcgggttgctgagtttcctgtgggctgacggtggtggtggcggcgggagtggcgatggtggcggcgagagcctccgggagccaggggtggaggtgtctggtgaggagggccgctcctcggatttggaggccttggggaggctccgggtgctgtcaagcgagcgggaacacgcaggtgcgaagcaatcaagggagctggcgtgcgtggagagcaggccgtctggggagctggagcacgcagaggacaccaggcctagcgagcgggagcgcacaccgacttcagcactcaggctgtctagagatccgagttggcaggcgggtttgggggcgtggcaagagccgctggaggtctggggcagcggttcttccaaggaatgcacagcttgggggtccggtgatcccgacaaagccgggtgcccgcggaagtgcgccaggatgtacttgaggaagagctggcgctccacctccagcgccgcctgcagatagcggatgcgcgccgcctgctcgccgtcagtctgccagcgaagctgcgccaacacttcctgcaggcgacagcggcactgcgccgcggaaacctcggacgcccccgggcggctacagtggccgcggttcaccagctcctcggccagctggcgctgcagctcccgggcttggcgcaccacgccatcgcgctcccggtgcagcagctgctgcagctgccgctgctcggcctccttccagcgcagcagctgccggatctcggcctcgcgttcccgctgcatctcctcttgcagctgccgcaactcccggctgcgctgtgcctcccacttggagcgcagacggtcagccagctgccgccgctcccgctcggcctcctcacgcagctggcgctcccgggcagcgaagcgccgccgttccgcccgccagcctgcccgctccgcctccagctccgcccgtagcttctccagctcccgcctctggttctccagcactgccgccgccgggctggagcagcccggcttcttgggcgacgcgcccaaggggctgggcgagtccttggccattgcggccgcggcccggctggtctccagacttcgcctggcaggcctcagctcgccaacggccgccgccgaccgcccggcgcgccccttccggcgccccctgggggtctccgcgtgccccttccgcctcttggcatgttcccccgcctcctgccgcggatgtctggcccaggcgcctctccacctggcaaggccagggctggactcccacacccctgctcaaactggcccatgtcccttccaggatgcacgggggcttttccggtccctacacttttcctgcttctagcaccaagtcccttgtgaccctccccaggcaccctcccaggcactgtgcagtcccaagcaggccgcggtgccccgagggaagtctgggctgctgctcctgtacttggagaaaggggcagggtgtgtgtgttaaggccacccatggggtgtgggcatacctggtcgtgggttcaggtggtgtatttgggtcaggtggctggaaaatgcagcaggataggcctcaacttggctagacctggactccccaggacccttcagccccctaacagccctgatcacccaactggtcatccaccttttgaggaaaggatgtgcctgatacacatttgtgttactgcgcagagtcggctcagaggaggtgtaagcgaaaagaccctccccagcaaggtggcatagggacccagggccagataggcatgggggcactgcccaaactggccatctggcctgtctacctcccacatccaggtaccacctggtgacaaacactggagccccagtgtctgggctactcattggcatcttaggtagaggcctcaggatgggccaggagtgagggtgaggcttcagcagaaatgttggaggcatcctgagctgcagaagaaacacacacacacacacacacacagctgcagaagaaacatacacacacacacatactgagctgaaggaatacacacatacactgagctgcagaagaaacatacatacacacactgaactgaagaaatacacacacacacacacacacacacacacacacacacacacacacacactgcctctctgactggtggccacctgtgtggcttgggagctaagaagccctgcttcagtctggctcctctttgcccttcctgtctgctcctggtgccaagtggctttttggagacatggatggacacctgatacctggcagtctgcatcgagacattgattttgttttttgagatggggcctcactctgtcgccaggctggagtgcagtggcgcaatcttggctcattgcaacctctaccttccacgttcaagagattctcctgcctcagcctcccaagtagctgggattacaggcttgagccaccatgcccagctaattttttgtactttttagtagagacagggtttcagtatgttggccaggatggtcttgaacttctgacctcaagtgatccacccgcctcggcctcttaaagtgctgcgattacaggcatgagccactgtgcccgacaagaccttgatattgaagtcacatcagaggcccctttgcttcttggtctgtcgtgtctccctgtccccaggaagcacctgggacctctcacaactgctgtgttcactcagcttatggccctcctttacaacactcaagtttttcaaatcagtttccccggaacccacagaacatgcctttaggcagtgtcaagtaacaagaacatcgggaattatggctccagatgttctttttttttttttttttttttgagatggagtctcgctctgtcgcccaggctggaatgcagtggcgcaatctctgctcactgcaagctccgcctcctgagttcacgccattctcctgcctcagcctctcaagtagctgggactacaggtgcccgccaccacgcctggctaattttttttgtattttcagtagagatggggtttcaccatgttaaccaggatggtcttgatctcctgaccctgttgatctgcccgcctcggcctcacaaagtgctgggattacaggcgtgagccaccgcgcatggccctttattttattttattttattttattttattttattttatttttgagacagagttttgctctgtcaccaggctggcatgcagtggcacgatttcggctcactgcaacctccgactccctcgttcaagtgattctcctgcctcagcctcctgagtagctgggattacaggcatgcgccaccacgcccagctaatttttgtatttttaatagagacagggtttcatcatgttggccaggatgatttcgatctcctgaccttgtgatccgcccactttggcctcccaaaatggtgggattacaggcgtgagccaccgtgcccagcccagatgttctttatgagaggtgaggcagatgtagtgtgtatgtgagaggaaggggaggtgagatgcagggatggccttagccttgaactggtgctgggctcctggacatggta

SEQ ID NO: 1562963 - DNA, 4001 bp, Homo sapiens
tgctccctaagacaacataaacattcctaagcattctagcaggtgttgaaaaagtgatttaggcagagctttgtaatgcacaaaataaggacataataatgtttgattagaaaaccaaaggtatgctagaggccaggcacagtggcttacacctgaaatcccagcactttgggaggctgaggcaggcggatcacttgaggtcaggagttcgagaccagcctggccaacatggtgaaaccccatctctactaaatactcaaaaaaaaaaaaaaaaaagctggaacttgtcatgtgtgtgaactggcaagtcaagtctataagaggactgtttttatatgatgcatggaaagctagccaacagactgcaaaaattctctcacatctatacacatattgctgaagagaggattcaagcagggattatgttccagggaagagaaggctggtctgaacaacctcaaggggtgctttcaactgagagtcctcaattttgtgattcagagttcactggcttctcctggtcaaacataaaatcttcagaggcatttccaacttgttcttagaaaaaagctactaacccatggggtgggacccagtttacttattcattcaataaacatttaaggtgcctctatcagatattgggtcattccaaagtccttgaaaagaaggatggtgcacaggacaaccaggaagagattatgtaaggtcagatgcattggccttatttacaggagatgtaggctaaagtgatggaagtgtcaaaagagaagaaaaaagtcacatttgccttgagagcagagtcagcaccagaaagatgcagaacaactccttggaatcacagactttcaagttggaaaggaccttcatctaatacctatatacctccctcgaaaggaggcacggaggcaatccattcactccatcggtggtcacctctgacgattcttccatttaagttcttctattaagcaaaaatcttgccttcctgtagaattcacctgttagtcctagttctgcctcttttagcctaaagatgaagtggaagccctctttgccgtaacagtattttcaatttttaaaaagttaattcccttccagtgctctctttactgagctaaccattccagttctttcaaagttcctgaactggcaccagctgcctcaaagcgaagaatggatatctagtgctcacagcaggaaagcacttaaaatcaatgagcttcaaacattagtatatacaggacccccctacgcataagttcagattctaaaccagaagtctgaattgagtcccgcgctgtaaagccggcatctcagagaattacaaagcagatggtgtaagaaccatattttgaaaaacactgccccgttttagagacgagaaaactgaggcccagcacagggaagagatttggcccagaacgcacaattgtctgtcggtggcgaagtctcgaatccaggtctcttactttcagcccaactctgttcaccgcgctccccggcctctgcttctccactcagggcaaactcgtgaaatgcactcccagatgatagaggcggtctcgcacgggggatagaatgggaatcagtgcccatgcctcgaaaggagagcttgtgggagcccttctctttcgcaaggcctcagtttccccaatctgtattcatgggacgcagaaccacaacgccagctcgtcctcttttcggggacagacacgaccggtcttgctgtctctgggcccctgggctcagatgttcaagcccgtgtgtcctgggaaggcggacccgggtctcccgcccccgtccctaaactttggcgcccccgccccaaccccagcccctcacatacctgcctccgcacagttaacgccagcccagtcaatcagtttttcgggtacacggccaatactaacgccgcgtcaatctgttgggtaagacctccgacccctcctacgcggactccagtcacatgacgcggagccgcccctctcggagggacttccggccccaaccggaagaggttaatttccatggctgaagctctaaggttccgcctgcgggcaggaagcggaggaaccttggagcttcggcagcttttcaaagagctttgggttcggggctcctaaaagaaaaaaactgattccggccgggcgcggtggctcccacctgtaattccagcagtttgggaggccgcggcggatggatcacttgaggtcaggagttcgagaccagcctggccaaaatggtgaaacccctctgtactcaaaatacaaaaagtagccggtcgtggtggcgcacacctgtaatcccagctactcgggaggctgaggcaggataatcgcttgaacccgggaggcggaggttgcagtgagctgagatcgcaccactgcactctagcctgggcgtcagagtgagactccgtcaaaaaaaaaaaaaaaaaagagagagagaaagaactaactcattccggaaagtaccagataaacttggaacatcttgttacaccagaatataaggatgatggtaataagaatcatgggaatgtgtcaaagaacacaggagctgtctttaaggagatcttactggccaagtcagggcaatttcagaatcaaaatatggagtgatagtaatagagtataactaattgaataaaatagtaatccatgagtctttacaaacataaagaagtgagcatattaatgggtgaagggaaagtcttccttttagtagaatgctagctaataaacatggtggaattaggaaatcaataatgtgtggtaaaactagagaaacgggatgtttacaacagcaaaagtgtctcccataaattagctattgattacaaagggaaaatggtgatgttacagaggtttaacctagcagaacaaacagatcaaagtgatcaaagttaacaccactagttaatgggtcagatcaagggcctcctaataaaatgcactgagaacacatctgtggtatttctgtcaaaagtgcaccgtacacatctcatgaggaagtgctagagaaccccaaatgaaggacactgtctacaaaataactcattgtcatgaaaaacagagaaaagctgaggaactgttccagtttaaaggagactaaagaagcatgacaacaaaatgtggtgtgtgattctaaataggaccctggactggggtagtggtggtggtggaatagttgtaatggacaatattgggacaagtaatgaaatttgaatatggattgtggattagctgttaatacatattgtatcaaatcacatactgataggtgatggagcttgtgatttgcactcaagcagtcattggagttcttgacagccatcttcattcattcaacaagcatttattaagtacctacagttatcccaggaacggttagggatcggacctgagtaggaggtgaacatagtagataaaggccggcgcggtggctcacgcctataataccagcactttgggaggtcgaggcaggcagatcacctgaggttaggagttcgagaccagcctggccaacatggtgaaactcatctctactaaaaatacaaaaattagccaggcgtggtggcgggcacctgtaatcccggctacttgggaggctgaggctggagaattgcctgaacccaggagacagaggttatagtgagccaagatcgtgccattgcactccagcctgggcgacaagagtgaaactccatctcagaaaaaaaaataaaaaatagtagatgaaataagctcatagatgaaagtcctagtctgccagccacctttgcaagttcctgtgatcaagaagtaatacaagggatgtttccagtcacacaaacctggatttgaaaccaagcgctaagagaaaaacagcccctgacatccaggagatggtctggcactcacaaatagaccttggtgtgttctcttattgaacataaaaacttcacagaacatcaacatcaaacaaagccactatgtgaccatgatggatcaagacaa

SEQ ID NO: 1562964 - DNA, 4001 bp, Homo sapiens
tgggaggctgaggtgggagaatggcatgaacccgggaggcagagcttgcagagagccgagatcgcgccactgcactccagcctgggtgacagagcgaaactccatctcaaaaaaaaaaaaaaaaaaaagttaacagttaggccgggccctgccaggcccagccacagtggcagcaggggcagcagcagcagcagtggcaacgggggctcctgcctgtaatcccagcactttgggaggccgaggcaggtggaactgaggtcaggtgttcaagaccagcctggccaacatggtgaaaccctgtctctactaaaaatacaaaaaattagctgggtgtggtggcacatgactgtgatcctagctacttgggagactgaggcaggagaatcacttgaacctggaaggcagaggttccagtgagccgagattgcgccactgcactccagcctgggcaacacgagtgatactccatctcaaaaaaaaaaaaaaaggctaacaggtaaggccctggtcccaagccccctcagtccatgggagaaccaggggctctctgtacccagggtcagtcctttgaagtctaaataccaactcactgcagcaatgcatccaacagcttggtgacattggaggaataatggaggacgatcactggcctgagcagaagctgggatatgtccagctgcagggagacaaggaggtcagcaggcctgggtccccctttccccagcttgcttaccctcacggcctggtccgatttacctctcggaccacgttgtggttcaggatgagaagaagcagggcagaggcacccaggaagagggcccgccgcatctgcagagggatagaaggcgagaggctagcatataccctgcctgcacacctgtctcaccacctgcagccctagctgctcttagctcctggccctgcagtgagcaaaactctggacagactgccataagctccttgaggtcaaaggtggaaactgctttcttcctcctgcctcccttccagatgcgctgtgccttccccggtcctatcagggcagtcccagcagtggtcgtcagcagcagctcccccatcccatactctcagagcctggtcaagcttctcaacctctctctggcctcctctcacctccctgcttcgaagccatactgactccattcttcaaactggggtgccctgacccaccaggcctagggcttctctgcaagctcttaagggcccatctaaggagggcctggctctagcagatgccttggaatcctttcctccagccccctcccccatagacatcccctgcacctgctggaccagggccttgggataggcctgcgggccactgcccttattctcctggtggaactgggccgcctgctccttgcccacgtatgccactgcaatccagccttccactggtgcctcctgctcggcatccacgatgtccatctgtgtggcaaggggccatgagcagagggaggtagggtgtggtgggggagggagccggggtcatcacagtggatgccaaggccagagttcccagagcatctggctctctggtttgggaagccggaatgctgggggcctggggagcctggggaggggcgctggactctcaaggcttggtggaggatgaacgtcggttcagggtgcggggtctctagggagggttgagagaggggtttagtgatgcggccagatggctcagcagcgctcaccagcagcagacgaccgcccagcaggggcgccgggtcggcttcggagccgatcctgacgccctccaggaccagagcgtcctggcgcggcagtctcacgtccacccgcacggcgcgggctccgccccgccccgccccggccgccggctcgctgccgtccgccgcggccccgggccccgccaggcccagccacagcggcagcaggggcagcagcagcagcagcggagacggaggcggcggcggaggcggcggcggcgatctcagcgcggggcgagcggcggggcccatggccggacccggcgagctggcccaacagtggggccaggggtcccgggcgcgggggggatcggagggagcgaggccgctgccggacggggcggggcgccgggaggggcggggccgcggccggacggggcggggcaccaggaggaacggagtgggcgcttggcggctctcgcgcccagactgggccgcgggcgccccctggtggccgcggagagctcaggtgcccgcggctgagggagctggagaggggcaaaaccggggtcgcagcgggaaggcggaaagtcagagagaggaggtgcttcggcagcggacgcgtcagcggggcagacaggaaaatagttggaaagggcgacctgggggagcagagacacgatcagagcctgagaagggcaggagcaagggatgtctaaggggcctggtggcaggcccttgttctgcggcagccccgtggacccacggggtggccagggccaagtcacatccctctcttccccggtcctccctgtctcgaccccactaaacagcaggaggcagagaaccagagactggcgtgggaagccgacaggggagatagaggggcaggggaaaggggctggggggcaaggcaaaacgaagcaggcagggactcagtgcctcagtgggaccgagaggctgggtcacttccctcatctgtgaaatgggcaccataggccgggcgcggtggctcacgcctgtaatcccagcactttgggaggccgaggcgggcggatcacctgaggtcgggagttcgagacccgcctgaccaacatggagaaaccccgtctctactaaaaatacaaaattagccgggcgtggtggcgcatgcctgtaattccagctactcaggaggctgaggcaggagaatcgcttgaacccgggaggcggaggttgcggcgagccgagatcgcgccattggaatccagcctgggcgacaagagtgaaactccgtctctaaataaataaataaataaataagcaccatgtacaatcaacactgcctcacccccagcaaataactcaaatgtctactggaatgtggaagttccactactgttctaaaacttgtccgtttctccaagggttggggctgctgggagctggctcagtctgaaacctgagcctttaaaaattgtatggtgggcagggcgcggtgggtcacgcctgtaatcccagcactttgggaggctgaggcaggcggatcatgaggttagcagatcgaaaccatcgtggctaacaaggtgaaaccccgtctctactaaaaatgcaaaaaaatagccgggcatgttgggaggcgcctgtagtcccagctactcgggaggctgaggcagcagaatggcgtgaacccgggaggcggagcttgcagtgacctgagatggtgccactgcactccaacctgggccagatgagccacaacactcttttttctccagaaaaattgaaagaattttacagtgaacacctgtaggaacactgatatgggatgaccaagttgctcctgaagaagtgtgagacgggtatataagacagcccccgatatcagcctaaagacagacaaatggaacatgaaataggccagaaactgacccacacatctaaagatggtgtacatcagaggaaacattgtgtttgtggagatacaaggaggcagtagcatggactgtttggtaaattgtgctaagaaattgaattaaccattaggagaagaaattagacccctattacatacacatcatatacaaaatatgaattccatatagattaaagacctaaataagaaaagtaaaagtttaagcattaaaaaattatttatgcatttatttttgagacagggtctctctctgttgcccaggctggaatgcaatggtgccttctcagctcattgcaacctccagggtcaactgattctcccacctcagcctccaaagtagctgagaccacaggggtgtgtcaccatgcccagctaatttttttttttttttttttttt

SEQ ID NO: 1562965 - DNA, 4001 bp, Homo sapiens
cccaagcaaggggtgtaatgttttctaggaaaatgcaaagtgcccatttaggccggaagggcaactgggccccacacctgcagtacggactcacagggctgtccttactgcctatctctcattcaaagcacatttatgttattcaaacaaaaaatatcaggaccctagacagccaaatacctgtccagcttcaattctcttctacagaaacctctggaggcagacaagattgctatttatctggaaaattcagtgccctaacaatagctctgagctcagagattagtcagtatcaactgcctaacattaatgtctccatggctcagcaaccagtgctgttagacatctctaagtagaacacacacaggtaagtggccattattcaagctttcaggtgaaaaaaacatgaatgaggcagttcttatgccagcctcagcagctccaaccccccacactagtgttaacttctctttgctaaggttcctggcaaatttactatgctctgaaatcaataccccacaccgcacctaaagcaaacagtgctgaccatctgtagccttggaatattagttttcaagttaagcattcccattctgctgtcgcagcagttctgacaacgtgtaactcctgcttaaaaaaaaaagtctgccctctgctaacagcttgactccatctctacaatttccctccccctccactcctattcccccaacttttaggatgtctgtacatactggatcccggcctgtcgacttcccgcacgatgtgagtcatgccagccttgtatcccaggaaggctgtgaggtggaccggcttggacgggtcatccttagggaagctcttcaccttcccacgatgcctgctgctgcgcttccgaggcaggaagccgagggacccatgtctgggagcggagaactttctgtgagactaggtgggaaaaaaatcaccgtcagcacccaaaccaaagcagtgcccccttctctagttcccagctgcttaagttccaaatctcagcaatactgaagaatcctgaccagacacccagcaagccgaataaaaaggtcattatctcttccaggctcgcacgtgtcaagaatgcttttgtattcgacaaaatttaagctgaatcttatttcaaatcctctcaacctgtaagaaaacgacccattttttttatctaaccacacaaaaatacactaagtagtggcactaaaaactgcttaacaggcagctttatatgccaattagcaaggttttgaccgctaaagaaagggactcccgggacaaacgctgggtagcagctagcaatgttaagctataggctgcctccggtgcccggacactaattacactgatacacacaggccaaagaactccgcagagccaaatcagaacgtgacaatcagcacacagtttctgtccgcccgtcaataagttcatcatctgtggtttctgcgagctccagaggccttcggagtgcaccagcggccccagatattcaggaggactccacaacactcccctcccccaagcttctttacctcccaatgagaacggcgccgagaacctccacccaaggtccttctacccagacaagcaggttatgggccctaatcccaactaatgatagaattggtgaggtcgaaacttagaaatgactcatggctttaaaaacgccgggcctccaagcctgctcccacccttacggcctctctctggccgacctgcaggcccaaagccagtcctccaagcgctcttcacaagcctctcgactttccagaaaataggccagactgaagtccccgctgggtcgcccgtgcccctaaagcaaacccccggcgccggccaagacgggatggcggcgatgcgtcgcggattcagccgtgccgacgccggtgacaatgaaacggccgccattacaacacataccatcacgccatcaaatcccgccggtagaggccggtcggccttacgggtccgctatataaagccaaatctggccccgccccttccggcgtgcgagcgcgcccccgcggcagacgacaggtcgggggcacgtaccgagcgccatttccacgcacgctcttccgctcctagctttcgttcagaagttgacgtcagcttcggagacagaaattacacactctacggcgaggggtcgggttcaaacttagtgaaaagccgcggagaggtgggctaagggtgggtgagccacaaatctacggcgtccggcagcagccaaatttgataataacgaagaaaaatggctgcgtcgcttctcctcctgtgatatgcagctatctctggaattagcgaagaaagactgaaactctcgtttcctggctcccacgctggttttgcggcgacaccaatttacctttaatacctttaatctcgggcatccctccctcaagccctatctctgccatttctcccatgctaatgcagtggcccgcgcttgattctgagggtcaggagcgtcccaagcctgcggaacggcctcacgacctctggtcatgccgagtccagctgctcagcctcccggagccccacgccttccagacctatgcatcagcgagggctttcgctgatctctgcctaggctccagggtgactcggatcctgaccgattccctgcttccaggctggtcccttacaaatctcttttttgagacggagtctcgctctgtcgcagtggcgcgatctcagctcactgcaagctccgcctaccggttcccagttcaagcagttctcctgcctcagcctcccgagtagctgggattacaggaatgcgccaccatgcctggctaattttttttttttttttttttgtatttttagtggagacggtgtttcaccatgttggccaggctggtcttgaactcctgatctcgtgatccgcccgcctcggcctcccaaagtgctgggattacaggtgtgagccaccgcgcctggccccctacaaatctttctaagaatcaagtatctcgttactttccatggccgcctcgttgtttcctcggaattaagcatcaacttcagcggccaccaaagacgctcccctaaccgtctacttcagcctcatggctgcgccagagcacacgctctcatatcacctgcttcctctgtcccaccctgtcatcttctttaattctgggcctggcctttgctcccaccgtcgtttgaaaagcattctctcggccaggcgcggtggctcacgcctgtaatcccaacactttgggagaccgaggcgggcggatcacctgaggtcaggagttcgaaaccagcctgggcaacatggcgaaaccccgtctctattaaaaatacaaaaattagcggggcacgatggtgtgcgtctgtaatcccagctacttgggaggctgaggcgggagaatcgtttgaacccgggagacggagtttgcagtgagctgagattgcgccagtgcaatccagctcaaaaaaaaaaaaattatctcaatcctcacaccattcccgaaggacataagtgatagatcttcaatccattattagaaatcctgggggccacatatgtttcaaaattgagcattttttgatttttagaaaggtaatatggtgcacatactgtatattatgtaatacagcactttttaaagaaaaacaatattccgtaaggaaacatgaatattcacatggagtgggacaaatataaatagactcacatcagttcaaggctgactttgctgctcaaaaaatgcatcagtttactttttgctgccaaataatttaagaaggtttttaaaatttcaggatacaggccaggcacggtggctcacacctgtaatcccatcacttatgggaggctgaggagggtggatcactggaggtcaggaacttgagaccagcctggccaacacagtgaaaccccgtttctcctaaaaatacaaaaattagcagttgttgtgcacgcctgtagtcccagctaccccggaggccgagggaggagaattgcttgaatccgg

SEQ ID NO: 1562966 - DNA, 4001 bp, Homo sapiens
gccaccttttagtgactacaatgagagccacccagaggaaaaacaaggaatgacttctgattttacacgatcactttggttgctgttgagaacaagattacggggggaggggcatgtggaaggcaggagaccggctaggcttctgcaataattcaggcaagagacgatgcagcttggagcaaagtggcagctgcagaggtgttctttccattggctgcgaggcttgccattcctctcactcagcatctatgtgccaaaacctgtggtggacaccaaggctgcggacaagcccaaggaggtgtgtgcctttaggagcttccatccaacaggggaggtgggtgagcacccaggacacgacagtgagacaagggctgggacagatgggaatgacctctggcactccacactcctgcttcatggcaagtatcgctggggctcaaacctgtctcactttcctgcctccagactttggcttaagttgtatttcctccttggaattcataattcttttaacaaatactttaacatcttttatgcattagactctagggattcagacacagtaagagcttgccacgtcctgacacatgtcaaaatatcaccatcttgcctacaccagcccctccgaaagtctttatgtctattaagtgacactacgtcccccaagaaactaggctccaccttcacagccaattcaccactaaaacccctctaaaggctgaaattctctgctgccccctctttaacatattttccacctgcacaattctcttgttatctctgctgctatagccactgcccaggccacagcatgtcctatttcaatggagtaggtaatagcagcactctggagacacaatgcccgggcagccacaatgcctgtaccacctgggcaggtgcctttttctgaatctgtaaaacgggggtgatagtagtatcgacctcaaagggctgctgtaaggatcaaacgagcttacatttgtacagcacttagaatcagcacctggtacagagtgttagtgaatgtgtttaaatgctccatctttgatcctcattcactaggtcacctttaccagcctttattttttcaaattctcaaaggcaacaacctcctttctgactcaggacctttgcacatactattcttcctagaatattctcctacttttcacctagctcactcttatacatccttcagctctcggctgaaatgtcgcttcctcagagaaggctgacttggcctaagtccccatcagagtaccgtagtcttttaattcataggcttcaatgcacttagcaatgacacactgggtttgatattctttgatgcttctctccccactagggccgtagtccacgaggaccaggacggtggcgtgttctgtcaccttcgtatgtccagggccccgctccgcgcctggcacacagtaggtctagcaataccgggcgaacgcttcaagccctgcctcaagcgccacctcctctggggcgcaggtcccagcaccggaggcagcactttcagccccttcccgaacttacccagtgccgacttgggcacctttcccttggccgagttccgcagtttctgggcctgaattgccttcgtcttccggggccgtttcaccggagcccctctcggcttggcctgacctggagggtcccggggggctgtaggggaagagagaggaagagacccaggtcagagggcgcgcagcgttcccatgccactggggctaagcccggcctggattgttttccatccagggctcccgcccgcagccactaccatcctcctgcccgcgccggacgtcccctggccagccctcctcaccctcggacgccgccagcagctccaggccccgccgcagcagggcggcggacatggcggcgcttggctccgcccacgagcctcacactacttccgacctggcagtccctgtcgtctcggcggaaacccgagcccgaacagagggatccggagggggatgggcggaagtgcccatctttcttaggacgcatgcgttaggggtttacacttgagcggaagaaggggcggaaactggaggcgggtccaaggcgcagaaagacacatgtgttactcaatcccaatctacctggctcctggcgctcagtcccctccttccccggaagccgtccgcaacctgctccgccgggttggccaatcctctcgggtctcgtggctccgtggcgggctaggatggggacagggcggagtgtttttcatatacttcaaccagcactaggtatcgcacaggttgagtgcagcatgagaatccagttgtcttcccttaagccagacattaaagacatatctttgttttgaaaactacaattatttctcataaaatacgttgtttatgttaccaagcaatgggtttattgtcattttaagtgaattaatgaatatgtaaaatttttgttttagtttctagtatggcaaatatcagttgcctacatacaaaagttctttgggatcctgaattttttaaaatttattttatttaattaaattaattttttttttgagacggaatctcgctctgtcgcccaggctggagtgcagcgatctcggctcactgcaacttccgcctcccgggttcaagcgattcttttgccttagcctcccgagtaactgagattacagacgcccgccaccacggccggctaattttctttttaaaaaatttttagtagagacggggttttgccatgttggccaggctggtcttgaactccggacctcaagtgatccgcccacctcagcctcccaaagtgctgggattacaggagtgaggggattctgaagttttaaatgtaagaagcttcttagaccaaaacatttgagcccctctggcctagaagtgacactgcttacctgggggaggagccctgggcttgttcgctgctccatctgcagctggcagcccagcacctggcatggagaagacacgcaataagtgaacggtgaatcagaagggaccactgggttcactcagccgggttctgagggccttctgtgtacttgacaccacagagtgtgggacctggagttcgtcctccgggatagaccacaccgtttaagctccatcggctagagagtaataataacaaccaacacaaactcaagcatttgtgctgttctacgtgctttacatttgttaacttgtttatcccccctacccttccaggtaggaattgtcttttgcattttacagacgaggaaacaaacacagagaggcgaaggtcacacgggtggagtcaggggtgggagttaagactggcagcctggccgcaggatttgtgggggcgctcctgtcccagccaccagggagagcagtgctgtggtgctgggtggggcctgtcaagccatggggtcaggtaggcccctggagggtgaggaggagctgaccatgtatgggcagcggggattgttctaggcggagaccgctgtagcgaggacctatcccctgtgacacacgagtggcccttcaggatgccatgctgggctggagggtcgcaaaggcctcagactccatgattttgtcctaaggggagtgtggggcctggaacccagtgactgttcagacatatgcctccttcctgcttctaacatagccggattgttgtcttacttattatgtgtattgcgtattgtctgtttccccgcccataccccactgtaagctccgcaaggcagggatctttgttttgttcattgttatatccctagcgcctggaacagtgcttggcatacggtaagagttcagaaacgcacgaaatgagtggatgagagctgagtttgggacgccagtgagccgctgggttgaggcccaggaggtcgtgggatgtgcagcgagtcagcctctcaggagggcaaaggaccaagctctgtcctcctcccgatctaggctgaatcagcccacggtcccccgggtggaggagttttctgccaacgtgccaggtggacccctgcagcgtcc

SEQ ID NO: 1562967 - DNA, 4001 bp, Homo sapiens
tatacttttaaagacatctttaaaaagccagtttcctgactggagatcacggtagccctcctgacactctcctctggggctcccattagctgtgtccgtctcaccaccaaggacttggtggaggccatgggagcccccaccttgagcccacaggtctcctcccagacagacactagctcacctctgtgcagtatgggggcacattgaggacaaaaagagtcctcttctgaggccaggtggacttggtgccttgtcgaacgccgtgtgctctcacatagaggtagtgagaagcctgttgcttttcagagaacttgattggaatagctggaaaggaaatgggaggggagggatggccaggctaccctgagctgaggccagcgagacactcacacaacttcctttctccacatccctgtctagtcctatctgttcatcgatccatccatcccttcaccaaccccccttaccctactctttggcaaagcctgtgcgggctctaagagtctgcccaggagggcctcccaaggcggtgcagggagagagaagataaatgggcaatgattacagatgggggcgcaatgagagggaagctcgaaccctgcggctcttggagtcaacgccaaaatcctaaccatggctggaagccccgtgagaccctgcctgtcactgtgacctcttctcgtaccatcttcccccagcaccttggattctctgttcccccgggtacaccagggcctcacacatgctggcctctctacctggcgtgtcaccctcttccctcccgctcacctcaggtttagctcaaacctcgcttcctcaggagagccttagcatcacctccgcccctcctgccagctcagatcccactgcctgtgccttcacagcttctcttaacagtctggaggctatattgatgagattctttggttaatcgctggcacacccatgactgtaatcctcataaagctaggaactgcttctatttttctcacacctccgtcacagtaccggttggcgtagagctgcggtccctgaactcaggaagctcagttgcaataacggagaagacaattaacaagcatacagcaaacttgtatcaattgtgaaagaaacattacagggtgatggggtggcagaggtcttctttccataggccatcacggatggcctctttgaggaagcaacattaaagctcaggccagaacgccactgtgcaacaaaccggcacagcacgtgcaaaaacccagaggggggaaaaagcatgttccctcagaggaacagaaagagctttaggtcggcaccagccagaccacgtggcccacacaggttaagaagtctggtttttgttttagaagctacctgataaagccactggagggaatgcagtaggtgtggcgcctatcgtgggcgcggcagacatgatcgaatctaaatgtccttaaaagaacattctggcacgtgggtggagaacagaagcaggggcaagaggagaaggagggcaaccgagtaggagggcctataacagcccaggtaagagctgatgggggatggactaggagcagaggcgatgagaaggggatgggctcacctggacgagcgggtgtggacggaaatgggtttgtcctgggtgagagtgtggacagaggcgggctcacccaagggaagcgtggaccaagttgggctcgccccgggagagtgagcaggcagaagggcgccgcctgggtcctcgggaccccggagcctcaagacctgcggagcctggggccacgggccaccggggctcacacccaaccgtgcggccgctcctggggacccccggccgtcgccaacccccaaacacctcccggcgatgcctgaccgcccccggtctcgcgtcccggagcccctcacctgcgtagcccagtgggctggggatacggtcctccgggtcccgcgcggcgcacttcctcctgcgcgccaccatcttgccacccgggagcgcgggggccgccgggagttgcggttcggcgccggcgcgagcgcgttttcgtggcgcctgccccgccccctcactccaagcccgcctccccggccccgcccgccatggcccaaccttcatccgctcagagataaatcagcgcgcgaaagtgggagcgaatgtcagagttgaccccggccagtcacgagtgcgaactcagctttccactcatgcattcacacgttgaataggcagtgtgagagaaatccaggatggctgctaggttttcagtctgagcaactaagaggatggtgttgccattgactgagatgggaagactgcaggagaggggcctgcttgggggtgaaaatggagtagatcagttctctgtgagccgtggtgagatgcccattaggccactcaggggacatgtcaggtgggcacttagatatgagactgaacagactgaacatcagagatgtcaggcctggagcaatacacacgggactggccatggataggttattgacagttacgagaggagccgggtgcggtgattcatgcctgtaatcccagcaatttgggaggccgaggggggcggatcacttgaggtcaggagttccagaccagcctggccaacatggtgaaaccccgtgtctactaggtacaaaaagtagccgggcgtggtagtgcatgcctgtaattccagctactcgggaggctgaggcaggagaatcgcttgaacccaggaggcggagattgcagttagccaagatcgccccactgcaatccagcctgggcaacagagcgagactctgtctcaaaaaaaaaagaaagagaaaaaaaaagaaagttatgagagggtgtgatcgccaagggagcaagtgtagataggggagaaatgaagtccaaggactccacttttctggactccaaagggcctctcagactgtgtacccgccagcccttgatgtatctactatttctcttttcccagtgtacagttgcttcttggaaatgctgtcggcccctttggggaaagattaggagcctactactgcaaatatttgtggtctggaggggacccagcctccctttcagtcagtgacctctggttctgaggcctagcttaggcctggaaactggatgaggggttgggattttccatcagcagctgccattactgtcctgttcgctcgttttttgtttttgatctttctttgcttagcgcagtcaagcagtgttggggcttccgtggcccctgggaataccgtggtctactagcattcaccagagactcctgtgcgcccaggatccctggcagccactctggccttgctcctgttctgacagtcacatcaaccgaacctctgctctctggaatcctatctcctgctgacctttccgagcccggctccagtcctatttgccctcttctaccctggcctcagaggacggccatgccgattgcccattgatgcctagaccccccactagtcaaagcagtctctggtgaaccctccagaaatacggtcatctggcttctcagatgttgcataataaatctgtgcctgcacatccccctccccgaggcctttggctccttctcagtgccctgccaccatcgttctgttatctccctctcatgtattgcttccacgcttcaaggagccatctcgatggatatcaggactggccacacaacatcacttttttttttttttttttgagatggagtctcgctgtgtcgccaggctggagtgcagtggcgcgatctccgctcactgcaacctccgcctcctgggttcaagcaattctcctgcatcagcctcctgagtagctgggattacaggtgtgcaccaccatgaccagctaaatttcttatttttgatagacacagagcttcgccatattggccaggatagtctcgatctcttggccttgtgatccgcccacctcggcttcccaaagtgctgggattacaggcataagccttttttttttttttttttttttttttttgagacggagtctcactctgctg

SEQ ID NO: 1562968 - DNA, 4001 bp, Homo sapiens
cctcaataaataaacattttttaaaaagaacccgggcaccgcacctatagtggaactggcctggagtcaggctcaaacaatagcaacccttattactgaagttctacccagtgcctgaagccatgctaggaccccagtcatggtcacctgtgctgtgtcacgctcacctatgttcatggccttgtagatacactcggggtcatgcatgaggtcacacaaggccatgagggctttctgcctcgtctggaggtcctctgactgcagctcctccttcagcttgggcagggcccgatggccataggcagtggtaatctgggtggcattgatgttaatgggaagctccaaggagttctgggaatgggccatctttccccaactacagaggcctttccaaatgaagctctgcagaaaccactcactaaaagagaccaaaaagctgtcattatttctattatgatttaaaagctacttctcatctgatcctccaaactgtgagggcaggcaaatgggtatttttactttcattttacagatgagcaaactgaggctgagagcaatgaagagatttgctcaaagtcccagtgaaggtaagtaagtagcagcccaaactgcaaactccagagccctcccacacaatagtgcttcacagaagaaaccactgatactttcatctggatcttcagtcaaaggcattaaaggacaaaacaaaccaaacaagcaaactccaagttggtcactctgtttagtgcttaccttgtgccagcaataagtagtatccaattcaactaccccataaggagggggctggtattatccacattttacaaatgaggaaactgaggttctggccaaggagcttactggaggccatgaaactggtaagactagaagccagtgttcaaatctgggtctagctcattcactgccaggaacccatattcagatgcttctgacacatccatgaaaaggaattaatgttaaaaggtgatttatggccacgcgcagtggctcacgcctgtaatcccagcactttgggaggcccgaggcaggcggatcacaaggtcaagagatcgagaccatcctggccaacatggtgaaaccccgtctctactaaaaatacaaaaattagctgggcgtgatggcgcatgcctgtagtcccagctactcgggaggctgaggcaggagaatcgcttgaatcagggaggcggaggttccagtaagccaagatcgcgccactgcactccagcctggcgacaaagcaagactccgtctcaaaaaaaaaaaaaaaaaaaaaagtgattaacttttattgccgacacacacacacactttcagcaactatgggcagtgtaggttagtagttaagaactggctccagattcaggcctgggtgaccttggcaagttacttcctctatctgtgtctttctgcagcttcaaaggggagatgataacagtacctccttccctgcctcccagagttgtcatattaacgaatacacgtaagcctggcataccagggcttcagctatgttggctgtggttattattacggttattatcatggttagtagaatggacaggccacaggcctgtaggaatctactccagtaaaaggtaagccagatgctcacgcgggacaccagatgacaacggtagaagtgggggccggactgggagggacgtggccatgtttgagttgagctcccctcacaggaacggtgggtgctggagacaggggcctgccttcttctaagcggcgtgggctgggagagtccggccggagacaaaagaccgtgattttgagtgtggggacacggccccgtgtgaatgggactgggtgggtcactgggcccccctgtccccgggcccctagcccaccaccgccgcctcacctgcctccgcagccctttctgcttccagtagcccgcgccactggccaacctattcagttgccaggcgacatcgttgccaggcgactccagcagcgtccgcggcgccgcggtcgacataatcagcacccactgcgcaggcgcaaacagcccaaggctgcggccggctgcaaagcgggaacaatcatttacagggttgctgtggagaccaaaggcagctcagctttgttcaaagtacagaagggaaaggaagtgacttatttacgcccttctctgtactgggtactttgcatgcctctgatcctcagagtaaattcataaggtggtaacatctagtttagagacaagaacctcagagaagttcagtcgtttctcccaatttttttttttgacggagtttcgctctttcacgcaggctggagtgcagtggcgcgatcttgactcactgcaacctccgctccactccgcgccaccgcacccaacccgggtgcaagtgattctcctgcctaagcctcccaagtagctgggattataggcggccgccatcacacccagctaatttttgtatttttagtagagacagggtttcgccatgttggccaggctggtctcgaactcctgacctcagatgatccacccgcctcggcctcccaaaatgctaggattacaggcgtgagccactgcgctcagccagtttcccccaaattacataggcctgatctcaagactgcctagccctgcccatgccccttgctcttcaggctgaccgcctggtaatgacaaaggttagcctctgcagtggacccaacacactgctggccagcgtagctgttctcaaaagcaagccagacccagccaccacctgcataaaaccctccatggctccccactagtctcagggctgagtccaaactcctagcctagtgctccagtccctgggtgatggcctcctccagccatgccagactctctcttaacccctcaaatgccacctcgctcatgaagcctgagcgctctgtaacactaattattacctctttatccttcaggatgcaacttggtgaacacttcttccatgaaaccttccttctccctgaaggagtgaagtatgggccatcccaaaatatgctggattggtatattgaccattttgagtggacaacattggaaaaatagtggcctcagaaagggctaactgggccaggtgcagtggctcatacctgtaatcctagcactttgggaggctgaagggggagggttgcttgagcccaagagtttgaggttacagtgagatatgatcacactactacaccccagcctgggtgacagagtgagacctcaactctaaaataaataaataaataaataaataaataaataaataaatagatataattttaaaaaaagatacaagaaaaggcaaacagatatgcttctttctgcattcagcaagccataaagattcctctaggagcggtaccctcactgtaccagggcaagaaaatagcccttgtcacctgagactaagaattggggactgcaatggacctgaataaatatacttaaccctgtcttccactaagtttatgcccctcatattatctcctagtgaatcccctagaatttactgccctagccagatcccctttgtcctgccatttcttctcaaatttgtcatcctttgtctaaaaagtataaaagcatcttgctttggccacttctctagacttcactctggtaaagatccccatgcgcatgtaaaactaataacacttgtatgcttttctcttgctaatctgcccagtgtcagtttggtttctagatctaggcaaagagcccacttaagagctaaaggaggattggggccaggtgtgctggcttacgcctgtaatcccaacactttgggaagccaaggccggcggatcacatgaggccaggagttcaaaaccagcctggcacacatggcaaaaccccatctctactaaaaaaatttaaaaattagccaagcatggttggtgcgcacctgtggtcccagctactcgggaggctgaggcaggagaatcgcttgagccgggaggcggagattgcagtgagccgagatcacactact

SEQ ID NO: 1562969 - DNA, 4001 bp, Homo sapiens
tcactggcgcagcagaacatctaggaactaaacgcaaaaatgacgtaaagatgggaagggagtgttttaagggaataaagagaaatttttagtccaacatgtgggtcttgggggagaaatggagatttagtaacagatgattatctgtgtgaaattcactgctctcatatggaagcacaattcacgcttagaagtcaatagcgttttaagagcaatgcattaacattccaagtctctattcccaaaggaaaggtggtagtaaagtgctgtatacaaacttaaaccagaactgcctagcaaaatgagacttgcccctagatagaatgagcagcagtgtgtgcatcaaaggctgagtcagaacacctgccagacaatgacagtctgtgttattagatcctacagataatcatgtcatggtgttttctttttcttttctttttttttttttttgagactcactctgtcacctaggctggagtgcagtttagaatgatcacgggtcactgcagccaagatctcccaggctcaagcgatccccctgcctcagcctcctgagtagctgtggtgcacaccaccccgcctggctaattaaattttttttgtagagacagggtcccactatattgcccaggcaggtctccaaagtcctaggcacaaaggatcttcccgccttggcctcccaaagcgttgggattacaggccatgaaccactgcgctctccctatgttagattttctattccttccttcagggtaacggtttccacacaaagaaagtggccaaacagcaaacagaacacagatttatccccgtgcgctttttcttccctcagtgtaagtgacttgccaacaagggaaactcagtaagctttgattctgaataaaagaatggagtgactattgggagctgtttaccaagacgtgagacgagacggtaaacctttgaagcatttacttggcaccttcagggatttcaaaaactatttaaaaatacgttgcaaaacttcataaacgttttcttttttcacattaataaaaatatgagcacagatggtgatgaaggccgagagatacagagcccaggctttcaaactatctgatgatcctgagccctcaagtctccatctgggacgtcaaagaagtaaaccggacatcaagtcctggctgagcttcttcctaggtgggtagaggaagctatgtcaccgacagatcctcgaggtccttctgtgaagtgaatattaaaatcaaacaggccctgccctgcgctactgcaagaaatgacatcgctttattaaaaaccaacatgcgatactgaatgctgaaaacctggtttagtgaacaaaggtttgtaaacgttatttaaataaccagcatgactcagaggaggtgaattccagtcccagcaaatgaacctggggctggctgttccaccctggaaaagatcactgaagtttctgtgaacgtaaaacagctcacgatacgtttatgagactgatctgtgaaaacgctttggaaaccccaatttcgtatttatttagattcccatatccaccgcacttagcttgtcctcgtggttcggggacctctcctggcgggaggtggtgccggaacaggttgggcggccccagaaccgtgaggggagaaggacgggatgagggaaactctgcaaggggccggggcggacccagtggtcaggggaggtccagagggcgcagtggacgccggccgggccggggacggagcacggaaggccccgccatttgctctcctgccttacctgcatgttgggcacgaagcccttcttgatcctccagcagtttttattgatcttctccaagaactgcagctcatcattatagctgcgactcatggtggcgaaaactgtagcaaaaactcccggctccgctttgaagagccgctgccgcgtagtccggcttctcagagcaccgccttccaagaaccaaagcgcaggcgcgaccagcgccgcagcagatgagcaacggcaagcgccgaggctcaaaattcttcaggccaatgtctttcctctggttaagttgtactgtcctgtagtgtataactttaggatctttattagtcgatttcctctaaactacagctaagcgaaatccagaagtttaaagtataatctagttatcttttgttttggaaatgcttttcagcagcttatgaaaacaccttgagtctgggtcaggttcggtgcattggcttggagtttacaccctcagctgggaggggaaaaagataacgccagcagctgagaaagaaaaacctgtttgagtaaataccatagctgaacatttatgtttcagaatgaatctggatatacaccaaataacttttttggtcagaaaggagcatcccaaagaatgaagcatggcagcttatcatttattctgacaaacacttgtgggtgcatctattgtggccagacatatactacaaaatgatcaaatcacagcccttatggatcgccaaaactccccagtctagccgcatttgatgatcaagacctctttaatcatgcttttatacgccgtgtctcttgttcatagtggtaagtgagctttaagtgatttcagtttccagttcggcctcatgtcaacaactgcaactttgggattagaaagacgcaagattcaatttctatctgtgccatttactgacttggtgtgattaacccctcttatctctgtttcgtcatctctaaaatgggatcataattctttcttgagtagaaggctaaatgaagtgacactggaggggtaatcagcacggggcttggcacacggcaagcactctataaacagctctcctctttccattcccccactagactgtaagtgctgcaaaaaacagtatgtagtttccattcatttgttgcattatctacactggttccgcttttcttctcttctgccccaatttctccccattgattaggtgctctgacacattaatatcattctcagttatgaattgtctgagtttagtactctgcactgccatttcattgaatctgtggtgggtgaaaaatcccaaagcttgaagtgatacaacttttagagtttcctgtggttaccctgttccttcttggaaagatttcagaggtaaagaattctcttttaaaatcaagccttgatgtctgtgcaaccttaggtctcttcccttttctatgtcttattttattttattatttttttgagttggagtcttgctctgtcgccaggctggagtgcagtggtgccatctcggctcactgcaacctccgcctcccaggttcaagcgattctcctgcctcagcctcccaagcagctgggactacaggtgcgtgccaccactcccagttaatttttgtatttttagtagagactgggtttcaccatgttggccaggatagtctcgacctcttgacctcatgatccgcccaccttggcctcctaaagtgctgggattacaggcatggcctactgtggctggcctcttattttattttttaaaaattcagggcaggccatttctcaaataaaaaaaccaagattgaagttgatagaaaacaattttaattaaacacagaagatagtaacagtgaatataaaacatgaaaaccaatatgcaggtaggggaaaaccactagagggcctaagggatttccactgagaatgaccaatacaaatacagacttagagttgcttacccacctggtcagaagtacatgcctagctcttgtcctagaatctttcttgccccaaacaaacaaacaaacataaacacagacacacgcagcatgcatacactcacattcagacacctctatttatccctttaacagagtctgccttattctgggttcctgaaggcttaagaaagaaaactttctgcctaagcaattcacaagggctttacaattccagtgtgtactgtctttcccttctgggtttacagtagttgtaggattaaggaccatttacttcctggggtgaa

SEQ ID NO: 1562970 - DNA, 4001 bp, Homo sapiens
caggaggtgtggcctgccaatccaagccccagcccagggcccttgccacagtgctagtgggccacccttgcccatcatgcagcatggcatccatctgctcagcaccctacacaacaccggaggtaggggagcccaccacagaacccctcaccaagaaggtcctcaccatggagaaactgaggcactggaggcggggcctctgcagtcacgctgggtcacgtgctccagtcagccaagctgcagcggccaccaagggtgcccagggtctggcctgttggtcacagtgttgacctcatggcctgaaatgggtcttccctgcccagacaggttccagcccaccatcatctatctgcctcagccctggtgggtagggagtggctgggagaccctgcccctcacaccctgggctttgcggtattcaacgagcccccaacacacattccagggcctctgctccagattaggccacagcctgtctaggcacacaaggggcacccacaccctggaggcaaagagacatgcctatgtgcccgcaggcacacatgatcacgcgcacagacacacgtgcagatgcataccaagttacacacacgcacacaagcccgaggcggggacccccaggacacggaggcaggcaggcagaggtggggcccaggatgtcttgcccctgtctgtgggcctggcctccccactcaacagacgagcatgtgggtgcgggagtggttattgcgaaaggggccccagcatgtgccacccgtggagaccacagcaggcatgccgcgtgcatgcatgtgtggccgtgggtgtgcaggcgggggcgaggacacagatatgcaccctcagagtccgtgtgtgcacccagtgtttgtgcatgtgcacactggggcggcgttggcttgcatgtgcaccagaggtgtgcaagtgtgcagtccgtgtagacaagtgcacgtgcaaggaaacgtgtgtgcagcctgcggcaccatggacatcagcagggcagcctgggtgggcacctggggagcaccctccaggcggggcatgcccaactcacatggagcccaccctcccttgcccgcaccgcgggacctcacagccggtggggcgggggagtcccacgagggctgctagggaggggttgctgattgccccaccgcccctgattcccccagccaagcctctcaatgtccctcgggctgcagatggcgggcgttgctgcctcctctcaccgcccgccctggaggcagcgctgggacaaccctgtcccccacgccctctactgccgccaacgcccccattcatcccactgtggactgacctcggagaaacgggaggttctgagcccagaccgtgaggctggggtggaggcggcccgacacccccacccaccctcggtacccacgtttctgcaaaaacccgctcgttaaccccttggtggccggggcgctccgaggccgggccccgcccttccagcccacggcccccgccctcgacttggcccagcatcggggaccctcggaccgccaccctcggccctgccgaagccgtcaactttcccgggaagcggcaacttttcctgccgcctccggctccgccctcccggggccggggcgccagcggccccagcctggcgcggcactgcggtggctttccctgccgcccggctacgcttccctcgcctcggcagcccgggacgggccctgcggctccggggagggggcgagccgcccccctccgcgccccgccgccggccgggctcgggtgcagcgcggacactcacctccagcggacgccctcttcatcgtaggggttgggcggggcgcgtcggggactgaaagtcgtttcggggcgggcgcccgtctccccgcggccgggtccgcatccaggcgccgccgctacggcccggccccggcccggccgcgggacgaggctcggcgcgctccgctccgcccggctctggctgggctcgggccgcgggtgcgcagggcgcgcagggcgcacagggcgagggcggcggcggcgcgggggttggggcgtgggcggcgcggcgggccggggcgcgcaggccgggccgcaggaggcgctcagcccgcccggtgcaccggcgccgcgcggtcccagacaaaggcggcgcattcctgaagaggcggcggcccctgcaggcggcggaggggatggcggcccgggccggagccggccggggacgcgggcccgagggtgtggcggcctaggctggcccggtccccaagcgggcaagggctttgtcccgaggcctaggaatggcctctgcctgacccactcccttcctggcctcacgaaacccatgaatcccccgccccctgcacagaagccccttgctgcagcacgatcgcccccatttttcagtaagaaacaggctcagggcttaagagagttctgggggccctcctgggcctttgtggccctctctgcaccatcctagagaagggacctaggcctgatgttacccgtaaccctgcaggggtcccccacctcttcccttctgcggaatgggggctccaaacccagaagacgctctccgaggtcacctgcttagtatccccccactctaccaagccagccccccacgggcggtgtgaggcatggggccagagaatccagtgacgcccctgcacacaccacacaggggtgcaggtgtcccttctcaatcttctgctcggggcacctaccgggcctcaccgatgagctcctaagtgcatcccggggtcttcagacaactgccaggctgcccctgcacctggagaagtgctgggagtcagctcagccgggctgggtcctccccaggcccaccctgcatgagaggaccatgcagatgagggtcttgcaggcccacctggtgtcagtctgtaggaccctgactcaaggacggagtgggccagcctgatgccttgatggcccccctcagagcccaggtccactgatatgaagcagagagacctggtgactgggcacccctgtgccctctgcctgcccctggccatggaggtggccctgagggagatgagcagggcgcagggccggtgacctgcctgccttgtgcagaggaagtgaggacctcccagagccctggtgctcccatctgatcccagtggcaggcagcttcgcagggtggagccatgctgggtgggccctctgcctggtgtggaggctgcactgcccacatgcctctggctgccgctctgtggccctcatcactttggcctgctttatccctatcacccttgtcccagcctaggcttatgagggcattgtggagtgcatgccattcccagccacacagaaggtgaggtggggcccagacacccccagccactctgtcccctggcctcctgaaggggtgggctgtgcacacactgccacctccccagagggtgctggctgccgagtgccaccagctcagcccctgaggtggctcaacaggtcctcccagagccacaccaagacgtcatcacccattgcacagatagggaacctcaggcgaagctcacagagccagtgggaggctgaggcctgacccccagacaagcattcttctccagggtccctgcacacagcagcccccaggctaggaactgagctctctccacagggatgtatcagaccctagatgagtcacgtggcactgaccatcagtctgaggacagcgctggggtggaccaggctccagtctcgggctgctctgtgcttgcagaaaggccttgagaggacacttgcttgcttactccgcaggcgtctcttcaattaccagtgacccagagcagcccactatagctgaagattgtgaccccacaccctatctcataggtttaaagcccctcccacccctcctgccgcagccgaagtgaccattctggggcatgggatgggcatggggtgaaatggggagcaggggtggccctggaggcttctggcaccagcaccctctccagccaccaacctggctgttcccggttgctctgcgctgg

SEQ ID NO: 1562971 - DNA, 4001 bp, Homo sapiens
aaatccacattgatttattgacttttcattagtttaaatccttgaggggtacagcattactcggattctgtgtccaacagccttagcaggaagattgcttcagaatttggcacgaatcatgccattgtttctgtgggcccgagttacctttccccagattactctggctttgtttgatttgccgccaggagtcactatgttgttctttgctttgtatacatgagcccaaatagaattctgtttcatctcgggcataaacaccttcaattttaagaagagctgtgtgctccctttggttccggagactccacttatagccagcaaaaatggccttggaccacagccttccagacatatttcctttcagaagtcctgctcccggcaggccgccacaggagccaagatggcaggaagagctcaggttgcactctgacctacttgctagtaaccaaaagtcacagatactatttgcatccccattgattttacagataggatttctaaaattagaatcataaggcttttgcttaagagttgctttagatgtttttcagatctcgaattccagcaaaactgatgctgccaaccagtttgaagactcctccccgcaacagaggaacggaatcagcatgagaagtttcctcatctccctgtcccataacttcacccttcactcttccaccaatcaaggatctccacacttcagcaaaaacatgaggtccaaactcctgaaggagatggatttgaggtttcctctcttttcccatctcctcgttcagcggccctgcaactgaaactctttctctgctgcaacccactgtctgagtgtattgacttatcgagcacactgagcaacagacctattacagttacacaaagagatgtcagaagagaaacggtgtttgatctgaatgaaagacatataaagggaagttaagtccaattatcgatgtcaggctgcgacttctgtgctaaatttttttggaagttaatggggaactactgaaaacgtctatgcaggtcaagtgaagcaatcaaagttgcagtagaaaagtagtgttggggctgagactcaggaaatctgaggttttaggccatttggaaccagtaactatgtgaccttggagaagtaactcattatctggcccttatttaagattaggataaacgagaggagtttggcaaccagtacagttagtcaggcgccaggcacccaagtattcacatgcattgtcttttaattctcttttaagccaggcgaggtaggtactattactacctccactttaaaacaggaagtaaggcagagagcggttccgtcttttgcacggtagacaggagaaaagaggacccctagataggtttgagttagaagacttcaaaggattcttgttgctctaggagcctacaatggctccagcagcggctgagcggggaaaggctggaagtgaccagtaaagagagaaaacttaaaatcatgcaaagaaagagcacattcactgcggtctaagacatcacagaaagttggcaagtcctttgggccacggactcgccgagtgacctttagccaagtctcgtccctcctatcaggttcctgctcgaaggtctgcaagactcgctggcccgaggcgacctcttttcggcctcctccacccagcccggcacccttggcaccctctctcccggtgaaccctgggcgcagccacgagagcgtctccccgcggcgcccgtctgccctgctggcccagaggcctcgcagcccgcgggtcgctgggcctcttacccgggcgtgcacagtccccatggttccctctccagccgctgcctcgcagagctgcccgggcgggacagagcgtctgctgctgagggcagaaggcgggtccgcggtggcggagctgcaggtcaaggcaactcccacaaacccccggacgcggaacactgggggcggccatgattccccgccttctccgcgccccctggctcgcgatgccttcgctcattggtccttatgcgcctgtgacccggatgttcacacggccgcggaggacgttctgactgcgcaagcgaagagcgttcactgacatccgcgaagctgctggcgcgtggactgtgtggggagggcgcgtggggtgaaggtgggtctgcgagagggtccgctgggaggctggcgtctggcgttggcgcctgaaagagatcagaccagctgttgggtgtcactcaagtcctgctgctcttagccctcctagcacccccgacccgagggtgctgtgcttgtgcccacgcgccggtgaagccccgagactcagcggggagaccccgggtccggccacccccgagctgcagtagtcgggtctcaccggcatctgctacacaaacccggattggtgccctggctcctttcgttcaagtcattggaacccccactcaaaatcgtcaaaatgaagacgatggtcgtgtctccttcttgggggttggattaaaagggcctaatgtgagagacggaaagcaaagctcccggcaccgggccgggcacacggtgggcgctagataatgaccgctattcactcaactgcagccagtaattatgggcgagggccatctaggtgcttgcatgagaaccagtcatatcggtgaagaagacggccatgggcttaggttttggtggcaaaacagctcccctgccccaaaaaagaaaagagaatagaaaagaaaaaggcataataaatatcagccacacattgtgataagtatattgaaagaaacgagacagaataagaaaagaggaagcttcagtatcctgtcacgttgccactcccttctgataacagaagcatcttttcttctgtccccttactccctcccagaaaccctgacaccctttccatttaaatagcagcaccctaggcctccaacatccctgagctaaatattcaagtccacatgtcccttcttgcctggaaagagacagaacccagcaccagccaggcccctgcccttccctcactctcagttccctgagcctcaattccttatctgtaaaatggaaatgatagcctaaggcataaggtctgaggacctcatgagatcaagcatggggcctggcactctgtaaacatcgaatcaaccagattttctttgcccaaacagccctcttttcttacactttcttcctcgttattcttctgagtatgccacttgtaaaggataagccatgaggttgccctgcagagtgcaagatggttgcaatatttgagagcctattgtgtgtgaggccctggaggatggcagagggaacaggaggaaaacaaagtcacatgctttaccctcaaacaaagggctgtctgcgatagttacaatgtatatattaaaggctatctgtgatagttacaatgtatataatatattaaaggctgtctgtggtagttaacaatgtgtatattaaaggctgtgatagttacaatgggtatactatattaaaggcggtggtagttacaatgtatataatatattaaaggctgtgatagttacaatgtacataatatattaaaggctgtgatagttataatgtatatattaaaggctgtctgtgatggttataatgtatataatatattgaaggctgtctgtgatggttataatgtatataatatactgaaggctgtctgtgatagttaagatgtatatattaaaggctgtctgtgatggttacaatgtatataataaagactgagaagtctcacagtgcatatactggtttccttctctttaacccagtatttcttgaatttattgggtcatagagatttttggttttggagatttttctgtggcctctggcaatgctattcaacagtatttcttgtgctcctcttttgggcacaagagaggattgcatctccctgctcccatccatgtgacttgctttggtcaacacattgtgagcagaagagagatgtgccactctggatgagaacctttaagaaccatatttctctaaccat

SEQ ID NO: 1562972 - DNA, 4001 bp, Homo sapiens
tgcctgcactacgtgtggctccagcagtgagcacacacgtcacagccagcttgttgtggagcccactctgcctcttctctctgcctaccttcaactcctcaccccacggccaccacgcctcccacctggcctttgcctgcagtctctaccaacccaaaccctctccacactgccctcaggatcatcagggtcattatcagctgttcctgtagcccccgccccagccctcagcccaaggcccctcacgccaagacagccctcagccagccttgcttccctggatcctcaggcaccctctgccccaggtggtaaggcctcctccatgcccctcataggtgcctcggtgcagacagctccctctgtgggtcaagacaacattgacagccaacctgcacagtggggatgaggactatgtggtcctagcaagcgagaactccctctctaaagaaaaagacagatgctcatgactgacggtgccataagacacacacttggatagacatgagcagagaggagtgtgtgctgagtaagagggcactgaggaggggctggagacgaagaagatgctaaagaggcttcaggaagtgtaggggggtgtccagcagaagaaacacaaaaaagagagaactccaggtccttggtggggacagtgacaactggactgacaaaaaacagggtaactgggaaggcaagctcaatcccacctccaggctcaagatccagcccctgcctgaccacacagccatccccacacactgccagtctgcagctgggatctgacagcctgagtgccagtcccagcctctctgagccggctcaggccaggcagtcagcttatccgcgcctaacttctctacagatgggggcaacaccagggcaaccccggtgggctgctgggaggaagaggtgagatcatgtacacaaagggctgtgcggggcctggcacaccaagcacgctcgccaacgctgctgtctccaggctgttgctgatgtcatcgtcaggctccgttttctcctacctcctgggctgaagagctctcagacacgggcgctgaccccacacacagacctcctgggcatgggcaccgaccgccacgctgataccccacccagggcttggcgtgcagggcctggaccgtcaggcgagtcgccaggaatgctcttctctctactctcgacgcttcctcctcaaatcctcccagtttcaaatcaaacaccgcttctccatgcaccaaacccgaactccaccccctctttgcaccccgccaagaccgccgggggcttcagacggagcaccaaggtcagaggcgggctggcgagccgcgggtccgcgcccctggagccactagagccacagccgcccgcagctggccaaggagagagcccgtcccaccccaaggaggccgggcaggccgggcccagccttctctccctgccgccaccaggcccgcgcggccacgccgcccccagcggacgcccattctccccacgggctgtccggtcggccctggccttcagtccccgcccggcccccggccccggccctcagtcctcggctcccccgaccccggccctcagcgcccagcccccggtcctcggccctcagcgcccggccctcagtcctcggcctcccgacccagcccccagccctcggcccccagcccccggccctcgaccctcagacccagcccctggccctcagcactcgaccctcggcccccggccctcagcgcttggcctcggcactcaccgcgcgggtgcggcccgaacgccaccagcacgaagtagtccgcgagccgcgccatggcgagggacgcggggcggcccgaggggcgcgggcgggctccgcggctcggggactcgaggacggcgcgctcatggcccggccccggccctggaccgcgcaccccggacacccctggttcgctccgcggcggcggcggcggcggcggcggcggcccaggttcccgccgccatcttcccagccagccggcccgcccgggcgcgccgtgcgcctgcgcgctgtcgtcaagccctgagcgggcggggcctgcaaccgcgcatctccattggtccagagggtgggagggcggctcccgagagcagcgccccgcccatcgctgaccactctggggcccgagcaccgcccctcgggccgggcacctggactacggctccggcgggtctgacgccctgacccgggtcggctgtggtgtcggcgggaggcatgggccaggaccacagctgccctcgccgttgggactccccgcacaggagcccgaaccccacccctgggccgtcccaatctggggatcgggtccccagactcctcgtcccccgcccctctctgtccagcgggagaaaggcgggagaagcctaggcgctgcctaccgggccccccaaactagaagtcagaggaggcgcagggccatcacctcaggggctgccagcctggcgatggggaacagagagagaattcaggccctgcccttggggtcccaggctgaagagcccccatctaggccaagtgagacatttaacacagcttaaaaacggcacgctcatgtccccctgtaaagagcaaatgttctaagcgtgtgaggcacatgaggccacggagcagggggctctgggaaagctgcatcccccaggatccctgacagtgcccacccctctcaagggcagggctggccagggccacccctgaagtggctcagggatgagcatgagcccagagcagaacatgctgggagagaaggtgcaggagccagcctggtgcagcagggaaacccctctgagcacagcaggccaaggtctgttttttgttatgttttgttttgtttttgaggcagagtctcaatccgtcacccaggctgaagtgcagtgacaccatcttggctcactggaacgtccgtctcctgggttcaagcaattctcccgcctcagcttcccgcgtagctgggattacaggtgtgcaccaccatgcccggctaatttttgtattttagtagagagggggtttcaccatgttggccaggctggtcttgaactcctgacctcaggccatccacccaccatggcgtcccaaagtgctgggattacaggcatgagccaccgcccccagcccgaaggtctgttttttgttttttgtttgtttttgtttgtttgttttgagacagagtctcgctctgtcgcccaggctggagtacagtggcgtgatcttggctcactgcaaactccgcctcccaggttcacatcattctcctgcctcagcctcccgagtagctgggactacaagcacctgccaccacgcccagctaattttttgtatttttagtagcgacagggtttcactgtgttagccaggatggtctcgatctcctgacctcgtgatccgcccatctcggcctcccaaagtgctggcattacaggtgtgagccaccgcgcctggccctgaaggtctgtttttaaatgagtttggctgctgcaagaactggccaaatgactggcatccagtctccatccatgggcaggagccagcccaagagaatgaatggaatcaaactgagaggccccaccagggtcccctccctgccctcaggcacaggccacgctacgcctctcctctcccactgttggttttcacaggttgagaaatcatctttttaaaatttaatttttttgtagagacagggtcttgataagttacctaggcttgtcttgaactcctgtcctcaaatgatcctcctgcatctgcctcaaaaagtgttgggattacaggtgtgagaaactgtgccctgccagaaatcctcctttttgccccagctggctcaagttggtttctgtcacttgtacccaaaaaggtcctcagcaccacactaccacaccactgagcttgtgtgcaggctggcaggggcccggggcaagtctgggctagtgcttgagcccagggctggctctcttcggagagactctagggaccctgcaccgcactctccact

SEQ ID NO: 1562973 - DNA, 4001 bp, Homo sapiens
cacagtgtaggtgcataggattttactggctttgcactctcctctccccatcctcctgcctcccaggaaagggaagggctgatggaagccttgcaagatgtgggaggacaacaaagacatgacccagaccccaggtgggcagtgcccagagtggctgtccttcccatcgacccttgccactcatgaccacagcgatctccacttagccccatgagggggttgtgatcactatcccattttacagaggtggagacaggcccagagaggtcaaatgacttgcccaggtccacacagctgggtagggtggcaccaggatgggaacccaaacccaggctcggttcctggagcaggcgcctcctgggaggtctgcagaccaggggagcgggagcaaagggctctcaggctccggacagctagagcctggcaccggacccccattcctggtcccgggcctgtctgggaaagagggctggagtgagtagacagagaccacggcgatcgcgccctccccctctccaggcaccgccccgcccgccgccgccgctgcattcctggggccggggaggcccgggagtccgcggcggcggcatcgatgcgaagcagatggcgggccaggccggcccccgccccggaggcggggctcgcagcggggaggggtctgcgcgcctccggaccagagttcggaaaccccgcgctgccccctcgcagccccttgtctctggcgccgagcccctggactcggcttgccccgggtccgtggctcaggcgccccgacgcgacccagctcggagcccggcggccgcctctgcggctgccagcccgtgcggcgtctccaatccgcgccaaggcgcccccacacgcccgctcctcacccctgcgtggagatgcccttgaccttgtggcctttggccagcccaccggctcccccgaccccagctcctaactcctggcgtccggggctcacctctctgccctccgtgcaaactcccggactcgcccccccaccggccgggcctgtcgcctgcctgtcccacactggcttccccagccggcgccccacatttgcgcggccccttcttgcacccagaatccccacctggttgtcgccagggttcccacatcctccggtcccctgtgcctgtcatagtccttccgcctcccgcttctggtccacttcgagcgccggctcctcgacgctcgcctgggtcaccaccctcccacccgcgcccgctctaagacgcgaatctgtctttccaagtctggcttgctccaggacctccccggctagcaccgctcctcctcccctgaccttcctcctcactcccactcccggctccagtcggactagtgcggggctttagcacatgcagttcctttggcttgaatgcccttccccagcttttccccgtggacttcacaactcggtcaagggtccctttttccaggtctttcctgatatcccggacaacgcgtgtcatcccctgggtgcccacggcactccatcctcccctcaggtgacttctcgtccagggttccctgggatgcactgtcgtggcccatggccgaggctgggcctggaacggagccgcgctggctagggagccgaaggggcccacacttggcgtaggaaggttccggtagccccctcccaatgcccggcgccgccacaccactgcccagagcgtccctctcgccccctcccccagccaggccggctcctacccgggagcacggcacacgttgcggccgcgagggttcagttcctgaggcgccacggtgtccggcagcatccagagcagcagcagcagcagcagcgacggcagcagcggtgacggcggccccccggctccccggcgccgcgccggcccggccccccggggccctgcgccctccatgaggcgcggggcaggcgcggggcgggcacgggcgcgggtgcggccgcagcgagagcggccggaagcggagtgcgaggccgggcggggggcggcaggaggggcgccgagccgggcaggaaattccacatcggctccctgatcccgggccagccgcggccggccaggcggcagcgcccgccccgcgctccagaccccaccctccggcctagccaccgcccctccgcgcagcccccgcccccatttggccgctcgcaaacttgggggcgaacttggaggaggcccgccgagcgctggtggagggagggtccgcccgaggaatccccggttcccgcgcctttccctccgctccctagacatctaccgaagcagccgcccctgcgcgcccactgcgtaggccaggcccgggacgggaaggcggatcggggacacggacgcgactccgcaagcccacccccgctcccagcgcctcggaaccggccaagggagtggggcccgcagacagcccaggtcgaggccgaaagccaactccacagcaccccaccgcgaagtccttgtagtgctggggtgtgcggtcagctccccctgcgcactcctgcgcactcagagctcgcaaggggcggaccgagcaggatgcttgaggcctgtggtagactcggtccggaccagaggcctgggggaaggggtctccgtagggacggatgggagagatacagaggaagtagaatggccaggctgtggactgcggtaggaagtagaggtaaagacagaaggagacccccgggatggaaaccctgcagtcctagttgaggagtgaagggggctgggggagcctgggcggtggattctgctggctgtcggatttccaggagaggctggggctagagagtgggaactcctgcatcaggtaaggtgggtaacagcacagagcagaaggaaggtgtgggaagggagcaagacagagggacaggccctagggagccagcggggaagctggacttggactgggaggcagcagggtgcgggtccccggggggcaactggggcagaccgactctggaagttgggcagggagcacaaatgtcccgtgtgtagccaggtcctagtgaggatgtttgtcttttggggacttgagagctggcagaaggcctaagcagggagcgggcacctccgttctttggggagcaggccacatgcggcccacaggctcactgagggagggcaggcagactctgtccaggtgtggccagatagccccgaagggtggggctggaggagggggcttggaggaggagccactgaaaggcccaaggccatgggcatcaccaggctggcacaggcagagagtgggatggggaggagcaggcccctcactcagccatgctggtgcaggagggaggtggggtgggctgaaagagaagtggaactagtgtggacacgaatgcaactacctggggacaaataaacaggccaaccacttctgggcagctcagcctgggcacagccctgacctcagcaatgccctcccagtgctggggcccctcccacggaggatccggattgcggctcccaatagaggccagcagaggtcccagtggctgcaaggtctgtcccagcccagctcctggctttagaggcactgaccccctgggctggaggggacactcacctcagctggatggaggtcatgaataggcatatcaaattccatcacctttctccttcccccagacctgtccagggagggcaccacctggatggtgccccccaatcccccaggacctcctaaatgtcttagatctctgcccacccctgtctgccacccagagtagtctttttaatctcacatgtggctatccaccactgctctcaggatgaggaccatccccagtctcacctcacgacccggtacatacatcccttgcagtagatggcaactttgggtgtcatgggcagagccctcatttctcccaaccaccactgcacccctaggggaagactgagaagtatgggaggaatgaaggatcatccacatggcactaggatgtagaaggaacccacagacaattgaccaccacgcaggcaaactgctggagcccggagccctgg

SEQ ID NO: 1562974 - DNA, 4001 bp, Homo sapiens
ggcgtcaggagccagaagggaaggcccaggacagtgcctgggctgcccctgcgacttgagaccagccacccatctgaaggacccagcccacgttcaggcttaacaggcatttgcagctgctcacctgagctcagaactccacctccaccaaacatccacacctgggcaaccacacctgtcactcctgtcctctacctgggatcaccagcctgtcaccgcaccctgccctgcacctgcacctcagcaaggtgaacctcttgctgacggaaagcattccaagtgcatgccttgcctgaactaaccacgttatctatttgcaataaacccatttcttaaaaggaggtgggtaactctctggcttgcaatccccgagagcaaccgattcctccaacactttcctgttacctccagccacttcaaccaaccgcggccttcctccacactcccagcagaaaacctgcacgacctacccccggagctcagactctgcccgccggctgtgtttaacctctcctggcagagacgcacgacacttccacccgccacaaaaccccaccctcctcacatccaggcttcccagcagctcctccgggctcacagccgacgccctgcctttgcgttggtgacctttgagcctttcccacgggcccccgcagaaggtttgctaggtggaggtctcaggactcccggtcactgccccctcctgctgagggcaccctcccgaggactcactgcacccccgcccgggcggttctgggtttgtgccctccccagcaaggccagcgccctcgtggccagaaaggttccaggaccactcgaagcgccgcgcgagcgcgttataactgtgcttggccgcgagaacaccggtgcctgctgggagcctcccacgggcgccccagcctcgctccggcctccagcgcgccctggggtgtgccccgccagccccgcgcagtagccggagctgggaaactaccccggagtccagcgagtcctcagggctacctcctcccctcccagccccggcgtccgcacctcgcggcggggccgcgcgtcagtggaccaagcacgagaggaagcgccgacctccagctccctgcgctctgccccgccggctcagggaaagcgggcgccacacgctcacaggcagggcgcaggcgtccccggagctgcgcatgcgcacacgggcgcagccgctgacaggctctcagcgcgtgcgcggaaggcggagcccgccgggggtcacgtgttcatcgagacggcccccgcctccgcagccctggatccttccgctcccgcccaagcactgacaaggtttcgcggcaaaggagctttattgctgcggcggcagaacgagctctgcgaagggcgagggggcggcgaatggcgcgcggtcggagagtacgagcgcctcctgcagggcgcggctctgcgggccgctgagcgcggggccgtcccggtgcacgcggagccagggggtccctgcagagcgaggggctgttagaggccgcgcggccggagctgggcgggggtgcggggccagcagggcgggggcggcgctcaccacggcgcagcctctgacccacgtcgaccagcagctctgcgcccacccccaggcggagcggctccccagcgcggctgcgcccggccccgagctcgtgcagcaccagcgccagcggcagcgcccggaccagctccacggtgcctgcggggagaggggctgagaggcgcgggctcgggaaggggcggggcctcgggaagggaaggggatggcggaggcggaaggacggggactcccccgacgctcaccatctgcgggcgccagcagctcctcctgctcccgggcgcgaggcagcagctgccggcgttctgcgggacttcccgagcacagggctcgggccagaccgggatccacgccctgcgccgccagcatccgctcgaagcggccaagggccgagccgtcgtccagcgccgcggccacccgggcagcgccctgggcctgagtccccgcgtgtccgctgagccagagcagggcgccccctgcgggcggggacgggtcttaggcgcggccgggtcggggcggccccagcgggaagcaccccccgccgcctccgctcccctacaccccgtccccctcaccgagcgtggtgaccaggtcccttaagtctggcgggcctgcgccgtccatgcagagcagcgcctcctccacctccagggcgtggcccacgcagcgacccaggggcttgtccatggcggtcagcgctgccgcgacccgaagccctaggctggctcccacgccaacctgcggagaggaggctcagcgtggaccccccatggcggggccttctgcagccggttcttggtcgaactccagcccctgctgcaccctgggttgccagccccccagcatgaagtcagggaaggattggggtggggaagagacacgagtgaagtgcgacacctcgccatggggccaggaggaacttgtacttggtctggggcaggaacgccacagagggcttccccaggtccaggccgggccagccttgacctctaaagtcacagcaggttaggaagccgtgaaggagggagggacttcgggcagaagagggtgggactggggttaggcaggactgctgagtggagggaggcagtggggacgggaggggtgaagggtaggctgggcccgcatcaagacgcttgcccagggaaaggccacaccgctcaccagcgtctttgccagctcccgggcctgctcctggttggggaagacggcggcccctccgaacttaacgtccaccaccagagcggacagcccctccacgagtttcttactgagaatggaggctttgggggaggcagaggaggttggagacaatggagaacctggagcttcttgggagagttcggggatgccgactttggggtcaggggccctgagcattgagggtcaagtcccttattatgggggtggcagcacctggtgggttgagtatcaggccaccccacatggtggtggtcaggcatcttgtgatgggggtaggggggcacacggtcaggtgacgggtaactcctaacgagaggcccttgacttgagtttggaggtcaggagcctgtgaacatgcagaagcaggccatggagtcaggtcacctgtgatgagtggcaggctgtccacggtggctgtcacatctctggctgcatataggattccgtccgcaggaaccagctgctcactctgacccacgatacagcagcccgcctggtccagcagcacttgcatctggtcagacatcccctgttctcagtgacttatggtaaatgacttagcagctttttttttttttttttttttttctgtgaagagtcttcctctgttgcccaggctggagtgcagttggcacaatttcggctcattgtgacctctgcctcctgggcttaagtgatcctcccacctcagcttcccagtagctgggactacaggtgcgcaccaccacacgcggcttttttttttcttcttttttttgtagagatcaagtttcactatattacccaggctgatctccaactgggctcctctgcctcccagagtgctgggacagggtctcactctgttgcccaggctggagtgcagtggcatcgtcccggctcactgcagcctagacctcccaggctcaagtgatcctcctgcctcagcctcctgagtagctggaaccacatgcgtgcaccaccacacgcagcgaactattttgtagagatggggttttgccgtgttatccaggctggttttgaactcctgggttcaagggatctgccctcttcggcctccccaagtgctaggactacaggtgtgagccaccgtgccccgccagccatctgtgattttgaccaacttcccattttatgatcctaatcaaagttccactgatgatttcggcccaggcccagtgactcatgagtaaccttgaccagtgttctcattagtgaccctaatgatccaccagtg

SEQ ID NO: 1562975 - DNA, 4001 bp, Homo sapiens
ttttgctgctgcagcctctccttctcagccctcagggccagccaggccccaccgagtccagccccgaacaggcctgtgatcagcagccgggttcgaagcccagggccctggggctggccctgcccacctgtctctgcagggccctgccttgacaaaagccaggacctcagatgcagggcctggcctcccagggtcccagggaggacccgaggcttgagctgagagagcctgtgccaagctgtggggctccgagtcagcagcagcatggatctgatgctcctggaaacaagcacaggcgtcaggagccagaagggaaggcccaggacagtgcctgggctgcccctgcgacttgagaccagccacccatctgaaggacccagcccacgttcaggcttaacaggcatttgcagctgctcacctgagctcagaactccacctccaccaaacatccacacctgggcaaccacacctgtcactcctgtcctctacctgggatcaccagcctgtcaccgcaccctgccctgcacctgcacctcagcaaggtgaacctcttgctgacggaaagcattccaagtgcatgccttgcctgaactaaccacgttatctatttgcaataaacccatttcttaaaaggaggtgggtaactctctggcttgcaatccccgagagcaaccgattcctccaacactttcctgttacctccagccacttcaaccaaccgcggccttcctccacactcccagcagaaaacctgcacgacctacccccggagctcagactctgcccgccggctgtgtttaacctctcctggcagagacgcacgacacttccacccgccacaaaaccccaccctcctcacatccaggcttcccagcagctcctccgggctcacagccgacgccctgcctttgcgttggtgacctttgagcctttcccacgggcccccgcagaaggtttgctaggtggaggtctcaggactcccggtcactgccccctcctgctgagggcaccctcccgaggactcactgcacccccgcccgggcggttctgggtttgtgccctccccagcaaggccagcgccctcgtggccagaaaggttccaggaccactcgaagcgccgcgcgagcgcgttataactgtgcttggccgcgagaacaccggtgcctgctgggagcctcccacgggcgccccagcctcgctccggcctccagcgcgccctggggtgtgccccgccagccccgcgcagtagccggagctgggaaactaccccggagtccagcgagtcctcagggctacctcctcccctcccagccccggcgtccgcacctcgcggcggggccgcgcgtcagtggaccaagcacgagaggaagcgccgacctccagctccctgcgctctgccccgccggctcagggaaagcgggcgccacacgctcacaggcagggcgcaggcgtccccggagctgcgcatgcgcacacgggcgcagccgctgacaggctctcagcgcgtgcgcggaaggcggagcccgccgggggtcacgtgttcatcgagacggcccccgcctccgcagccctggatccttccgctcccgcccaagcactgacaaggtttcgcggcaaaggagctttattgctgcggcggcagaacgagctctgcgaagggcgagggggcggcgaatggcgcgcggtcggagagtacgagcgcctcctgcagggcgcggctctgcgggccgctgagcgcggggccgtcccggtgcacgcggagccagggggtccctgcagagcgaggggctgttagaggccgcgcggccggagctgggcgggggtgcggggccagcagggcgggggcggcgctcaccacggcgcagcctctgacccacgtcgaccagcagctctgcgcccacccccaggcggagcggctccccagcgcggctgcgcccggccccgagctcgtgcagcaccagcgccagcggcagcgcccggaccagctccacggtgcctgcggggagaggggctgagaggcgcgggctcgggaaggggcggggcctcgggaagggaaggggatggcggaggcggaaggacggggactcccccgacgctcaccatctgcgggcgccagcagctcctcctgctcccgggcgcgaggcagcagctgccggcgttctgcgggacttcccgagcacagggctcgggccagaccgggatccacgccctgcgccgccagcatccgctcgaagcggccaagggccgagccgtcgtccagcgccgcggccacccgggcagcgccctgggcctgagtccccgcgtgtccgctgagccagagcagggcgccccctgcgggcggggacgggtcttaggcgcggccgggtcggggcggccccagcgggaagcaccccccgccgcctccgctcccctacaccccgtccccctcaccgagcgtggtgaccaggtcccttaagtctggcgggcctgcgccgtccatgcagagcagcgcctcctccacctccagggcgtggcccacgcagcgacccaggggcttgtccatggcggtcagcgctgccgcgacccgaagccctaggctggctcccacgccaacctgcggagaggaggctcagcgtggaccccccatggcggggccttctgcagccggttcttggtcgaactccagcccctgctgcaccctgggttgccagccccccagcatgaagtcagggaaggattggggtggggaagagacacgagtgaagtgcgacacctcgccatggggccaggaggaacttgtacttggtctggggcaggaacgccacagagggcttccccaggtccaggccgggccagccttgacctctaaagtcacagcaggttaggaagccgtgaaggagggagggacttcgggcagaagagggtgggactggggttaggcaggactgctgagtggagggaggcagtggggacgggaggggtgaagggtaggctgggcccgcatcaagacgcttgcccagggaaaggccacaccgctcaccagcgtctttgccagctcccgggcctgctcctggttggggaagacggcggcccctccgaacttaacgtccaccaccagagcggacagcccctccacgagtttcttactgagaatggaggctttgggggaggcagaggaggttggagacaatggagaacctggagcttcttgggagagttcggggatgccgactttggggtcaggggccctgagcattgagggtcaagtcccttattatgggggtggcagcacctggtgggttgagtatcaggccaccccacatggtggtggtcaggcatcttgtgatgggggtaggggggcacacggtcaggtgacgggtaactcctaacgagaggcccttgacttgagtttggaggtcaggagcctgtgaacatgcagaagcaggccatggagtcaggtcacctgtgatgagtggcaggctgtccacggtggctgtcacatctctggctgcatataggattccgtccgcaggaaccagctgctcactctgacccacgatacagcagcccgcctggtccagcagcacttgcatctggtcagacatcccctgttctcagtgacttatggtaaatgacttagcagctttttttttttttttttttttttctgtgaagagtcttcctctgttgcccaggctggagtgcagttggcacaatttcggctcattgtgacctctgcctcctgggcttaagtgatcctcccacctcagcttcccagtagctgggactacaggtgcgcaccaccacacgcggcttttttttttcttcttttttttgtagagatcaagtttcactatattacccaggctgatctccaactgggctcctctgcctcccagagtgctgggacagggtctcactctgttgcccaggctggagtgcagtggcatcgtcccggctcactgcagcctagacctcccaggctcaagtgatcctcctgcctcagcctcctgagtagctgg

SEQ ID NO: 1562976 - DNA, 4001 bp, Homo sapiens
agtggctcaagacaggacactgcggaaagccgccatgtgccgccgcacactgtctgagatctgctcagccgatctgctccggccgtagtaatccgtgaagaggccgtcagggttgagcaggtagatggcaatggagtggtccacgatgtagtcctggtcctcatccttggggcctgcattgtagtacacgcggtaactgtgactagcctgggcaacctgtttggtggagccggtcagacccaacagtcttgggtggaagtcctggacgtagcgggccatggcttcaacgtcgtcccgctcggggtccacagtgatgaagacaggctgcactggaggcaaaccaggctctgcttccagctgccgcaccacctgcaccagcttctccagctcgtctgggcagatgtcagggcagtgagtgaagccaaagtacatcagcacccactggccccggaagtcagccttgcagcgagcccggcctctgtgatccagcaggtggaagtcgccctggcccacagctgcctggcgcagggcttctgttcgcttttgctgctgcagcctctccttctcagccctcagggccagccaggccccaccgagtccagccccgaacaggcctgtgatcagcagccgggttcgaagcccagggccctggggctggccctgcccacctgtctctgcagggccctgccttgacaaaagccaggacctcagatgcagggcctggcctcccagggtcccagggaggacccgaggcttgagctgagagagcctgtgccaagctgtggggctccgagtcagcagcagcatggatctgatgctcctggaaacaagcacaggcgtcaggagccagaagggaaggcccaggacagtgcctgggctgcccctgcgacttgagaccagccacccatctgaaggacccagcccacgttcaggcttaacaggcatttgcagctgctcacctgagctcagaactccacctccaccaaacatccacacctgggcaaccacacctgtcactcctgtcctctacctgggatcaccagcctgtcaccgcaccctgccctgcacctgcacctcagcaaggtgaacctcttgctgacggaaagcattccaagtgcatgccttgcctgaactaaccacgttatctatttgcaataaacccatttcttaaaaggaggtgggtaactctctggcttgcaatccccgagagcaaccgattcctccaacactttcctgttacctccagccacttcaaccaaccgcggccttcctccacactcccagcagaaaacctgcacgacctacccccggagctcagactctgcccgccggctgtgtttaacctctcctggcagagacgcacgacacttccacccgccacaaaaccccaccctcctcacatccaggcttcccagcagctcctccgggctcacagccgacgccctgcctttgcgttggtgacctttgagcctttcccacgggcccccgcagaaggtttgctaggtggaggtctcaggactcccggtcactgccccctcctgctgagggcaccctcccgaggactcactgcacccccgcccgggcggttctgggtttgtgccctccccagcaaggccagcgccctcgtggccagaaaggttccaggaccactcgaagcgccgcgcgagcgcgttataactgtgcttggccgcgagaacaccggtgcctgctgggagcctcccacgggcgccccagcctcgctccggcctccagcgcgccctggggtgtgccccgccagccccgcgcagtagccggagctgggaaactaccccggagtccagcgagtcctcagggctacctcctcccctcccagccccggcgtccgcacctcgcggcggggccgcgcgtcagtggaccaagcacgagaggaagcgccgacctccagctccctgcgctctgccccgccggctcagggaaagcgggcgccacacgctcacaggcagggcgcaggcgtccccggagctgcgcatgcgcacacgggcgcagccgctgacaggctctcagcgcgtgcgcggaaggcggagcccgccgggggtcacgtgttcatcgagacggcccccgcctccgcagccctggatccttccgctcccgcccaagcactgacaaggtttcgcggcaaaggagctttattgctgcggcggcagaacgagctctgcgaagggcgagggggcggcgaatggcgcgcggtcggagagtacgagcgcctcctgcagggcgcggctctgcgggccgctgagcgcggggccgtcccggtgcacgcggagccagggggtccctgcagagcgaggggctgttagaggccgcgcggccggagctgggcgggggtgcggggccagcagggcgggggcggcgctcaccacggcgcagcctctgacccacgtcgaccagcagctctgcgcccacccccaggcggagcggctccccagcgcggctgcgcccggccccgagctcgtgcagcaccagcgccagcggcagcgcccggaccagctccacggtgcctgcggggagaggggctgagaggcgcgggctcgggaaggggcggggcctcgggaagggaaggggatggcggaggcggaaggacggggactcccccgacgctcaccatctgcgggcgccagcagctcctcctgctcccgggcgcgaggcagcagctgccggcgttctgcgggacttcccgagcacagggctcgggccagaccgggatccacgccctgcgccgccagcatccgctcgaagcggccaagggccgagccgtcgtccagcgccgcggccacccgggcagcgccctgggcctgagtccccgcgtgtccgctgagccagagcagggcgccccctgcgggcggggacgggtcttaggcgcggccgggtcggggcggccccagcgggaagcaccccccgccgcctccgctcccctacaccccgtccccctcaccgagcgtggtgaccaggtcccttaagtctggcgggcctgcgccgtccatgcagagcagcgcctcctccacctccagggcgtggcccacgcagcgacccaggggcttgtccatggcggtcagcgctgccgcgacccgaagccctaggctggctcccacgccaacctgcggagaggaggctcagcgtggaccccccatggcggggccttctgcagccggttcttggtcgaactccagcccctgctgcaccctgggttgccagccccccagcatgaagtcagggaaggattggggtggggaagagacacgagtgaagtgcgacacctcgccatggggccaggaggaacttgtacttggtctggggcaggaacgccacagagggcttccccaggtccaggccgggccagccttgacctctaaagtcacagcaggttaggaagccgtgaaggagggagggacttcgggcagaagagggtgggactggggttaggcaggactgctgagtggagggaggcagtggggacgggaggggtgaagggtaggctgggcccgcatcaagacgcttgcccagggaaaggccacaccgctcaccagcgtctttgccagctcccgggcctgctcctggttggggaagacggcggcccctccgaacttaacgtccaccaccagagcggacagcccctccacgagtttcttactgagaatggaggctttgggggaggcagaggaggttggagacaatggagaacctggagcttcttgggagagttcggggatgccgactttggggtcaggggccctgagcattgagggtcaagtcccttattatgggggtggcagcacctggtgggttgagtatcaggccaccccacatggtggtggtcaggcatcttgtgatgggggtaggggggcacacggtcaggtgacgggtaactcctaacgagaggcccttgacttgagtttggaggtcaggagcctgtgaacatgcagaagcaggccatggagtcaggtcacctgtgatgagtggcaggc

SEQ ID NO: 1562977 - DNA, 4001 bp, Homo sapiens
gtggctcaagacaggacactgcggaaagccgccatgtgccgccgcacactgtctgagatctgctcagccgatctgctccggccgtagtaatccgtgaagaggccgtcagggttgagcaggtagatggcaatggagtggtccacgatgtagtcctggtcctcatccttggggcctgcattgtagtacacgcggtaactgtgactagcctgggcaacctgtttggtggagccggtcagacccaacagtcttgggtggaagtcctggacgtagcgggccatggcttcaacgtcgtcccgctcggggtccacagtgatgaagacaggctgcactggaggcaaaccaggctctgcttccagctgccgcaccacctgcaccagcttctccagctcgtctgggcagatgtcagggcagtgagtgaagccaaagtacatcagcacccactggccccggaagtcagccttgcagcgagcccggcctctgtgatccagcaggtggaagtcgccctggcccacagctgcctggcgcagggcttctgttcgcttttgctgctgcagcctctccttctcagccctcagggccagccaggccccaccgagtccagccccgaacaggcctgtgatcagcagccgggttcgaagcccagggccctggggctggccctgcccacctgtctctgcagggccctgccttgacaaaagccaggacctcagatgcagggcctggcctcccagggtcccagggaggacccgaggcttgagctgagagagcctgtgccaagctgtggggctccgagtcagcagcagcatggatctgatgctcctggaaacaagcacaggcgtcaggagccagaagggaaggcccaggacagtgcctgggctgcccctgcgacttgagaccagccacccatctgaaggacccagcccacgttcaggcttaacaggcatttgcagctgctcacctgagctcagaactccacctccaccaaacatccacacctgggcaaccacacctgtcactcctgtcctctacctgggatcaccagcctgtcaccgcaccctgccctgcacctgcacctcagcaaggtgaacctcttgctgacggaaagcattccaagtgcatgccttgcctgaactaaccacgttatctatttgcaataaacccatttcttaaaaggaggtgggtaactctctggcttgcaatccccgagagcaaccgattcctccaacactttcctgttacctccagccacttcaaccaaccgcggccttcctccacactcccagcagaaaacctgcacgacctacccccggagctcagactctgcccgccggctgtgtttaacctctcctggcagagacgcacgacacttccacccgccacaaaaccccaccctcctcacatccaggcttcccagcagctcctccgggctcacagccgacgccctgcctttgcgttggtgacctttgagcctttcccacgggcccccgcagaaggtttgctaggtggaggtctcaggactcccggtcactgccccctcctgctgagggcaccctcccgaggactcactgcacccccgcccgggcggttctgggtttgtgccctccccagcaaggccagcgccctcgtggccagaaaggttccaggaccactcgaagcgccgcgcgagcgcgttataactgtgcttggccgcgagaacaccggtgcctgctgggagcctcccacgggcgccccagcctcgctccggcctccagcgcgccctggggtgtgccccgccagccccgcgcagtagccggagctgggaaactaccccggagtccagcgagtcctcagggctacctcctcccctcccagccccggcgtccgcacctcgcggcggggccgcgcgtcagtggaccaagcacgagaggaagcgccgacctccagctccctgcgctctgccccgccggctcagggaaagcgggcgccacacgctcacaggcagggcgcaggcgtccccggagctgcgcatgcgcacacgggcgcagccgctgacaggctctcagcgcgtgcgcggaaggcggagcccgccgggggtcacgtgttcatcgagacggcccccgcctccgcagccctggatccttccgctcccgcccaagcactgacaaggtttcgcggcaaaggagctttattgctgcggcggcagaacgagctctgcgaagggcgagggggcggcgaatggcgcgcggtcggagagtacgagcgcctcctgcagggcgcggctctgcgggccgctgagcgcggggccgtcccggtgcacgcggagccagggggtccctgcagagcgaggggctgttagaggccgcgcggccggagctgggcgggggtgcggggccagcagggcgggggcggcgctcaccacggcgcagcctctgacccacgtcgaccagcagctctgcgcccacccccaggcggagcggctccccagcgcggctgcgcccggccccgagctcgtgcagcaccagcgccagcggcagcgcccggaccagctccacggtgcctgcggggagaggggctgagaggcgcgggctcgggaaggggcggggcctcgggaagggaaggggatggcggaggcggaaggacggggactcccccgacgctcaccatctgcgggcgccagcagctcctcctgctcccgggcgcgaggcagcagctgccggcgttctgcgggacttcccgagcacagggctcgggccagaccgggatccacgccctgcgccgccagcatccgctcgaagcggccaagggccgagccgtcgtccagcgccgcggccacccgggcagcgccctgggcctgagtccccgcgtgtccgctgagccagagcagggcgccccctgcgggcggggacgggtcttaggcgcggccgggtcggggcggccccagcgggaagcaccccccgccgcctccgctcccctacaccccgtccccctcaccgagcgtggtgaccaggtcccttaagtctggcgggcctgcgccgtccatgcagagcagcgcctcctccacctccagggcgtggcccacgcagcgacccaggggcttgtccatggcggtcagcgctgccgcgacccgaagccctaggctggctcccacgccaacctgcggagaggaggctcagcgtggaccccccatggcggggccttctgcagccggttcttggtcgaactccagcccctgctgcaccctgggttgccagccccccagcatgaagtcagggaaggattggggtggggaagagacacgagtgaagtgcgacacctcgccatggggccaggaggaacttgtacttggtctggggcaggaacgccacagagggcttccccaggtccaggccgggccagccttgacctctaaagtcacagcaggttaggaagccgtgaaggagggagggacttcgggcagaagagggtgggactggggttaggcaggactgctgagtggagggaggcagtggggacgggaggggtgaagggtaggctgggcccgcatcaagacgcttgcccagggaaaggccacaccgctcaccagcgtctttgccagctcccgggcctgctcctggttggggaagacggcggcccctccgaacttaacgtccaccaccagagcggacagcccctccacgagtttcttactgagaatggaggctttgggggaggcagaggaggttggagacaatggagaacctggagcttcttgggagagttcggggatgccgactttggggtcaggggccctgagcattgagggtcaagtcccttattatgggggtggcagcacctggtgggttgagtatcaggccaccccacatggtggtggtcaggcatcttgtgatgggggtaggggggcacacggtcaggtgacgggtaactcctaacgagaggcccttgacttgagtttggaggtcaggagcctgtgaacatgcagaagcaggccatggagtcaggtcacctgtgatgagtggcaggct

SEQ ID NO: 1562978 - DNA, 4001 bp, Homo sapiens
gtttgggaggactggggtcacttatgagacaggaccagcaggggcagtgggccacagatatggctcttcccacttcccaggggccagtatgtaggaatgaggggtgggagccccttgtgccctcacccctaatctcccacctaggcaggtgtcttcactggaatggaaatggatggatgttgatgaggggtgggtggagctatctcccaacacacctttaaacacttgggtgtccttggtgtggagtgtggggagaggacatgggagtttgaggagagagagggagaagccacttgtccccatcggttctctgccatgctcccgctcctgtctgggctggagactcccctgcagggcgacccagccctcctagcacaggctgctccctttgactctggtttgcttatgctggggacatgctgctggggtttcacagtcacagggcttccacggagagggtcgtggaggagacagagtcagatacagagagacacgaggagggacacaggtggggataggcacgcccaggaacagtcactcagaggtgagggaccccaaagcttgggagagacacccacagacacaagggggatgatggggcagcagggctgggcttccaggaggggtgttgctgtggaagagtctcacaggcccagcatcctcactcggggcacgcgggaccaccaggaatagaccctacgccacccataccagacctcaggaagccgggaaggacgtgcaggaccctccccctgcctccccctccaagcagagcaccggaggaagcgcctctgatgacgaggaggggagaatgtgactccagcttttcgggaagcccctgaagacagagagcaggaggggaccgggtgggagggtgggggggtccccgtgaaacccacgggcctgggcctgtggcctccgggtctccccctccccttcctgggtctgctccaccgacgtcccgcgtccggactctcctccctgtgtctgtcctccggatcctctgccttccttccctctgtctttcctccccgtcctgtcagacggtcccggtccctcgtctgcggctttccaggtatctctgtccctctctctttcccggtctccctctcaccgccccccccaaccccgtttttctgcggcgtccatctgtcccccgtctcctcctctctctctcccttatcatcggtgggaccatccctcttgattccccctgatccaccggcctcctcctccttccccgggcggtgcgggcctcctctctacccttccgcatctgtcttttctccgggcttccttttgtctgctccctcggcgccggctcttctgtccgtctgtcccgcacctcccgccccgtcccggtctctcggtccgtccctttccccgtccacctcctggcgtgtccccctccgcccgccccgccccgcgccccctctcccaggaggagcgcccctctgcgctcggggtcccgccccgcccaggtccgcacgcggggtccccgggaaccgccgcctttcttcctcgctcccgcgctcgcgcttcccctcccggggccccggcccacccacccctggtgcggccccgccggactcaggagccccggccgcccgggctgcggggagggggcgccccgggccggccctagaagttactttgcaaagaggcagggggcgcggggccgcgcggggcgagctcgggatccgcggggaagaagccctccgggaccgcgcctcggccgcccgagccccccgcgcccgccgccccccacctcggtcgggggcttacctgggagcccgctgcccccggccagccgcccgcgtgtgcccagggccagcagcacgcacaagtgccagcgcacggccgccgcgcccatgctcaatgcgggccccgctgggcgtgcgggcgtgcggggcgcggggacccgaccgaccggccgctcccgcaggcgctgctcgctgctcgccgctccgccaccgctcgggctcccgagccgcccagccagcccggctgatgagctgacagcgcgcgctcattggcccgtggcgtcggaggggcggggcgtcgcccagggccggccaatgggcgccggcctccggccctccgaggaagaggggggctcgggcgtcgtcggggggacccttcccctggggcgggcggcaggtggggggtgtgggcctggccggccggctcgctaggcgcggggtctaggccaggctggggctgcttggaggctgcgccctcccctgcccgcggcgccccggcccccgccgtcgagagtggacgcccctctggggtaacccctcccggcccagaggcagcctcgggggcggggatcctgcgaaccggggatcccgtgaggtcgcccgccatccgtgggcagtgaaacgcgccagcgcgcagagcagactcgcctgcgctgccgtttgctggacgtttcttgagcacctactggggaccgagtgcgggcgaggcagcagcgaaggaaccgggaggggaaacctcgtgaagatcacttgaaaattgacgttcaaaacaaacgaactttttagcactcgtcaaaggacagtggcccgtcagtgtgcttgtcacggggcggccgcaggacctgcgtctggaaccgggcgggcgcccgggacggacaatgccgcttggcggtcggtcccgcgggaggcccccgcacggggctaacctcggccggcgaagttcgctgcccggaatgcgaggccgaggcctccccctgtgacagaccgggcggggccaggaggaggggcagggcgggcatcccggtccgaagacccaggaactgctctggcctggcctggggtctacacctgacgcctggcgagggttggcttcgggtctggtcccaccgggcctgggagggacgggcggctggaaataaatggcccctctcagttccaggcaggacgctttaagggacgaaagttcagcaaaccccaaggcccatctccttgacaaccaccaataagagctccttttttcttctcctgctctccaggcccaactcaaagacaactcttttctctttttgtccactctgcctgcaccagtttgagcccctccacaccagctccctttcctgcccccaacacacacacgcacacacacacacacacacacacacacacacacacacacagtcacacatgcagacacatgctctcacgtgcaatcactcagacacagcctcacaccctcacaccctccagcacacacacgctcacacatgcttcttcacgccctcatccaacctaccgtagacgagctcctcagccctggaaggttaaatctgtgtccagccagctctcacaccccatctgacttcacatcagcttgtggcacgggcctggtggctgaggcaaggggtcccctacatggggatcgggggtgtggggggtccagagatgcccaaagaagaaggaagcgctgcctgttgtctccactgagcccccaccccattgctccagacatttcggtctgcacggctgctcctggctgctggtttaatttgggagatgctgttgacaggctttattttgtccccgtcaattgtgtagctttgagtttctgcagggggtggggagttccctcagaaccacatattatcttgtgcattgggcaacagggcaagcagtgtgaggtggtgggggaggttcttccagggggctctgacctacttgaaacaatgccctctaatgtgcctggtcattaggcacccccccgcccagccctagccaggtgcccctcaagcttgatggcagcaagagaagcttcttccaggctccatccccacaaatcaaggcaggaatggaggcaggttactctgtgacccctcagcccagaggtagctgtcccttgtaccaagttgtagtccccagcctgcccccaagcgattgctcaggtcaagtttgctggtgaattatcaccctctaaggtgtgcaggcagagagaaagtggttccttctaggcagctgttgtct

SEQ ID NO: 1562979 - DNA, 4001 bp, Homo sapiens
caaacccaaagtctctgccaagagtggccctgcagacgccccacctgccaccctccatccacccatccatccacacactcagagttcatcgtgacctgcagagggctccacactaggcttgatgaagatgccttccatggccttccacgtattgtgcgtgttggcactgggcatgccgtggacctcatgctgcccacggatggggcttccatactgctcacccgtgactgacaggaacacagaggtgcccacatgctggaagcgcacagcagcctcacgctcccagtgctgtccagagcagcgcactgtccataggtccaggtcgtcgccctcgccgtcttccccaaaggcactcacctcctataggtgcaaaggatgagaagacagtggtcaccacagaaggcggcattcgcacctagtacaccgagcctcgggttcttccctacccttcctggagcctcagctcccacagctgcaaaaggtgacaccatgacccgcccccgcaacctctagcactccctccccagcatgggctcttcagacacatgcacacaccattgcatctgtctgtgcagagaccactggtccccacggagctaaggcctcctcctccacattttcccagtcctaacccctctgacctaccttcagcctaaaattcagcccctcaggctaacagtcaagctgtctatctatctcaaacattttcttccaccagctccccaagggcacccactgttccattccaatcccctgaattccaatgacctccatgcattggcacaatctcttctgctggcctgggaagtctctctttcccctttgtggcttgtaggactcctaatcatcctttcagatctagcctgagttcctcctccccagtggagtttcctattccccaccctcaaggctgtgtggattcccctcctgggtcccacttgccaccagaggaagagctatccaggcgtatctctccggatctctctcccgtcgttctccctgccgggccgggagcacctgagggcaggatcctggcggagttactctgtgtcccccgagggggcgctcagtaaccatctctgaagtgaaatttccatttcacgaagaagctgaggctcggattggaacccagggctctgtctctggcccctcacacaggccaggagtctctctgggggctccgggaggggctcacctggttgttggacagcggcgacgggaagtggtgcgtgtgcaggttcttgcccgtaagcacatgcgtgagcctcaccgcctgcccgcagcgcaccggggacccgcgcgggcacccgccctccgagccgccgcggatccgccagtagctattggcgtcgtccgacgcctctacgccggtcaccgattgctggccgctgcctgaggagtgacaccccacacacccagggtctccgtcaatcgcggaaccccggaccctcgccctgggaccagaacatgtcccaggggaccccaagggctcacccccagcccccgcctgacaccccctcagtctttgggcccgcagttccccgacgaccgtccccaccctcaatatcctcgacaccctcaaagctttggcccctcgacctcccaacgactctagagcccccgccgcccggcttccagacggcccacagacccccatgaccaccctgtctccacactcccaaccccgagccccggttccccgcgctctcccagtcgctggccccacgcaccggatccgtatttgatgtcgtgcgagtgcagccgcacgcggtggtgcgtattgagcagcttcagcaccgacccgcaggtcacgagctccgcaccggtcttggcggcaccaccgcccggcactaacagcgccagcagcagccccaacagcaccggccaggcagccccgccgcggcccgcgctccacatcgccccggcccggctccagcccctcgggcccaggggccgcttccgtccccgccgcggcccaatccggttctgacagcgcccgcttgcggcagccaatagtcggcccgcgcggcactccgcttgcactgccactgggtcagcgcggggagggcccgcccccggttcgcgagagccgtagctgggcggggactggagacacgaggagggttttgattggtccacgcttccgaggacttaccaatgagtgcccagggaagggcggctgagtctccgagccgcggagagtgagcgtgaacagttggtgaagacgcggctcctcgcagccggtgagtccctggacaccggctcaggatcctaggaccctgcaggcacgttttcacgacgccccttgatcctggactcctgggcactcagtaatgagtctctcccctcagaacctgggcccgcagctgcagggtcttgaggttgttggatcgctagattttgtggtcacaaagtcgacagatcccggggtcactgaatcgggatcagtccttaagtccctggaccccgggattaatgaaacctccagtcattcggccctaggccctctctgatactgggtcaccacagtccctagaccctggggtttctgaattcccctggccacttatacatttgactcctttcgtggctaaatctcgtggtcactgggtcatcgggcaggagagggcagcagggagctgtagcgttgagaataatggcagcttctcaccagaaagtcccaaagctgtcttaggaaaccagagtcaaaggagaccaaggggctgtgggaaccatgcctgggcgaccgtgtcccaggtctcctggccatgagtaggtctccttcttgccgccttctcagagtgttgtcagctcaaccttcaagggaggaaaacttacacctctgtttatttattcattcatgggacattgttacagcagcttcactccagatcctgtggggtcacagagcaaatagctctgggctcaagagtctgactagggtgtagttgaagcacaggcaaagcagagagaaaagttcatatttaattaaatcatccagaattttgcgttcagaaaatccagagtaaagccattttcattacagcaacatgttattttgggggtttcgtgtttaatactgttttgattttgagttacatgtagtataagacaccttgatcttttcagcatttaggtgtccaaacggttaaaagtcagtctgccctggatttggtagtccctgcacttgaggggtctccagtctagggtggaagagctgaagtactatctgagaggcgatggatatatactcttggacatgtcagccatcatctcaaaatcagcacatccaaagcagaattcctggtctccgccctcaaactacccctcccccaggcttatgagtctcagtaaatggcacctccattctgcagatgctcaggcccaaaacttgggattcttctttcattcgtctctttaccttgctcctcacatctcattcaacaatttttttttctttaatacggagtttcgctcttgttacccaggctggagtgtaatggcgcgatctcggctcactgcaacctccacctcctgggttcaagtgattctcctgcctcagcctcctgagtatctgggattacaggcatgcatcatcacgcccggctacttttttaaatatatttagtagagacagggtttcaccatgttgaccaggctggtctcaaacttctgacctcaggtgatccacctgcctcagcctcccaaagtgctgggattacaggcatgagccaccacggcacccagcctttttttttttttttttcaaacttttgagtctcccatgtgcatcattcaagaagtctttttttttttttttttttttttttttttgagacggagtcttactctgtcactcaggctggagtgcagtggcacgatctcggctcactgctgcaacctctgcctcccgggttcaggcaattctcctgcctcagccccctgagtagctgggattacaggcatgtatcaccacacccagctaatttttgtatttttag

SEQ ID NO: 1562980 - DNA, 4001 bp, Homo sapiens
tcctcactcacaacccgtagaagtattgtccccattctacagatgaaggaattaaagctcagagaggctaagtaacatgcccaaggtcaaacagctagtcattagcagagttgggatgcaaacccgggtctgtctgagtccagagcacacactctttccaccatggtcttctgccccatggaaggatgaggagtttgctggggagcagagggaagaaagaggtggtctcacacggcttcctataaaacatggcatttgtgctgggcttgaaggacttcaaaggcagcgggggagagaggtgggcaactcaggtggagggaacagttccagtaggggaagccaggaagcgggaaagtgcaggtagtgccaaacaaaggaggtggacagtgacctcaatggacagccacacctacctccaacctctcactccctggtaggcgaacaggcccctatatgccctccctgagcctcctgctcccagccattcacctttccctgaccactgacctagagggcagtcccagaggacactaatgaggactggccacctctgccccttgcctaggtcagccagggactcagaccatcccaccccacaaagcagctcccagtgcaccagggaaactgctcctccaaactgcaggcatgaagctacccctctccaaggaccctaaccagcccctggtctccagtttaatcaccacctaatcccttctctgcctgacctctcctgcgagtcagcagtaaaatctgaagcctccctgtccagccttcctgggatgggggaggcccagcctgggacagaggctttatggagctggtgcctccccactgctgccagtggcaggatacatctgccccccgccccacctttcccagccatggaaaactccccagctgtggagcctccaaatcttggggccagaccctatcggctcttgcccagagaagagccgacctcctcactccccaggggtgacagataagagatttagttcgtgaagaggaaggtcccgccctcaaactgttgccccctccttgtcacagatgccaaggcaaagccaggctcaccttcttgccttctgaggagcataaaccttaagtcctgaaccaggcaggggtctgggatgcaagataggggacggctggtctcagctcaaactaacaccaacccagtgcctcatggggggagcctggaattcacacacggaggtgttcccttcaacatcatctggtccaacctcctcattccatggcatcgaggagcaaagagaagggcagggttttgcccaaggtcgcacagcggcttggtgccggggcaggagctatccaagtctcccaaggagctatccagagccctttccatcgtgccactgaccctacaagaagaaagcctcccggaaatgggaggaaacttgggcccctgcccctgcccctgccccagggcccggctgccagtcccgaggatgaatgttgcctttgtgccctcagcggcctccggggactcacaagcaaccacttgtccccaggtggcaccgccacggctgctcagagcttgggcggggggtggccaaacttcctgggacctcgagggtggcaaagggaggaaggagccatccgcgggcgcgggccaggctgggacagccgcctctgttccctccgccgcccgccacggaccctcggcccccacccagccccgtcccttctcgctgccgcaggagggcgagggccacagcccgaggcgggagcccgggccagggctacagctcaccttggccaatgcctccttctgcctggggctcagatcgccgactctgccgctcatcgtggctcaaccgcggggatggggtttgggggcgggaggcggcgggtgcggcagctgatggagcacagactcgtcctcgccgccacccggagtaaagtcccagccttttgcccgggccgcggagctggcagccaagccccgcctcttaaaggatcccgagaggcggagtagggagcgatgcgctggggcgcggaaggctctgacacgggccccctccgccctcctgaagtcagagacccaggcaggaggcgagcaagtgtgcccactgggactgaggccagtgggcatcagaagggcagggagtctcagttttagttccaaatttatccttacctcattgtgtgaccttggaagagacacctgagctctctgggcctctgaacaaggagggattgaaaggtgctatctaatgagctcttctaaccaggctcgcatagtgcaggacagcacagcatcctgcacacagggattgtttttgcattgttttttttttgaaacggagactcgctctgtcacccaggctggagtgcagtgtcacgacctcggctcactgcaaccttcgcctcccgggttcaagctattctcctgcctcggcctcccgagtagctgggattacaggtgcacgccaccatgccaagctaatttttgtatttttagtacagatggggtttcaccatgttggccaggcgggtgtcgaactcctgacctcaagtgatccgcctcggcctctcaaagtgctaggattacaaatgtgagccacggtgcccagcctacagggattattaataaatgtatcctgaatgaatgaatgaatgtaagaactgctccaatagagacacagatcccggggctggcagaaccctgagagggagagagaaacatagatcattcagggatcatgcaacttacctcgtttaacagctagggaaactgaggcccagataaggcatggcttgcccaaagttgttagtggcatgacatatgtggagtgcccactgcctggcacatggaaagtgctcagctgtgccctccccttatggcctggaattaatgcagagctaggtccaggagtctgtgggcatctcgtctcccagagccatacttctgccccctcaacactcaagtctctgggagagacaaagcagaatgtccccagtctctctccttacctggaggcaaaggcaccaggcctgttaaagacatttaaggactttgctctgcccttggtgtggccccctccatagacgcctgctgcagggtgcagagtgagggttgaggcccccaacgcccacctctacagagagttttcaggcagttctgccctagttaggctcgctggcttctggcctggggcaggacagggctgccttccttactggatacatggctaagatctttatataagacccttccagggccaggatattctttccaggctagagcctactcaaaggaaactattatagaagaacagcatcttggccgggcgcggtggctcacacctataatcccagcactttgggaggccaaggcaggcagatcacctgaggtcaggagtttgagactagcctggccaacatggtgaaaccccgtctctactaaaaatacaaacattagctaggcgtggtggtgtgcatctgtagtcccagctactcaggaggctgaggtgggagaattgcttgaacctgggaggcagaggatgcagcgagctgagatcacaccattgtactccagtctggggcgacagagcaagactccctctaaaaaaaaaaaacaaacaaacaaaaaataaaaacaagaagcacagcctcttatattggttcagcaacttagagctcacaaggtaccttcagatctagcttgtcacttaagtgtgggacaatcctctaaggtaggcaggtcaggtgacttattgaggagcctgagggagaggtggtcataggtgggcacgtgcagagttgggacttaaacccaagtttgtggtttctaggccgtatgctcccaggccaaggtgtggacgggcctgggaactgcctgcgaaagttacccacgaaagtacaagatcaccttcacccagcaggatacagccctccccgcatctgaagttacccaaataaaagcctcggtaaagaacccttccccaggcctgcccttcccaggttcaacagctgcctct

SEQ ID NO: 1562981 - DNA, 4001 bp, Homo sapiens
caatatccatggtcttccggaactccatgtactgaaagggaaatgagtggtaagatcccactgggctcccagtgccctgagaacagggatggaaggaggggcttgaggcatggattgcccctgacaaatcccctccataaatttccagagtggataggtctcaccttgcggagcaaagcctccgacttctgcaagtcaaaattccgagctgtgggaaaacagaaggaaggtgtgagacaggaaagatgccttgtcttactcctggccagtgggagctatggaggacactgggggcctgggtgagaccttgctcccctacccccttccctcctctggacctgaacatgtgaagcaagattgtgtggatggaccctgagagccatgagacactctggagcagttgagaccaggcccctcttgatgccccctgatcccaacctctcccacctctgccctcacctcggagccagcgtagaaggaaataatcatcagggttgggcagggcaggaagcacatcctggacgttttctcggaactggcaagagagatgctggttaaagtggctctctcacattgagccttggcctccagactcaaagactgttttcacaacctctcctttcctcccacatgcaaaatggcccacattgatgaaaggatgggttaatggttgaatagaagggcagatggatcactggataggtggatgaatggaaggaggatagatggatgaataaatggttagaaagaagaatagatgggtgagtgggtaggtagatggaaaaagggagaagaaatcaatggatgaatggatagatggatggatggagagtgggtgggtggataaatcagtgaatggacagaggagagatgggtgggtgattgagagaaagaaagatggataggtggctgcgtgggtaggaagagggatgggtggatgaaagaaaggataaacagccaggtatggtggctcacgcctgtcatcccagcactttaggaggctgaggttggtggatcacctgaggtcaggagtttgagaccagcctggccaacatggtgaaaactcatctctactaaaaatacaaaaattagccaggtgtggtggcacatgcctgtaatcccagctactcaggaggctgaggcaggagaattgcttgaacctgggagacagaggctgcagtgagctgagatcgctccacagcactccagcctggatgacagagactccatctcaaaaaaaagaagaaaaagaagaagaaaggataaataattgggtggatgaataagtggattggagtttggatgcattcttagttccctccatgtgttagccctcaaaacatctgctttttttcatcccatcttctattaaaacatggttaataattatatgtcctcttcttcctttagctctttgaaagacaacactttctgctctgtctcttgggcttttacagactggtcatctttcaggatcccaaagaggaaggggttaaagggcagaccagcagcatctttcagctcctacctatggtgcctgggagggaggaacgggggtacctggctgccaggtaaacctctctggttctggctcctggatgagaagaagtcaggcttgacttgggtgggcaccacccacgttattgcctggaagtggtgctagtccctcaacccccgcccgggacagggttgatgttactgggcaccgtggggcttgaccctttgggaggtaacaccaaagagacaatgtcaaggacatgctgaatcaactgagtggggcaggattccagccacttctttccaccccccagcccctttcccctggtcttccggaactccagggggaggggctctcaccttggccagggtctctgcctgtttggggctcaggtctccaactcggccgctcatggtgctggctggggcttgaggagtggtggccactataggcaagaggccaagcctagtttgtcagccctgacccagctgggtccttttgcccccactcctgggcgtggctccaagcgcctcctcatgggccaactgtttaaattgcagattacataattgggattaagtgaggtcccctgcttggcttggggacagatctggaggggcaggcgggcatggagcgtgtgccagaggtcccctgccaggaggaggcagctgggaggaagggaggctggcctcccgtgaccttggagcccagagtgagtgcctgtagaacccgctgaccctcccaggcctccagtgaccactgccctggagaagggggagtttcaggagaatgaggaccgctccttgtgggtaccctttctccctgagccccagtcttcccacacttaggattctgcaaagatcacccccctctacccagctctgaaagggtaggattctgaggcttggtcagtgtagtaaacagttcattcactttgttgggggtgggaggcccaggtccttcttttgtgtccacagtcaagaagaggacagatggcatcttttgaacgtcacttgcttcatttataaaatggggccgttaatgtttgccttcccctccttatgtggttagagggaagatctaatgagacatagggactgtcaagggttgtgtgcatctgagggatactctccttcagctctcctggtcccccctggagctgtaagcttcagctccaggaagggagagaccctgttatccatgactctctctgaagaaaccatcagcttgaggctgcagcatggccacatggccacatggccacatctcagccttgagggggtctgcatgggctgaaaccaaccccgggctagcctcggccccagcagctgggctagcccacaccattctgcctagggcttttctaggtcccctactcctggggcatcctgggtacccacccctgagctacagtgggcctctattctgggctaacccagggtctctttaggctagtagatgttggtcagtatcagacatcttctcagggacatcttccttgctctgggctcctcacagagttggatccagaaggagaaggcagggctaatgctggccatttccctctgcctggggagcccgtggcatgtactcaggaacagttaggtaactctccacaccccagccctgccccatttcacattccagcctcaatttctgcaaagccccagctgctgtctacacccacttcctgccaggccagtaatgtacagagattgggttcctccactgccctttcccgagccactaatcctgcccatttctcaccagtctcctttctcaccctaatccctataatgtgaggtgtgctagttacttctaggggcatcggagactgtgaaggagagccaggagggagggttgggggtctcctcaggagttgtgagccttcacactgagctcttttcctgacccagaccacagatttgtcaagtaccttgctatgttcacaaatcctcatcagctacagtgccactccacagaacttcctgtgatggtagacatcttctgtctggggtgtcctgttagacatatctggtagccactagttacatgtgaaagatggttagcgtgactgaggaactgaagttttaattgaattggattttgatacattttactttaaattgttcaatctggctagtggttaccatattggatggtgcaggtggcccatttttattttattctactttattttattttatttttgagacagggtctcactctgttgcccaggctggagtgcagtggcatgatctcggctcactacagcctcgacctccccaggctcaatcaatcctccccacctcaaccccccggagtagcctggactgcaggcacattccaccacgccctgctaatttcttatattttttgtagagatggggtctcattacatgcattacctcattttggcctggtgaggtggctcacacgtgtaaacccagcactttgggaggccgaggcaggtggatcacctgaggtcaggagttccagacca

SEQ ID NO: 1562982 - DNA, 4001 bp, Homo sapiens
ttgggcagtatgggcagcaggtcctggaggttctcccggaactgagcggaggaggatctgatggtcggcggagctctcatgacctcgggggccaccaaccccgcccctaacccttcccacatcatccaccagtcaactccaccagaagaccatgcagggtgctgccctgaacgactttgccatctgaaaatagggcaccctccagcccaacataggaaaaagagttgggtccttcccaaaatttgggagtgccctacacactggactcccattctacatgtctaaggtggggccctggcatccttatttttaatttttattttattattatttttatattattattattattattattattattgaaacaggatctcactctatcgcccaagctggagcgtagttgcgtgatcttggctcactgcaacccgtgcctcccgggttcaatagatcctcccagctcagactcccaagtagctgggaccacaggcacacaagatgcccagctaatttttgtactttttgtagagatgggatcttgctatgttgcccaggctggtctcaaactccttggctcaaacaatccacccgccttagtatcccaaagtgctgggatcacaggcgtgagccaccatgcccgactgacagccttatttctacaaggatccctgggagagtctgatgcaggccagctaggcggttttaggaatgttgtccctgatactgcatcttgagggtttagatttagaggcaagttaccaaacctctctaagcctcagtttccttatctctgaaatggggataaaaataaacttgtaccaatcaaaggagtctgtgcacgtaaaacacttagcaggcttggctccgagcaggtgtcagatatatgtgagcactcagccagcgtggactgcctgatgccccggacaatggaggctttgtggaaaaaaaacagaggcagaggtcaacagacaggggctgaaagagaagccaggaatgccttatcagggcatctgttgcgtctgagagagaggagatctcacttccctggggaccaacagagctgaaggcaaaggctgggtttgaaggtgaatctgtgaatccaaatttgggattagaaatatgaggccgggcgcagtggctcacacctgtaatcccagcactttgggaggccaaggcggatggatcacaaggtcaggagttcgagaccagcctgtccaagagacctgcctggccaatatggtgaaaccccgtctctactaaaaatacaaaaattagtcgggtgtggtggcgggcacctgtagccccagctacttgggaggctgaggcaggagaatcgcttgaactcaggaggtggaggttgcagtgaaccgagattgcgccattacactccagcctggacgacagagcaagactccatctcaaaaaaaaaaaaaaaaaagattacagagaagcttgggccctaagaacaaatcacaaagagaagccaaacaaacaaatgttgcaacctggacatgaaaagcagtctgtctacccaaggctgcccccgcagccggatggcagcgccactccctcccccacaaccggggaacaaggaccagggccgggtggtggagagcacgcaaggtcagaagactggattcggctcctggtcacgcagagatgggcccctgtcccgcgtgctgcacgtagccgcctcaacaaccgcacgctggaccagagggcagaacagaggcgctctctccaggctcggtgttccagtctgtaccatgggggctccagccgggttgggcagtgccaggctgctcagggcccctcctcaagcctcccagcccgcgatgctcctcaccctggccagcgcttcctgctgctgggggctcaggtccccgactcggctgctcatggtgcccgcgggcgcagaaaggctcagggcgcaggtccgcccgcccgccgccgcctggccttgtatccgctgccgcctggttgtgcctcctgggccagatgttggtcccgccccgacgggagaggcactgggcctgccccgccccgcccagttctctcctcctctccaggattttttgctgcggtcaccaagcgcaccctacttgggacagggaggtgacctgccgggagagtggcctggggcagctggaggcagccacctccaggcctccttactgcgggggctcccgcctgttcgcaggtggcaggaaagggaatacactgagatcctctttccagcaaaatggaggaaatttttttttaaatgtttttttttttttgggccaggcgcggtggctcacgcctgtaatcccagcactttgggaggccgaggcgggcggatcacgaggtcaggaggagatcgagaccatcctggctaacatggtgaaaacccgtctctactgaaaatacaaaaaattagctgggcgtggtggcgggcgcctgtagtcccagctactcgggaggctgaggcaggagaatggcgtgaacccgggaagcggagcttgcagtgagccgagatcgcgccactgcactccagcctgggtgacagagtgagactccgtctcaaaaaaaaaaaaaattttttttttctttttcttattttgaataaaatagagaccgggttttgctatgctgaccaggctggtctggacctcctggcctcaagcaatcctccaacctccgccacccaaagtgctgggattagggatgtgaaccaccatacctggccaacatggaggaatttttaataaacctggctcaaccctctaggacccccagggcttttgtctaatgacccccaagctccttcccctgaccttgaacacagcctgggacctgtcagtgctcactgactgataggacagcctcatgtgcaaaatggttcctgccctcaagatggttggaaggataagaggacgcaccctgggtcagcagaatgtctggcgttgcctgctcagtaagtgctggctggtaggaatatatttcagaattgtgttattactgaggctgtcaccagagctgggagctgcaggggtggagatcctagggtgtcccaagtgcggagctcctgggtgagagccacagtctgaaggtggaggcatgcaaggtgccagccgtggaccaatggaagccctgggcagagtgacagagtgggcggagagccaaaaggccactctggctgacacaagagagccaggcggagatcactaggaaaagcaagaaaaaagttcagccaggcgcggtggctcatgcttgcaatcctggcacctggcactttgggaggccaaggcaggcggatcacttgaggtcaggagtttgagaccatcctggccaacatggtgaaaccctgtctctactaaaaatacaaaaattagctgggtgtggtcgtccacgcctgtagttccagctactcaggaggctgaggcacaagaattgcttgaacctgggaggttgagggtgcaatgagccaagatggcaccactgcattccagcctgggcgacagagccagattctgtctcaaaaaaagaaaacagaagttggctgggtgtgaattttcaagagaggagtagaggggacgtgaagatgaaggagagagtaaaacaggccacaagaccctgttccctctgtcctcccatggaatcaaaccaagctctagtcccgaaaggactaacccagtggccgtgagccacagaggcttttgagcccagacaacgtggcttgtcataacaagcatagagacatgctgtaattgtaaaatacaaaccaagttttgatggcttagtaccagaaaaagtaaaatgtttcattaactaattttatttatttatgtactgagacagcatctcactctgtcacccaggttggagtgcagtggtgcaatcatggctcactgcagccttgacctcacgggctcaagtgatcctcccacctcagcctcctgagtagctgggactacattctcaccccaccacacccggctaatttatttttatttttattt

SEQ ID NO: 1562983 - DNA, 4001 bp, Homo sapiens
gactggagacaaaaccctccgcttcctcaggtccctccaagactccctggggcccaactgtgttgctccacccggacgcatctctcccttctagacctgagcttgcccctccagctagcactaagcaacatctcgctgtgggtgcctgtaaattactgagaaatgtgaaacgtgcaatcttgaaactgaggtgttagaaaacttgatctgtggtgttttgttttgtttttttcttaaaacaacaacaacgtgaaaaaaagaaagtccactccagcgcccggtcgccacccttctttgccccgggaaccccatcccggcacctcccaccccgcatacaccacctaccccatgcaaaaccctatgatggcaggaatcgagacctccaaggacccgtcgttgcctccatgctcatggaaccgtgtgagtcttcctggaccccaagcttgccgtgtgcgaccacgaaggaaagaccctaaggaccttcaagggactcctcccaggctagagacgaaaatgcaccctgttcctgcctcctccagctcatagctgaggacgtgacctgccaatgcagcctccccagcaggccagcagccttcaccagccctgtccaatatggtagccacaaattcttaaaatgtggctagtttgaactgaggtctgctgtgagtgtaaaatacacaggattccaaagactcagtatcccctcaaaacactcattttttttttttttgaaacagggtctagctctgttgcccaggctggagtgcagtggcacgatgttggctcaccgcagtctcgacctcctaggctcaatccatcctcccacctcagcctcccgagtagctgggactacaggcatgggccaccacacccagctatttgttgttgttgttgttgtttttagagatggggtctccctatgttgctaattttttaattttttgtaaagatgtgttcttgctatgttgccagaactcctgggctccagtgatcctcccgcctcaaagtgcggggattataggcccgagctactgcaccagaccagttgtttttatattgattagattatatattgaagttaatacatcattaaactttacttcaattgtttctttttaggttttttttgttttgttttgttttgtttttgtttttgttttgtttttgagacatagtcttgctctgtctcccaggctggagtgcagtggcagaatcttggcccactgcaacctccacctcctgggttcaaacgattctcctgccacagggtttcaccctgttgcccaggctggtctcaaactcctgacctcaaatgatccatccacctcagcctcccaaagtgttgggattacaggcatgagccacagcgcccagcctctttttagttctttaatggagctactagaaaatttcaaaaaggccgggcatggtggctcatgcctgtaatcccagcactctgggaggccaaggtgggtggatcacctgagatcaggaattccagaccagcctgaccaacgtggttaaaaccccatctctactaacatacaaaaattagccaggcgtggtagcaggtgcctgtaatcccagctactccggaggctagggcaggagaattgcttgaacccagaaggcagaagttgcagtgagccaagattgtgccgttgtactccaacctgggcaacaagagcgaaactccgtctcaaaaaaaaaaaaaaaaaaaaaaaggaagaaagaaaatttcaaatgacctatgtggcttgcgtttgtggtggcgtggtatttctattggttagtgctggtgtagcctctggctaccaagcccctcagggttgggaagagacccagagctggagagttcagaagaaactcagggaccttgagtcctgcccttccccgtggcagaaggagaaactgaggctggtgtaggagtctctcccttcactcacctgggccagcgacttctcctgcgatgggctcaggtcacccacttgtccactcatgctgcccatgaatgggtccaggctccactctgtggctccctccaggtggcctgccttttgccagctggtagccatgcccacatttatcaccacccagaaatcccactacttcctgtgagcctcagggcaacaggtggggctcattccttactaggtgcctcaggcatggggccctggattcagcctgccctgggttcacatcctcacttgcaaaattaggacagcgatgtttcctcggagcgttgatgacatgttgaaattgacaccacctgatttcacacacacacggaggcggctgttcaccctgcctctcagtcccctaccctctactcctgtggtcccatcggatgcctctttgagccaggagaagtcatctctcacccccaacagaggcccggaagtcactgtcatcatgccttcactctcatcccaggcttcatctaccacctgacatgtccagagcaactgcccatgattcatcccagatgttaaggcacatggcttcagggttgaggatgaaacttcccaggcccagacccaaacaggtggatttgcaatcctgagctgggccacacttggcctgggagccaggatgagaggtgaggagggactcctggctacatctgcccccaccacccactggacaagcagaaagccagagcccaaggtgaggacacatgagatcacgcggtgtgcacggggcctggaacacagtagttatttgtagtagtctgggttgccctgaaacaaggagttcagggcaagtttattagggaggtgtcctgagaaacacaagtagggaagtgtggaaatgagacagagaacggaaggcagctgtataggcctggttatcaaggaagtacagaagagctcaatcccagtggggacttctgggagacagcagggaacctgcccatcagcgtttccttgcctgagtggggagggagctggggtatttatgcagcatctcgggacagtcttcagttgagggctgctccaggggctgtcaattctgctggcactgctggcctgctgtgcacacaattcagaaggctggagagcgtacttaggcagagaaacacaggtgctgctgctggggagtagtgaggctgaggtgatacaggcagaacatcaccagctttagctctaatcagaaaccgtttgctgggctccatgtcaagttctagtccaaaggcttcatgtgctccttgagccccagactgttcttccctacctgacagagcctggaagagggaagcagcatgcctggggccatacagccatgtagtaagtgacaatcaggactatctggacctggtgcttactcaggacattgtatcccacatgcctggctcctgccagaggcatgcacataggtggccttactaagtcccaggagagtcccccttagccctggaagagggcaatgagcagatctgcctcttctacagggtggggcctccccagtaccccacacactgcaggctggagcttgagccataaggggtaaaatcaggaactctcccctactcttgtctcctcccactgggtccctgctcccagcacctctggcccatcttcttcttcttcttccttatttttatgtatttattttttgagacagagtcttcttgctctgtggcccaggctggagggcagtggctcactgcaacctcctcctcccaggttcaagcaattctcctgtctcagcctcccgagtatctgggattacaggcgcacgccaccacacatggttaatttttgtatttttagtagagacagggtttcaccttgttggccaggctggtcttgaactctcgacctcaagagatctgcccaccttagcctcccaaagtgctgggattacaggagtgagccatcgcacccagccttggcccatcttcttcaagctggcttctgagtaagtccctcctctgctccaaagcctccctgggctccttgttaccctcagttaaaaactgtagatgccttcgcctagac

SEQ ID NO: 1562984 - DNA, 4001 bp, Homo sapiens
agttgaaaaccatctgccacccctttctgaagttacgtggagattctcccaggtgcccatcccatttcccctcccccagaacagaaggatactagaatggaatgtcctgcgtgacgaaagccttcacctggggaggaaccagagcatcagagaccatgacctcagtctactcgaggtacagacgagacactgaagcccagtgaggtcataaagcaagtcaggtgcaggctagactctcagcctaggctagactctcagcctagggatccttcccccctccccgccccagtcattgggaccatgttgcccactccccaagaggctcagggggaacagagctagggacctcttccttcaaactcacctcctttaggcggttcagctgtcatcccccgcaggtctggagggggataaaatgggataggtcaggagtccttcacgtttattccagtcacatccccaaagccatacttccttatccctgagttgggtcgggctgtgagttatccccggatcagcagttcccaaggtctgaaggaaatgctggacccttgtgggcagaagggggaactgtgtatacaggtggggagactcaggcctagagacaccaggggaaaagagcaaggccagagacccacagtgtgcctgccagccttggggcctgtacatcctactggctgtggactgactcccaatgcccaggggaaatgatcaccctgctcctcttaagcagtagagacctgggcttggcctttgatccctgaaatctcacagtggaggcagagcagaaggaaacacctcagaatggccctgggggcccccattggagacacctaccatctggtccctactctacacaggcagacctcaccctgcctgccacctgcggcccagccccacagaccatgtggttgcttccctgacatgggaggatgggagggctcctccctgccttccctgaggagatgccaccatccagcaggagtctagaccccaggaccacccactccagccctcctccatcctaccctcagcccttttcttagagacagggtctcactatgtcccccaagctggtcttgaactcctgggctcaagcaatcctcctgccttggcctcccaaagtgctgggattacaggcgtgcaccaccggcacccaaccattctacacccttttgtcagacagagctgacaaaaagctcagaggcgggctgtgatggtcaaagtcacatagcaagacagggactccgaacgggaatttcctggttgggggaggatgggaggctgctgcagagtaaatgttggcaaccaagttcccaactcggttgcccctccgagttggcccccttccccggatcctgcatatgggaggaggcacccagaaagtcttctttccccccaggagaaggaaaagagactttctggagcctccagccctggaaccgggtcgggggggaattccaggaaaacatgaagtgatgggggatgggaagttgggacaggattgggagtcataggccacgagaagagttaggagactgcgtcagtgtgtctgggtgtccgctgtcggaccgggtagggggagctggggaagggttcggagttccaggccccaaagtcggtgtctcaggcttccacggtggatgctggggccatctggggctagggaacaggagggatggtcccggcgccagggggaaagcagggagactcgcggttcgaggtggtcttggggccgggacggacggtgctcccatggggccgcagggttggggaacgatagtgccggggctggaggccggcgtactcacctctacccgggcgcgggttaggccgctcagacggttccagtccggccggtaggcagtggcggctgtggctggggccacaagcgccgcgagaagcagcagcagcgccagcggaggcaacaggaggctcatcgggacccggccgcagatgatgcgcaagctggaggcgaacctccgagtcgctgcgccacgtctgggcccccaggctggccccgcccccgcccccgcccccactcccgctagaggcccagtcccgctggagaccacgcccccagcgctcggtctccgccccaggactccccgccgttacctcccgctagctcagggcgaggtcctggctcctccctggcgtttgggccgtcactttcccaggtccgagagtgtcgacgctccttttgtcgaccgaggatgtggacgctcccccaggatgcggccaggcagcgccacctcacgccggcagagggtgccggcgagacgctgagggacactggagtttctgagccgaacctgcgactttaagatagggaaactggtaggacatccaagaaaaaaaaaggaaagaaagaaagaagaataaataagggaaactggctttctgaggactcctcgctttggagcgtgggagatgaggagtgaggttcggtggagggggtgcggcttctgggagccactgagacctaccagcgtgtcttcttaccatccacagctactgctgagcagactttctgacctggggtgaggaaaggaatttgctattcaaaggtgggaaaatgcaaggagggttacagctgataggccacaacagggtcttaaatcagctgggttaaatttatggagtcaggatttacttttttttttaatgtggctatccaattcaattaaaaatcttgtctttttcattgctactctgccgcgttacctctgttatatataaataggcaaccacggccgggcgtggtggctcacacctgtaatcccagcactttgggaggccgaggtgggtagatcacttgaggtcagaagttcgaggccagcctggccaacatggtgaaaccccatcgctactaaaaatacaaaaattagctgggcgtggtgtgggcgcctgtaatcctagctacttgggaggctgaggcaggagaatcacttcaacctgggaggcagagtttgcaatgagccgacatcctaccactgcactccagcctgggcgacagagactgtctcaaaaataaataaataaataaataggtaaccatataaatatatgggagtctacttctgaatatcataccctattctagtccttcagtgggtttgtctaactacgctgtcttattaactatagctttatagtcagacttgacatctggttgtgtgttggtcctctagctttgttctttctttctttctttttttttttgagacggagtctcgctctgttgcccaggctggagttcagtggcctgatctcggctcactgcaacctccgcctcccgggttcaagcaattctcctgcctcagcctcccgagtagctgggactacaggcacgcgccaccacgcccagctaatttttttgtatttttagtagagatggggtttcactgtgttagccaggatgttcttgatctcctgatctcatgatccgcccgtctcagcctcccaaagtgctgggataacaggtgtgagccactgcgcctggcccatttttttttgtttttttgtttgtttgtttttttgagacagagtcttgctctgtcagccaggctggagtgcagtggcacgatctcagctcactgcaacctccacctcccaggttcaagcgattcttctgcctcagcctcccaagtagctgggattacaggtgcccaccaccacgcccagctaattttgtatttttagtaaatatgggggtttcatcatcttggccaggctggtctcgaactcctaacctcaagtcatccacccgccttggcctcccaaagtcctgggattacaggtgtgagctgctgggctggctattttttttttttttttgagacagagtcttgctctgttgcccaggctggagtgcagtggctcaatcacagcctgaacctcccaggctcaagcaatcctcccacctcagcctcctgagtagctgggactacaggcatgcaccatcatgcccagctgattttttttttttttttttgaga

SEQ ID NO: 1562985 - DNA, 4001 bp, Homo sapiens
ttatccaacccacgaacaagggatgtttccatttatttatgttttctttattttcttcatgtttttcagttttcactgttcaagtctcttccttctcacagccacttcagacgttagcctcaatcttggagaactggtgaggccagggaccccaggacacgtgtggggatgtcaggcagggcctgagtaaaggtcaaaggactccttaatttttaggagaaaatatattctagcagctctcaggtctgaaagcagtgagttaatactcaagtcttcaaacataaaaagtgtcttccagcgacagattactctcataaaaaaaattgtctttttaactttaaaatatcaccaaaaatgaaaacataaagtttaagatgatcgccaaaaagaaaaacaaaaattaaaaaaaaaaaatgctcacaggacaagcaggccccaggctgagcagcatttccaccacgttccaagggtcagaaacgctccagtgggcggccggtgctgtcaactctaagcaggtcgctgggggtggggagggagagccagagccaggttgccctcagacacagaacagaacggatttggagacgggggagtgaggaagaccctcagtctgaggagcttgcttgggagatggagccccggggaagggatgctgagggaccgaggggcatttcaggtgctggagggggaggtgatgagagcacagggaggggccggatgagatgcgggtttagcatttctctgaacataaaatgtacactttcctagtcattcacaaaagcagtaaagaatatggagtaagtacattgtttagtagaaaagagcagaacagacccaagcgctgtctatacacaggaggcaggtggcgcgtgcacggctccccggtgggcctggcggcatctggacccagatcctgccttattagaccacctgtgtgcccccccacagaaatctaaacgatgcccacctcacttcggggttaaaaagggctgcccgcagggaagtcagggccaggcctccgtgaagtcagtcgcagagcgaggctgctggacgaagcggcccgccccacgagcgatcggaggaaggctggggacctgcggggttagggttagggttagcctaacctctcatcccggctcccgcccctgggtttggagccccagcgaacgtcggtaaacatgagcggcgtccctggtggagctgactccaaggtcctcggcgggttgataagcacagggcgcgggcggctgccagcaccgcgctcccgcgggtgcaggggaggccccacttggcagtagccgccggacgcccccaacaccgcgccgggcggagggaaggggcgccccggcggggaggacccacccgcgcccctcgcccgccccggcccacctggagaagggcgtgggcccggcgcccttgagctgcagctcccagcgctcgccggtcgccgtgcacacctcgcccaggtacatggcggcgccgtcgcccagctgcccggcgaactggccgaattggtggccgcagtagcagtgcgcggcgggctcggcgcccggcaggagcgcgttgccgctgaagaacagcgcggcctcggcctcggcctcgcgcgcgggcggcgcgcccaggcccagcaacgccagcgcgggctctgacagcgccacgaggcgcggctgccgcagcggggtgggctgcacgcgggtgaagcaggccccgggcacgggccgcggcgcggacggggcgccctcgggaccgggcggcggcgcctccacgggcagggcgcgcagggcgcggttgtcgaagcgcagccccgccagccagcgaggcgcgggctccatggcggcgcccgacaacgtagagcggggcgccggcgacggggaacagcgaccgaggggcaagagtcgggcagccgcgagcgaagccccgagcgctgccctgtatacggccatccgcggccccgctcccgccggaagccagcctgccccgcccggaagccccgccccgcgcgtcccgcaacccaatcgccagtgggcgagagtggggcgggtggggggaggggtcgcggtgtctggccgggctctaattggctgcctcgtccgtctatccgcatctcccggccggagggtcggaggcgtccggggtggctgtcggcgtcacggggcgcgcgctgatgcgaacggggtgacagatgggaacgcctccgagaccgccagcgacgaccccgctcgggcagccccggatttcctcggctgcaccggcgccggcagcggggaccgaggcccgcgtccgttcgggtcgggccggggcttagccccgcgccccacgggcggccgggaccccacccggaccccgccgcggttctgggccgccggagcctcgcgccgcctctcggggaccttgtcccctggcctccggcctctcgggcccctcgcctgccgtctaggagggaaggggccttggatctgtgccccgcccatggaacagcgcccgggctcggagaggccccgcgaggccgcaggcgcagaccctcccggagggctgggcgggcaccggggtcttcggctggcttgagggacccgacccctgggggaggaatttggggtctgtgtgtccgaatgaacgcgggggttcagatgagtctgtggtgcccccgctttccatctcctccggccccggccccagaggactgtctgagaggccggtggccgcggatcctggacgcgcctccctcctgcctgtggtttccctttattccggcagcggcgcgagcccacccttcacatacaggagctacatccagaagcttctcctggggccacagcgtgggcttccgagactctgcgtgaccccagctctgcccctttggggctgcgggtgaagccctcaggaccctccgcgtgcgttgggcaggtaactggatgagggataatgtggtgaggtccccgtgcccaaccctcctctgcagcccacagcaaccgttccctcttcagcagccccctccccccggccgctctgggcgcccgttcccagcatcctccttggcaggtgttacccctccccattccccaggccctgggccctcctgatctgtctcctcgaccccctggggccccagtctggctcagtctggtccacactctggaatctggtgggactgggtatggagggtcttgagtgtcagcaggccacctgcgtcccacctggtgggtgagaagggtcccacaggtcagcatggagggacccgactctgtctcttctgctggaaaccaggcaggttccttcccccagggccccggcagggccacgagtacccgctgcactggagcacgggggaagaggcagggatccttcattacctgaaccccatgttcacacgtcacaaaacaggagtttccaaaattagaatttatttcagtttctaaggaatgaatccccgagtgtggcaggaaggacacagccggctcctgacgcacacctgatttgattcaacaccgagtcggcacagacacaaccagagatggcctgggtccaggctggggctgcacgggctgtgtcctggacagccaggagggaggccccgcacacagacggccgccgggcagggggcctgagcgggacaggcctggccacagcccatgtccttggccttccacataggtgcacacattgtctgcccagagagggccaagatgccccaggcaccccttcgctccgggggctcaggacacaggctcccagctgaggccacgcctggacccagagctgatgtttggctgcacgcgagcccactcgggacagacccaagaacacgaattctctccctttggatttaaggctggtgttttttgacatttacttcagtttttctctctgaaattaaaattacctgagtaaaagattttaagacattaaaaaagccaaaaacacagaatccctgcaggcagacggtgccagggaggtggcggccagggccaggatgccaggggcacggtggggtcggctggagc

SEQ ID NO: 1562986 - DNA, 4001 bp, Homo sapiens
ctcctcctcctcctcctcctcctcctcctcctccagcattcagccccactgctactcccaggaaagcctctgctttgccttctgatgtggatggccctcttctgtgcccactgcacattttctggtactcatcacattcactcattcattcattccatcccatctaggccatttcatatgctgtcaaatgggggtctacaccagccaagccctaggcgaaattccaaggacacttatgtaccccagacaaggttgttgcccttgagggccccctgtctggtaagggtgcctgacaaataaacaaagacctctggggcacagaaccaatgctgctctggagctggattctgtagttccatcctctgtccctacaactcccctggtcccaccatgtcaacgtcagatgggcaggtgacccaggcttgaatcctggctgggtgacccttatgagcctcattttctgctcagacaactggggatagaacctaccttgctgggtttctatgaaggttatacagaatgaagaatgtaaattatctggcacaaatacgtactagttctcacccttctttagggcggggccgtgtcttattgatctctgtgccccagtctacccagcataccacaggcactcctcaataagtgaatgaatgaatgatgagtgaatgagaacttcagagtgaggcaggtatcagacacatcacctttctcttccctcagatgcttctccccatgcagagcagctgaccccccagtgagcaatggctgttgtctccgccacagtcaagggagtagaattgttgagacctcctccttcctctgcaacaaggattggaggggggctccccaagggtggggaagagctcgggtcacagcagggtgcagctcaagtctgccatcctggctagatggtccttggggcccccctcagctcctggctctcctagggcccctggagaagggggatctgcctgcagcaccctctgccagaagctacctgccccatcagtgctccagggagaggcaccatccacctgactcggttgcagccaagaaacagcccctccattcccatgctaagcaaagaccctggcacttccttttacaggcaaatgaatggctttggctttgtctggcccagggaccccacccctgtgttaggaaggtagcagctgggggagggtacttttccaaaatagcacctgcttagtgcaggccccccctcttccttccaccctgaagatggatcttcctcagccccccgcagccttcaggaccccaccgccccccacaaaggcaattccagcccaccccagttccagccctaggctctgggaaaaggaatcacgaaagctctctcggtcctttcccattcgcaggagcagagggccctgggacacccgttcccccatcccagtcctctggaggccaacgggttcccttggagaccaccagctggtgcctgtctcagcgtgtgcctgtaggggttgcgggggaggggacgtatgtatcagtgcacaggtctctcatccggctggcatggccctggcacctgtgcgtggtgtgtgtgtgtgtgcgtgtcttggtgtactccagcatggggctttctgtgcgcatctgggtccctgcttgcgtgtccgtgggtccctgcgtctccccgcgtcctatgtctgcctctctccaagattgtctctctcgaggtgggtgccaccgtgtgtgcgtgtgtccgcgcatctgtcaccgcgcgtgggctcctcggcgcggaaaccctcccccaggagcgcctccagccgcgctggccggggccgcagcctcctcctggcgggtgccggtggcctggccggccgccctacctttggacatgaatcctcctttgtctccgttcctccagggagatgctccgggcgcggggctgcaaggctgagcggggcgcgggcttccccgggccgagcggcccctgcaaacgggcctcgccccttcgcgctctcctcccacccgcccggcccgcggccccgccgcgccgcccctgcgccccgcgccgccgcgccctccccgggacctcgcctcggctcgctcggcgccgcgccgcccctgtccgcgcgcaccgttgccgccgccgccagccgccgccgctgccacccgcaccacgtgaccgcgcgcccgtcggccccgccgagggcccctccccttcccgcggcgcccgcgcccgcaagcgggaactggtcccgggtccacgctgcgggcggtccaggagccgcccccgcgggctccaggtgccaggcccggaaaggtgcctgcatcccagtcccgtctctccccgctggacctgctccccgccccttacccactgggctgcggcggggacgggcggaggggcgcaggggaccagtggcagctgcgggcggccgtgagcgcgcgtgagtcacgcgggggctggggtgttgcgcgggtgcctgtagagccgagtcaggggcccgggttccaggccctgctccagaatgatgaaccaataaccttgagccagacaggaacttctctgagcctcagtttgcccattagaaaaaaatttcacgcattcagtggatactaatggacagcatattgcctcacaggggtgaggacaaccatccctcccctcgaaggttctgggtctagtggaggagacaggaagatggaatgtcctaatgcaggggccggggtgcacacagggaactgagggtgcaggcaggtgggcaccctggggagagggggcttggaagacttcttggaggagatgagggccagatggaaaggcaaatgggagtggaagggaagaatggaaagggagaggtattctgcaaagagaggacagcagaggtgagggtctccagaggtgagagctgcgtggtgctggtggacagcccagagtccttggtgtcgctgaagcagagaaaattccagacaggtgtgtagagctaaataagaggctggagaagtccgcacgcagccttggaagctggattttaatggaaggtaatggtgagtcactgacgaatattaagccgaaagtgctgccattcaatgtgggagtcgttgcagcagttgtgtgtggacagggaacaagctggtgggtgggaggtggcctcacaggggcagaaggatggagaggaggggacagccagccagatagttgagtactgaggaggtaaaccaacaaggtgggaagtagactggatgagatggcaagagagagatgaggaagaagaggatacccgggtttctaggcacctaataaaaggtaggcaatgcctacagctgagagagtgagatcagggaggcaggagtcagttcaagaagaaaagggctacctctggacatgcccgggagacatccgggtagataagcctagcaggctgctggctgcccacatctgcacttcaggagacagggctgggctgcagatggagggagagctgagatctcgtagggagaagtgaagaccagaatttaggtgaggtgcccagactgagtgtgtggggtggagggaaaggggtctgacaatctaacgactcaattaaggcattagactggatgccttctaggcacctttccagacccaaaaactctgagcccttgaaatgttgggaatgaggctgcccaaagtagagattttaacaatctggattccaatcagcttactgccaccagccagctttggtgtgactttaggcatgtcacaggctttctaagaccaaatgaatgtccagcccttgtgttgccctattttagagttctgtgtaggacttccatatatacaaggctccaacttacctttcaggattaaagggctgggggtgggggaccaagaaagagacattcaggtaagacaacttttaagcaacagataccttcctaaaaggctgagcgtaaatggatttggaaagtctcgagtgaggtcattatctcacatccagaggaggctgcagagactacctattagacaaatcacaacttcctaaagc

SEQ ID NO: 1562987 - DNA, 4001 bp, Homo sapiens
tgaagtataggcagcagtgcactcggttgtcttggatgttctttcggttgaggccgctctcatcacggaagtactgctcaaactgctggtccacatagtcggtgatgggcttccagctgtgggcaggagggaggtgaggccaggcctcgagtgctgtggccgcctaggcaaggcctttctcagcaggcctcactcaccactcggtgttgttgacagcgtccccgaatcccggcgtgtccacgatggtgagcttcagcttgactcccttctcctcaatgtccaccgtgtgttttagaatctctaccgtctggctgatgcgctctacggggaaggggccactggaagggcctctccaaccctcagcccctcacccttggcagccaggaccctcgtcctcatccatcttggtgccttggccctacccccaggggacccacaccgcgagaacagaacagtgggagctggacctgaaagggagtccttggagaggtcccatggaaggggactggggatcagtgccagggcctcctgggggccactcaccctcagcactgagcagcttccggtccttgtacaagtctgtcaggaagaggctgtggaccagtgtggacttccccaggcctgactcacctgcacacaggtacagagaaggagctgcgttaggtctggggctccaacgacagagcttggctggccagtgaccccagccactcccccgaggagcctggcccactcaccagccaccatgagtgtgaagtcaaagcctttcttcaccgacttgcggtgcacctggttgggcagtgtggcgaagcccacgtactgcttgtcaatgtcctggggacaggatggaacagggtagggacacaaaggtttctccagaagcccaataccctgtctcttaccaaatgcggtatgaggagacagcagagggtacggttcccagggtggggcatttcgttggcaaaaataaggggagggcccgtgggcaaaagcctggagataagaaggcaggcgaggtggtggcaggagaaggcacccctggccccaatcccagggagggctctgcagggaccgacactgtatttattccgtggggagatgtcaggccgcagcaggcacaggcgatgtcctccctcctcgggcagagggcagcaggattgggacccctgggacacactcaaggccctccataagccggagaagctgggggcctcgacactcacccctccggagagtgccagggggcgggaggccccacctggcccggatccagccgcgggggcggcggcagcggcggtggcggagcagcgcctatttatagaccgcggcgccgagcctcccccgcccgcgcgcccaggcgcccagcccccgcagacccttggggcccctggaggggtcccacggccgcattctccgccgcgttttggagtcgcgtgaggtgaggcctggacagggcacgtcgccccaccgtggggccgcggacctgcgaggccgctgcggagggaagggctgagcctaggcgctggcgggccgtggcgcgcggggacggggaccccatgccgagtcccggagcccgcggggtcacagacccacgttccgccctctccacacacgcaccttgagccgcctctgggcctgggtccgcggcgacagcagctgctccaccaggcggtcctggggcgctgccagcgagtccatcgcggcgacccccccaggcccgggggcacgctcggaccccaggcccggtcaggccgccagagcccggcgacagcgagggaccttggcgcggctctgccttaggctgcgttgtccaccccgttttgcggacgcgggaagtgaggcctggacagggcacgtcgcctacccgggggatcgtcgacccccgaggccgaccgagccatccccctgactgggcgaactggccccaagctgtggcggcgtcgcagtccgggcaggccccgctcccgcacccgagccagaggcggggcgtcgcaggcgcccgcggagcgcgcggcggggggcggcagagacggccccgcccgccgtcgccgggaaacggtcgcctggaaattgggccgcgggcggagccacccgaaagcggctgcggagggcagggctgagccgaggcgcggtcgggccatggctcgcgtggaccgggagccctgccgcgcccccggggcctcagtccgggctccaggacagcaggaggggacgaccgggtcctgcacgcgggccggggcgggccgggagtcggtagccaccgcgcgtcccgcccccaagaggtgctgcgcggcttccgcccgccagagggcgccggaggccgctcccgggacccacgcgcaacagcgcgggtacccgcccagttcagggcccgccgtcttctcgcagacttgcccgaaaacctcccggcggcgtctcgacgccccaagtgcccacagacacgccgcgccctgcacccctccccagccctgcttggggctgacctcccccgtgcgtgcgtgcgtgcgtgcgcgcgtttgtgtgtgcgcgtccgtgcgggtgtgtgtgtgtaatgtgtgtgtgtgtaatgcctgcgtgtgtgcgcgtgtatacatgcgtgtatgcgtgtgtgtgtacgtgtgtgcatgcattgggtatgtgcgtgtgcgcgggtgtgtgcatgtgtgtttggtggactctttcccaagacattcgggggaccggaggagggcagagcccaccttttctgaagtccagcctgcctgtcccctaggaggcttagggtggacagaagggaagggaagggaaaggaagggtgcaggctgccggagtactggaggtccctgcaaaacttggaagcccccgccagcctgctgaataaacgccggccacccatgcgctgccctgcagccctcaggtggccctgccctcagagacaggggtgggggtgggatgggacccatctcccacgtgcttctgtggacattcccttgccctctgagcatcctcaccagctctgacccacaggattggagggactgggagctcctgccagccgggcctccctcccatgtggctactccagggactgcgggggtctcccgagctccgctctgtgggccacccacctccatgaccccagtagaatcccaacaggcaagcccagcggagcaggacatggggcctggaaaggttccagggtaggactggtcaggccaagcccctgcacattagaacattagaagctggaggccccaaccccaccccaccccacccgccaccagccctcccttaggctctcctggctgagagacctcctccacttcctgtccaggccctggtcctgttgtggggcctggaccactggcacctggggaggaggggcaggcccacagctgggaacaggagagcctttcatcccagggaaagggggcagctccaggccccccagctctaccagtgcatccctcagtccttgctgccagaaagcctcctcactggccccagccttccatggccctgacctgcaggaagcctctaggctgagtcccacccagtttccaactgagggtccacacctcgaagcccagcacccacccagacaggctggcatctcaggcccagggcatctccaggaagacagacagccctgggcctaggcctcaggctaggaggtgtctaacagagtgtgtggctctcagactgcctgcctcagtttccccattggtaaggcacagcctctggggaggcccaggtcaggagggcaagaatctcactctcagcgttcaacccacctgccctgccacccactggggcccagtcagggcctgtggattccctgggggagcctcaaggaaggggccgtacctgccaccccctttctctggtccccaagtgacaaaagatactcccagggcttcctgagccatatgacacagctgcgcccatctcctcccaatgcctgagcctctctggcacttccattcttagaatcacccgagtcagctctgggagcagcagcc

SEQ ID NO: 1562988 - DNA, 4001 bp, Homo sapiens
tcacccgagtcagctctgggagcagcagccagggccaagagatcaccggtgctgcctgtgaggaggtgggggcacagagcgtagtgacggaactcccccaatgcctctacagccccctttcaaagagcaaaaagaatgcttggacaggctgaggctcagcaacggtggtagcagggaagctgccatgtgcttccagctcccccagacccactggtcacccagacacctggcctggctcctgctccggggctcccttccttggccacacagtgccttcttcctctgggcttggaggcctgggaggcctgggatggggtgaggtggactcccggttgacctcaaacgatgggcacctcagcaggagggggtccccaccctgcagtaatgggcaagagaacctggctgcacccaacagcagtggctggagcccagggtctcagagtgcccttgggtcaagctggggacacctgcaggcacaggagaagcctcaggggcctggcctcctggctttcccagcctcagttccttccatttccctcaaacagtagcctgacgcatgtgtccctgcatctcaggctttgtctgacctgctgtgatggggaggcagctcccagcctggctccccaaggggcccctcccagagagcctcatccacctctgggtggggtgtgtcccttccaggagaatggcactggtcagccagtgactcccccagctcctggcccccctgcccgccctcctgccctgcctgctgcaccctgggccaggactctggagttccactcagcatccatggctcctgagaaactccatccctgatgggggctgccagtgccaccctggtgccagaattgggctcttcttttttcctccaaagatggctgagctcaagccagagaggacaccagcaggctttccccagcccccccagcccacctggttgtcagcccccgccccaccccaggggcctcacagcattgtttaaccctgagctcggctgggtttcacccaggtgcctagaccagcctcctgtccagtcttgctttcctggagggtggggccaacccttttgagaagccacaagcctatttgtacccacagggtcccaggacccatctgggcacccagaatgactcagaccagaccctgggggttcccaatctggggaagagtccctgttgcagacctgaacactcaaatttgtgtatggggagggaaaggggcatgaaggtgcaggggaggtgggtggtgaccacaggccctctgctgtagggctgttcagggactgtgctggctgatggagcctgactcccctcccccagcgtggcctgccacgaccatggcctcacccaggacccccagctcatggcctacaggccaggtcagcaggagatgctggcactggccctgtgggagggggacactctgcccatccccccatcctggggaggggcgcagggtccctgctgtgcgggtccggggaccagggcccccactcctctcctctgaagccccaggcgcggcggcactgcccggctgacaatcggtgatcgcgacagggctgggtgagggccggcgggggcggggtcgcgcctgggcgcccaaggcgctagtgtcacaatgggtgacagccggccgggtctcccggcgggggagcggcgctgcgcacgtacctgcttgtcctctgcggggtcggggtcggggtcgagtccgggtccggttccgagcgggtccgggccggcgggcgggggagagacggagagacacggtgagaggcgcgcgggcggcggggacaaaggcgcgcgcgggcacgcgggcaggcgctgggctcacctggggtcgccagcttgctcttgtaccgcaggcctgtgctcatggtggccgccggcgggggacgtgcggggcgggctcgcgggcggggcgcgacgacaagcggcggaggccgaggccgggctgcggggtgagcggcccctccgcgccgccgccgccgccgcccgctccgcccgcgcgcccggcagccaatcggcgcccgccgcgcccacgcgcgacccagggcggcccgggggggcggggacccaggtcccccaccatggacccgagaccacggcctcggggcgacgccctcgcctcctacagccctggccgcgcccggggtcacccgaccagacccgcgccgcccccgccctgcacggctgttcctgccggcctcctccccgccacctccccggtgccgcagcccaggcccagccttacgctccccccgccctcgctgggacccgggtccatgccggtcctcggaccatccgtccggtggcccttctctaaagcctgccctggctttccgggccagaccctgcacgctccgccccaccccgccgaggtcagcagggatggtcctggcgcggctggccagtgcccagcattgcccctgctgaccgctcggtgctgcgcagacctgctctgcgagcagacgcacctggcaggctgtaggccacaggcttttgggcagtggtccggcctctctcttcctgggctgtaaaatgggattatttgtgaagaggagtgatctgaggtgtctggcaggaccggccctgaccgtctcaccccagctctgcgcctgcttctctgctgacccataggctgtggggatgctccaggcagacccgatcccaccctgcggagaaggcttgtaggggaccgaggggcactgtgaaggcagggccagggcctgcaccccatttacagagggggaagttcaggccctaatcttcagtgagtcagccagactcagtgactgagagcaagtctctccggtcatttgtgtcactatcacattcccaggtgtcctccgcctggactttcccaaagtgtccccaggcggcatctctgaaggctttggggctgtcaggcttgcggtcaccacctccccaggtgagggcccccttgtatggagatgtctcctgcaccccgtatagacagtacctccacagccagggaatccgcctctgctccccacccgtcctgtgccccttggtccctctgctggcccgtgggctccctgggtggaggggggtgtcgctagggcctttccatctctgaatcaccagcacccagcacggtaagtgaaaaattcatgtaagccgcgtctttgttccacagtccttgctctgctgcattctgtggccagagcgccgttgaccataaccctgctctgggtctagaactctaaccagtgtagggatcccccacagtcccaacctctcatccaagatgtgtttggaactcaggcttttttgtatacatcatacattatgtggcacctctttggaacctggggctgctcctcataatcagacccatttatattttcggggcaaaacatatgtattcaggtgaactggaagaaataaagacagtaagtgatggcgcatcgttcaggtccagctttgccactgagttttgaaaaacctttatgtttctgagctttggagaatttggaatttcgataaagaaatgtgtgttgaggtcaggagatcaagaccatcctggctaacacggtgaaaccccgtctattaaaaatacaaaaaattagctaggcatggtggcacatgcctgtagtcccagctattcaggagactgaggcaggagaatcacttgaactcagaaggcggaggttgcagtgagccgagatcgcaccactgcactccactccagcctgagccaaagagccagactccgtctcaaaaaaaaaaaaaaaaaaaaaaaaaaaagaatgtgtgtgtgggggtaggggcactcaaagggccaggcaggacttctgagcatagacaggactttttggaaagaattggaaaatgatggttggctgttcaccacgtgctgacccatgcaagcctgtgcttgtggagacaaaggaggagagacaggagccctgcccagggggaggcaggcagcctgtgaaaggcaccagctcagcgcccctccccatggctcaggtggca

SEQ ID NO: 1562989 - DNA, 4001 bp, Homo sapiens
gcctgaggtcagagggtacagtggtcaacctctgactgaccctctcatctctctttgcagatctcataagtgcaggggaaaggggtggggcagcagctcctatccttccctcccagccctactccgggcccggtcagctcctggccactgtactcaccgaagctgtggcccagaatggagaatcgattccatttcaaggctggaaatgcaaggagccagaaggtccggctgggcacaggctcagcccacgatcttgcttctagtccccaggctcaggaaatcccttcccagcatctggggtgtccacccaggacactagcttgggggacccactggaggaagcgaactcttcaactttcccaagatctcccgtgaattgctggcagacctggggccagagcccaggccccactctcaggccagcgctgcttcctggatcctaccccgcctccagtgataagagggggtgccctagagcaccccccacaccgccgaaaatacacactctgtttcttacctgccacaactcttcggatctcactcacaaaagtctggaggtaatatgggacacctgggctgtaatgggacgagagcccatgacctccgaaatccatggcaacgtaataaaagtctgaaacagagagaagcgggttggagggtaggaagaggtgtctatgccagctgtctccccgccctcctcattcccctgcagacctcccccctcaccttcctgcccactttccccctggccttcccttcagccccagcctcacaccttgcgggagaagagggatgagtctgtcgaaggagctggcattgtccagccagccgtgcaggcagagaactggagggccctgcagggagccccaggctttggctgcgatgtggccccagggcacagccagcttcagctctgagatcagacctgaaagacacagccgggtctttcattccttcattcattcacccatgaagctggtgctccctgagccccttatctctgcctgatgtgcttgagccaggggctcatgtccagagggactcagacccttagctgccccagaaggttatggggagagagtcagacatgggagtggagactcccagaggagggacagagaagttaagccggaaaaagctgtgacaggcctcagagcatgcaccccatttaaactggggcagaaccttctagaatgtgctggggcgggggcgctggtcaggcctggaccccatcacttgctggctgggtaaccttggagaagttactaaaacgtcttgagcctgtttcctttcctgtaaaaccggagtaaagaaacagcccgtttcctaagcctttcccaaaggccagaggggtgccaaaccctcatacacgcagcaggtgggaccactgtcactctccctccacagagcaggaaactgaggcactgggagctgcagtacatgcccaaggtcacactgggcgacaagggcggagtggaaatttagggcaggcggtgggactccaggaacccccaccgcccccacatctggcagcctcctccgtctctgcaaggctggagacttgcgcacccccgacacccacgcgcacgctcggctaactcaggggctcctggaaccctgggaggccacgtgcggccgtgtcccgggtcccccaactcctggccggtcgcgctctcatgccccgggactgccgaggaaggagctgcgacacccaggagggcgacgcggtcggcgaaccctccactccatcccgccctcttctactgtcccaaccaggtgggtgggcagtgggacgctcgcacaaggcctccccgtcagacctggtgcggcgttctcactcatcgctctcgtcccgcgaatgcgctgctgtcactccctcacgcctggctaggtcgcaggagcagagtgacgcccgcaattccgggccctatctccaagctgtcctgccccgccctaccccaggcaggccccgcaactccagcagtccccgcccccactcagaaggccccgccttcccaccgccctgcccgagccccggcgggccctgctcccacagccgcgggctccaccccaggaaggtccacccccaccgccaggccgcgcccccacccgccaggcccggccttcccgccacactgtccgcgcccaccggcttggaacccagcagggcgccaacccccgggcagtcctgatggccgcccccacgtccgcgcgggaccagacccggggagcaaccacagcgagttgggcctctgaatgctcgctggcccgcgccgcagggctgaaggctaccctttgtttagtggcttactagcccccttgacggacagcctgcgtccaccgtgtccccaccgtgtcctgggattctcagcagagcctggcacaagccagtcttaataattgttgtacaggccgggcgcggtggctcacgcctgtaatcccagcattttgggaggccaaggtgggcggatcacaaggtcaggagatcgagaccatcctggttaacatggtgaaaccccgtctctactaaaaatacgaaaaattagccgggcgaggtggtgggcgcctgtagtcccagctactctggaggctgaggccggagaatggcgtgaacccgggggagcggagccagcagtgagccgagatcgcaccactgcactccagcctgggcgacagcgagagtccgtctcaaaaaaaaaaaaattgtacaggtgaacaaatgaatgtataaattggggacgtggaggaaccctccaggtgagggattataaacaatatctgcctggaaaggatcgaaaaccccaagttatgaagaggatgtttggggtgagcagattcatgcactaaatcctacaatgaaagagggaaagtgcaccctttgagtctgaaacagtggcaagtctaggacaaataagaacaagtactggtagtgaattctcttttttttttttttttttttttttgaaacagagtctcgctttgtagcccaggctggagtgccgtagcgcgatctcggctcacttaaacctccgcctcccggattcacgccattctcctgcctcagcctcccgagtagctgggactacgggcacccaccaccacacccggctaatttttcttgtattttttttagtagagacggagtttcaccgtgttagccaggatggtctcgatctcctgacctcgtgatccctccgcctcggcctcccaaagtgctgggattataggcgtgagccaccacgcctggccaagtactgatagtgatttcttataattttatgttgccttggcatccattttgataagattcaaatttttcctaccagaagtagggctcagtctgtgggcggcaagccacccaggtgccaaggcaagagaccgagggcacgagccgtaccagtataataaaatatataaaataagaatagttatactagatatagatcatagatatgattatatatgaatatcattaatcattagtttgtagcaattactctttattccaatattataataatcctcactctacaatcataacctaggaaaaatcaggccatacagggataggagctgaggggacatagcgagaagtgaccggaagacaggagtgcgagccttctgttatgcccagacagggccaccagagggctccttggtctagcggtaatgccagcgtctgggaagacgcccgttgccaagcggaccgtggtctagcggtagcatcagtgccaaggagaaacacctgctacttagcagaccgggaaagggagtctccctttccccggggtagtttagagaagactctgctccacacctcttgtggagggcctgactgattgcccacagttatccggaggcctaaccgtctccctgtgatgctgtgcttcagcggtcacactcctgtttcactttcatgttccactctgtacacctggctctgccctctagatagcagtagcaaattagtgaaagtactaaaagtctctgatatgcagaaa

SEQ ID NO: 1562990 - DNA, 4001 bp, Homo sapiens
cctgccttggcctcccaaagtgctggaattacaggtatgagttaccatgctcagcctctagaaatgatttctaatgtatgtagctgcaaatagaactgggcccagtttctgaatggcactttgagtaacttagcttcatcctcccagcattttacatatcaggagactgtgtatcaatagcaacacacttttaaaagtcaggaacaaagaaagtaagcagctggtagaaggctccttgcccaactacacttcaagtgtcctcctcttatcacttcttggccttttggctaagatcaagaagaagaagaccaggcataggggctcacacctgtaatcttagcatcttgggaggccaaggcaggaggatcgcttgagcccaggagttcaagaccagctggagcaacatagcaagacctcatctctattttaaaaaagaaagccaaaagaagaaggaacaaagggggaaaatgttttcttctcagataaaaataaggttaaagaacaaaacaaaaaccaacttgaataaataagcattcaggaaaacgtatctgaggccagatagagtggcagagtaaagacatgcatgttttatcccggtattcagaagttatatttggaaacttcttataccctgttcccacattatctgataaaaagccaaaaatagttttcgtcattcccttaccagaggaaggagaaaatatctctgatatcttttatggattgaaattaaagatctgaaggtaaatcttcctgatgttttgctatttagtataacaaacattgtagaagacgtttaaaaactatcactaggttgtgattaaatccagattactgtttgaagagaaacaatatattttaaagataaatcattcaaaagtttgttttgctttttttttttcctgggaacttcatattgtgctttcttgctaattgccagagctgggttggccttttcagtcacgcatcagagcataacacttgataaaccgtcatccctcctggtgtatggtctccaggcccaacagagcaggcagaatgggagagaagtaactgcctaaagtttggaaaactttttattttgaagtaagttcaaacttccaaaaatgttgaaagaatagtgtagtagaacaactcctgtatacccgtaccgagatttaccaggtttaaaattttggaacctttgccctgtcattatctgtgtgtgtgtgtacgtacgtgtgtgttctcacaggcatgcacatacacattttttcttctagaccatttgagagtaggtctcctatatcttgttcctctaacattttttcttttttcttctttttttttttttttttgacggagtctaactctgttgtccaggctggagtgcagtggcacgatctccgctcactgcaacctctgcctcccgggtttaagcgattctcctgcctcagcctcctgagtagctgggattacaggcgcgtgccaccacgcccagctaatttttgtatttttagtagagacttggcttcaccatgttggtcaggctggtcttgaactcctgacctcgtgatccacccgcctcggcctcccaaagtgttgggattacaggcgtgagccactgcacccggcccctctaacctttaatactaatacttcagggaaaatacccaagagcaaggatattctcatacataatcacaggacagttatccaattcgattaatttaatataagtacaatattttcatctattccacagctcctattctaagtttgtcaactctcccaacaatggaactgacacaattttataataggcacactgaaaaatgaaaccatttcccacttctaaaacagtgtagaaagcttctgaattcttagtttgctagaaaaatgaaccagttgcctatccgtaaacaccaaaaataatttataatcagcagaaacattagaaacccaacttacctctgtgtttctgagaagtggcgcttcagagatgaaagcagccaaggtcatcagtgggattttgatgtgaactttggtgctgggctgttgctgcatattttccaaagtaaataagtcccaatccaaacaccaggcaaccagcttggtcagcacaaaccccctcagctgtgcctttgataactgtagagtggcttgcagctcctcatctccagttcttagagctgacactttgagtatatgacggttactgtgttagcatgcacacatagccttggtgcaggagcagcccctcttgaggtcaccacataaacaaggcgctcttcaggcctctggggaccaggctgcattgagggtagctgaaagtagagaccatgcatctgcctccaactgtgtcctctcttctgggatgatcacagcatctgccctccacctgctctccaggactgatgtggctggctcagctactaggcgggtgtccctgtccttccaagagctcgttcctcagtgaaaggtggaggagagaggacaaaattagtggcttacagaataaggggattgtggcatggacctttcttcagtcaagggttgctgtgtttgttgccagtaggtgcagcccagcactcctgtctgttgtgggacagataggactattactgagcagtgcctcccaaattcagggccacttaggcattcgtggggatctctgaggctgtgatacattttgtgtttatgggtgtttgtttgtttgtttgtttgttttgagacagagtttcgcgctgctgcccatgctggagtgcagtggtgcgatctcagctcactgcaacctctgtctcccaagttcaagcgttctcctgcctcagcctcctgagtggctgagattacaggcgcacaccaccatgtccaactaattttttgtatttttagtagagacggggtttcactatgttggccaggctggtgttgaactcctggagtgaagtgatcctcccgtctcggcctcccaaagtgctgggattacatgcgtgagccaccacgcctggccctatgtgttttttgagacagggtctcactctgttacccaggctggagtgcagtggcgtgatcttggctcactgcagcctcaacctcccgagctgaagcaatcctcctcacctcagccctgcaagtagctgggaatacaggtgcacaccaccatgtctagctaacttttgacttttttgtagagacagggtctcactatgttgcctaggctggtcttgaactcttgggctcaagtgatcctcctgcttcagccttgcaaagtgctgggattacaggcatgagtcactgtgcccggccttatgataatttgttttttaatttgtgttttaaattttatgatctaaaaagttttaagaatattctggattgtctggaagatcagcttatcacagagactgctcctcaagagcatgtttgggagtgtcggcacccagagtctatctgaagagagaatgtgactcctaggagaatctgcgggtgtgcaaggggcccatgggggtgtctgtgcattgctccgtttgagaaattccagagtgtaaaggtccattgtgttcaggacacagaccggtggttgtgtctgagtctgattttgcactctagcttttgtcagagctgtcttcttagagccttcatctgtcacatacaatactgagtcttcagcgtggcaccacaggcagaggctgctgtctgtgcccacactcctcgtgggcccacctccctcattctctgtcttgttctcacacatgcaaagcccggccccagcacagccctggcacttgctattctttctgcccaggacaccatccctgcagaccagcaggtggccgctgctctcactgttcgctcttggtttcaccgaggcgtcaccagccaccctggctgaaattgccccttggcctccagctctcagtattctgctctctgaaatgagggtgacagttacacctactgcatgaggttgttgtgaaaattaaatgagatacattaatttatctcattaattaaatgag

SEQ ID NO: 1562991 - DNA, 4001 bp, Homo sapiens
cagaggtagaactgctttagaaaatccagtaagctgctgggtagattcaggttctttttatatgtgtgttagtcacaacacagattcaaaagggggtgggggagggagagctggactcagttcaaggccaccaagccattgttagaaagagacagctaattaagaaaggccatgctgtggtggaaacgatttgtttaaaccaaatctctttccctatctttcccagagaaactgtccagacctggtgtaaattgtggacattattgccccataaaaaaggggtgggggttcttcaatgatatgctttgttaaacaaaaggtgatgaacaatttcctttgctctgcactctgggctctacatttaaaaagacggggagatgggggataaaatgcctgatttatgctgaggggggcactccaggccaccgggaagggttgaagggaaagggacccagagccagggcccatggagctgagagctgtccagggcctttggtgctgaaagcaggtgcgcgcgctgggggtccagaactccccggagaagaacaccgcctgtcccccaactccgagtcaagacggtgcaaatgacagaggcggagccccagataagcatagtgcctgcgctccctctgtcttcagcctgggcagaccctgcagctgtctgcttttttacacgtgaggagcgcatttctgggaccttgcaagaaggccgggtcctgtggccaactaaccctcccattgattttcgggtctcctaggtgcctgagaaaacccccgaagctctgagggttagctttgggtgagttaggcgttgcacccctctctctatctggccctctcccccacccataacttttcctggggtaccttaccggggtggagagagggtatggttccaggtctgagaaagaggagctgtcattctctgctaaatttgggcccctcttccccttcaacaaacacgtggtagatgaaactaacacccctcaccccccattcctaacagtgatcagagatgctaggcagtaggggagagagtagaggggagcccgttcaggttcccaactgctaactaacatctcttctccctcccctaccaagttctcagagccctcagccccctccaccggcctctagcgaaagccacacccaagtccggtatcctgacgcttggctgagatcgatccaggaacacagaccctcggggtagcctgaaccaaaggagtcaagggtttctgtggtgtcggggggagcggcaaatgcactgtttgagtctagtcctcagttgcagggtgggtcagcttctcaccccccttcctgtcctctcccggagaggaagataattatctggcacctagccccgggtgcggttgcagagaagcgccgggaatttggggtttggaggcgaccccactccaaggagaacctctttggctgcaaaggagaatcagccccgcagccggggaagaccgaaagggagcccgcagccgaagcagggaagcgcccgagtccttcaacacatccccgcctccacactcccatcagcccgggccaaggggacgtgcggttcctagccccgattttggacagccaccaccgcttcccatcccggcgggtggtgcctgagtcgccctggtcagccccgacccctggctgccccgctctcccggcaactttgccccctgcccgccccgcccctcggggcgcttacctcgctccagcgctgccgccgggctccccaggagcagagcgaggaacagcgagatcccgcggagtcccgcggcgggcggccgggccgcgggcatcgtggctgcagggggcgcggagccgctggctgtggggcgggcggacggcgagggagctggggaaggagggcggcggtgagcgagaaaggggaagcgggagcgagggaggaggccgcgggccggggcagcttccggagccccctgggcggacgcgcgctcagccccgcggtcgctctggccgagctgcgccgggcgcgggcgggcgagtgaggaggagccggcgagcgagcgaacgagcgtggagcgagcgggaggagggagggggctggggccgagtctgtgccgagcgagtgcagggagggagggggcgggcgagcgggcagtgagctggaggggccgcggcggcgccgggggtgccagccgcctcctctggccgccggcccgtcggccctgcaaagtttaacgccaattccccttgcgtcctgggagccgagcgttttctctccctgctgacgctcccagcagctctgcctggccaggccaggctggagagcacccggaccattttccagacggtgagatggagccctggaaaccgagcttatgagcagcccggagctttccattgcctgcccagccttccagatacatcccagttccagttctttccagagccctctgggatccagccagcctgcttccccgccagggcctcactgcttccaaagtgagtccccataacctagaaagtctgtaactctgtggatctggtgacagctgtgaatctactagaacactacacatagccacaaaatcgtgcatctaacacgagggggtctggacccctctgaagcccaatcacgaactctaaattaagatccacctccactttttaatctgagccctgtctcccataaccccactgccggcagggcactagcgctgcgaggcttcctctcaggtcagccgcttgcctcttcctgtacccgcttccctatctgagcaggactacaaggcccacctctgcagcattcttgcccaggcctgattctcaagcaaagtcttttctccacaaatagaggtagtgagggacaatcaatgagggagataaacagatacttggggacagacattggcagagagctaggtggggacaagcttatgcacagtcctggagactgactgtctctccctgcgtagccttggcagaccggtcaggctttacaggcctctcacccaatttagaagctgtcctcctccccctaccctaccttgccatactatctacacactgcagcctgaacaggcagagggagcagatggagagaaggttgcaggcagcaacagggggaggaatatgtctttagcagcgtggtggagccgggagtccctagaaagaatgggtgggggaggtgaacactggatggaggagggaaggagaagcactctggcccagggtttcagaagacgctccacacccagagcttccccatttactcactcaaacaatgctcttttacaggccactgactataggcccagacctgcctcaggctttgggggacagagagcccccccataaaatcctatcttcagctgcaagaggtttccattcctggcagtaaacccaactggcttttataaagaaggtggctgaggcagggatgcaggagtgctgatttctcctttggagaagatgaagcactccatgctttactgtatgaggctgccagctctctgtggaatgaccttgcctgtttgtggctatacgctcaggctctgtatagtataatgcaggcatgcagcgggtgctcagtgagacttgttcaatggaaacctaaagaagcaaggaagatggaggaggaggggaaagggaagaaagcgagcgagagaaaaacgaagaggtagtttagctccatacttggaggcaaggaaactatttttaattcctaggttcaggggtacttgtgcaggtttgttatgtgtgcaaacttgtgtcatgggagtttgttgtacagatgatttcaccaaccaggtattaagcctggtactcaatagtaatttttttctgatcctctccctcctcctgccttccaccctctggtaggcctctgtgtgtgttgttcccctctatgtgtctgtgtgctctcatcatttagctcccacctataagtgagaacttgtgatatttggttttctgttcctgcattagtgtgctaaggataatggtctccagctccattcatgtttttgcaa

SEQ ID NO: 1562992 - DNA, 4001 bp, Homo sapiens
tgagtagatcccaggtatttttcccaagcactttaaatatattaactcttataacctttagaagaagcctataagattaagtactctttttttttttgagacagtctcttgctgtcgcccaggctggagtgcagcggcatgatcttggctcattgcaacttctgcttcccaggttcaagcaattctctcccgaatagtggggattacaaacatgcaccaccacacctggctaattttttatttttagtagagacagttttgctatgttggccaggctggtctcaaactcctgacctcaagtgatctgtctgcctcggcctcccaaactgctggaattacaggcgtgagccactggacccggccaagaactcttaatatctccacattacagatgacaaaactgagagatggagagcttaatgtccaactggcagaaccaggattctaacacaccactctggctgaagagcctgcctaccccctctgccctaatctcggccaggccttcagcctctttggaatagcgtgactggcctcccctcatagtgattctccacacgtctgcctacctgaatttctgaaacacaaatgtcactatttggcttaaaacactcccttttcttcccactgtctacaaggaaaagttcaaatcctaagtaagaatcgcatctcctgccactacgctcctaagtctatgcttcaacacttgttcatttactcttgatcagagacaccgtttgattcacctcggtgtctttgcgcatattatctggctattaccttattttcccccaatgcctgggaaaatgccagggacacacgggcacttaaatatttgtggaaaaggcatggcttcttcagtcatgttccccccccccgccccccttattctgaacccaaagcaatgatcagcgtatgtgttcaataaatatttgctggatgaataaaggatgctatttcccttccctagtcacctacctggcaaactcctattccttcttctaaaagaaatttacctctcactcttgtgggcttccctaccttaatatcccttctagcccagcaaacaatgttcattagatttgtacctgaaacttctatcacagggcatatcacaccatactacaatggtttgtgcacattcgagattggagagctttattaagggcgggctggcactgtatcatcgatggccattgggacaacaaacatttggtgagcattctcatatgtctgtcttctcgttagcctgtgagctccctaggcagggaccatgccccattcattccggtaatgtgggagcctggcacggtgtctggcttggggcagacaccgaaatagatgctgagaattaacatccaaagatgtaccgtgcaggctgggaaattagccattactggggaaaggctgtggccggcggccccaactgctacataagatcagaggatgggctggatcagcgcctctcgcacttataaatcaatcaccttaggattttgttcaaatgtagattcctatttaaaagatctacggcggagactccacatttctaagaagctcccggctcgtgccgacggggctgctccgcggaccacttagagaatcccgttcagggtggctcatttcgctaccagaacaccaccatagcgcgggaagcgcgcagcctcttgggacttgcagtccctccaagcccttcatagcggccggccgcttattcctgtgcgagtaaggagcgcccaggccaaccctccggctgcaggctgaggggcgggggagaggtacctgtttgggctccgtgggcacgggcggcggcgggggcaccgcctgcacgggtccggccggcatgactgcgacgctcagggctgccagtccgcctcggtgtcggtgagcggtgccgcctcaagacagcctccccgctcggtcagtacgacgagctcgcaagatggcggcggccgagcgagttgcggccgcgaaggtacgactggcgcacttccgggaccgtcccctcgccgtgacgcgcttcccgcccctccccgcgggcaccgcggcgtccgacgccgttgccaaggcagcggcctgagcgcccggctagggcttttcggggatcccggtggccgcaggcgcaccgggggcagttccgggagccgaccagacacgaaggctgaagccgcgacgccgaagacaggtgagatgttgtacgtcacccgccggacccccgccgcactcacctcgcggctcctttactccacaggccagtacctcgctcccttcgaccccgccttccaagagcccagctccctcccattggtctctcatttaggagagcccctgtcccctcaggctcaccgcctaagagccccacttccctactcccttagtcccccctttcatttcagacccacatcctccaagccccgcttccaaatcctacgcccttaattcgcttttcccacggaacctgccttttcttgcttccatcccctgccttccgtagtcccgccctcaagccccactgggggcctccctctcaaatcaaggctgctgctttctttgtctttcttttttctttttttctgagacaaggtcttgctctgtcacccaggctggagtgcagtggcgcgatcttgactctctgcaacctccgcctcccgagttcaagcgattctcctgcctcagcctcccgagtggctgggactacaggcgcccaccacacccggctaatttttttttttttttttttggcatttttagtagagacggggtttcaccatgctggccaggctggtctggaactcctgacctcaaatgatccgcccgcctcggcttcccaaagtgttagggttacaggcgtgagccaccgcgcccggccagtttttaaatttttttttttgtagggacatgggaggacgtctccctatgttgcccaggctggtctcaaactcctggggtcaagcgatcctcccgccttggcctcccaaagtgctgggattacacgcatgagccatcacgcagggctgctgctttaggcttcacccctcactctcacagatgcagccctgcaagctatgcggctcgctccccagaggcctacctcgaatcccgccggcttctctccctctcctgcgattcccccctctctccttcctcctctcctcaactctggaaagcggggagctggctccgaacctgttcctggacttcagtttcctcacctgtgaaatgagggagtgataggaaaggttgctctctcaagtcttccccctccccccacacacatcgtagctgtgtgtcatggttgttattaatgtagaataatgatagctgggatgtattggtcatttactatgagccggatactgtgcccaacacttcatgtgttacgtcatttattccttatagcaacctatttacaaatgaggacagtgaagtttggagttggtagagtgggaatgcaagttcaagccagtcttattcctctactagtgcagttagttattttgccctcagtcccttcagtatccccagggatccaggcaattaacaatctcatgtttgagactgacatctgccacatagctggttttagagtttcccgtgttttcatggtggtggctttgaatctcaccaggcaccctggctgggaagtaggcatcatctttaccgagtagggttagggtactagttctgagagagagaaggcgcttgaatgttgaacggaaatgcaggaaaggctcctgctcttctctgggagtcaaaagtccaccttgagccccaggaaattgaggagaggcagagatagctgctgctcctccctaagggctcaattagtgctgtcacctatgtggtcatgggtacagtgccgggctggcagcttcagactgagggttccactcaagacccaggaattgcagaaagagctcacgtcaagtgcttcttcacttgacacacacataaagtacttcttaaactatgcttgtatctgcatgacttcaattttcaga

SEQ ID NO: 1562993 - DNA, 4001 bp, Homo sapiens
gtattttttagttgagacggggtttcactatgttggccaggctggtctcaaactcctgacctcgtgatccacccgcctcggcctcccaaagtgctgggattacaggcatgagccaccatgcccagcccacaaaatgtatttcttaaataatgacttgaaagtcaaaattactccttgaaccatgggctatagaatgcatactgtgttagcagacatgtaaagtaacattaatctctttgtacatcttcatcagagttccttggtgaccaggtgccttgttaatgaccagtaatatcttgaaaggaatccttttttctgaacagtaggtctcgatagtaggcttaaaatattcagtaaaccacactgtaaatatgatgtaaagacattcagtaaagagatgtgtggtcatcctgggtttgttgttgcatttacagagcataggcatttctagcttcgtcatttctagcttcgtcatttctagcttttgatataaagtgagagacatggaactcttcctttcactgaacacttaggggccactgtggggctattaattggcctaatttcaatattgttgcctctcaggctacaaggaggaccgagagggaggagagaaacagggaactggcaggtagtggagcagtcagacacaacacttaagtttgctgtcttataccagtgaggttcgtggccacctaaaacaattgcaataacaacatcaaagatcactgatcacagatcactgtaacggtgcacctgaaataaaaagtttgaaatatagcgatagttaccaaagtgtaagtgacaggaagtgggcacatgctgttgaaaaaatagttgctcggtgcagggctgcttgctacaaactttcaatttgtaaaaaacacggtatctgtgaagtgcaataaagcgaggtatggctgtactcaagtccctcacatcattcattcaacaaatatttacaacacatctacacagcagttaagaaacctgaacagcctcccataaaaacaggtacccacctcccacgcggggaaggcttccaggtttgtttactgcgttactccctgcgggctcagtgggagtaaggtcgcccatataccagcccttccgctcctgggccacggagccgggaggaggaaacccctgatttggatccgcgcacgctaaggggcattgcgtggactcgagcaccggccaggagcgcactagacgcctgggaggatgcggtgcccccagggcggaagacaagaagccgagaagacgcggcgggagaggatggcaggctccgggccccgtcctgcgccctcttgtcgcacttcctccattcccgcaccacagacccgcaggtagacaacatcacctgcactttcaggggaggaagcggaggctcggacagatttcaccgggctcggaggaacccgactgaggtccttgccgggctcactgccggaaaggccgagcccagaagagggtggggacgttagggccgggcctcgtacctggggaagccgagccatcgggcctgacgttgggagaaaacccggcggtatacggcgatccgggacctgcttcttaactcccgcgcggtccacgcccgcctcagcgcttcgcgcgcctctagacgccagtctcgcgcgggcccgccctcgtctccacggcgacgcggcgcgcacgaggaccaccccgcccagaccccggggcttgcgcagcctcagtcgggtaggtggcgcacttcgggttgctttgcagcagcagcaatgagaatcggtttcgaggggcgtggagcatgcaccctctgggcatccccaccgagggttctttatctccttggctcgccagcttcgctctgagctcagcttgctactgctcctcttagacaagagaagtgggaggtattccgaggcggaaccccgagttacgccgcccgcggccgagcactaaagatgaggttccagctgggaggcggctgcgtacgaaagtcctccctccctcacttccggactcgtgcgtgggcctctctggcttttggttcacagggagtggaaaccggaacccgtggagtatgacccgcccatgcgtggacccggcaggttgctacaacttgcacttggaggggagaggtcccaaggcccccgaattagaaatgccaggctcatctctttttgtaacccttcattttaaaatgtaattaataagcactctttttgttaaatttttaaatttgggccgatcctaataatcttaaaaataggagtgggaggggtaagtgggacttttcaaatacttttttacgtgctttgtaaaacatttgaaagcacgtgagattcctggtgcagagactaaaagcagtagttatttatttgaaagattttacgctaaaaacaggaaaattaacttgttgggtgtctcgggcttagcatcacagacaatttgtatttttgccctattttctacatgctaatttttgcaattaaaacatttattatttattttttgagaaggagtctccctctgtagcccaggctgcagtgcagtggcgtgatctgggctcacttccacctccacctcccgggttcaagtgtttctcctgcctcagcctcccaggcgcacgccaccacgcccggctaatttttttttgtttttttgatagagacggtttttaccatgttggccaggtgtgtctcgaactcctgacctcagatgatccgcccgcctcggcctcccaaagtgctgtgattacaggcatgagccaccgcgcctggccctaaattatgttttatatggtgaaacctcgtctctactaaaaataaaatttaaaaaattagccgggggtggtagtgggcacctgtaatcccagctactggggaggctgaggcaggagaatcgcttgaacccaggaggcaaatgttgcagtgggccgagatcgtgtatttgcatttgcctgggcaacaagagcaaaactgtctcaataataataataataataatttaaagggagttctactttagcggacatcaatgctaatgttttagggacaacttttatctgaacttaatgtggccaagtagttttaaaataatttagtaagcttcaaggttgtaattaacagtataacaaaaatatatttactgtaatttagcctaagtacttttatgtaattatgtaaatttatataaattatatatttaggataagtcaataagcacttctttctagatgatttgagctaatttcctaatgctttcttcctgttatgtgcatttaccatcctcagctttgacaaatttaggagggatgaaaggcatttccatttgagttacaatgaaaatagtcctgttgggaaagattagaagataatagtacataataatagctaggacaaggacatcttagaggctgggcacggtggctcacacctgtaatctgagcattttggaaggctgagccaggagaattgcctgagcccagtagttcaagaacagcctgggcaacatagtgcccatctctacaaaatataaaaaatttgaccaggcgcggtggctcacgcctataatcccagcactttgagaggccaaggtgggtgatcacttgaggtcaggagtttgagaccagcctggccaacacggtgaaaccccatctctactactaaaaatagaaaaattagccaggcgtggagtcacgagcctgtaatcccggctactcggggggttggggcaggagaatcgcttgaacctggtgggggcggttgcagtaagccaagatcctgccactgcactccagcctgggtgacagagcgagactctgtctcgaaaaaaaaaaaaatctaagggttactcttggagcaagaaaaactgagtaggaaaaagcccatttagagaggtgcaatccagccttctgtgatgaggctgctgaaaggtcatggcctggcattaaactctctcacaggtgctctcataatttctgggtttctagtattttcttttttcttttttttttt

SEQ ID NO: 1562994 - DNA, 4001 bp, Homo sapiens
tgtactctatcctgggcaacagagcgagactccgtctcaaaaaaaaaaaaaaaacaccaagaaaaaaaaaagataagaggttctagatggatctcccttggaatacccacaggagtctatacaagggctgagctgaaaacttctgggcctttctgagggatccaatgtattttgcatgtctcattcgaaaatgctagaatgtgcaagcagccctggagctcattctttaaacaaaataggacatgccacacacagagacacacacacacacacacacacacgcaggcacatactcatgctcccggaggacggaggagcagcaacaggtccaagcctcgaggctgcccttggtggctgtctgccactgtgcagggaaggaggggtcatcagtgatgcttgatgctgccacctcagccaacacccccaacacatacacacacatgcacgcatgtacacacacacacactgaaagccaggcccagaaaccaggccagcccacgatgtctgctgccatgcaaggccttgggctaagcgctgataaggttcaaaagtgatgaagacacagcagcaatggggtctgagactgaagaatggggagggcaacacacaagacacacgcacacagacggagtcacagccctagttattcatgcagactcatgcatcacatgccacacacctactcaagatacacacacacactcacagcatcactcattcacagactcatgcaccacacaatatacacacacagacccaccctcacaaaaacagatacaaagacacacatagatacgtgtacacacagtgcaaagagatacacttaggtatctccagacagatgcacagacattctcatacgcacacactcacagccacaggtcctcacccatgcaggtatacacaccagagcacgcagtccaggcatcgagatgctaccccaaggactataaattctgtctatggggttctgggaggtcattggccatgagccctaaagactagactgcccccctctccacgcgctgaccccaaggagagtggaggggcagaggaatggcagaacctctctgattctcaccctctgaatgtggggtgggagtggggcggggggagtgaagggacccctactgccaggggagcagctcactgacccgtgactctcagggagggagtcccctggctcttggaggtggctccaaggactgagaattcgggggctgggaagggaggttttattttccttctgccttttcctgaagcgtgccccaccttcggcagccccattcagagcccctcctccagcacaccctgtggggggcgtccccctagcagcttctctctcttggaaggtccccttcctgagccgcgcccacctgctcctccacaagaggaggtcctatcgggatacatccaggtgtgccccacacctggagggccctcacgctacatccgcccccgcaaaaagcctcaaatgggccaaagcctccccacacctacgcccacccccaaactccctcgctgcgcctcctgccctgcgggaggtcaatgcccacccaggtgagccccacacctgttctggccgcccccccgccgccagaggccacccttccacgaagactcttttcccgtttggccgctgctgccgggggagtcctgcccagtgcccccaccccggcacccacctccttcttgacggtgcgtagcagcctctgtcgggtctccgcctctgtgggacaagaaacgagagccgcgggtcagccgagagagggtgcgggggccgggcgctgccctcccgccgccctcgtgtccagcggcctcttacccgcgggggccgaggccatggctccgagcgctgcgttccgagtcccaggaggcggtggcggcggtggcggcggtagctcctccggccgcggcgctgctgctgcagccgcggcggggcggggccgagcgctgagtgacggccggagggcgcccgacgtcaggacccgaggcggccgccccacccctccggaaagccaccgctcggcggggcagccgggtcgcctgcgccaggagccttcgcgccaagcacgcacgctccctcccgcgcacccagcgcccgagcctctcaggctcccccaacctccacgccagcgcccgcgtccctccctcttccctagggcggggaaggaaagcgtccgtcctgaaccctcctctgtgggccaggctccaggaagtcacaggaaatggtggggctactaccgatattctccaagcctcagttttctcatctttaaaatgggtataatgtggtataaaatgggcataatgggtctcagaacgatctgagccttaagtgagatattggatgtgaagcccttaatacagacccagggggaaaggccagcgagcataaatgcttgccactgttactgttattattattaattattattattgagggtcttccagccggtcgcggtggctcacgcctgtaatcccaacactttgggaggccgaggcgggcagatcacttgaggtcaggagttcgagaccagcctggccaacatagtgaaaccccgtctctacgaaaatacaaaaattagccggacatgatggcgagctgcctgtaatcccagctactggggaggctaaggcaggagaatctcttgaacccgggaagcagaggttacagtgatccaacatggcgccattgcactccagcctgagcgacagagtgagactccgtctcaaaaaataaaaaaaatacaaatacaaaaattagccaggcatggtggcgtgctcctgtaatcccagctactcaggaggctgaggcatgagaattgcttgaaccctggaggcagaggtgtcagtgagccaagattgtgccaccacactccagcctgggcaacaaaagtgaaactccatctcaaaaaaaaaaaaaaaaaaaagagtcttccaagatacactggttatccattcaggagaggccgggacttaagtggctccctccccgacatgcaggtcactggaggagtggggttttcccaggagtctggccccaaaaggaggcacttgtcagccaggatctctggggctgagcaagcagtgggctctgtgggaaaagccttgttccatcaagagcccctggtcaccccaagtccctaactgtatccacccagaatgcaactcaggtcaatatttattgagcacctactctgtgccaagtgactgtgctagagatttctaagtgagcaagacagacaatgaactctgccctcatggagtttaggaggcggacaacaaaatatgtaagaaaaggacagaccatgctggaaagttctggagaaaaattaagtaggcaagggggacagggagggcccagacccctggggatcgtattctgaagtagggtggttgagggaggccccactgagcaggtgacatttaagcaaagaggaaaaggagtaggccatggggatttctggaggaagagcagttgagtcaagggaacagcaaatgcaaagtccctgaggagggagtgtgtccagtcaaacagtgacaaatagcacagatgcctgtggggctggagtggtgtgaacaatggggacggtggtgggatgttggccagagaggtgcagggccaaaaccctgtatgactttgatggtgatgttaaggatttgcaatgccttttagggtcccccagtattcaggccttccttcagaaggactagagggcagcttagagtgcctctccgtgcagcagtggatccagagcccccttttttccattggtcagtgtcaggggtctctggccgtaagccacagaagctgactttggcttcctcaggcaaaaggaaataaactgggaagataatatgtgatcccagagcccatgggagcctggagaactgggaaatgggatgaaatcaaggtggctctggaaggccagaaaggggaatcttgggaatatttgcctggcaaggacagtgtggttagggcactgctgctctggtaa

SEQ ID NO: 1562995 - DNA, 4001 bp, Homo sapiens
tgaagcaattgtttgtttacagccttttaatgttctggtcatgggttatgttaacctattacccatatctgatcaatagacacctcaccctctcccctcccagaccacacacctccacgcttaaaaagggacagggagggccaggcacggtggctcacgcctgtaatcccagcactttgggaggccgaggcgggcagatcacgaggtcaggagatcgagaccatctggctaacacggtgaaaccccgtctctactaaaaatacaaaaaattatccgggtgtggtggcgggcacctatagtcccagctactcgggaggctgaggcaggagaatggcgtgaacccgggaggcagagcttgcagtgagccgagatcgcgccactgcactccagcctgggcaacagagcgagactccgtctcaaaaaaaaaaaaaaaaaaaaaaggggggggggacagggagaagaactaaagctcaggctactatgataattagggatgaaaaagctacattcacttaggattatcaaaagccaggaaagatatctatagaattacaaattaatcgggcctggcgcagtggctcacgcctgtaatcccagcactttgggaggcccgagacgggcggatcacctgtggtcaggagttcgagaccagcctggccaacatggcgaaaaaccccgtctctattaaaaatacacaaattagccgggcgtggtggcgggcgcctgtaatcccagctactcggtaggctgaggcaggagaatcacttgaatccgggaggcggagcttgcagtgagccgagatcatgtcattgcactccagcccgggcaagagcgaaactcccgtcttaaaaaaaaaatagaaaagaaaagaaaagaagaattacaaattaatcaccaagaacagaaatagtgtaaaaacaaagatgtaattcaactgtttagagtgcagagataattggaactaaaagagcaagaaaagcgggaaacatatgtacctataaacctaatcacaaacctgtcacaaaaactacgagtaaacgagtcgaagttgaaaatgagtttttgtgaatcagagtctgatttgacttgaatttactaagaaagaataagaaaggtgtagaacattccaggacatctctatcccaccgcaaaacaaaaaagagccatcaacccaccacaaacgtgcagcgtgagactggaagatacactagtcacccagtcactgaaaacaacctttgaaacatctttatttttctttccaaataaaaaagagcctaggtcagtaaactaagtatgagaataattttcaaaattccagtcctaaccacaccggatgattctggctaacgtatgcctcagtttcccccgtgctaaaatgcaaacacaccggtgttccgagtctcgggcctggatccgagcccgggttctgcacctggatctgaatcttaaagggaaaaccgcaagttaaacctgaggaggagtctgcagctgtcccggtgccagagccagccaggctctttttagaaagccccccgcctcaggcgcggttttcgtaaaaccgctcccggctgccagcgcggtggattccggctggcgccccgaacacctgaggtggcctcggccgtctaggggcggccgcaccggaggacgcagccgacctccccgccccgccgcgtccccggcccccattccaacggcgacgcgagcaaggtcggcccggcggctctccggcccgaggcggtgcttctctcgtgggcgccttcggcccatacgaccctcggtcggacagtccgaccacagccgccccgcagcccccgcctgaggggaacttgtaggcgccggtgggtctccgctgactcccgccccgcactcacctgccccacgggccacctcagcgccaatccgggtcgggttagcagcttccccactcgcacccagtcagcgctcagcggcgcctaagcgcacgcgtggcggggcgtggcatgggcggccgcgggtcatgctgggggctgtagtcgttcccgcccactaggcggggcgcgtccaggggctttgcgcccccatcccaaggccagcatgcatagcgatgatttcttcgtctgcaccgcagcctgagaagcttgggacagtatggtgtggaccagcagtcagggtggtgggagatagacgctgcaaataacttgctaatttttttttttttttttttttgagatggagtctcgctctgtcacccaggctgaagtgcagtggcgtgatctcggctcactgcaacctccacctcccaggttcaatcagttctctgcctcagcctcccgagtagctgggattacaggcgcccgccaccacgcccagctaatttttttgtatttttagtacagtatttttagtagagacggggtttcaccatgttggccaggctggtctcgaactcctgacctcagatgatctgcccgcttcagcctcccaaagtgctgggattacaggcgtgagccaccgcgccaggccggaaaacgaaattttctgagtaccttctgtgtcagattctatgctgtgcaattcccatctcaccaaccctcacatccacctaggcttcatatcacctttctagggactcctaaccctcgtgcttccactaaagctgtgtttacaaacatcaggctctcctggttcttaaatgaaactgagcatcagccagggaaagagggcattaagtgtccaggtgtctgacttcagctgagcagacatttcatcagttgccccaagttctgcccagaacctgacatctgggtagttctgatgctggagtccgtgtgaatttaaaccaatcttaaagaaaatacaacagcctgggttaacagagtgagaccctgtctctacaaaaaacaacaaaaaatgaaccacgtgtggttgtgtgtgccatagtcccagctactcaagaggctgaggtgagaggatcgcttgagcccaggaaatcaaggctgcagtgaactgtggtcatgccactgcactccagcttgggcgacagagcaagatcttgtctatatatatatataaaagatagatatatgaatgtatattatatataatatatatgaatgtatattatatataatatatatgaatgtatattttatatatatacataaatgtacatttaatatatatatgttttccagtgaacacgcagaccacccatcaaattaaaatgttacatgggaaaatcagattacaaagttgcatacaagtatgtaaatacaaaaataaaggagaatggaaaaggaaagaagacaagagatgcaccaacaaatccacccattcaaatagtccaggaagaaaccaggtcaaatcgccaatcactggagatcattagtctaacagaattgttaggacaggaacaagactgttatttccttattttctatgaggaaatgtattaactaaaatccatggtatcctatatccccagtatctgttatgtaatataaattctcacattacagataaactgatagtagttgctgcctccaagttgcccatagcagagaaggaagtagacagaatatctggtcagagtcccatgacttaatttccttgtgtcagacttagtatcctttcaagattttttctgttttgttttttcagatggagtctcgctccgttgcccaggctggagtacagtggcatgatcttggctcactgcaacttctgcctcccaggttcaagcaattctcctgtctcagcctcccaagtagctgggactataggcgcctgccaccacgcccggttgattgtatttttagtagagacggagtttcaccttgtcggtcaagctggtctcgaactcctgacctcaggtgatccacctgcctcggcctcccaaagtgttgggattacaggcgtgagccaccaccgcacccggcccttttcaagattttttagagatgaacagagtaactctttctggaagttgagcaaatggctctatgctatccctgcttgct

SEQ ID NO: 1562996 - DNA, 4001 bp, Homo sapiens
acagggaagtggggtaaaggtgatggggaaggtatagggcctcttgagtgcagtgccagaggggccttggaacagagcagtctccatgcccttggtgccagacactcagactggcaaggaaaccccagccccgaccttgcttccccattggatggaagtctcctgctcaggcccctccttcccgggaccccccactcaccacccgcttgtccatgtctgccccgctctggccctgcagacaggcctgcagccgcttgtggatgttgtgggctgcccgcttggccggctccagccgctgttctacctgggaaggaggtatggaggttaaggatcaagagaggctgtctccccctgagcaggaaactttctcctgtcccctggggaccccatggccaacagcttgaggaatgactcaacccaggcccctacctggcgtccccgccccggccctctgctccgagacagcctgcacaggcctgccttcccacctgcccggcccaggcacgtacctgcagcaggtcctcacccaggaactcagcggtctccggggtgctgcggggagtggtgggggggggggggagagtgcttctgctgagcctgcctgggttagaacgccccctacttcccttccccgcagcagggcacctggaccccagtgcttccactgtccctcccagctgaggcctgccctgggtggcccagttgcttcatcccagtcggagcacattccatgggggtgggaataggatacatgggtttttcctcctccacccagggctgtgtcctgagagagggcggacagatgaaactaaaggggaggctgagagacccacccggggcccagctttgggacacagaagcctcttttctgcccactcccaaatcctcagcccaccccgggatgaggagtattagctggccccaagaacgggaagtgcaggagctcagactcctaggcacagtcacacagcactctggactacagctgtgggcaggggtgcacaggcccttggcccccacctggggacacatgggggatgccaaggcccactgcaaggtggtctgactgtccaggctatgtaggcatctgtgccagtgtgagactagaaccaggtctctggacacccagtcccctccctggacccagagaatggggaactcctgaggctgggggaagaggagcagagaagacaggctctgagaggctccccaaacttccggcctccgtgccaccggctcagaggctgggggtgggagctgggagacctggggatatttccacctgagtccaggaaaagcagaaacgagacagaagcaggaggcccctgggctggggggagggggagggggagggacgctgcaggccaggggcaggcccctcctcccaccaggccaggacccatctcctcccctcgccccaggtctgtggccctaatcgaccctcctccctccccggcccagcaagcagaggtggtgaactgtcccattgtccagaggggacaagtgaggtcaggaggaccatccacttagagactcgtggaggcagagaagtcccagcgtcctagggcagagagcattctcccgcctgaagccccctccaatccggtaagggggggcatcccttcccccaaaggccacccttgctcctccagctctgcccgagagacgggggcggcgttcagagaggaggaagagagagcaggagtctggccgctcagagggtggctgcccagctgtccccagcctcccccacccccgtctcccccgacccttttacgacccctcaagtcctgccggggtaagagtggggctggaagcgggtgacactcaccgtcccaagctgcccgtctgggccagctgccgcatgcggtgcagctgcctcttcatcatcttgggggcgagctgggggctgcggggtcacggcgggggtcgcgggcccggggagcccccggtccagcctgcctctcctgcggcgcggctcttgccccggatgggtgggcggcgctctcgcttcctgggccgccgcgcggctcttgctggcggccggctctctcctcccccgctcacgactccgcccccggcccccaggtcactcctctctccaagttggtttcctcgctcttccccggcttccgggcccccgggcgacccccggccgggcccccgctgctgtgtgtccgccggccgcggccgtccacaggttgtgcccggctcctcctccccgcagcgccccgcccagccccggtggcgggaagcaggtaagcccattcctgcccctgcgcccgcaacccgccccaggcggggtgcctgccccacccgcagcctgcagacccgaagtataaataacctttgcatccctcgcaaagaggaaagggtaccaagcgaaagaggggtaggcctttctgacctgtcctggcctctctgggcctgccgcggatactgccttgcactctcttccgcagaggacctctggccccctggaactaaaccccccaccactggatgactggctgggagctttggcttcctggggccacgggctgctgtgtggccgtggacaagcccctggaactccggactcgctgtttctaatggtctgatgggccagctgtcctgggcctgcccattctgcagagtggacaagacacccctgccagctccctttaagggaggtgcgtgccacccctcagccaccaggaaccctcccagagcggttcgcgacaccctgttctccacatctcctggcagtttgctccatctgtgaagcccgtctcctctcattcctcctggcaaacagcctcagtcccccttccttcttgtagggcaatgatgtaggtgctgctctgactgcccccaaactcagtagttctcctctttggccctccactcaacacagagttaggcatacagtaagtgctccataactgctggttttacaagatgtgagcgcctttaggaaacagtaggctctccttaccctgcacccctgtggcatcaggagccgcaggcgtggggaagaggggagggtgtgccccagagtcctgccacaccctctgcactttgctttgttagtttcagtttagtttgagactatttgagccactactgtgtgccggtgcagactgtgtgccggtgcagactgggcgcctctcagaggcaggaccttggccccacacatctccatactcccagcacctagcccagggcctggcacactcactggctgcttctctcctccctaatgaggcaggactcattgggggtgggaggagctgagaagggaacccaacagctgcctgctatggccagagcctcccagatgggagcccacctgagtgtggaatcctggtgggaagttgggaggctccaagatcaaagctcaggccaggatgagatgtcaggcaaggttccctcccccatctcccttttcccaacaggaaggctgctggccagtgactatgggtggcatggcaagggaacctcaggtgccatccttcctgtccctcgggaagtctctggactatgtggtgcccctgctctgttccagccaagcctccagcccagaccacaccgggcctgggcttgtctggttctgtagctggtctgaaagtccttgaaggcaaggtttggcttacacctctgtctctcctagatttgcccagtcctgagccccagctccggcctggtgaggggtcagtacacgtgggttgtagccgcagctgtggtggaaactacctgagccatattatcagtctaactgagctcttgccccgcgctcctgccctggtctccagactcccctccagccagacctaagggtcctgggcaggagagacaccctgggcctttgagtcggattcgggtggggctgctgtgcctcctagctgggtgatgggtagattttaggccctcccttgtcacacctggatgttgaatcatagaaggatggactccccaaaggttgggttagggttataggctgttccttagaaggaattgta

SEQ ID NO: 1562997 - DNA, 4001 bp, Homo sapiens
aactcgccgcttgtatcgaaactgctcagataaagaaaaggtagagaaaatgcccccaccccggctgagcaagtgagtccatgcacaaaccccgtcccgctcatgctggccacaccgcacccctcactgccctcctgtacacaccatcagtcatactaccacagtggacagagctaacagctgccatgcacccaccacactcaggcatgatgcagcccgatggaaggcacgtgcctagctgcccgcagcctgcactgtcccgtcgccttcccatccccaggattctcggcaaaatcccactcctctctgaaggcctgattccaggcttaccatcctagacatccccctccactctccaggtagaactgaccccactttcctgtgccaccacggaggcccgcccaactttgagctcagctcacaaaatctttattcaatgcccactgcagttgggcacccccctccaccctgccaaactccaagaccttccacaggactgaccccgtctacgtccccatgcctagcaaggcactcaatacatcttcacaccatgcatgggtgagtaaaggaggggacttggttggccttcacaagacttcacagctggagaaaggaacaaacgtgcacacagatagccctgctcacaccacacacccctctggcactctctcgtgctcacactcctccctggagaacaatgctcagcgtccacaccatccatgctgctcaatgcacacactgttcaaactacacacaccacactgactctgtggcacacagcccacactgcacacactgtgcacactgttcactgtatactgcgcatcctgcttaccacaatcacaacactcacactgtactcactgccccacactgcaatgctgtacacactgctcactgcacactacacactgcacaccactcactgcacacacggtacgtgcccactgcatactttgtgcacactgactgcactgtgcccactcactacacatgctcacggcacacagcacacaccactcacactgtacatgctgtgcacactgcccactcactgcacacactgtgcctgctaactgcacacactgcctgctcactacacatgctcgcacactgcccacactgtacatccttactgctcgccctgcccgctcactgcacacaccgcgcctactcatcgcatacactgtgtccgctcgctgcaccctgtacacgctcactgcactctgcacacagcaccacacacacacacacacacacacacacacagcctccacccctcacccctcccacttgtgtttccccactgccgtgcccttcactggtcccgccacggggcttggtgatccaccctgcgcgctcctcagctcacccccgcgccggccacttacctccaggtagggcaggggcgtgtccaggttgggcgggtactcctgcaggagccgctcctcatccaggaacttgccggcgcggccccgggagggcggctggaaaagcccatagttgagcgcgtcctggaggctgtggttgagggcgcagagcacgcgctgcttggcggcccacacgggcgcggccgggtccaggcgcaggcacttctgcagcggagcgggctcgtgagctcaggtcccgggagcgcggacccgccccgccggccccatgcggggtgccgagccccgggcccccgccgaaggagtccggggctcgggtgccggcgcccgggaccccgcgcctccgcgaaccgcggccgaagccccgccccaggggccgggcttcccggggccccgccctggcgatggggagggtcccggcggaggcggcgggggaggggtgagtagccgtgggccgggggtcccgggcgccgggcgcgcccggcgggggtgggggaatcccgggcggggagcgcaggggcacggccgggcccagggcggcggggctcaccgtctgctgcaggtccgggatgccgacgcgcacgaccacggcgctggccccggggccgtccatccccgcgccggggcccgggccggggccgctcgcgccggggaacggagcgcccggggactccgcgcgcggcgccccggcccccccttcccccccgccggagccccgtcggccgcgctgcgcgggagggggccggggggggccggggccggggccggcgcgggggacagcggctccgggggctccgcaggggcggcggcggcggcggcggcggcgcggctcagctgcatcggccccggctcagctcggcgcctgccttccccgggggcgggggcggcggggggagggggcctgagacgggagggaagcgggggtggcgagggggctgcgccggaggcgggggccgggagggctcagggccagtgctggggggttacttgcggggtcccgggtgggggcgggaggtgtgtgcggagggcgggggccgagccacggggcgggggtctggggggctgtgacggggttgggggggggagtcctaggcctcggtgcggggggagtggctgagcggcaagggcgggcatccgcggaccaccggggcgggtgcggcggaggaaggggtcccggagctggggtgggggccgcgtcggggcacgaagaccaaggtagggcgagaaggggaaagaaaaacaattaatttccggaggtggcggcttctcccccccactccaccgacccccagcttcgggcctggaggagatggcggggacccccccccgccccaggcctgggggtcggaccacggggacctccagaccggggagggcccggggcccttcccaccgcctcggcgagaggccctccgaattaaccctttcgaccgcgccctggcgtgttcggcgcggctcccccacgccagcctagtttggggagtttgctccggacttccccccaaggacccctggccggtccggatccaacgcctgtcgccccctccccgtcaccttagcgacggcgggatgggggcgcgacctacggggaagggcctaggggagggggcgctactagtctccacctgcgactgggaagtgaattttagttttacgcgttgtcgtggcaacgcgggagggggtgatgagtgggcggaggaggggggagctcagtaaagaaacgagctcaggcaccgccgccccatcggggtgcaccaggccccccagccctgagcggcctctcggaactgtcctgcactgcgagcccctgtgcccccaagagcagcccctaagtcgaaatagttccgcctcctgcagaactctcccaacccgctttgcctggcgttccccacccccctcctccgcccccaagcagccccagatcctcctagaggagccgctggccccctgagggcagagcttgagaacgttcacagaagagcccagcctggggaacccctctgcctaaggaggaaaacagcctctaacccccagcctccccaagagcagctccagatcacccacaaaacggattttgcctgagcctcccaggaataaccttgaactgctccggcccccatacacgcagaaaaacctccctaccctcccccgcgtgacaacctggaccatcctaaacaccctgacccacacagaacagagcttggcactccctccaaggacagcccccactccccagcagatccacctcgaccagcacctgctcaccccagagcacccctgacagagtgtttctgatgagccctctcccctcaaaacagcctctggtcaaccccagagcagggcctcacttccctgggaccagtctggcttcctcctcccgcctccccaggacgccactgaccgggcagagcggagcctccagtgcggtgtgtgggtcacgtcctgcgttctccccacgcctagacggttgctccctgcccaggaactgtggtcccagcatcacaggcccctcccaaggccactggcctggcctgagtggtgcagctgagggtctcccaggggagggggcaggatgggaggggtgggggtcccgggagcagggagcaggaaggg

SEQ ID NO: 1562998 - DNA, 4001 bp, Homo sapiens
gactcaggacacacccacacacaagcctacgtcccattccaggtctccccagcagagaaaagggagttggggccatgggagcctgaagcccagaaaggagaagggactggcctacaccacacagcacagcaagggtgggcatggctttcctgcggcatcaccaaacctgctgccccatccccagcaggtgcagggagttcaggatgaacatgtcagctgggctgctgcagccacccctcaccatcgcagccctaagttcctttttccccgcccctgtcaaagacatatccaggcctcttccaagctaccctcacccatcatgggggacccccaaatttgggcagcccagcccctacccctgcagcatccagaagccaggccaggaggctccacctcctgaaggcagtgcagaagctgagggtggaggccagggtgccagcccgggcttcccttagagctccctgggagaaagtgggctacgtggtttcgggagcgaggggtgctgaagtgccaaggaagccctcaccccctgcctctgaggcccaggagggggaagtgtccacatctggcctgccagggtatgaaggcttctctatggtcacttttaaataccagcctgtcacattcggtgtcagcagcccacaggcccaaagggtgctgggaccgggtggatgaggagggcacaggccccagggcatgggggttgctgggggcatgtgagtgccacgtgtggcatgtgggtgggagttccagggtcaggacacatagagtcctagagtcctcgttccaaccgaggaaggggacctggaccctgtagtgcccacttcacaccaagctcagaatgcaacaagcacctgtcctggcctcagcaacacacgactgtgttccagagtcccctttctacgcagagggagccctgaccttcacctgggagctgtggcatggggtgagtggggggaggcctttgaaacccaaggagggaagggcagccttgagtcacagctgtgggggcaggggagaggcaggaggtggaagaggggagggaggagtggggagaagcaggagatgggcacccagagaaccaagcgccccttcctttcccgtgcccaagacgcccggtcacctccctggccagcggcgccccttaccctggacagtgacccggtgccctctgtgcaaggctacctgtccccctcccagcccgcccccacccccctgccctccagaggagactcgagcagggaaaggcggtgcggcgcccagcacgggcagaaggtcaaagggagtcagggcggtgtcaggtgtctccctgatgaagtgttgggggggcggcggggggagaaggagacaggaaaacccagagaaggggcctgctgggagaaccagcgcttcgagagcggcgggaaggatcagcgggcagggagagcagtccgaggagcaggcgggggtccctgggcggcgcgtgctcacctggtcactgtgcgccgcgcgcgcgggctgtgcgccctctccagtcccaggcgcgccccgatgccggccagcaccagcagcgctgcgacgccgcacacagcgtagacggccgtatggctgcgctcgcggccggggtcccggggcgctgcggtgtcgcgggcgcgggcgggcggccggcctgtctggacccaggccggcgtgtcgtagttggaacagcggctctggtcgaggcgccgcggcccgtcgtggcagcagaagcggtagccgcacgtgccgcagcagaagctgtaggctccggagctgcagttgaagggcgggtcccactggcccatcacgtcgtagtagccgcggcagcggtcgcccccctccggggctgtcgtgccgggcgccgcgggaccctgcgcctcgggggctcccgcgcggcccgacggcggccgcgccagcagcaacgcgagccgaagcgcgagcgcgagccggaggccgggaggacggcggccgccgagcagtccccgcgccccggcccgcgccatcgggcccgcgcctcccgctactgcgcccggtgcatggccgggcgccgcggctccctccggctcggctcctccgctcccgcagggatcgcgctggctcccggcgcacgccgcctcggccgtcggcctcctctggggaccccagccccgagtgggctgggtctggagctccgaggccgcacctccggtgggcgcgtcctccgcccgggctcacctcggacccgagctgcccggtccgcgtcctgagatcttccccgggccgggcggcgggtcctcgcctgcgcgcggcccccggcttctccccggcccggcaggtgtgcgggtcttggccctagcggaggccgcgccggggccgcgggccgcccgactgcgctaccttcccgccgcgctctcagtacagcccgcgctctggctccggctccggctccggctcccgctcgggctcggcgcgggctcgggcgggcgggggagggagagaggagggagggcggaagggaggcagagccgggggaggagcgcggctgccgcgaggggcgagaggaggcagcaggccccgcggagccgggaggccccacagggaacccccctccacaaagactgccccgaaacattcatcggaactgggcgctcgaaggggatcagttctagggcccgcgactagagcgtccctgtcttacaggtgcggggacctgtaccttacaggcgcggaggtcaaagcagcccggaattgccccgggacgggcagggccaccctctcacctccttcccgtcccctctgtccgttctgatcataacataaggagggccccttcccctctcggcgcctcgattttcccacctgtcaaatgggaaggacttcccctggcagcgccgcttcagagggccaaggatttaccccacggcgcgagcccagttccagaacccctcgaacgctgggctggggtccagggatgtccccatccctgcgtcgatgggcacggcttggctgacgcacttccgcgatctgctccctccccaggtgtgaggagagggggactgggctcgcccctgccctggaaaaggaaagcctggaaaaggaagacctccgccctgcgcccacccgcaggtcctttcacaaaccgaggggtagggtgtgggggccctaaggagcccggacccggtcccagcacggcccagtggtgttttcggggttgagttgaactggagaaggtcctggtgcttggcttctccctgcctcagtatctcatcttaacatcaaagactcttcctggagggcagactcataatctgccccttccaggagataggggtcgatatggaacctccctctgtccagacggaaacagcaggagggcaaggactgggcgtgcaattcacccagtgtgcagctcaggcctctgtcggcatttgctgaatgaataaatgaatgaaaggactccagcgcctagtttctgtgagatgaaacatttggggctccctagggtccctcctggtcccctttccatccgtccttctctcagcaactgggaccagcttatgaaagtggagaaggtgggggagaagaagaggaaggatttacattttaaggaggatcaagtctgttgcctgacatgaggggctgacagactaatttcaggtattaatgggttcagacaggaagaggaggtgacctccccactcagagcttctccttgtgccctggccaaagacagcctgctccctccacctacacacacacatgtgcacacacatgtacacacacttcccatccagccccgaaaacccaccctcattaaaggaccccttattaccagtttagaagaaaaaacacagatgaacaaaggaattaaatgaaattgctttaatcccatgtccagagacaaccacactaaaatatgccacatttacatgctggattgtaactagtttgtggtttactttttgccatccttaaacttttcgtttggctgggggcagtggctcacgcctgtaatcccaacactt

SEQ ID NO: 1562999 - DNA, 4001 bp, Homo sapiens
gcaggaaggcggcgtcggtgtcgggcacgcccgcgtccttggcgtagttcaccagcaggatggcggggacgaagagcccgagcgccatcaggaacttggtgacggcgtacacggcgaaggcgcggtcggtgcacactgccaagtccagcaggcgccggcggggccggaccctgggggatgcctcgcgcagctgcagccccgcaccgtcagcctccgcctcgcccggagcgtccccggcgcggtcgccggcgctgtccctgcgcggtcgcgggcccggcccgggcggcggcctcatgacagccccgcaggcgcagcagtgcagcaggagcccgccgagcagcaggaagccgccgcgccagccgaagcgctccagcagctgctggccgagcggcgacagcgcggacaggaacacggggctgcccgccgccgccagcccgttggccagaggccgccgccgctcgaagtacagccccagcatgatgagcgacggctggaagttgagggccaggcccaggcctgcgggcgaggcggtgctgtgccggggtccccggagagcccctccctggcccccacaggagggaggggccaggcccgggaacccagcagatccgggaacccagccgagggacttcgaagactgtccctcatagggaaaccgaggacagatcttgcagcaagaacccccgacccccaacccagcggagaggagaccagggggccctcacctgtgagcaccccagcggtcaggtagagctccaggaggcgcgtggcaaaggaagctaggatcatgcccgcggaagccagcagcccacccgccagcatcaccgggcgacagccaaagcgggtcacgaggatgctggacacggggcctgtgggcagggcagggtcaccacccgggtcccgggatggcttgagtcctctaaggaataaggtcacctccggctcagggacacagagaggagggcagtgtctggccaaggtcacacagcttggaggggacaggccaaagagacagcatcctgcgagggcaaggcccagagcaccccatcctgcgaacccaaaccccaagcggagcgggggcttccgcacccctttaaccttcacagcctccaagtcccgccctggcacagactgggattcctccgcagccccgcctcccaggatgggaactccagcaagcccccacctacaggtcagggctgcggggagggggagtgcttctgtggctctcagctttcctgcctctacaatgggcgggtgtggtcttagaaggggccctctgagctcgcagggcagccccctgggccggccccgcctctggccgctgtctccctcccgccctctcttcccctctttctggtgccagggttcccacaggcaggaagggacttcgggggccaccccgagggtcagggggatgctcaggggctcgggtgtctcctggttccggatcccaggggtcccggggaggcggagggccgggcggggacactgacccgtgccgtagagcatggctagcatgatggaggacacccaggccgtgtcgctgtagccggcgtcgaagtcgcgcatgagcgcgcggaagaagacgctcacggctttggggaagccgtaggcgaagccggtgaccacaaagcaggcgcccagcaccacccagccccagccgccgtctggggggccctcgccccgccgggggccgccagcgcccatcgctgcctctgttgggagggggcggggacaagagggaggggctgggccagcagcctagagaaggagggggatggagacgaagcatggggaaactgaggcacagggctacccacgtgagggtggctcaggtctgggaaccaaaaggggaaacggaggtaggactctcaccccaagtctccttctcctgcaaagggcgctgaaggacgaggggaggacgacgggtcccacctgactctgcacctctgcaggctccctctgaaggacaactgctggcccctcagggcctcaggtggaaggcgtcgggaagtggagcaggtatgtgcctggaggtgggcgtccagcaccaaagtcgccccgtacgcgtgagggtctcgggacaacagaacaaacagcagaggggcagatgccggctgcaaagggccgctgtgcgtgattttcctctttagccttccgccatgttcctaatgtttctcagtgatcacaaatgactattgtcattagaacattaaggggacaaaagccactttcaacagatatcagccaggggagctgagttcccatgcatctcagctcagccatggattccctccctgacttgggccggtcgcctcccctctcccaacctccctttcctccgatgtaagatgggtgattgatcaccccgaggccagctgggaatcttgcgggagaggagtcaggtctctggcttctgccagacaggtaggaaccttagcagcactgagagagtggccttctgccctccaaacctcaaaccctctatatgaaaagaatggctccaaagcctgtctcattcctggggctccacccggggccctcacagcagttacaagcgcccccataacagatgaggagggtgtactcagagacaggtgcaccaggagccgggggctggggatagcctcctgccctcctgcctggagtgtccctcctggcactgggcagtgccaccacccccagggtatccgggactctgcccctcctccactaggaccaggttgtggcttttcctgcctgttgtcctcttgtcacaggggcagccacttgaaggtggagacaggagggtgatcccaggcagccctcacatcacactcacctgagcctgcctcgtgggtttgggggtccagcctcacatctcctgaggcctgcagggaggggccgccgccgcagctcccggtgaagcttacccggatgggggctgccagacaccccagcttcccaccagcctgggctgagcctctggccgactcccgcctgacgctccctgccccaggcctggagcttagagtgtgtgcccccaccacacctcacccctgctaagaggcttttgtccaggaggggagaagagactgggagccccaggccaggctgggcctcggcggtgggctccctgtcccaagccagtccaggagggaggaagagaatccctgtgcctcctggagcctggggtggtagacacagagaccttgcccagggggtcctagtctggtgctgggggcacagccctgccctgaagagaccccaacggttctaatcacctcagtgcctcatctgcccccgccccaaccccccgccccaggccacattccaggaggggctggcagctttctctagaatgaagctaatccacgcctgtgcctgggaatgtgggggggggaggggccaaaacaaagggtgctgtgtccaggccgcctgagggcagcttgctggtggtcccagcccttggccactgccacctctcccctgacccgagcagccgctacttcctaggaaacccacaggtcgaaatgagagcaggtggagatgggggctgcagcgcgagggctttggggcagccctaaagagttctccaaacaaacaaacaaggggctgggagtgagatggcttcccggggaacagccaggacctcagtaccccctagaccccattctccaatgggggagtctctatccctcaccccctgccctgtcccccaaataagacaccaccagtcctgctgccgcatcactttgcgtccacttcctttatttctcatcatttacaaaagatgtacagagagggcatgtgttgggcacggagcaggtacaaggggctcctccccacgggggcagaaaagggggaaagaggttagggggcaagaggtgggccccccagggagagtcctggagcccctggagggggagaaattgtcctgtccccccattccgcctgctttactttgaaggtctcggaccccaagccagtgctttggagctgctcaggctgccggggtg

SEQ ID NO: 1563000 - DNA, 4001 bp, Homo sapiens
atcagcaggcaggggctcagcagctagctctggcctggtccccccttcccctccccttcccggccccaccacctgcatccgggtcttaatcacatccagaggagtgtttccaaagacactggctgcgcctgcaatagctccgaagaccccagtgatcagagggttcatgggcttgttggggttgtcccctggatataggaggggtgaggtgggtcagagggtgccgggaggggcctggatcagcacttcaaaaggtgggtgcccgccacccaggggtggccccaaggagaggagaggagctggccatgtgcagagatggggccctgtgatgcagacacacctcggtaccagttgcgcagggaggtcatgacgaagaagcggatggcctggttcgagccctgcttcaggacagtggctgtgaggccctggtacgtccccttcagccctgcgggaaggcaggcacggggttaccctgcagcctctcaggccccggttgggaattggtgtgtgtggggggtgggtgttgcacaaagcccaaggcaggatgggaggtgcaggcccttcccaccctggcccaggtccctgagccctatcaggaaggtcgagtggctcaccttgttcccgcacaatctccctaaccccgtggaagaatcctctgtacttggggtttggggaggtctggtcgtggatgaacttcacctgagagagagaagcaaaggcgcaggttctcggctgccacctgggtgggtcctggctagctggcaggcccagggcccatccagggtggagggaactgggaactcttccccaggaagcagtgcagccaaggccgccctgggctgcccacacggaccatgccccgggacacagggcagcccacacggaccatgctctgggacacagggcagccctgtgagcagcctctccctttatgtttgctgctcttttccagttttggcagtgaaggtgtcattttgttttctgctttataaaagtattttttaaagactttaaggctgcctttagcatagactcagcctccacgggtggcccttcgtggcaggcgtcctgccccagggccccgcggtcaccccgccggccttccctggcgtccaggagaccctccccagcttgccggttgccccgggagcaccgggccagcggggccgcccgtctccgtactccctgcgtgtccggggtcctcgccaggaccttccccaccttgatggtctccatggggcacacgaccaccacggcctcggccacgccagcgcccaggccgcacagcagcccacgcgtgctgtccagccgtccctgggcatcccgcatgtggttgctgaggaactcgaacattccaaacctggaggcgggaggcgggtgagaggggctgccgcggccgagcccccctcccgcagcagccaccggccgggcctcacctgacggccgccttggggatggaaccgtagagcagggagctaaggccgcggtacaggcccaggacgccatggctgcgaaccgtctgccgcacgcagtcccctgggggagggggcggtcaggaccccacggccctcggtgccgccgccctgggtacccgccccccgcggcgccgcggcctccccctcctcaccgatgccccggtaccgcggcgggtgcgagcgctcgtccagctgcagctgcgtcttcacgtactcggtggggaaggtgatgcagatctcgatgccacccgccaggccgcctgcagggaccgggaacccgctcctgagactcccgcccggccgctggcgctcgggcccctcccccgtcccggacttcggtcggcgcggccgccgcgccagtgccgcggggaacataggctggggccccacgcccccatgccctcaccccgttgtcccggcgaggcgcagggggtgacagacgggaggcgggcgagtcccagcgcgccgggtggggaccaggaccgcgcctccacgactccccagcccacggcccaacccggaagtggggcggggcctcagcgtcccgggcccacccagaagcgcggcgggagaggggtccgcgtcccggaggggcccacctgccaggatcgccttccccgggtgcgtcagcttggccttcccggacgcgggcgcggcggccgccagagcgcgcggggcgcggggcgcgggcatggcgggcgggaggcggggcgccctgtggcggcttcgggtccgagactccagaactccgcgctcggtccgcggtggcggcggcggccggttatggtcccaggggcggggcggccgcgtcagctccaggtcccgccccgcgtggtccgagccaggccccgcccccagcccgccccgtgcgggccgggaaactgaggcctgggcggggcgcgccgaggcaggcgtaggggcggggccaaagcgcagccaatggccgaggccgagtccctgggcgaccgcgagcggcgggacgggggcggggctgcgggaggcggagccgtggcccagctccgagcagtgggtcaaggtgcactgtgtgccgcgccgcgggatagcgggcctcgggtctgcgcgactgtcgagagcggcgggatccccagggatcccggaggccaggggcacaccctccccgaaaacacgtggggctagcccagtcccagaggaactctaacgtttcaaacctggaggcgggaggcgggaggccggtgagaaggggctacgccgccgggcccccctcccgcagcagccacgggccgggcctcacctgccggttcccacccacacctttcccggttgtagtttctgcgctcagcgaacaaggtcaggaaagaccacaaatgcaagcggctgtattctcctaggcagcttgtctgggcaacggaggtcccacaccccaaagaggacccagcaaatctttaatggactgcggggcctaggaaactggcccgtccctcctacccataccagcaccaagcagagcacctttgcctggataaaccgactttaatatttatgattgccaagaggctgagagtccttttatgaggtccggtacctccaaacaagacgtgttcatgtagtcttcaaactggcctggagggggcagctccagccagtcggaggcgcccaggaggaaggcctggctccagcaggagggcccacagtccagtctctgttgtcggctaaagctggtcttgcgccgtcagcctctaccctggcctccccaggctctgggatggctcagaggttgccgtcattgggtttcagcaaaaataaatattgtccaggtgtccctgcctcccattgcgtcccctgtgctgctggagtgacatgctccttggagaagttagtaactctgcaggtagggtgggtggtgacaacgcccactacacgcggaagttgtacattggaggctggcgaagttgggagcagaggcatatccataggggaagctggcaggggctgggcccacggcagggcctgcagagggggaagcccacaatgagcagagctcttcctgcccatgggggtcctctcctggctgcccctgagtagcccggggcccagggagcagggtctataggaccagcccttaccacccagacgctgaggccccaagagagcaggcatccagaggcaaggagcgtggggtcagccagagaacctggcctggctagaggataagctagtctccaaatgggacacttacttagtgcaatcagctgggtctcattcatgcccatcaaaatctaaaaaaaccagaatgacattaatggtggaaggacacactcagccggacgctggagacccgccggcgtgctgcacactcacaccacaccctcaggcctgtgtttgccccacagtgtccaagcaccccacagcctctccagtctgctcgacagccaggctgccctgggcaggttctcaggtgcaaagcccctcccagcacacaccagcagcagccttgctgtccaggggccaggcccagcaggacacagcagtagttcacagctaggc

SEQ ID NO: 1563001 - DNA, 4001 bp, Homo sapiens
gggaggtcatgacgaagaagcggatggcctggttcgagccctgcttcaggacagtggctgtgaggccctggtacgtccccttcagccctgcgggaaggcaggcacggggttaccctgcagcctctcaggccccggttgggaattggtgtgtgtggggggtgggtgttgcacaaagcccaaggcaggatgggaggtgcaggcccttcccaccctggcccaggtccctgagccctatcaggaaggtcgagtggctcaccttgttcccgcacaatctccctaaccccgtggaagaatcctctgtacttggggtttggggaggtctggtcgtggatgaacttcacctgagagagagaagcaaaggcgcaggttctcggctgccacctgggtgggtcctggctagctggcaggcccagggcccatccagggtggagggaactgggaactcttccccaggaagcagtgcagccaaggccgccctgggctgcccacacggaccatgccccgggacacagggcagcccacacggaccatgctctgggacacagggcagccctgtgagcagcctctccctttatgtttgctgctcttttccagttttggcagtgaaggtgtcattttgttttctgctttataaaagtattttttaaagactttaaggctgcctttagcatagactcagcctccacgggtggcccttcgtggcaggcgtcctgccccagggccccgcggtcaccccgccggccttccctggcgtccaggagaccctccccagcttgccggttgccccgggagcaccgggccagcggggccgcccgtctccgtactccctgcgtgtccggggtcctcgccaggaccttccccaccttgatggtctccatggggcacacgaccaccacggcctcggccacgccagcgcccaggccgcacagcagcccacgcgtgctgtccagccgtccctgggcatcccgcatgtggttgctgaggaactcgaacattccaaacctggaggcgggaggcgggtgagaggggctgccgcggccgagcccccctcccgcagcagccaccggccgggcctcacctgacggccgccttggggatggaaccgtagagcagggagctaaggccgcggtacaggcccaggacgccatggctgcgaaccgtctgccgcacgcagtcccctgggggagggggcggtcaggaccccacggccctcggtgccgccgccctgggtacccgccccccgcggcgccgcggcctccccctcctcaccgatgccccggtaccgcggcgggtgcgagcgctcgtccagctgcagctgcgtcttcacgtactcggtggggaaggtgatgcagatctcgatgccacccgccaggccgcctgcagggaccgggaacccgctcctgagactcccgcccggccgctggcgctcgggcccctcccccgtcccggacttcggtcggcgcggccgccgcgccagtgccgcggggaacataggctggggccccacgcccccatgccctcaccccgttgtcccggcgaggcgcagggggtgacagacgggaggcgggcgagtcccagcgcgccgggtggggaccaggaccgcgcctccacgactccccagcccacggcccaacccggaagtggggcggggcctcagcgtcccgggcccacccagaagcgcggcgggagaggggtccgcgtcccggaggggcccacctgccaggatcgccttccccgggtgcgtcagcttggccttcccggacgcgggcgcggcggccgccagagcgcgcggggcgcggggcgcgggcatggcgggcgggaggcggggcgccctgtggcggcttcgggtccgagactccagaactccgcgctcggtccgcggtggcggcggcggccggttatggtcccaggggcggggcggccgcgtcagctccaggtcccgccccgcgtggtccgagccaggccccgcccccagcccgccccgtgcgggccgggaaactgaggcctgggcggggcgcgccgaggcaggcgtaggggcggggccaaagcgcagccaatggccgaggccgagtccctgggcgaccgcgagcggcgggacgggggcggggctgcgggaggcggagccgtggcccagctccgagcagtgggtcaaggtgcactgtgtgccgcgccgcgggatagcgggcctcgggtctgcgcgactgtcgagagcggcgggatccccagggatcccggaggccaggggcacaccctccccgaaaacacgtggggctagcccagtcccagaggaactctaacgtttcaaacctggaggcgggaggcgggaggccggtgagaaggggctacgccgccgggcccccctcccgcagcagccacgggccgggcctcacctgccggttcccacccacacctttcccggttgtagtttctgcgctcagcgaacaaggtcaggaaagaccacaaatgcaagcggctgtattctcctaggcagcttgtctgggcaacggaggtcccacaccccaaagaggacccagcaaatctttaatggactgcggggcctaggaaactggcccgtccctcctacccataccagcaccaagcagagcacctttgcctggataaaccgactttaatatttatgattgccaagaggctgagagtccttttatgaggtccggtacctccaaacaagacgtgttcatgtagtcttcaaactggcctggagggggcagctccagccagtcggaggcgcccaggaggaaggcctggctccagcaggagggcccacagtccagtctctgttgtcggctaaagctggtcttgcgccgtcagcctctaccctggcctccccaggctctgggatggctcagaggttgccgtcattgggtttcagcaaaaataaatattgtccaggtgtccctgcctcccattgcgtcccctgtgctgctggagtgacatgctccttggagaagttagtaactctgcaggtagggtgggtggtgacaacgcccactacacgcggaagttgtacattggaggctggcgaagttgggagcagaggcatatccataggggaagctggcaggggctgggcccacggcagggcctgcagagggggaagcccacaatgagcagagctcttcctgcccatgggggtcctctcctggctgcccctgagtagcccggggcccagggagcagggtctataggaccagcccttaccacccagacgctgaggccccaagagagcaggcatccagaggcaaggagcgtggggtcagccagagaacctggcctggctagaggataagctagtctccaaatgggacacttacttagtgcaatcagctgggtctcattcatgcccatcaaaatctaaaaaaaccagaatgacattaatggtggaaggacacactcagccggacgctggagacccgccggcgtgctgcacactcacaccacaccctcaggcctgtgtttgccccacagtgtccaagcaccccacagcctctccagtctgctcgacagccaggctgccctgggcaggttctcaggtgcaaagcccctcccagcacacaccagcagcagccttgctgtccaggggccaggcccagcaggacacagcagtagttcacagctaggcaggcacccctatcagaaggcaggcatccttacagcagggaggacagcggccgtgccaacattcctgggcgtacacttctccacacccagtagccactgggatccttccagcccccacccatctattcccatccccatccaaagcccagccaggtaagggcagtgggactttgactccctccctgctccctccccagggggttgggggctacaggtgccacctaccaaacacgagaggggcaggctctgtcacatgctcctcttgcttgcgcagactctccaaggcatccagtttgtccacctgcaaggaggcaaaagcacgtgagcacccgcttgacagagtgcagtccggcctctag

SEQ ID NO: 1563002 - DNA, 4001 bp, Homo sapiens
agattcttctgtcagtccatacacacttccctagtgagctcatctagtctcacgactactcttaggcatttcaaactcctccaaaaccaaagccaaatttatcatttcccccaaaaccttctccttcacagcctctgccatcccagtaaataccaccatccctccagttactgaagccaaaaactcttggagtcaaccaaccctcattttataaatatattccaggtcaatgatcacttctaccatgtctgctaccacccggatccaagtcaccatcatctctcgcctgataattgcttgtcccctgttcccttacattctactctcaacacagcagccagggtgatcacgtttaaaggtaaatcagcaagttcaacagctagccagagtgaaagtctcacacaatttggccccctgaaacctatttgcctctttgttccctccactccggaaacacaggcctccatgcccatcttaaagcaagtcacgcaagcgtccatctcagccttcatgctggctgaaaggctcttctggctgaactgaatgaaccaggcttcctgaattaggcattttcatgaaatgctgtgtcacttaattctctaaactctgtgaggtaggtatcacttcccccactttacagattaagaaagtaaggtttacagggcatctagctaacaaatgatggagttagggttaaatccagattagtctacagagaaggtgagctctcagtgaagtttctggaggctaaacagaggattcagtgatgttcctctgaagtcacagtgattttaacagctaaaggtgtgtgctaacaactggtgaagaatatgagaaaaggcagtcaaagagataaaagaaccacaagaggagtcacccaagccaaaagtggaaagttttaaggaaaagaggggagaggggaagtgtcaagtggaacctagacaccagaagcccaagaatcaagcgtatacctcataacaaaccacacttgtggtagacaggaacccagatcttgatttagaaagaaagaaaaaaaagccaggcacagtggctcatgccagcagtttaggacgccaaatcgagaggatcgtttgaggccaggaattcgagaccagcctgggcaacactgccagaccccaaaaattttttttaaaaatgtagccgggtgtggtggctcacacctgcagtcccagctactcaggaagctgaggtgggcggatcgctggagcccgggagatcgaggctgcagtgagtcgtgatcgcgccactgcactccagcttgggcaacagagcaagaccctgtccggaaaaaaaaaaaaaaaaaaaaggatctatcttctcctgccaataacggtgcccagagctatcctactaggtattgccacttgcccgcggcaagcgtgaagacaggctgtagggaagcatgtgactaagcaacacggcttcacacctacgttctcctccgggccagtaaagcaaagtgtgtgagtgtgcggtggtagcctgaccttaaacttcccacggcaaagatgcggaccctgagcgggcacgtgtgaacacggctctctaccccgcagtctctaggagaccaggaggtggcggagtctcggcccttaccccgaattcctccaacaactttccgccaatggcccattcctctctgccccacagtcatgacagtggaccccaacccacactacctccctctcagacccatccctcaggcatatcccgggactggcccccgagaagccttataacccgttgcggcccgggcgtaaagaccccgtctcaccacggctccggccacggcgtggaccaggctttcgtaggacagcacggaagccattggtgcggctcctcgaagacccagccacacttttcccacagatgccgcagccagtggagttaggaaaggagcaccggagctcagggtgtgagagtcgcaatccccgccctctcaaacccgcccgcctgccctagaaccacttccgggtcgcggggcgggaaagcgggggggggggggcggctaagaacgcccctgaacgctgattggcccctgtgggcgcggggcgggacagcgaggtgttcgcggggctgggctccaaggcgcaaggcggcctgacaccaggtacccggctcccggttcctccgacgttctctggcgttcccgggccctgaccagttcctccatctcagaagtcttaatggccttcttttactctggtgacaaagatggggaaactcaatgagactccagtctccctgtttctctgcgcctgagctcttttctattctgaaagtcacattttggccaagaggaaaaaaactcacttgtggacttggaaacttcttcctccagaaaaacccttgagtgtggtgggaagagatgttgagcatcaggagcccaaaatacaagacgcgagtgggagcctccccctagttggcaactatggaagtcatttaacctcttgggtttcctctgtgaaatgacaatgtactagtaccaacaatccccatctgctgtgaggattacgaaagccaatttatgtagtagtacttcataaaatactgaaggaaaaaaatttttttccatgttgcaaagtgactaacaaaattacacaaaactaaagcagccacattcagctttaacctgtcatactgtgagattctgcttcaggatgctcctcagggactcagggattctttcctgagacaccatcaccacttgtctttaccatgtttccttttagaatatcctcgtgataactcctcagtgctgactacatgccaggcttagtgttttatgcccatcatcacacttaatccctgggagaggggtctaacaaagtttaacctggccgttttcacaaaatttgcagaagatactgcttccaggaacattcccatcacgccatagaatcatgacgtgaaagtgaaggaccaaaagtgaagcgaagatgattttgggctgggcgcagcggctcaggcctgtaatcctagcactttgggaggccgtagcgggcagatcacttgaggtcagaagtttgagacaagcctggcccatatggcaaaaccctgtctctattaaaaatagaaaaaattagccggacatggtggcacgcgccttgtagaaattacaatgttgaaactgcagctactagggaggctgaggcaggagaatcgcttgaacccaggaagcaaaggttgcagtgagccaagattgcaccactgcactctagcctgggacagagtgagactcctaaaaaaaaaaaaaaaaagattattttggcatgggaacatagaaactagttggctgtaaaacttgagaactcagttctcattgactcctgatcaaattgggagcttgctgtcaagaatatactggattatgcatcatagttatgaaaacattgttaatactttgttttgacgtttttgtatcttacataccaaaaacattttgatcagcttttttttttttttaaacctgagacagtgtttctctgcgttgtccaggctggtcttgtactcctgggctcaagtgatccacctgcttcagccacccaaagtgctcgtattacaggcatgagccactgtaccgggccttgcaaccttttttttttttttcagatggagtttcactcttgtggcccaggcttggctcactgcaacctccgcctcccgggttcaagtgattctcctacctcagcctctcgagtagctgggattacaggcatgcgctaccacgcccagctaatttttgtatttttagtagagacggggtttcatcatgttggtcaggatggtctcaaatctcttgacctcgtggtccgcccgcctcggcctcccaaagtgctgggattacaggtgtgagccacagcgcccagcatgatcaactgaagactgacatactgaaaacagtatttttttttttttttttgagacggagtatcgctctgtcacctaggctggagtgcagtgacgcgatcttgactcat

SEQ ID NO: 1563003 - DNA, 4001 bp, Homo sapiens
gaggatcatttgagccctggggttggaggctgcagtgagctatgatcataccactgcacttcaacttggcaagaccctatctctattaaaaaatagaaaatttggcagggcgtggtggctcacgcctgtaatcccagcactttgggagcccgaggtgggtggatcacgaggtcaggagatcgagaccatcctggccaacatggcaaaaccccgtctctactaaaaaatacaaaaaattagctgggtatagtggcaggcacctgtagtcccagctactcgggaggctgaggcaggagaatggcgtgaacccgggggggcggagtttacagtgaaccgagattgtgccactgtactccagcctgggtgacagagcaagactgtctcaaaaacaaaacaaaacaaaacaaaacaaaaacagaatgagtctgcacagagtgacaaatgaggctgcaggcagaaataagagcatcccgagggagggctcctgggctcaagcgatccacccacctcaccctcctgagtagctgggatcacaggtgcacaccatcaacctggctaattaaaacaattatttttttgtagaggtggggcctcattatgttgcctgggcctgattttttttttttggagacagagtcttgctctgtcccccaggctggagtgcactggctcaatcttggctcactacaacgtccatctcccaggttcaagtgagtttcctgcctcagcctcccgagtagctgggactaccacacctgctaccacgcctggctaattttttgtatttttagtatagatggggtttcacgttagccaggatggtctccatctcttgacctcgtgatccgcccgccttggcctcccaaagtgctgggattacaggtgtgagccaccgcgccccagccaacttaagtcctttctaaaaattttttttactttatataaactgtttgtattcttttttctatgctatgcctcaggtttgaagatgttcagctcagattacctgcatctaaggaccaaaatgtaaatgccagggccattcttccaggtcagtttgcatcagaaccatgcaggttgcatctgttgctagttacaagagagagctaggcccttcttcagtttaaggtcttaggcgggatgccaaaatctgcatttccagcaagttcccagatgatggccaggctacattgtgagaacatcacaatagatcatgtgagtgagaatgatcagggcaggctgaggtggtggggagaggaacaccatcacttctcccaagctgcagtttctgcagatctacgctgcctttgggaaatgtttagcatcacactggacataattacttgcgctgcattttctgaattacacagtcttcgtcttagagtggagccagggcaaaagaggaattcaagctggaacaaggagtccgagaagacgcgactgctggacagaacaagcgatgaagccagtccccaaactgatgagcccgcagctccatccaaattaaatgggctgagaacaccaacactccaccctcccggtacgattgcatggcagggaggaaccaaaaatatttttccttcatctgctatctcagctaagcagtacactctttctagcacctcactagagtccagtttttctgtattctgtattcacaatacaggtttattatgaactctgagcagatgaggctatttttcccccttttggtttcttagtaactaggcaaagtacaaggctcacggtgggtatttaataaatacttactgacaacttgcctgcaagcgagtcgacgttcatctcagttgttgaggcactcacgggccaggcttcactcgactcttctcactgcctactcagttccttctcaaagcaaagcccgtggatatatccaaggaactggcttcattgcttttaaaaattctgtccagctttaactggctagaataggggtcctcgtccttgtcatatgctgtccagaatgaagtccaaatccaggattctgggagcatgtcatgctttctcgaacctgcaggagtctcaagggcacctgcattgatatgcatgtcatggctgtagaagggggctggcattgcagcacacaatagccaaatctggggattttccagatgccttcgccttcttggctagtatttttcactgaaggttttttataaaactgcttaaggaaactaggggagtgagcattgctagcagaaaggggactaaaatagatgcacagaggtcccttaaaagtccaaaggaacaccacgaggccagggaaacatctgcagggtcaatgcagagaaatcaacagcagttgtgggggaggacagtgaaggcagccacacagcaggcagctgctgctgggtcacccagggctctgccgcggctccatgagcgcccagaaggaaaggtcccatgatacctcttgcataacaactgcatgacataggccgttcaccttccaggaagattccagggtaaagatcagcccccaaatagcccgtctggatggttattttctcaattccgttggtagcactctcagagaacatagagtatagcaaaatggagcccacaaaggggctgatttataaaacttgcgttgcctttccttccagtaacacgaattggtttagagacaagagacattaatctttaacaagagaagcacctatggatgtctccaaatgtcaaaatagaaagttgatcagaacttttgagactaatctacagtaacaatgtatagcttcctgtctccctaaatcttgcccgagtagcttttatgctcttattttaagaagctcactgtgtaggattatctgtgtaagatatatttacccaggatgcttaacaagcgttaaacagtaacagttccaaaaatagagccacatttacactgcctactgcactgttttgaaacagttaaccagtggaagatgctaacttttggtacatatatttgttgctggttttggcccgaagaagataaatctggaagcactctaaatggctaagttccttataaaaaataaaggccgggcacagtggctcacgcctgtaattcctagcacttcgggaggctgaggcagacagatcacttgagctcagttctagaccagcctgggcaacatcgtgagacaaaaaattagctgggtgtggtggggtgcccctgtagtcccagctgcttgggaggctgtggtgagaggactgcttgagcccgggagattgaggctgcagtgagctgagaccatgccactgtacctagcctgggcaacagagtgaaaccctgtctcaagaaaaattaaagcctatctttttttttttttttcatgttgtgagaatttaataagtcaatgaacataaggtgcttagaaccaagcttagggtatggaaaacagagaatagatgtttcttgttattctttttttttttttaatttatttttttattgataattcttgggtgtttctcacagagggggatttggcagggtcatgggacaatagtggagggaaggtcagcagataaacaagtgaacaaaggtctctggttttcctaggcagaggaccctgcggccttccgcagtgtttgtgtccctgggtacttgagattagggagtggtgatgacacttaacgagcatgctgccttcaagcgtctgtttaacaaagcacatcttgcaccgcccttaatccatttaaccctgagtggacacagcacatgtttcagagagcacagggttgggggtaaggtcaccgatcaacaggatcccaaggcagaagaatttttcttagtgcagaacaaaatgaaaagtctcccatgtctacttctttctacacagacacggcaaccatccgatttctcaatcttttccccacctttcccgcctttctattccacaaaactgccactgtcatcatggcccgttctcaatgagctgttgggcacacctcccagacggggtggtggccgggcagaggggctcctcacttcc

SEQ ID NO: 1563004 - DNA, 4001 bp, Homo sapiens
ttttagagacaaggtctcgctacgtcgcccacgctggagtgcagtggtgagatcctattagatccctgcagcttcgaactcctgggcgatcctcccaccttagttggtgctattttaaataaggctgtcaaggaatacaagtgcaaatcaagacaaaggaggtgagggaatgtgccatgcaaatacctaaagaaatcagtccagattgggaaggaacccctagaagcggtgggcagtgcagtgcgggcgctctcctctggctgcgccctttccctctgtgaggcaggacgtcaggtcagagctgagggagcatgaggaggaaagaggcgggggtgggaaacagtctcgggagggggcgagcagtcaggattgcagcgctcggagggcttactgcctctgaggtcagggctgatcggcagaggatttagcatctctgggggctgggatgccagggtccagcaaccttgctctggcccacaggccgaccctgggcgtaaacacctgcctatgcacatctgagcctagcacctaacgccactgtacatacaagcacgatatttttgaacatttgacgacttagttaagcctcccaggtggctgcacctgcgcagttcactcaggtccgcaatccctcatctgaaacgcctggtctgggcaagtatgagaattcataccattctagatcgcaggagggcgtggagcattcgaaagaggggcctgagcggaggtcttgctgtcccagggagaccccggctgccattagcaagcggtgagccggcagcctgtgcgcggagggaagggcagcgcgcagcgcccagtggtgaaagaggcgctagcgcacgcgcagtgagcgtttgagaggagcaaacccgtcgagacgaagctgtagcgcaagcgcagtgggtattgagagcggccgcaccagctgagggttcgcgcaacgctaaacgatggccgggactaaggcctgagactcaagctcaggcgcagtgaagcgcagagccgctagagtgtcgcggagggcgcctgaggcgcatgcgcggactcagcgtttttaagaagggctgggggtgctggggagttcgccccagcgtgttgggggggagtcgccgccgcggggggggggtttggggtcaccgccgcggggtttgtcgccgccgctgggagctcacctgcgtccgaggccgtaaggacggctccagttcatcctccatccgcctctgccgcagcactgaggctgaaaagccgctcactccttactcggctaagccccaagctcatctctgcaggccggaagggagctctggtccaaggtcatctcggccaagcccctgcattcgccctcgcaagtgccagcaagcgactctggtcgccgcgctcccaagtcctcccccgaaattccggctctggcccctcgtccccctcctttgctacagtctctggactaaatgtctgcgggtctctgtctctcgctggtctgacctcagccgcaaccctgcgcgattccctgcgccggtcgccactgccggccgccagaacctcggaggccactgcccctgggcgttctccggagggccaagcccttggttgtgcacatctatgcacgccccacctacacccccccccccccacacacacacactttggttcaggtatccccgacctttccccagaggacgggaaaattaggaaagaccgaaagatagacccaccagtcttcggagcgctctcatctgtgcgtcctgggcagagcgagagacttggcggaatgcgggtaggagaaccggtctcgggttgccgccaggggatccattgcgtgagaggcaggtccgacttatgctgggggcacttggagttgaggaaccacagagtccactgaaccggattaatcttttatccctcagggcttctcaggccctgcatggaggaatccaggagctggacaaagaccaactgaaactagacttgccaaagatgctatttgtggtcacagaaacatagagctggacatgaccttaagaagtcacctgagcagacactgtgatgggcactgtagtagctctattgctcagacttggtttttgtttgacttttgctgctctgaactttaattcctaaaaacactgcatttttaaggaaaaacacaaaatattagcagttataataaataggtattttattgcatgcttttcgtgcatctattaagatgatcatatgggtattctcctttaatctgttaatgagatcagttacatcaataaactttctaatggtaaaccattcttgaattcttggggtagacgcaacttggtcataatattattgttattaatacattgttagtttcaactgctgatattttattttgataggttaatttttttcttttttttttttaatttatttattttttttttattgatcattcttgggtgtttctcgcagagggggatttggcagggtcataggacaatagtggagggaaggtcagcagataaacaagtgaacaaaggtctctggttttcctaggcagaggaccctgcggccttggccttccgcagtgtttgtgtccctgggtacttaagattagggagtggtgatgactcttaacgagcatgctgccttcaagcatctgtttaacaaagcacatcttgcaccgcccttaatccatttaaccctgagtggacacagcacatgtttcagagagcacagggttggggataaggtcacagatcaacaggatcccaaggcagaagaatttttcttagtacagaacaaaatgaaaagtctcccatgtctacttctatccacagagacccggcaaccatccgatttctcaattttttccccacccttcccgcctttctattccacaaaaccgccattgtcatcatggcccatccccaatgagccgctgggcacacctcccagacggggtcgtggccgggcagaggggctcctcacttcccagtaggggcggccgggcagaagcgcccctcacctcccggatggggcggctggccgggcggggggctgacccccccaccaccctcccggacggggcggctggccaggcagaggggctcctcacttcccagtagggacggccgggcagaggcgcccctcacctcctggatagggcggctggctgggcggggggctgtcccccccacctccctcccggacggggcggctggccgggcagaggggtcctcacttcccagtaggggcggccgggcagaggcgcccctcacctcccggacggggcggccggccggaaggggggctgaccccccccacctccctcccggacggggcggctggccgacccccccccccccaccccgcctccctcccggacggggcggctggccgggcagaggggctcctcactttccagtaggggcggccgggcagaggcgcccctcacctcccggacggggcgactggccaggcggggggctgatccccccacctccctcccggacggggcggctggccaggcggggggctgaccccccccacctccctcccggacggggcggctggccgggcagggggctgaccccccctcccccctcccggacggggcggctggccgggcagggggctgacccccccacctccctcccggatggggcggctggccaggtggggggatgacccccccacctccctcccgggcggggcggctggccgggcagaggggctcctcacttcccagtaggggcggccgggcagaggcgcccctcacctcccggatggggcggctggccaggcggggggctgatccccccacctccctcccagacggggcggctggccgggcggggggctgaccccccacctccctcccggactgggcggctggccgggcggggggctgacccccccacctccctcctggacggggcgtctggccgggcagaggggctcctcacttcccagtaggggcggccgggcagaggagcccctcacctccaggacggggcggctggccg

SEQ ID NO: 1563005 - DNA, 4001 bp, Homo sapiens
aggttttctgaagtttccagaacctacggactatttattcatttattagtcaaatactgagtgttggccggatgtcgtggcccacacctgcaatccctgcactttgggaggccgaggtgggcagaccacttgaggtcaggagttcgagaccagcctggccaacatggtaaaaccctgtctctactaaaaatacaaaaattagccgggcttggtggtgggcacctgtaatcccagctactcagaaggctgaggcagaattgcttgaatccgggagggaggcggaggttgcagtaagcccagatcgcgccactgccctcctgcctgggcaacagagtgagactccatctcaaaaaaaaaaaaatgctgaatgtttatctcagccaggaagtgtgctggggggcaagatacagctgggaaagagacagctgtgctttcaccattcagtgagatactgcactggaggctgggggagcagaggaagtggctctggagggcagaatcctgctgaaggccttgccataggtctggagacaggttggtgacaggggccctggctgcccatagttccaataaggcctaagtaactttctctaaggctggaagccttaggaagaagccaggtgagaaacctggcatctggtcccattgaggccaaattacagctccacgggggccgcatggaagtgagagctcccttaagacagcagatgtgaaggaagcagcgaacacagtgcttgatggcagctgagctcatgtagcaggagatattgacaggtctctaagactacaggaaatcgttgaattcaatgagatcatgcatggagattgcctataccgtgcctggtcatggtaagcattcagacattagctacgatagggaccattaattcagcaaacaaagatttattgcctccctattatggtcaataatcctactgttctaggtgttgggatacagcagtgaacaacagacaaaatccatgagctgtcagagctttccttccagcagagaaagacaagcaatcgcaaaatgaacaagcaaaatatatagtacatcagctggtgctacagagacttaaagcagtgaaggggcgtaggaagtgtttggaccaggtggtgctattttattttattttattttatttttattttttagagacaaggtctcgctacgtcgcccacgctggagtgcagtggtgagatcctattagatccctgcagcttcgaactcctgggcgatcctcccaccttagttggtgctattttaaataaggctgtcaaggaatacaagtgcaaatcaagacaaaggaggtgagggaatgtgccatgcaaatacctaaagaaatcagtccagattgggaaggaacccctagaagcggtgggcagtgcagtgcgggcgctctcctctggctgcgccctttccctctgtgaggcaggacgtcaggtcagagctgagggagcatgaggaggaaagaggcgggggtgggaaacagtctcgggagggggcgagcagtcaggattgcagcgctcggagggcttactgcctctgaggtcagggctgatcggcagaggatttagcatctctgggggctgggatgccagggtccagcaaccttgctctggcccacaggccgaccctgggcgtaaacacctgcctatgcacatctgagcctagcacctaacgccactgtacatacaagcacgatatttttgaacatttgacgacttagttaagcctcccaggtggctgcacctgcgcagttcactcaggtccgcaatccctcatctgaaacgcctggtctgggcaagtatgagaattcataccattctagatcgcaggagggcgtggagcattcgaaagaggggcctgagcggaggtcttgctgtcccagggagaccccggctgccattagcaagcggtgagccggcagcctgtgcgcggagggaagggcagcgcgcagcgcccagtggtgaaagaggcgctagcgcacgcgcagtgagcgtttgagaggagcaaacccgtcgagacgaagctgtagcgcaagcgcagtgggtattgagagcggccgcaccagctgagggttcgcgcaacgctaaacgatggccgggactaaggcctgagactcaagctcaggcgcagtgaagcgcagagccgctagagtgtcgcggagggcgcctgaggcgcatgcgcggactcagcgtttttaagaagggctgggggtgctggggagttcgccccagcgtgttgggggggagtcgccgccgcggggggggggtttggggtcaccgccgcggggtttgtcgccgccgctgggagctcacctgcgtccgaggccgtaaggacggctccagttcatcctccatccgcctctgccgcagcactgaggctgaaaagccgctcactccttactcggctaagccccaagctcatctctgcaggccggaagggagctctggtccaaggtcatctcggccaagcccctgcattcgccctcgcaagtgccagcaagcgactctggtcgccgcgctcccaagtcctcccccgaaattccggctctggcccctcgtccccctcctttgctacagtctctggactaaatgtctgcgggtctctgtctctcgctggtctgacctcagccgcaaccctgcgcgattccctgcgccggtcgccactgccggccgccagaacctcggaggccactgcccctgggcgttctccggagggccaagcccttggttgtgcacatctatgcacgccccacctacacccccccccccccacacacacacactttggttcaggtatccccgacctttccccagaggacgggaaaattaggaaagaccgaaagatagacccaccagtcttcggagcgctctcatctgtgcgtcctgggcagagcgagagacttggcggaatgcgggtaggagaaccggtctcgggttgccgccaggggatccattgcgtgagaggcaggtccgacttatgctgggggcacttggagttgaggaaccacagagtccactgaaccggattaatcttttatccctcagggcttctcaggccctgcatggaggaatccaggagctggacaaagaccaactgaaactagacttgccaaagatgctatttgtggtcacagaaacatagagctggacatgaccttaagaagtcacctgagcagacactgtgatgggcactgtagtagctctattgctcagacttggtttttgtttgacttttgctgctctgaactttaattcctaaaaacactgcatttttaaggaaaaacacaaaatattagcagttataataaataggtattttattgcatgcttttcgtgcatctattaagatgatcatatgggtattctcctttaatctgttaatgagatcagttacatcaataaactttctaatggtaaaccattcttgaattcttggggtagacgcaacttggtcataatattattgttattaatacattgttagtttcaactgctgatattttattttgataggttaatttttttcttttttttttttaatttatttattttttttttattgatcattcttgggtgtttctcgcagagggggatttggcagggtcataggacaatagtggagggaaggtcagcagataaacaagtgaacaaaggtctctggttttcctaggcagaggaccctgcggccttggccttccgcagtgtttgtgtccctgggtacttaagattagggagtggtgatgactcttaacgagcatgctgccttcaagcatctgtttaacaaagcacatcttgcaccgcccttaatccatttaaccctgagtggacacagcacatgtttcagagagcacagggttggggataaggtcacagatcaacaggatcccaaggcagaagaatttttcttagtacagaacaaaatgaaaagtctcccatgtctacttctatccacagagacccggcaaccatccgatttctcaattttttcccca

SEQ ID NO: 1563006 - DNA, 4001 bp, Homo sapiens
gcattcagacattagctacgatagggaccattaattcagcaaacaaagatttattgcctccctattatggtcaataatcctactgttctaggtgttgggatacagcagtgaacaacagacaaaatccatgagctgtcagagctttccttccagcagagaaagacaagcaatcgcaaaatgaacaagcaaaatatatagtacatcagctggtgctacagagacttaaagcagtgaaggggcgtaggaagtgtttggaccaggtggtgctattttattttattttattttatttttattttttagagacaaggtctcgctacgtcgcccacgctggagtgcagtggtgagatcctattagatccctgcagcttcgaactcctgggcgatcctcccaccttagttggtgctattttaaataaggctgtcaaggaatacaagtgcaaatcaagacaaaggaggtgagggaatgtgccatgcaaatacctaaagaaatcagtccagattgggaaggaacccctagaagcggtgggcagtgcagtgcgggcgctctcctctggctgcgccctttccctctgtgaggcaggacgtcaggtcagagctgagggagcatgaggaggaaagaggcgggggtgggaaacagtctcgggagggggcgagcagtcaggattgcagcgctcggagggcttactgcctctgaggtcagggctgatcggcagaggatttagcatctctgggggctgggatgccagggtccagcaaccttgctctggcccacaggccgaccctgggcgtaaacacctgcctatgcacatctgagcctagcacctaacgccactgtacatacaagcacgatatttttgaacatttgacgacttagttaagcctcccaggtggctgcacctgcgcagttcactcaggtccgcaatccctcatctgaaacgcctggtctgggcaagtatgagaattcataccattctagatcgcaggagggcgtggagcattcgaaagaggggcctgagcggaggtcttgctgtcccagggagaccccggctgccattagcaagcggtgagccggcagcctgtgcgcggagggaagggcagcgcgcagcgcccagtggtgaaagaggcgctagcgcacgcgcagtgagcgtttgagaggagcaaacccgtcgagacgaagctgtagcgcaagcgcagtgggtattgagagcggccgcaccagctgagggttcgcgcaacgctaaacgatggccgggactaaggcctgagactcaagctcaggcgcagtgaagcgcagagccgctagagtgtcgcggagggcgcctgaggcgcatgcgcggactcagcgtttttaagaagggctgggggtgctggggagttcgccccagcgtgttgggggggagtcgccgccgcggggggggggtttggggtcaccgccgcggggtttgtcgccgccgctgggagctcacctgcgtccgaggccgtaaggacggctccagttcatcctccatccgcctctgccgcagcactgaggctgaaaagccgctcactccttactcggctaagccccaagctcatctctgcaggccggaagggagctctggtccaaggtcatctcggccaagcccctgcattcgccctcgcaagtgccagcaagcgactctggtcgccgcgctcccaagtcctcccccgaaattccggctctggcccctcgtccccctcctttgctacagtctctggactaaatgtctgcgggtctctgtctctcgctggtctgacctcagccgcaaccctgcgcgattccctgcgccggtcgccactgccggccgccagaacctcggaggccactgcccctgggcgttctccggagggccaagcccttggttgtgcacatctatgcacgccccacctacacccccccccccccacacacacacactttggttcaggtatccccgacctttccccagaggacgggaaaattaggaaagaccgaaagatagacccaccagtcttcggagcgctctcatctgtgcgtcctgggcagagcgagagacttggcggaatgcgggtaggagaaccggtctcgggttgccgccaggggatccattgcgtgagaggcaggtccgacttatgctgggggcacttggagttgaggaaccacagagtccactgaaccggattaatcttttatccctcagggcttctcaggccctgcatggaggaatccaggagctggacaaagaccaactgaaactagacttgccaaagatgctatttgtggtcacagaaacatagagctggacatgaccttaagaagtcacctgagcagacactgtgatgggcactgtagtagctctattgctcagacttggtttttgtttgacttttgctgctctgaactttaattcctaaaaacactgcatttttaaggaaaaacacaaaatattagcagttataataaataggtattttattgcatgcttttcgtgcatctattaagatgatcatatgggtattctcctttaatctgttaatgagatcagttacatcaataaactttctaatggtaaaccattcttgaattcttggggtagacgcaacttggtcataatattattgttattaatacattgttagtttcaactgctgatattttattttgataggttaatttttttcttttttttttttaatttatttattttttttttattgatcattcttgggtgtttctcgcagagggggatttggcagggtcataggacaatagtggagggaaggtcagcagataaacaagtgaacaaaggtctctggttttcctaggcagaggaccctgcggccttggccttccgcagtgtttgtgtccctgggtacttaagattagggagtggtgatgactcttaacgagcatgctgccttcaagcatctgtttaacaaagcacatcttgcaccgcccttaatccatttaaccctgagtggacacagcacatgtttcagagagcacagggttggggataaggtcacagatcaacaggatcccaaggcagaagaatttttcttagtacagaacaaaatgaaaagtctcccatgtctacttctatccacagagacccggcaaccatccgatttctcaattttttccccacccttcccgcctttctattccacaaaaccgccattgtcatcatggcccatccccaatgagccgctgggcacacctcccagacggggtcgtggccgggcagaggggctcctcacttcccagtaggggcggccgggcagaagcgcccctcacctcccggatggggcggctggccgggcggggggctgacccccccaccaccctcccggacggggcggctggccaggcagaggggctcctcacttcccagtagggacggccgggcagaggcgcccctcacctcctggatagggcggctggctgggcggggggctgtcccccccacctccctcccggacggggcggctggccgggcagaggggtcctcacttcccagtaggggcggccgggcagaggcgcccctcacctcccggacggggcggccggccggaaggggggctgaccccccccacctccctcccggacggggcggctggccgacccccccccccccaccccgcctccctcccggacggggcggctggccgggcagaggggctcctcactttccagtaggggcggccgggcagaggcgcccctcacctcccggacggggcgactggccaggcggggggctgatccccccacctccctcccggacggggcggctggccaggcggggggctgaccccccccacctccctcccggacggggcggctggccgggcagggggctgaccccccctcccccctcccggacggggcggctggccgggcagggggctgacccccccacctccctcccggatggggcggctggccaggtggggggatgacccccccacctccctcccgggcggggcggctggccgggcag

SEQ ID NO: 1563007 - DNA, 4001 bp, Homo sapiens
ctatctgggtttagatcttgcctctgctgctcactggccacgtggcccagggcaagcctcttcatctatcaaatgggaacaatacagtgagataaaaggctagtcaaacacagatcactggctatcactaaatactggtttgtaattccagaacttcaggaagctgaggggggaagatcgctgaggacaggagttcaagacctaccttggcaacatagcaagactctgtgtctataaaaaaaaaaaattagctgaccaggtggggtggctcacgcttgaaatcctagcaccttgggaggtcaggagttcaagatcagcctggccaacatggtaaaatgctgtctctactaaaaatacaaaaattagcttagcgtggtggtgtgcacctgtagtcccacttacttgggaggctgaggcagaagaatcacttgaacccaggatgcggaggctgtattgagctgagatctcaccaatgcagcctgggtgacagagccagaccctgtctaaataagtaaataaacaaataaacacgagttgggcctccagagcctgagtctggggcctggaactcactgaactgttggccctctctgagcctcagttctgcttcctccacagccatgaacctcagtttcctcatttgtaaaatgggacaacagccatacccctcacagggccatccaggccatgcacccacccggacccccaccttctcaattggccacccaggcacttactttgctgaaccgacttgagtccgcggaggcaggtggctgcgagcaggaagccacagccggtagggggtgtccggaactctccagccaggctgcaggcggcccccaggcagagcggacccatggcggccaactgaagtgggtggtggcggcggcccagcagcagcgccgacagggccagggtgaacagaggtgtggtggtagtaaccagttgtgccaggtccaggggcacagcccttaggcccacgttgccgcaggccatggacgtgccaaaggtgagactgagcagtaggactcggcagcgagtgccgcctggcatggggcgccgtgccccccggtggcatgccagggctgccaccagcatgtgcagggccgacagcagcaggggccgcccaaagccgtgcactgtgaagatccacttgttgaggcttgacatgctggctcccgccagcagccacaccagtgctgccatggccactcgggcccggccaggctgccggagggcctgagggctgccagggggccactcggggggcccagccgcctgagcaccaccagctgctgctcctacttcggctgaggtcatcctgccatcatggtgctccggcgggcagcggcacatccgcaccagtgaggctagggcaggaggcgggctccccagtgacgacctctgggccaccagagagttccgcttggggccaggctagatcctggttcctccgaccccgtgtcccgtttcagacaggtgaggacactgcttacttgtgccaggcctgtgccagcgatgtctagaagctaagctgtgtttccagctcagacagggcagagccaaggtcgcggctgctaggatgccagggtctccgatgctcaagcgtgggctccaggcacctctgccccgtgccaggtggtctccactttcctcctcgcctagtgcccacgttatgcttttagatgaaatcctcgttccttttttctcttcagtccccaggtcattagggtgcgcgcagatccagaccctgggaactcctgcgtgctctggccgtgaccaggcctggcaggggggcgatctgggctccgcgcctggcggtgcccggcccggggggtcgcgggctcgctgcctcccacagcgcccgggcagtgagctgacaccacggcccgtcctccggccggtgcctggcggcgagctaggcgcggatccagcagggcctgcgctccaactcctgctctctgaggctttggctgcggctctggctgcggctgtgactccggctgcggctcctgctgcgactcacgcccggctccagctcaggcccggcacggcgggcgcggcggtgcgctcttgactccgcctccgcctctgcctcccccgccgccgcccgctccctacacggaaaattgggctgagcaccccagccaagccccgccccaggccaagccccgcccccggaccgggagggcggtcttgccccgccccaacgcctcccgctcacagcccctcccccatcggcctggcatttcccccatcagccctcctccgcccggggcctgcgcatctgcccagtagacccccccacgagctggcgtggtcagcctctcttcgccgccaggggggaccaagtcgctccccacccagcgccaaggcgagccctccatggagatgaacgcgcattgctggagacactggggtatcccgcacagccgcccaggctatcttcaagaagcagggtagtgaggaggggcccacagcccccatcctaggaccagtcttacgcccacctgatctctggccacaattatctcgtgggacctcagcatccagcagagctggattacggggtcccttaaggcacctccatcgcccctccgtagccccagcatcctccccagcctcccagtccagggcggcgccccctggggaccctcagagggaagctgaatcaccaggcagggatacccacagctgcggaagtaggtaccgccggccggcatccttccccggccagcagcctctgtccggtcccctgagcactcgaagctgactcatagcagaacttcctggggtccaccctgtgccccagccccggcaagacagagccctgggctgggaggcagagcggttgccactgagcccttgttcctgtctgggtctcggttttcccaccagaacgacagacgctctctgaggtcaggattgggtaaacggcgcgccccagggcagaagaggtccatccagattccaggctaggccaggccctggcccctctgagctctgaagtccgggagcacgaggaccaaggcccagccatgtgcccagtatcagatgtgagcctctttcctgttgtcggtcttcctactaggctcctgcccaagaggacccagctcaccccttgcctgttgtctaaccagcaaatccttgatgacagcaacctgtcttgagacacaagatctcaaaggggtaccgctgaacccagcccgctgcgccctctggtggccaggcgctgaatatagccctcaatccccatcccaatcacaggacgcgggtttaaaatccccagcctcaaaggaggcctgctgaatcagaggctctctgtcacgggtgggcctgggaatttacatggtcacatttgcctctgtaagtccgacgcccgctggagcctgcagatctctgctgaatagcctaagctacagcgcagggggtgcagatagggaaatttccaggccaaggaccaaaaaatggtggcatttagtgtttctccagaaagggttgtggaaaggaaactaagccagccaaagcggatggcccctctcccgcacccccttgccatttcctgaggaagagaaatctgggacccctaagggttataattatctttgatattttgtcaggtttttttgtttgtttgttttccaagaccgagtttcgctcttgttgcccaggctggagtgcaatggcacgatctcagctcactgcaacctctgcctcccaggttcaggtggttctcctacctcagcctcccgagtagctgggattacaggcgtgcgccaccaaacccggctaatttttgtatttttagtagagacagggtttcaccatgttggtcaggttggtctcaaactcttgacctcaggtgatccacccaccctggcctcccaaagtgctgagattacaggcgtaaaccaccacgcccagcctggattttgtcagttttctagtaagtctcctttagtaaaaaacaatagtctgggtacagtggctcatgcctgtag

SEQ ID NO: 1563008 - DNA, 4001 bp, Homo sapiens
tcacaaccacatgaggcttcaatttcctcttctgtaaaacggggattagcattctggccttccctgtcttgtggcttttgtaaaaatatactacccacctgaccactgctgcccattttacttaaaaggataaacattgttcagagcccagatcataccatggaaggtaaatgacaatagtagttttttttaatcctagagtccataaacagctttcagattcacctctgcgtatcctcaccacaaccatgggggagtcattagaatagataagagtgtacctatgttaaagttgagtaaactggaggctgagggaagttacccaatgttccatgatttgaaccatgtgaaagccagtagtgaacttgagtatcctggctcctagttggtcagtttccactatgtctgggaagctgagagtattgaggaaaagtcagccatactgaccccatgtgacacttgggaggcattctgccacatctagtttctacaattcctttggaaaaaaaaaaaaaaacacttccttttgtccctgaaaaagctctgtgtccacagaagtgttcatgcctaccttcctctcctctaagtcaaaagagttcaacacaatcaccagctgctacagcagcctccctgggcttatcacctccacctccataacaatcacgagaatggctggaacatctgcaaacattttatatattttttgtaattttttttatttttgtagagacagagtctcactatgttgcccaggctgatctcgaactcctggactcaagcaatcctcccaccttggcctctcaaagtgctaggattacaggagtgaaccaccacagtcggtcctgcacacttttaaaacatctcctcctctagttgttgggcctgccacagtctgtcataagtgaaatgcccatgttccaggtggctgagaacaagtttctctggtttgctgtgtccccagagtcccaaaaggagacacacacatttccctctccccagtgccaggtcacccccaggtcttcctcctcctccttttccacccatctttctcatctctaacttgatccagcccctgggatcctcatgcacaaggcctctgggttagcctctcccaggagtggggcatgggtcagcatccctctgtctgccacctcagcatccccatctctggggctggcagaggctgtggctttcccactccacaccatttctttcccatctgaaactggatgactaaaaggtaggacagtagtcacctgctagaggctcatctcccaagccccagagccctccctgtagctctaagcagccgctttcctgccccttacactttccagcggtctcttcaaacccccaccttccttctctgctcacaggctcaggtatcctccttggtccttcctggcaggctgccctgggcacccttctcacttctgctcatccttgcttgccctcctcccttcatgctgtgcctctgagtgcttctaaagtgcttccaagtcatttcctctcccctccaccgacacttaagcctactgccccttgcagctcagcgaggccattgctcctcctctgtgcgcaccctccccacccgcatcccagaacccgctgcatacccacagtccgacggccatcactaccacgaagtagataacgatgatggagatatcggctgcattgcgaatgagctcgtgggtctcaacaggccgggtgaccgcggtggtcttggggctccaggtgctactgtccatggtggcagcgttgcgtccttccctctcgccagggccgctagctccttatacggcctcctggttaatgatcagcaccaggggaggggacctgggactttgagggagcagggcagtagcgcggggcccctgcgatgccttgcggctgcaccgtcaggaagcagctccgggcgtggagcccaggaaggagcacccggctgagctgttggctggggcggcggcccggcaggtaagagctgtcctgcgaatggggaggggccagccagggggtggtgcccgcctggcacaaaggcccactgtactcccacagcaggcaccagcagcgccaccacacctgcccttgccagagctggagtggctccattgagggaacaggccacctggggctaggagcctagaggcttcagatcacctgccacccatccttggactagtcccatgccttctaaggacttggcttgtccgcttgtaaaatgggtgcagcactcttctgaagaatcagtcaagtcttgttctccctggagaacattcttgagaggacagagagttgctgggtgtcactggaaaaaaaccagcacaatcctaatctcttggccacaaggacagccacccacccacccacattcctgactccccctccacagcctgcagcccccaggtccactgttacccccactgtaaagaggaagaaactgagactgggggaagggatctcaccgggagctatttccttgccctgtccctctcccagtattgatgcagggccctccagaggcagcagaagggaagatactagagaaccctttccaaggagttcatcaaaccctgaccttcctggggactcagctcacccatctggaaacacatgtctaaacagcaagccagggctcagaacagagatgaccaagagaggaggcatgacttgcccaaggtcatacaggaaaccagcagcagagctggccctgcagcccatgccagggttcagagggagggctgtggggtattctcaggggctggctctagaggccacagagcagccaaaagtgactgttcccaaagaggggggccttgctctgatggggaggtgcagggaggcagaggaccacagaaaccctgccaggactctggtctgcctcaggccctccctgcccactgctagacaaccacccactgcctaaatgtgagcatcctgttcctttgcactcaatgcttcagaggtctgcctcccctccttccgtatcagcaactgttcttcccactgaagctgcagacaaagaatcattatttggacagcatccccacaggtcttccccatttcccccacacatcccccaggactgcaaactatataaggctatgtcctggggccagtataatgcctgcccaaaggaagcaggaattcttacgaggaacctgaaagcaggggctgtctgctgtggatgcctcccaagacttagagctcagctgtcagctgcagcttggagcaactcgccttttgcctgtgttcattcattcctgcattcagccaagttttttcacctgaatgtatcccaggaagagtccctgcccttaggaagcttctgttctagtctggaagtgaacccacccacaggaaaagtccagccctgaacccaggtgcaggtgcaggcagccaggccatgccaagttccaaaagtacaaggcatagaaagtgaagcgagcaggagagagaactggaagtactaaaggacttcaaaggagggacagagccattctttgatcttttaggagagccaaacataaatgggaaaagaaaggaaaggatggtgcccaggtagaggtcagaaaatgcatccattcattcattcatttattcttacaacaaaagagcagcttctatgtgccagatcatatgtaccgaccctggaatacagctatgaaaagacacagagctcttgccctcacagagcttcctgaccaatgacagagatagatcagcatcaaagatgagacaactacctgtgaaattaccattgtgacacatgctttgaaggagaaatactaataccccaaatgcctaccaaggaattcaacctggggataaggtgaggttagagtaagttctgtgaaagctctggtttgagcagggacctgaaagaaaaggaggaataggccaagtaagctgggagtgagggacattccaggagatgacaagcatgaggagtaaggaaggggttacaatatttagggagggactagctggggctacaaata

SEQ ID NO: 1563009 - DNA, 4001 bp, Homo sapiens
attacaggcatgagccaccgcagccagccgctactgacaattaatgttagaagtcagaagctggcaggaattgcatctgtctctcgaaccaaagacaggtgttactctatttaatgacccacccagacctattgaaatcagagtaataagctcttcgggtgattcttatgcccaacaaagtttgagaagcctgccctagagtgtattgaaagccactgtttcctccttaaatttgttttcatcactctttggaagcagggatgcagtctgtaactacacaattagaatgctaaaatctggcctggtggtgtggtgtctcaggcctgcaataccaatactttgggaggttgaggtgagaggaccacttgaggccaagagttcaagaccagcctgggtaacatagcgagaccccgtctctacaaaaaaattaaaaactagccaagcatggtggcatgtacctgtagtcctagctacttggaaggctgaggtgggaggatcgcttgagcccagtaattcaaggttgcagtgagtgtaatcatgctgctgcactgcaattggggggacagaataagaccgtgtcccctccaaaaaatgctaagatctggaggacaaaaagtgaaagaggctctctccaaaattccctgcttaactgccagagttttaaagatctgttacccgctgggcacagtggctcacacctgtaatcccagcactttgggaggatgagccagacagatgacctaaggtcaggagttcaagaccagatatggtcaacatggtgaaaccccatctctactaaaaatacaaaaaaattagccagacgtagtggtaggtgcctgtaattccagctactcgggaggctgaggcaggagaatcacttgagcctgggaggcagaggttgcagtgagccgagatcgcgctattgggctccagcctgggcaacaagagcaaagttccatctcttaaaaaaatatatatatatatgtgtgtgtgtgtgtgtgtgtgtgtgtgtgtgtgtgtgtgtgtatgtgtatatatatgtgtgtatgtatatatatgtgtgtgtatatatatgtgtgtgtatacatgtgtgtatatatatatgtgtgtgtatatatgtgtgtgtgtgtgtgtgtgtgtgtgtgtgtgtgtgtgtataaccatggcccctgtgctgcccagtgggcggcattttcacttcaaccacatgccaacatatagaacatggagtgaaagaaactttgactgatctcaccagggaggccccggaactggaaggcttggtagaatcaagacttccatgataccatcaggccgcagcaaagttatgaaagcaaagatatttcgactggaaatccactgaagctactcaaaatcttggtgggaaatcattccgcaaacaatttatctcctcaagagatgggattgtgagagttctcagaggtgatctcaaccaccagagacaacaaaggttgttgaccagagcacttttcaacctctcagctgtggcgtgaaattcagaagaggaattacaggcactccagactctctgcaataaagtcagtcccaccttctccaatctcagcagccctgccatgccctgccatgtcccctccactctggcaaaaccacactggctcaatttccaagatgtgctctgtgctttcctgcctcctgcttttgtttatgacattttcgtttttcctggaatgccctcttcatcaagctctgtctataaaaacacttccctcatctgcagaataaagcccagtcccacctctccactgacaccatccagagccgatctccatcctccaatctcttacctcatgtgttgtctgttcccctctcctggtgcgtgtcacatccccactttgataactgcttccacacaagtctgctgccccaaataccttctagccttcaaagagcccacttttgggacagagtctttttctgtcgcccaggcaggagtgcagtggcatgatctcggctcactgtaacttctgcctctcagctgtggcatgaaattcagaagaggaatttcaggcactccaggctctctgcaatccagtcctgcttccacttaacagaggacattctttgcacatggcaaggactcagtaaagatctgctgagtgagtaagtgatatcaaatctttgaatgttccacttggggaaacaacagaaaccatagcaaccaaatgtctgagagctgcatttattcccactggggcatggagtcaggactcttctcagggacatgccaaggaccactctctcctgaagaagaggcaataaacctagcctgccaggcctacccagggcccatgagaacagcagggtatactggagactatgaagtggctctgtgaaatatcagtctggcaacccacaagctcagtgttcataagaacaagaccataaggggaactgaccttataggttagtccgtcaaataggatttttttaatgttaaatacttggtgttggcaaataaataggctctcccacatatttctggtagagatgtaaattgataccatttttctggaaagttgtcggttggtacacgttaaaatcatttaaaagtttgtctccttccacttatatgaccctatttttaggactcggttttaagcaaattatcagagatgcagacaaagacttagatacaaggatttcatcagtatgttcattgctatgtcatttacaacagaggaatgttggaaaccacgtaagggcccaacaatagaaaaacaattggataaattcaagttcatatttatgatagaattttaaaaaaatttttgtagagatgggatctcgctatattgactaggctggtctcaaactcctgacctcaagctttcctcccagtttggcttcccaaagtgctaggattataggcatgagccactgcacccagccatatgatggaatagtgtgcagccattaaaattatagctttgaagaattcgttatgacatgaggagatacaaacctatataccctatgagccccaaaatgtttaaatatatgcataggtgtgtgtgtgtgtgtgtacctgtgtatacatatatatatccaaatttaacaatgattatcttgggaagacaaaacaatgagtgcatttttaaaatacttttccagttttttcacaaggggtttgtataattttataatcagaacacaatcctttaaaatctttaagaataaggaacaacaattccagagctgtctcagattcactagcagagcctgaggactgaaagcaaagtaggcatgtaagttatgtgttttttggggggatgtagaaaaagacgtgaaaatgtcactgagtgctagctacagttatgttttgtgtgcctggaaatagaaaattgacatcttaacccagctcatgtgatgttagagctggaattaccttggaaatgattacagctgaccttgttattttccaatgaaaataaaattgtagcccagaagaagaaagtgattcacgtttacatattaattttatctttactttcacaccctaaggacagtaagtcagcatgtgcacactcaggatcacaaatccaggcatcaagaattgtcctgggggctgggtgcggtagcttatgcctgtaatgccagcaccttgggaggccatggcaggaggatcacttgaatccaggagtttgagacctgcctgggcaacatagtgagaccccatctctccaaaaaaataaaaaattaactgggtgcagtggcactgtctatagtcccagatactcgggaggctgaggaaggaggatcctttgagcccaggaggtctaggctttgatgagctgtgatcacaccactgcactccagcttgggcaacagagtgagatcatatctcaaaaaacaatgaaaagaattgcctagggcaatggacaactggcttcacaatcagaggcagccaggggatttttaaaaaggatcctgtatcaataatcatacttgaaagtacaatt

SEQ ID NO: 1563010 - DNA, 4001 bp, Homo sapiens
gcaagaatcaagaggcatcagcattagcaccatcacagggaacacaaccaataactgcatgggacatagggacccatggagagagccgggaggctcctcagatgagaaagggctgaggtgaggcattgaaagaggacagcagacaaggggaggccaatcctaacaagagggccagcatcagctcaggactggcaacaaagcaggaatgcgcagagcttgtaagaagccaggagaagactcttgataaggagcagaagaaaagaatataaggtggggctgagctggggtccttcagtgccagactgaaccggctgtcataataggtgacatattgtaatgtcctggaattacagagaggagccatgaagtcggggatttaggaaaggagccccagcgagtaggcaaccaatgtacatcagaaatgatcaacattcccaatgttgtctacattcacttttttttttttgagatggagtttcattcttgttgcccaggctggagtgcagtggtgtgatctaggctcactgcaacctctgcctcccaggttcaagtgattatcctgcctcagcctcctgagtagctgggattacaggcatacacaccaccacgtccagctaatttttgtatttttagtagagatggtttcaccatgttagtcaggctggtctcgaactcctgacctcagatgatctgccagccttggcctcccaaagtgctgggattacaggcgtgagacaccgcacccagcctacattcagttttaagcacacacacaggaaatttatctccagaaaacttcgatccacttaccggccaccaggccatatcacgaccagcgaggaagaagcctcctatagtacctcggttggtcttcagcatcgcctgagcagaagggaagacaggtgagggtcaagccccagcaagtgcacccagacaccccagaggctctggccagggtgctgagaggggtgacttcagcactcctacagagagaaacatttcgctggaaagtgttctatagcatcaaattttaaaggacttcaaaaacagtcgctttgtaaaaacccagggctggaagaacttaaaaaaatcataatccttaacttctatcttaactgctctgattattctcacttatgaaaaccatgtgaggtatcattgagccatgcttgcaataaaatttgcagtctcggccgggcacggtggctcacgcctgtaattccagcactttggagggccgaggcgggtggatcacaaggtcaagagatcgagaccatcctggccaacatggtgaaaccccgtctctactaaaaatacaaaaagttagccgggcgtggtggcgcatgcctgtagtcccagctacttgggaggctgaggcaggagaatggcgtgaacccaggaggcggagcttgcagtgagccaagcaagcgccactgcactccagcctggacgacagagcaagactccgtctcaaaaaaaaaaaaaatttgcagtctcaaatttattaaaataaaaaaattcaacataaatgaagagtccaactcactaaatcagaaagtgagcaaacaacaaaagaaagcgaaagaaatgcgataataaaaatacactctttgtccattatgccaggtgttggggatgcatagtaaatctgaaggtcccggtgctggctgtgtgcacacgatggggttattaggagaatacattagttcattgtaagcgttatttatgcaacacacaagaaaatgattctgataacacaatgacatttgtgaaaagctttgtcacaaccacaccccttccccccttaagataccccctcctaaaccttgtgcccaccctaaaagccactgggattccacctacccacagcccaacagccatcaccaccagaaaatagatgacaatgactgagatgtcagcagcatttcggatgtggtcagacaatggaggtggctctggggtctcagctatggtgctggggctaaccgtactggccatggctgcaggcagtgctatacccattccacgcatgagccatctttatataagttctgggttaatgatcagcctcaggcaggtggggcgagatatcagagccagctcctggatatggagacctttaaacctcttctccaaagctgtggcaccccagccctccaccagtgagtgctagcctaggtagagtgtgagaatgagggatgcagggccagaaatgaggggagaatttgaggtggagcatggggcgttctctgagtgcaaagacagggtctttaaagagatttgcccaggtggaggggggatttgagagaaatgaagacagacaaggaggggagaaggacagactagaaggtaccagaaaccagccaggagggaccgaatgcaatggtccttcagagaacagatacagtttctgaccaatgagctatatcccttgacagtgaagtgaattatgcctttcgtggattccaaagtcccacatttctctgaagtgggtttcatgtgccacaaaaagacattggtggcctgtataggaaaggaagtggctcttcaagcaccatatgtggtgagttgagggcagagctgtggagagcgctgggtcagagggttgtacaaagagtgaatcaacctggaagcatgtgatggggatcatgaggactcaggaaacaagactcctggactacagccaagaagaagttagaagtaaagcctatgcggtggctgacacctgtaatcccagcactttgggaggccaaggagagagcatcacttgaggccaggagttcaagaccagcttgggcaacatagggagtctttgtctctataaaaattagctgagtgtggtgatgcacacgtatggtcccagctacttgggaggctgaagagggaggatcacctgtgactgggaggtcaaagctatagtgagccatgatcacgccgctgcactctagcctgggcaactgagcaagatcctgtctcaaaaacaaacaaaaaaaacaacaacaaaaaaacaaaaccaaaaacacacatgaaaaaacggaaagcccagaaattcttcttttatacttcattttttattgtggcaaagcatacatagcataaaatttaccattttaatcccttttaagtgtacaattcattggcattaagtacatttacagtgttatgcagccattaccactatccatttccagaactttttcatcatctccaaacagaagtatgtacccactaaaaactaactccccatccctccctctctccaggccctggtaacctctgttattctttcttactatataaatttgcctattctaggtacctcatacaaatgaaatcatacaatattttcctctttggtttatttcacttagtatgacattttcaaggttcatccatattgtagcatgtatcagaatttccttcctttttaaggctgaataatattccaatactcatatataccacattttgtttatccattcaactgttgatgggcattcaggttctttctatacttggctattataaataatgctgctgagaacactggtgtgcaaggatctgtttgaatccctactttcaattcttttgagtctatatgtagaagtggaattgcatgtgataattctgtgtttaactttttgtagaactgccaaactgttgttcacagcagctgcactattttacattctttccacagtgcataggagagttaatttctccatatcctcttcaatacttgtcatttatgttttaattatagacaggctagtaggtatcaagtgggtatcacaatatagttttgatttacacttctaacacaatcactagtagtgttgattttttcatgtgcttatagccatttgtgcatcttcttggagagagatatattcaacttcttcatccatttaaaaattatgttgtattcttttttacactgctccttgtggagcaggactacctcattggcagtgtacccagaatagccttatgttgtattt

SEQ ID NO: 1563011 - DNA, 4001 bp, Homo sapiens
gcatcggatgagggctgagtccctctgcctaggaaataatctataaggacatgcccagaactaatatgctatggaccatgtgtggggcggtcccttccaaagtttctgaagaaactttttttgaagtgaagagtttctaataattagcactttccttgccccattatgcaactagtaaaacagccccagttgaaggtgcattccccaagaatctgaggacaaggtcccccttgctcttttccctgccaccctgcccaggaagagtctctcaccgcagatggagccagctgccacgatgaagccagcccacctgtagccccgctggtagaaggcatctgcaagcgctgagtcggggtccaggctgtgccagggcaccatgagggttagcacggtggagacaaggatgtaggcaccagctgcaatggcaagcgagatggcgatggccagaggcacagaccgccgtgggttctgggcctcctcactggaggcggcaatgacgtcgaagcccacgaaagcatagaagcaggaggcagtgccggccatgacgccggagaagccgaagggtgcaaagccgccttcgtcagcgctccagttgtgaggctgggccaggatgaagcccaggatgacaatgaagagaatgacaagcaggctgatggccgagaaggtgtgattgagccaggaggacacgcgggctccacaggagacaaaggcagaggccaggaggatgatgccagcagccaggaagtccgggtagtggcccaggaggggcacctgccaagaacccacgtgggtctcagtgaagttgcggatgctgtggctgaacatagagtccaggtagccactccaggcacgggccacggcggcgccaccgatgatgtattcgaggagaacattccagccgatgaggaaggcccacagctcgcccatggatacgtaggtgaacaggtaggcagagcccgtgcgtggcacacgtgccccaaattctgcatagcatagggctgccagcagggaggccacagcggccacaccgaaggacaagagcacagcagggccagccacctccttggccacggcacctgtgagcacgtagagacccgagcccaccatgccacccacgcccagaagagtcaggtccagcgtggacaggcagcgccgcagtgacgtctccatggtggagtcctccagcggcttcaggcggttcagcttctggcataagcgtgccaggctagcaatggtgggcagcccccgggccatggcaggtggccgagaagagcaccgagccagctactggaacctgctagggccagaggggaatgacaggatgcgtagccggggcctgaccagccttccatccctcctggtctgaccacccccagtcctctctctgtccctgacctggggacctggacaccctcaccaggggcctgctggagagctggaatggggcaggtgtcagaacctgtgggcaggaggtcacaggaagcctggaggccctgtctgcatcccaggcagcaaaggaggcctggtgaggccccacctgctcacccgctcggtggccctgaggggtggggagggagcagctccagggggagcagggtgagaggctgggaacggctcagtggtggggtcccagagccaggtgaaaccgaggcttccccagagtcgagccggacccggaacaggagccgcggctctgcgtcggggcgggtgtggcccaggcagccacctggccacagacagacagtggcggctacatacacccccgcccctgcacccgtggccaggctggggtatccgcgcgccaggcggaatgcaggggcgccctgggcccgcacacctccccatgtccgacacgccgctgctgctagagcctgctccgccgcgcccccgtccccggacacctgcgccttcgcctgttcttgggcctgagcccgtcccagtccccgtccccgcaggatctgctgcaacccacctgctgctgccgcagccgctgcctccgctctgagcactgagcccgcccagttcgccggcgccgagcgcagggcccgcccccatcccaggccccccgcgcggccccacccgctgccacacacccagatatttcaccctgcccactctgcccgacctcgcaaggtcgttaccggagctcaccggggtctagggaagccctgtgactgtgactcagtcacagatggagaaggtcagaccgccggctgactgactagcctaggtcagttcggggaggttaagggccacgtctgaaagtccgcagcccaccttctttctactgcagcggacacccttcttgatccctcaccccagtacatgaaccccacccagctgggccccagacaggccccacagcaccgtcatgtgagcttcaggcacagtgagttagatgaagacatgggtctggcagagtggcctggggcggtccctgacctctactcttacaatggaagagactgcagccttttgagagagttctgcgaattgagggaatgcattctggctgttttgagcctgcagctaccacgtcctgcaaggaagcaagcagcttctgggaccagcctgcagccctcctgtgggggagtagagctcctcagaccccagtggcagcccttcctagcctaggcacctctggcaggccgggagggccctatgggaccccaatagcagatccccacttgtgtttatcagcgacagccactgtgtcctgagtactgcattccagtgccccacgccccaggcaggcagctatgcaacaatacacctggctaattttttaattttaatttttttagagactgggtctcactatgctgcccgggctggtctcgaactcttggcctcccaaaaggctgtgattacattcatgaaccatggctcctggcctccccagaacgctatactagacatgtgttcaggcttacatgtggtttgtggaatggaatcttaggagcatctgcagcctatccagcctattgggctggtgacaggatgatggactcccagacaagatggtgccaatttggaacattctgcctcggccagaatgccaataccttctaatatttggctggtattgtcttgaggaacttctcagatggctcccacttccggtgggatggtagcttccttaccccatccctgtgttgcctgagcagacgtcccttgtcctgaaatgtcaccacaaaagtctaggcacttcaggccagagggttaggcagatttgtaatgggagctccccaaaggccttaccaatgactgccttattgctggtgtccagtgttttggagtgttgactttttatctacctggagaaggtgtgacaccacaccctctgccacaggcaccaacatacaacggatatgtgagactaagcagggctgatgcagtaaattgtacatttccagagatatttccctcactactgagtgagacagctacacagagcaaccccacagtgatgcagtgaagacaaaccaccaggaaacaaaaactttctaactcattctgcaaggccaggattaccctgacactaaactcaacaaagacatcacaagaaaagaaaaccacagaccaaaatcccttatgaatatagatgtagaaatccccagcaaaacacagtggactcttgaacaacacaggtttactaatacatagatatttttcaaccaaatgtcgatcaaaaatacagtatttggctaggcccagtggctcacaccggtaatcccatcactttgggaggctgaggtgagaggatcacttgaacccaggagtctgaggctgcagtgagctatgatcctgtcactgcacttcagcctaggtggcaaagcaagaccctgtctccaaaactactaaataaataaattaaaataagtggtgggtgcctgtaatcgcagctacttgggaggctgaggcaggagaatcgcttgaacccgggaggcagaggttgcaatgagctgagatggcgccattgcactccagcgtgggtgaca

SEQ ID NO: 1563012 - DNA, 4001 bp, Homo sapiens
gtgggaggacggcttgagcctgggaggcggaggttgcagtgagccgagattacaccactacactccagcctgggtgatagagtcaaacctcgtccagaaaaaaaaaatggtggaaaatgctaacactaaagttctgatgctattgaccttagtctcatccatgggactcagtgtgaccatcttgaggcttcattcattcatgctatgctcaattgtgaaggataaaacccacaagtttaaaaagtatgaatgcgctgagtgtgagtgcagtagctcacacctgtcattccagcactttgagaggctgaggtgcaaggatcacttgagcccaggagttcaagaccagcctgggcaacatggcaaaaccctgtctctacaaaaaatacaaaaattagtcgggcacggtggtgcacacctgtagtcccaggtacttgggaggctgaggcaggaggatcgcttgagcccaggaggtcaaggctgcagtgagccgagatcacaccactgcacaaagtgagatcttttttcaaaaataaaagaaaataaagtacgaataaaatgctggaatatgatactaaaaactgctataaggagaagaaactcttggcatttcatgatagctttaattctccaggattggcacttacttccttacatgagattctactgcttgacatttgtacatctgaactgtatatccataatttttttaaaaaggtaacatatactagctggggactgcctttggagcaaaaaaggctagtttgagacaatctgtaaaaacctaatatatggccgggtgtggtggctcatgcctgtaatcctagcactttgggagacccagacgggcagactgcttgagcccaggagttggagacctgcctgcgcaacatagccagaccctgtctctataaaaaacaaaaaacaagaacctaatagacttggaacaaacacccattcaaaggccagtagagttttcctgaagtcagtcatccagttgatgcaacaaaatgcagccactctagttaagggttaaacatccttaggctctttcccctgtaataattcagaatcagttcacagatatggaaagtgtcaatcgcttcagaactgctgaaagatctagcttaggcatggggcccttattcacccaaaagcaaacatcttcctccaatctgtttcttcaccggtaaacaaaggtcaaaagacctccactgctcacctaagaggcaacaaacacaatggggatgagccctcactaagtccagggtttccagcctgccatttgaggttcccacaagtagcaatacggggaggggtgcacgtgaaatttacgacatctaaaaagggtcaaaggcagcagtgcagtcccccaagcgtcgcaggggctaactcaatatcccgtttctttgcgtctgactggaaaccaacccagcgcggaaccactggggcccctcgcggcgccaaaatcttggcagcactgaaggcggcggacctcggcgaaataagtaaggaaatcccaggtcgatgagggggcgggggccacacccgacacgcccactaggccacgccccacagccccgagcgcgcgcgcgcgcgcccgcccgccccgatgaatggagacgcgcgctctcggcgcatgggcccgccccggggctcccgcggggccgagcccggggagggcgagaacgcgccccgggctacctcggagccgatcatgtagaactcgccgtcgtcctccagctggaacttcacgggcttctgcccgaaggtcttgctcagcgccatcatcatcattgcggcggcagaggcgggcggccggagccgggctgcgagggatcaggagggctggggcggggccggggcgtgctgggccgagggaaaccgaagccggaaggcgaaatgcggaccgggccgggtactggcgcctcagccgggctcctcagccgccgccgccgccgcagacgacgaccaggccgccctcagtgcgcaggcgctggcgttgacgctgacgcgcgcgccgccgctcaaacaaaaggccgggcgcgcctccgcggaccccttaaaggagccacgactaatttctctttctcccaggctgcctcccaagtcgtggtgtagaggacttctcacggacaaaaatagccaatgaggtcctgactcaagcagtggctttcccagtcttacagccaggactggaactgagcccaggggaaaagcaacgaagtgaggcctgaaggaggaggacctagtatctggaagcctgggtggtctgggcatgctttgggaccccaatctcgtgccttagcttccccacccctaaaacgcagtgcagctgagcagataggcaggcccctaggaagagatatcccagttccgggcctacggctgtccctgcagctgtggaggtgggcaaaatgacaacagcggatgaggcttggcaatgttcaaaggcccaggtggtatttggtttggctggtgcatcagatgagcgttggaagggagagacaccttccaccttctccattcctctcttagcctacactctgcttaaccgagccctgcagtggggagtgaaaccaggcagcccagccctgtggctctgcctcttggctcttacagcgcgaagctagtgaaactaatgaaagtctgaaagcaatcatgattgaataatgcagggagtaaaacagtggcccactactgatgatttcacaccgttcaatctaatgaaattgcagctgtggctgggctcagcggctcatgcctgtaatcccaactcttttttttttttttgaggctggagtctcctgcctcagcctcccaagtagctgggactacaggcacccgccaccacgcccagctaattttttgtatttttagtagagacagggtttcaccatgttagccaggatggtctcgatctcctgacctcgtgatccgcccccctcggcctcccaaagtgctgggattacaggtgtgagccactgcgcccggccttgtaatcccaactctttaggaggccaaggcagggaggatcacttgaagccaggagtttgagaccagactggacaagacagcaagaccctgtctctacaaaaattctaaaataaataagctgggtgtggcatggcggtgtgcacctgtagccccagctacttgggaagtggagaggggaagatcccttgagcccaggagttcaaggttatagtgagctgattgcaccactgcactgcagcctgggcaacaaagggagaccctgcctctcttaaaaaaaaaaaaaatgcaactatgctattacgaagacacacatggggctggaaggtagggcaaggagacactggagagttgggaagggcagtgactgaagttgctttgttctgtatcctcacagtggtgggaaaccaaagtacagtcatccctcagtatccatgggaattggttccaggaccccctgcagataataaagtccacagatgctcaagtccattatataaaatggtgtcatacttgcatataacctacacacactttcctgtataccttaaatcatctctagattccttatactacctaatacaatgcaaatgttatataaatagttgttatactattgtttagggaacaatgatagggaaaaaagtccgtacatgttcagtacagaggtaaccatcccttatttatttatttatttatttatttatttacttattttattgagacagagtcttgctctgtcgtccaggctggagtgcagtggcatgatctgggctcactgcaagcaccgcctcctgggttcacgccattctcctgcctcagccttccgagtagctgggactacaggcgcccgccaccacgcctggctaattttttgtatttttagtagagacggggtttcatggtgttagccaggatggtctcgatctcccgacctcgtgatctgctggcctcagcctcccaaagtgctgggattacaggcatgagccactgcacccagcctatttatt

SEQ ID NO: 1563013 - DNA, 4001 bp, Homo sapiens
gttgttgcccaggctggagtgcagtggcgtgatgtcagctcactgcagcctctgcctcccaggttcaagcgattctcctgcctcagtcccctgagtagctgggactacaggcgtgcgccaccacgccaggcttttttgtatttttagtacagatggggtttcatcatgttggccaggctggtcttgaacccctacctccagtgatctgcctgcctcagcctcccaaagtgatggaattacaggtgtgggccaccatgtcaggccttatttttttgttgagacagagtcttgctctgtcgcccaggctggaatgcagtggcacagtcttggctcactgcaacctccgcctcccgggttcaagtgattctcctgcctcagtctcccaagtagctggtattacaggcacgtgacaccacccccagctaatttttgtatttttagtacagacaggggtttcactatgttggccaggctggtttctaactcctgacctaaggtgatccgcccgcctcggcctcccaaagtgctgggattataggcatgagccacggcgcccggccaattttattttatatttatcttattttattttattttagagtcgaagtctcgctcttgttacccaggctggagtgcggtggtgctatcttggctcactgcaacctctgcctcccgggttcaagcgattctcctgcctcagcctcctcagtagccgggattacaggtgcatgtcaccacacccgattaatttttgtatttttagtagagacagggcttcaccatgttggtcaggctggtctcgaactcctgatctcatgatccacccgcctcggcctcctaaagtgctggaattacaggtgtgagccaccgcgcccagccttttttttttttttttttttttttttgagacgagagtcgcactgtgttgccaggctggagtgcaatggcgtgtccttggctcactgcaacttccacctcccaggttcaagcgattctcccgcctcagcctccagagtagttgggattacaggcgtgtgccaccacacccagctaattttggtattattagtagagacctccgcaggtcctctggcctctccagacctcagtttccccaactataaaatggggagagcagccatgcgccatggctaaccaaagacggtgtcgccaggaacttaggaaaagctcagtaaactgggtcatcatcactacattcctgggtcaaagctcccttggatccaaatggtggttctggctgcttggaacccattacctcctcgacagctccctctcacttcaacttcggatgagaagggaaaagggacgcgagtgaccagggccaagggcaagagcagtccccgaagcaggagtgagggcagagaacagggcccagggcgggaccggggcggagaggaagcgtcaggacccccagggtggggggcgagggttgggagcccctgagatgaagggcgagggccggagctgaggtggggtggggtccctcagggtgtcggaggagggtcgggagccaggaggtggagggcgagagcggggcccgaggcggggccgagtggaagggtcaggacctccgaggtggggcggagggacaagggtcgggacccctgaggtggacggcgaggaccggggctgaggtggggtgatgggcaggggctgggccagggccaggccgggatccggtcgcggtcaggctccgggactggaaggggaaggccggccaggcgcccgcggcagacgcccacaccccacaggccacgtgtggcctggacgcctgggacggcggaggcgctccggtggcgccctgagctgctcagttaccagagccgttggggccgatgatgcaggtgaacctccggaaggggccaatgacctggcggccccgccacgacttgaaattttccacaagcagcagctccaggtgggccatggcgccgccctccacgcctcacccgcgttatcaagcgcccgcggaaaaagcgcgggaagggattcgccaagtgtcgcgagaagagagcgagacgcggcaagcgcggagccgttccttagcaacgagttgttgacatttccgagagagcgggagcgtctgtacctctgcggcgtcactgggagcccgacggaaaactgcgctaaaggcttgtctttcccctgcccgaccgaaggagccgaccttgcctgcgctacagcttccttattttcgtcgcctgttctcctgatcctgcgtgttctaaaaaccccttaggctttccatgggttcccagaccatggcggtggcgctgcccagggacttgcggcaggacgccaacctggcaaagaggaggcacgcggagctgtgcaggcagaagcgggtcttcaacgccagaaacaggataattggggtgaaagggcaggggccgggacggggttagagcggcagatgcgggcgaggggctgcgtggagggggaaaggagatgagttctaggatgaaacatctgagccaggaggcagcaaacggcctcctgcagggccaataatgctccctctcgagctcgcctggagtcaccaacggttctcctcccctgagccagattttctacaactcgtttacagtggggcagagattaaaaataataataagtaggattgttattactgaataaaatgatctggctctaacccttctcctctgtttttccatttatagggagacactgaagcctgggatgttcaagttcatgaccagaagataaaagaagctactgaaaaagctagacatgaaacctttggtgagcatttcctgaatgcttatctattggtttaggattgtgtggctttagactccagtcttccccaccgtccccctgccccgcctttttttttttattttttattttttttatttaatagagatagggtctcactatgttgcccaggctggtctggaactcctgcgtgcaagtgatcctcccacgtcagtctcccaaagtgctggaactacaggcatgagccacggtacccagccctcctttcttcacatatataaaaagttgtcattttcacactcttcttccttttaaatttcacaatttcttgtgcccagttaacttaatgcactgattcttctcttaaaaacagctattgaattcgaatgtggattataagaaatagattttaagggtatatgtatgttttccttcattttcttaaaaaactggataggaaaagccttaaacacagaaagacacacacacacactcacttgctctgctcaaaagtttaagaccgtctatgaaggacagctgtttataccagacaacacatatgtccgggctcacaccctcaagctgactcagagacagacatgattcaaatcatagtattcaagtaccttgaatactgttattcaaggtattattattccacttcaaatacaacttattttcccctatcgtgtccaacaatttcaacaattgttgaaatttcacactttgagaggctaaaactagaggatcacttgagaccaggagctccagacttgcctgggcaacaaagcgagaccccatctctacaaaaaataaattgaaaaaaaaaaaaaaaagaaatttcagtgtttttaaacaccataaagatttttataatagaaaaaaaagcaggatacaaaattgtacatacaatgggctgttatgtttttaaaatattttaaaatatgctcagaagaagaagagaggaaatatgccaaaatgttagcagggtaatgttggagggatagaattatgagtaaactttattttctcctttatactgttctgtatgttctaaacattttatcttttttattaatatttttagttatgaggtaattcaatcttacaaaaacaatgtgacaggtacatatgtacccaccatcagactagatgttaacattttgccagattggcttcagatatcttcagtgttttttgagaattgtgttttttatatatgtgtatatatatatatatat

SEQ ID NO: 1563014 - DNA, 4001 bp, Homo sapiens
tcaggagcttgagaccagcctggccaacatggtgaaatcccgtctctactaaaaatacaaaaaattgacccagcatggtggtgcgcacctgtaatcccagctactcgggaggctgaggcaggataattgcttgaatccaggaggcagaagttgcagtgagccaagattgcaccattccactccagcctgggagacagagtgaggctctgtctaaaaaaaagacaaaaggccgggcgcagtggctcacacctgtaatcccagcactttgggaggctgaggcgggcggatcacgaggtcagaagttcgaaatcagcctggctaacatagtgaaaccccgtctctactaaaaatacaaaaaattagccgggtgtggtggtacatgcctgtagtcccagctactcagaaggctgaggcagaagaatcacttgaacccgggaggcggaggctgcagtgagccaagattgtgccactgtactccagcctgggtgacagagtgagactccgtctcaaaaaaaaaaaaaaggagataaggtgactgttatggccatcaaaatggacgaaaagtccactggaaagaaaagtctaaggcaccctagacatctaaagttaggacacagcctgctaattactttaaatccctacaggcaatcgggtgcaccagtactaggagggccagactacggtgagctctgcctgaacacgaaatacacgaaaaccgatgacagaaagatgtacagtgaagggatattctacacagttcactaagtaacaggttccctgatgcctgagaaatttgatttaaaaattttagaaacagatgtatttgaaagtgggcatgtatttacactcaaagactttagatggattgggagaatgtcagtaaaatctcagcaacatttctctcgtattcctagaattaaaaaaatttttttttcaactgttttgataaggcaggtctttcccaacatggacctacagtcaattgtgtgagttagcataggctagactagctttaagagaatttgtttttttaactcccacaccacacagccctgcagtcgtaaagcaaactttcgcttgatataagggactgtttccgttttccctagaaaaactcaagcatgtgatagcgttcagtgttggaaaaagacaggacctggtggggacggtaccaggaagaaacccggatgctgcgtcctcagcgctggccttggatacgagcttcaccgctctagcccgattcttcatttgaaaacccgtgattgtaataattccctgcacatctatcaggactgtaaatcacatgaattaaatattaggtgacaactaataaaaagatgaggcccgtcccacgtaccctttatttacagagtcctttcaaaattcatatttcatcccataaactaggagacaggcagggcagagattacaggactgctctaagctagaagcacacggcctagtcttctgactccagaggagcagagcaccgcacctctcaggacaagctaatgtaaaaggccaacttcctcagcgtttgccccccatcttctgtctacctaccattttctacacacctgtcaaaattagcaactcattagcgtattcttggtccgccttccagtctacggtaatcgttatgattggccttggctcctatcaatcagcgccgccctcacgcactccccacaatgattggcctcagccccttcgccccgtctccaggaggacactcactttcaccggtttgggcaaaatggcgccgctgcgggtaacgatgactgacctcgacggtaccaggctccggcctgagccgctccatgcggcggagacatcgccatctttcctcaagctaggcccgctccggagagccccggacctgacgggtgccaatactagccagcgagccgctccggacgccatgcccccagctccgcccctcacccgggcacccgcaccccaccgcccagccctcgtgccgccctcgggaagaaagccgcccgaagcctcgcgagagtttgaggagtacacgagaagcccagccctcccactcgcgcagtgccggcggctcctggggcggcgggagggaggtgtttgtcactggccggcatggtggcgtcacgagagtggcggcgcagccccggctccctcagtccgcgtcctgctgggcgtggccgcggtcttgggtccgcccggccgtcagaacaggcctcagcggccggttgtggaaataaacccagggagcggaaggagtaataacgaaaaagctttactagtgttttaaccgtgtacaaaacactgtagcaataagagaaaggcccgtgctatctgtgtttaaacaaaatgcagtggctgcggggcttccaggcagggctggggaacaggccgggcgcccgccttgggcgcatctccgcctcttaggggtaagaggctcagagcctaccccttaggcctagttggatgcgggtcggtcctgcccaaggccccagtgaggggagccgaggctaggaaggggcaagttttatgtgtttgggagggggtgtctcttcccggcctctgcgtcttccccctggagcgtcagtatggtcaggctctggtgacccagccgctttgcctcccgactttgggaagagtagcaaggagaggtcctggcaagtacaccctgggtgacaaacggctatgagagttcccaggtgatttctcgagcagcttcagtttaccggagcccagccaggagagagaattttagcacaggaaacgcaatcccgtgtccaagctcctagaatacccaggactgagaaccaaagcaacagacttttcccagggagccacactgcctccccacctcttctttaacccctcacttggcagctccaggagttggctgctgaagacagagtacaggagggcatttcgttgacgtaaaaaagctacaagccccttccggggcaaggtccagcaccatctgttaacagggcagccagggagaaaggatgggaccccagcactctgagcagaataaatctctcttcactggccgaagaccctctgcctcaaagggccctacccagactgctgagtgaggatcccatccccaatcttcccacccctctcaggaagagctgggtcccagaaactcctatgacacaataaatccactttctctgacagtgtcagagcttcaagccgatactgcagcctacctcggatttaagtgcacaggagactccccaggttggaaattatggctctagagcccggtgtgtaggccaaaggtatggcaagcctgtgacagtctcgggtgacattccccacttccttcatttcattaacatcccctgggagggggcagtcaggccagtgcagtcaggagattggggtcttgctctgtggctgctaagtctccttccttctctggacctcaggaaataaagaggatggaaggaatggtcccgcagtcccttccagacacacgggtggatctcgaacctggagaatgcctaaatagcaggaaggagagaacccatgtcccctcccaaaacgcaaccttggaaatgggtaaacatttaactcctgaaaaagaactggccctggtttcctgactcaaagggcccagacttagggcctatcctgttcctcacattttgagtggctcccctgggccctcttctgccaacactgccgcagctccacgatctcctggccataccagtcatgcagggtagagaagcaggaggtctcaggggacacagggctctgccccttgcctaggaggaggctggcagggccctgcagctcccactcagccaacccccaccctgcagacctgctgcccgcttcttcaaccaagcccacagggctgctgtccttggagaggcagtggccattctccaggcccgcagctcggtggttaggagcctggggcttacagcggctggcaacagacttccaggatgagcggcgttgcaaagccaggctctggcgtgcgtcctgcaactggc

SEQ ID NO: 1563015 - DNA, 4001 bp, Homo sapiens
ggcgggcgccgggtgctggaggagccgctcccggggtcggaaagacttcgagaggcaccgatcccgagaccggggcaggttctcatctgtcctttcccagagattcaaccactgctccagcttctctccaaaactcttttccagcgccgcccgagcctcgcttaagagagggaggtggcggctgaagaaccctgagcctgcctgtggataccttgagatgaggatgtgcgggaaccaggcctggcattccctctttttggactgtgctgcctctacgacccccactgggacttggacttcctgagggaaggtcgaactgactggcgggcacctttggaaacctaacctcatcccctccaggctgcacacatcctgcggtgatagtggagaggcagacacccagagagtctaatgcgctggtccgagaacatacaggcagagtgccttggggaggtcatggcagcagctgggcactgcccagtggctgggctacgctggttggttccagcctctgcctgcgggggaaggtatgagagtggggtgggtcacttgtcttctaggtaaagtaaatctttaatttacccccatggacaagggtcagggactgaggagatggagctcctctggcccctcctccaggtcaggctgcctggcctttggggttggggaaggagccctgccccactgggttgccctacggcctctgtgcatggaggtagacagggctctcaggaagaggaacaagaaaggggatggagtgggctcatctttcctccacctgagatctgggtccatgcctcattctgtccccatgccaactctaggacctagagcttgtgtgcaaacacatctccctccctcccttcattttacaggtagaggaactgagactcaagagtagaaaaatgagatgagaagccacagaatccataagggcccacaaaacctgtctctctcttatggcctcgtccagccttgactttcccaggactctggtcccccgtggcccactatggggttgggattttggcacagctccttcttagatgggtgtccttgagcaggtgattttaactctcttgagtcgcagtgcccaggctttcagagctgctgtgattattctgtgacatggtatacccagtacccagcctgccccctgccaggccttggcattattaatcattgctgctaccattatcactgggccagcttccaggggtgggcattgcccgagctattgctctggagaggcatatccagcctccccacacctgtggctgcatacgggcgagtctacagcagttactgtttaaacaggtggtggctgtggagggttgggagggactaggcttcagtaccaggcatggacaggcacatgccacaagggcctctgcatcagccacatggaactggcctacccctgttcccatgtccccctcctcctgacctttcccccatcacttcttcctgtcagctgagaggtaccctggattgaccctgcctctctggcttggctttcctgtccccacagtgggtgatggggccacttaccagcttccgaagggctccctcatccagcccagctaaggcctcgtccgccatctcgctggcccctagctccgtcggttcctttctggtgagatccccagtgcctgtggcacctgtcaccagctcagagaattctgcaggggacagacatgaatcaggcatgctggggcttccagaaaccacaggcacttaggctctgtgccttactttccctctctaacctaggagcgtccattactgtcccatcctataatgtggctcctggctggaagctgccctctgccctagggtggtttgctggaaaactcaccaaacccagggtagggggtctctggttccagccctgccagcttggccgccagtctgctgtgtggcctgggatggactctcatcctgtctaaacctcaaaacagggagggcagggacctggattgagaagccagggcctggcaagacccacccaagctgtgcttaccaccagggggtgcactccagtctccagtttcctgccccacccacccatccacagggcctacccagcccccacccactccgcaggctcagcttctggctgtgggctgaacccgtagttcttgctgccaccaccactgtcattcccccaggtataggaaggtacactgtgtcttccgattcttggagccagctctgctgtccagacctcctgaagccaggtgtccaggcacccagcacctcctgccaattcatacagaattcaattccccacctggaagggctttcagaagctgacctgcccaacccctggatttcaggcaaactgagaagattggagagggccaaggatttgtcactgagcaaggaggaagccaaagacttagagggcagagaaggatgtaatcaaaatcttcgtcatctccggcttccgaagctcccttccaaagtgccctcaagggcctggaacactctcagtgacagaggcaagagccccatcttgccccagtgctgcccatcaaaatggacccctaaatcctggcccagcctcccagcgcagatctctccttcctcctgtagccccaactaatgtctgtctggaatttgaggggccctggtctggcacactgtggatgcttagttaatgtatggtgactgactaatgtgtggccccaggcctgccccccacctcctgttgattcatctttcaatcatcccttccctctcttcagaacagtcacttgggaagtcaccccatacggtgcatgggtggggggtgagggttaccgctccacacagttggggtgtgtgggtcccagcctgttcaagtcactgcttgttccccctcccatcctggtaggctcagaggtgtcaacctcccaatctctgcctgttaggatccttgcctcttacctagttactctgtctgggttaaacctcttcaagactgtccagtggtcaccagccttaggttctgcggacattctgattccccccatgtctgttcttctatggggcagctgaccctaatgcctaatctaggacacccatgggattataagaagatccctgccgctgctcttctccaatctccctgtcacacagtctggggtcgccggacattgtgaggggcctcaggattctgtggcagcttccccagggtttctgccgccacagactagcgcccctgtggggcgtggagtctcttaggaatccgggggcgtcttcccccaacagtctcataactttatcccatggcttagacctctcgtatgggtgggggctcccaggtctggacgttccagaactcctgtctagacatccgggttccacccccggacacgttggggcagcaccaggatcccccccgaggtccgcacacccacctctcagtccagcccacccgtccggcgcaggctcggcttagctctttcgggacccgacagacggattagacacgcgcaggccggaggtgccgcgacccgctgtcccaggcccgctcagcaaccgtcccctggattctgcggagagctgcccgtccagccgcgccagcagcccggctggccccgccctgccccgacgcgccagccaaccctcgattgggtacctcccactctcgtgccccattgggaaaattcaatttgacggccacgccccgagaggaaggccccgcccctcgcgggccagggaggtcggaaattgggagtcttggggtcgtctgcctcggtggctttagcgagtcgggtgggcatcggcagggggacgcaggctctgcgccaagtcggggggggcgccccgagccgaggtaagtttcctggggtcgtaggagtctcagagccttcaggacagcccctctccgccctcctctttgttcctgagaccacgtcccctccctcgactccacccctttctcgcgtcagtgtttaagcttggccgccgtccctaggctgctttcgggacacctggtctgagccacctcagag

SEQ ID NO: 1563016 - DNA, 4001 bp, Homo sapiens
ccaccccccaaatcattcaggggtagggccaaagaaccctctatcatctccctttttagcgcccccccgtcattcctttctgcttagcgggaaggccaggtggcaagggtggggatgggatggagatagttttcagcagggagtgtgggctggcccaactcagccatgagccagcttgtcctagtctgaagagagcagggagagtcttgggggaagagccctccaggctccacattcctgaggaattatgagaagaccccctgaaactcaggccagagcccttagttggttccagccctagtccaatcctggctgggtgatcaagagcatatcccttaaactctctgtgtcttggttttttcatttgccagtgggtggggttgggaacagtgacttggcctctcctgtacatagctgcagttgcaataagcatcacccccatacttggttctagccagtcaggaggagggagagagacaagggggcaaatgggaagggcaggataccccgaggcatcagtaacatttatggagagcctgtgagtcaaaccctgtgctgagccccctacttgtcctaagcccacaaaaaccctagatactactgttattcccatttgacagatgaggagattgaagtccagggaggacatgtgatttgctcatggtcaaatgacctgagccaggatttgaacccaggtctctctgactccagggcctgccctaggctgaagatagctctgctactggggtctgtgtgtcatggtggggacctcagggatcctggcactgtgttggagacccctctagcctggactagagatgctctgaggcctaaggaggccttatagcagaggcggggggaatgaggctcactccccagcccccggtgctggctgtgtctcaggcctagagccttctgtggtacatttggaggctgggggctggaggggacagagggtccagccccttctgtacagagggtaaagaggcccagaggggcaagggctagccttttgtctcctaggtccccattctcagtgctctgggctcggagatggggtccttgtctctgacaaaagcctgatgtaggaacttggccacctctacagcacaacccccggagcttcagtgtccccatctggaaaatgggagcctccctctgatcccccaaagtgggtgggcaaggctggagactgacaacctcattccactggtcaccctctggcacgacccttccctttgggcctggaggcaaaggttggaccacagtgtctcctctgtgtgtcccgagttccacccgcccaggccccaccgctgtgtaaggagggagctgtgggagggagggaaggaagtacaaagcgccattgtctaccgagggggaaggggaaggggatggggcggtttccgaaactgcccagtgaaattctcccgggaggaaagagggtgcttcctccccctggggagccggctctccgtgtactctctgccctcgctgttgggaacgcctggcaggccctgaggtctcactgggcctcagtctccccaacagcacaacggagggggctctccaggctttcagtcccagctcccccggttgcccatgggggtcccgccggcggtggagggaagcctcgccagggggcgctgaaggcccgcaggttctgcgaccgccctccctcgcagggcgccgccctcgcctcgcccaccctgcctcgcgctaggcgccgaaggggtagccaggtaggaagacacccgctaccgcctgcttcagtgtccggatctaaagggaagaaaccaaggtccccaggacacccagctgagtggcggaggtcgaactcgaactcgggaccgaggcagagggcgtcccggcgggtggtggaggggcacgcggcgtgcaagtccccaggcgtccccattcctcccatccccggcccaatcctcaagaatgtgcgggagccggggccggaagcgactgcccgcgtccccaaatcggccagacgctggggcgcagggcgggcggagcgggcctagcttttccttatatggcccggccccgcggggaggagcccggctcgggacgcccccgttcttgccacgaggccagcgggggccgggccggcgcgcggggcgcagtaatggcgggcgccgggtgctggaggagccgctcccggggtcggaaagacttcgagaggcaccgatcccgagaccggggcaggttctcatctgtcctttcccagagattcaaccactgctccagcttctctccaaaactcttttccagcgccgcccgagcctcgcttaagagagggaggtggcggctgaagaaccctgagcctgcctgtggataccttgagatgaggatgtgcgggaaccaggcctggcattccctctttttggactgtgctgcctctacgacccccactgggacttggacttcctgagggaaggtcgaactgactggcgggcacctttggaaacctaacctcatcccctccaggctgcacacatcctgcggtgatagtggagaggcagacacccagagagtctaatgcgctggtccgagaacatacaggcagagtgccttggggaggtcatggcagcagctgggcactgcccagtggctgggctacgctggttggttccagcctctgcctgcgggggaaggtatgagagtggggtgggtcacttgtcttctaggtaaagtaaatctttaatttacccccatggacaagggtcagggactgaggagatggagctcctctggcccctcctccaggtcaggctgcctggcctttggggttggggaaggagccctgccccactgggttgccctacggcctctgtgcatggaggtagacagggctctcaggaagaggaacaagaaaggggatggagtgggctcatctttcctccacctgagatctgggtccatgcctcattctgtccccatgccaactctaggacctagagcttgtgtgcaaacacatctccctccctcccttcattttacaggtagaggaactgagactcaagagtagaaaaatgagatgagaagccacagaatccataagggcccacaaaacctgtctctctcttatggcctcgtccagccttgactttcccaggactctggtcccccgtggcccactatggggttgggattttggcacagctccttcttagatgggtgtccttgagcaggtgattttaactctcttgagtcgcagtgcccaggctttcagagctgctgtgattattctgtgacatggtatacccagtacccagcctgccccctgccaggccttggcattattaatcattgctgctaccattatcactgggccagcttccaggggtgggcattgcccgagctattgctctggagaggcatatccagcctccccacacctgtggctgcatacgggcgagtctacagcagttactgtttaaacaggtggtggctgtggagggttgggagggactaggcttcagtaccaggcatggacaggcacatgccacaagggcctctgcatcagccacatggaactggcctacccctgttcccatgtccccctcctcctgacctttcccccatcacttcttcctgtcagctgagaggtaccctggattgaccctgcctctctggcttggctttcctgtccccacagtgggtgatggggccacttaccagcttccgaagggctccctcatccagcccagctaaggcctcgtccgccatctcgctggcccctagctccgtcggttcctttctggtgagatccccagtgcctgtggcacctgtcaccagctcagagaattctgcaggggacagacatgaatcaggcatgctggggcttccagaaaccacaggcacttaggctctgtgccttactttccctctctaacctaggagcgtccattactgtcccatcctataatgtggctcctggctggaagctgccctctgccctagggtggtttgctggaaaactcaccaaaccc

SEQ ID NO: 1563017 - DNA, 4001 bp, Homo sapiens
gctccctcatccagcccagctaaggcctcgtccgccatctcgctggcccctagctccgtcggttcctttctggtgagatccccagtgcctgtggcacctgtcaccagctcagagaattctgcaggggacagacatgaatcaggcatgctggggcttccagaaaccacaggcacttaggctctgtgccttactttccctctctaacctaggagcgtccattactgtcccatcctataatgtggctcctggctggaagctgccctctgccctagggtggtttgctggaaaactcaccaaacccagggtagggggtctctggttccagccctgccagcttggccgccagtctgctgtgtggcctgggatggactctcatcctgtctaaacctcaaaacagggagggcagggacctggattgagaagccagggcctggcaagacccacccaagctgtgcttaccaccagggggtgcactccagtctccagtttcctgccccacccacccatccacagggcctacccagcccccacccactccgcaggctcagcttctggctgtgggctgaacccgtagttcttgctgccaccaccactgtcattcccccaggtataggaaggtacactgtgtcttccgattcttggagccagctctgctgtccagacctcctgaagccaggtgtccaggcacccagcacctcctgccaattcatacagaattcaattccccacctggaagggctttcagaagctgacctgcccaacccctggatttcaggcaaactgagaagattggagagggccaaggatttgtcactgagcaaggaggaagccaaagacttagagggcagagaaggatgtaatcaaaatcttcgtcatctccggcttccgaagctcccttccaaagtgccctcaagggcctggaacactctcagtgacagaggcaagagccccatcttgccccagtgctgcccatcaaaatggacccctaaatcctggcccagcctcccagcgcagatctctccttcctcctgtagccccaactaatgtctgtctggaatttgaggggccctggtctggcacactgtggatgcttagttaatgtatggtgactgactaatgtgtggccccaggcctgccccccacctcctgttgattcatctttcaatcatcccttccctctcttcagaacagtcacttgggaagtcaccccatacggtgcatgggtggggggtgagggttaccgctccacacagttggggtgtgtgggtcccagcctgttcaagtcactgcttgttccccctcccatcctggtaggctcagaggtgtcaacctcccaatctctgcctgttaggatccttgcctcttacctagttactctgtctgggttaaacctcttcaagactgtccagtggtcaccagccttaggttctgcggacattctgattccccccatgtctgttcttctatggggcagctgaccctaatgcctaatctaggacacccatgggattataagaagatccctgccgctgctcttctccaatctccctgtcacacagtctggggtcgccggacattgtgaggggcctcaggattctgtggcagcttccccagggtttctgccgccacagactagcgcccctgtggggcgtggagtctcttaggaatccgggggcgtcttcccccaacagtctcataactttatcccatggcttagacctctcgtatgggtgggggctcccaggtctggacgttccagaactcctgtctagacatccgggttccacccccggacacgttggggcagcaccaggatcccccccgaggtccgcacacccacctctcagtccagcccacccgtccggcgcaggctcggcttagctctttcgggacccgacagacggattagacacgcgcaggccggaggtgccgcgacccgctgtcccaggcccgctcagcaaccgtcccctggattctgcggagagctgcccgtccagccgcgccagcagcccggctggccccgccctgccccgacgcgccagccaaccctcgattgggtacctcccactctcgtgccccattgggaaaattcaatttgacggccacgccccgagaggaaggccccgcccctcgcgggccagggaggtcggaaattgggagtcttggggtcgtctgcctcggtggctttagcgagtcgggtgggcatcggcagggggacgcaggctctgcgccaagtcggggggggcgccccgagccgaggtaagtttcctggggtcgtaggagtctcagagccttcaggacagcccctctccgccctcctctttgttcctgagaccacgtcccctccctcgactccacccctttctcgcgtcagtgtttaagcttggccgccgtccctaggctgctttcgggacacctggtctgagccacctcagagcagggactgagtgactggcagcaccttgaccctgtgttggagtgccgggaccatctcaggtggagcagaatcaatcacacagcacgcctcccccagcccacacacctttgaacagacattgccttcttgtagcatgcttctaccttccaagccctgagagtctgcctttaggagcgctggagtcctaaatagggaatatggagtccaggctgtcattcagcaaaagggggaaattgaggcccagagagagctgacatgtccaagaccaaacaaggaatcagccagggtacccaggaggtcagatccacaaggcaaagctattccatcttcagtgccagaggccctaaagccgcccttgggtctccatggagactaaagtgggtggagttgggaggatggggtctggagtcctgtcaaataaaaacaataacaaatcatttattttgtacttgccatgtaccaggcatataatgcccataacaagcacatgagaccatgactattgccccattttacagatgaggacaacagctgataagtagtaaagctgtgattcatacccagcaccttctgagtccagaccctgcttttaaccactataatgtgggattctggggaggtggtttcagcctgttaacccagaagagccccggttcaggtcctctgtgacaccccccagcccccatctaaggaaaggcccagtctccacactgagagtcttttccatgtgtcatttcatttcatccccacacccctgagaagtggtcccattttacacatcagaaaaccaaggcacgggccaggtgcggtggctcatgcctgtaatcccagcactttgggatgccaaggcaggtggatcacccaaggtcaggagttcgagaccagcctggccaacacggcaaaaaccccgtctctactaaaaatacaaaaattagtcgggcaagtggcatgcacctgtaatcccagctacttgggaggctgaggcagtagaatcacttgaacctggaggcagaggttgcagtgagccgagattgtgccactgcactccagcctaagcgacagagcaagattctgtctcaaaaaaagaaaaaagaaaatcaaggcacagaagaaagcgacttgtcaatgctacacagcaggagaggcaaacagagctcacttcggaggacatatttcaaggtcctaggctttctctacctgggcgagatgccatgttattatccagaacgagggtcaggcgccctctaagaccaattctgaatacttcaaaattcacgcgtcccttgggacctccccttcatgcagggcacacctaggccacctctgattttcagggcctgcctgaatggcggtcaccagctccaatgaatggcctgctttgtgctaatgccctcctttctccctgccctactgtaggctaggaggaatggtacaggtgagttcctccatgcttggatttactgtctggcacatgcgctcactagcccttggccctatggaagggatgtgtgggtcctgccccttcaagcccttagtgcctgggtccacctccagacatacccgc

SEQ ID NO: 1563018 - DNA, 4001 bp, Homo sapiens
agtgcagtggtatgaacatggctcactgcaaccttgacatcctgggctcaagcggtcctcctgcctcagcctcctcagtagctgcactcacatgtgtgtgccaccatgcctggctaatttttcaaattttgtagagacgcagttacccctgctggtctcaaactcctgggctaaaatgatctgcctacctcagccttacaaattgttgggattacagaagtacaaccgcgcctggcttatacatttttttaaacctttttttttctctgtccaaacaaaactgtttcattagcaggctgaagagagactgtggtgtacaataaagaatcattctcgaccggtatggtggctcacgcctgtaatcccagccctttgggaggccaaagcgggcggactgcctgaggtcaggagttccagaccagcctggccaacggggcaaaaccctgtctccactacaaatacaaaaaaaattagccgggtgtggcggcgcacctgtagtcccagctactcgggaggctgaggcaggagaatcgtctgaatcccggaggcggaagttgcagtgagcccagatcatgccactgtacccaagcaagggcgacagagcgagattccatctcaaaaaaaaaaaaaaaagaaaaagaaaaagaccctccaggatctcggtctgttgcccatgctggagtgcagcagcacgatctcagctaactgcaacctctgcctcccgggtacaagcgattctcctacctcagcctcctgagtagctgcgactacaggcgcaccgccacacccggctagtttttttttttttttaattttagtggagacagggtttcaccatgttgcccaggcgggtctcgaactcctgagctcaggcgatccgacgcctaggcctcccaaagtgctgggattacaggcgtgagtcactgcgctcggccagaataattgttattgaaggtactactctctgaaatctaaggatgggaagaactgatgaagatgagttggagcaacaaactcttaacccgcacactatttgtctaggatttgggaagtaaaggtaagaccctggactcaatcaaacccaggctttggtcaactaggcagctgtctgggctgaagggacttcaatacctctattggttggttaggtggagatgtcaatgatgcgggaagaactcgtggaccacctgccctgatgcttcagggtatcacctgacactcgcaggcacatagtcctctctttctggctcactccggaaggaatggccaaaaccctgtgccagattttgcacaggaaataatgtcgaagaaacggactctccatttcccaaacctaggacctgctgttcagaatttttactcacctggacagaaaataatctggcgtttccccgtgagctaggcgtaagaaaaaaaaaatcaacgaagcagactaatagctaaggaagatttctggggtaaactgccctcttcaagtactccagatgcacatacctttacatagttaacagattgttaccaccatcgagtcactaaggtgcaagaatctatgctaggcaacttgagaattctcaaaagattgtgagcaaaacatttctcgtctccgtttgacagcacagagaccggcgagtccacaccagccctgccccaggctcacctcggaagaggcgaccccaaccttctcggactcgtacatgagggccagggacctgctggtgctggcggccgtggcctcagccctgcggaggacctcctgccgcaagtactgctgcctgtccgcgggcgcgtcgggcccgtcggggaggtctcgggcgtccctccaaggggccggccgggcgccttcgtcctccccgtcgtcgtcgaacggattgtagcttttagggtaagctgacatggtgccggcgcggctctcggtctgggaaacagaaggaggagccccactgccgccgccgtccagggcctcgccccgcccgccgaccccgcggtcgtcgcgcgaactccttccgcgcgtcgcgcgcaggtggccccgccctcggagccgaccatcgcgcaggtcggctggggggggcccacatccggcgcgcgcaaccgcagcctactgtccatcccctctctcccctgcagcggtgggcccgccccgcagccacgccctatctagtgtcagcaactgagaggtcacgtggcgggaaagccggatgcacctacgcctgcgccctgaggtcgggcgctcgcgggccaggagcggggagccggcgggcagcgccgcggctcgtgaggtgatggcggcggccccggcccggggaggcggaggcggaggcggaggcggcggcggctgctccggctccggctccagcgcctcgcggggcttctatttcaacacggtcctgtcactggcccgctccctggcggtgcagagaccagcatccttggagaaggtaacgtcggcgggctgggccgcgggctgacaggaggaggggctggggtgacgaagcgtggaggcgggacgagggtctgtgggaggccgaggctgggctcgccggcagcctgtgcgggagggggcgcctgagcggagggatctagcgggggaaggaggccctagtgggaggggctggtgaagagagagggaccgtgggggaagggtcggcggggcctgcagggccgctgcaggtgggtggttgtgggatgggggtgggggatgtgagctgctggcccagggagcatcttgtgacatcgcggaggtggaggctggatcgtgggcggctgtgcggagcagtgggatgagccgaggaccaggggtcaagacctggggttctgcttccgatttcacctgctttttattccgcgaccttgggaagatggctttcttgtaaaatggggatgcttttatctgctttgccggcttcaccggactgtggtgaccaggagacgaaacactgtcttgaaagtgctttgtgactgtaaaccaactgcgcagtgttattctacgaggctgggggcgttaggttgggtaaaagattgtgcgtttgcagaagggacagtggcagggaaaggagagtgaactgtcagtgggcagagaagtgaacttggaattgcttcagaagagaaaggtgaagtcatgccagagcaatcctcatcttgggagaaaggtgaaaggcaactcagtggtgtgccttgagatctggaaagagacagattttagagtgggacctgaatttgttccctgcactggcacttacttaccatgtcctcttgggtaaatttaactcttagagcctctgtatccttatctgtaaaatgaggttgttcttgagaattaaatgagttctagcataaagcatcttgcacaggtcaaggcacagagtgggtgagcagtaaatgtcaactttctttgcccacccgtgtgcgatgagactcagcacagtgtttagctctgaaaggatggaattattttcccactcaactttttggcacatggagagaggatgttttccgacaagataagacagtggtgaccggagaccagcctgctgcagttgggagtggttttgtggctgtctgctgatggatgaagctgaaaggctgttttaggcacttttggcagagtgacctggtccttggccttgtcggttctcatatttgattttatcatgcaccttcggggtgagaaggtcccggcagattggtgctaacctgacttctagctaaagagggagtacaatgcaatggaaaggacatgagtttggaaaatggaacctctgaatttaaatcctgtatcacttgctttcactagtgtgactctagacaggtcagttcccttctctgatactttgctatcttctgtcaaatacaaggtagtacttcataggagtattgtgaagagcaacaaaaaggcacgtgggtacctaatgtatgagcactgttatcattagatagtctgactaatggagtgtagtgctgttttattgaatcaaactcatgctagctagtcagcacattcgctt

SEQ ID NO: 1563019 - DNA, 4001 bp, Homo sapiens
tgagagagacaacagtcagttcatctttcagagtctgaaaaggcatgtggcacacatcatgcttcctttaaggcctggcactccataaaacttagcaaaaacaccaaagctgcattttctaccaaggaaaaaaaaaaaagctcagctcctggtttggaggaaactatctggcaaatatgtgcaagatgtggggtgaggaggaatgatgggatggacagaagtaaaactaggaatgaaaagagagcatctcccatgggtcatgtgtccccgctaccctatgtcccttaatcttcagctaaaggaccattagccaatactgtgtgtgtcaggggagggggactggaatgttaatttgttgcactgttatttgttaacccttaattgtagatgattacgttttgagaataatacaggcccgagctgtccaatacagcagctcatgtacacacgtagctatttaaattaaacttaactaaaacacaatagaattaaaataaaaaaacccagtccctcaatcccagtggccatattccaagtcctcaacggccacatgtagctagtggctaccctatggaaggtgcagatacagaccaaaggaccatgcacatctaggagagcaggctgtacttttaattcagccctttaacccttcacttattttactatcaaggatattgagaaaatatcaaagtgacaacgtgctatatgcaggaaatgcttgtcatggaggaaaatcagggaaagcacctgacttgacctaatcaaaagcatcaagcagtgaactttttattgagatgagcaacaactctaagtttcaacttaagcgtacctaagacaggagaacatgaggttgaaaggacaggctcctttggtgaggatccctggctttcagccttaggagtctagattttatgctgaaggtagtggagaaccactgcagaattatatgtaaagaatgacgcaatgaaaagatagcagcatttatttacaaaatggatagaacgtaaggtttagaagcagagaaacttgttaaaacttctgcaacagttaaaactgctgcaacagtgtggaaagcatgaggggaccattgcctgaaaggggactggggcagagatacaaagaactttttaaaaaatgaccggctgggcgcggtggctcacgcctgtaatcccagcactttggaaggccgaggccggtggatcccttgagcccaggagttcgagaccagccagggcaacatggtgaaaccccgtctctacttaaaaaaaaaaaaacaaaaaaaaactcataggatttgggggaaggagatagtcaatcagaaatgacttcgagattactgcctggaagctttgaaaaacactcacctggagagatacagaatgtgagaagcatgcacgttgaggggaaagctaatgaacttacttccaggagctagtgaggcgacgctgatgtttgggtggcccaagcttcccgctttcttccctccccgagccccgcagagttccatgcagcaagtctttctccagcccctggcccctcacaggcgcctcgacctcccctcgcccgtccccagcctcaccggctctggcctacttttcttctcttcggtccgctgcgaaagatgctacggcgaaggcgtgagtcaagcgaatggcgggcctaacacccagaattccactctttcccaaaatgctgcgcgcagggcccgcctccttcctttccccagtgttgagcgcggtctcgcctccgcttcctcctcactccgcctgccggctgggaaactagggcaccagtacgatagttccggcaccggaaaagagggctgatgactgggcccgggggccgccgcaacgacccttggggccggcaaagagccagagagggtgctcacacttccaagcaccccacaccaaggacaggctggacggcaaggcggagacgcggggcttgggccctcagaccggggacagcaggaggttgggccaagggccaggacttcccgtcacaatttcatttgttgatcccggcaccgccaggtaaggggggccctgagtgaggctaggtatctggtacggataaagttaggtatagagtagagcggctgcccgctcagggttatccctaaagacagttggaggagagttgcttggggcctcggggatgcactgggcgggatcagggcttacacctaggactggcaaaagagcgggacccggcagaggcggggcttgccgaagggacgagcctctattcaggaaatgcacgagctttggggcggggctcaaagaaaggggcggggcttccggggcccgcgtcctggtgagctgcgcgtctgcgcgaggattgggcgagagggtggggccactcaacgctgaggcggcgaatggccggagcagacttaaatcaagaggctggggacctctaagatcaaagtttggggcggggcctaaggagggggcggggcctccagattcgagacctggaagggctggggcggcgcttggggcggcccagccgccgcctcccgttctctcctccgcagcggcggcggtggcggagaaggaactcgacacgcaccgaccgccctcccgccccagccgaagcggaagctgtagcccgctctgggccggggccatgggcgccccgcgccgcccgggtcatgaggacggaggcggaggcagcggggccgccgctcgagcccggtcagtgcctctctgtgggcccagtcttcaccctaggaacgaaagggacccctccctagcgcggggcagggtccagtcgcgcgaccttgggccgactcccgcctcgcccccacacccgcctggttccagtcagtgggggtttcctgacactcgcaggattgcgacccttgtcagcatggtgggaaggtccgggtagcaggggcaccaccttccccagaagcgaaaagtcctgctggagccgccttgggagctcccatgccttgggaaaccgtggaggactgaggctgggaagggcaggaaactggccgagagcaccgagcaatggaagggccagtgccctggcctccgagactcggcgttttgtcttgctcttgttcttcactttcgttctctctgccacgcggtagcctgagcccctttggggcggagacccggactggtattcaatgtcttggccgttagtttgcttgcccaagacgtaggggagggggaagacgtgattcctgtcctgctgaaggcgcggggttgatgacaaacggagttctagctagtaaactctgaagtgaagtgccaactgtggaagaggtcaacagcatgtgggaccctgaccttcaggtgtcactcccagggagtgttcccttttgtgtctgctgtgtggagttggtgggggatttacaaccctcctcctccagttgtctagccctgtggtctgagacaagatacttgcctttcctgagcctcagaggaggaatggcttacattcacagggagtgttctatgaggcaggcgcgcgctgcgtgcagttgtttacatgcagtgcctcattaatcctcataacgaaccagtgaagtaggtgcccactgtgatttgcacttttgcagctgagcagactgagtctgagatgggttaagtattaaaggctagtgcactgcttgccttccttagtgacagccactaactgagctcaggccagggccttccaggcagccctttggctccaggcagcaacgtctggctgtggctttgtgtttagaaggctaaagctgttatggggacagatgccaaggcctcgcctaaccttatcacccccaacatgagcacctctaggtccgatccgcccttgccgaggctggagatggccctgtggggcctgccaggcctcaggatcaaggagttctagagcgcagggcaagaggaggaggcgcagctgagtctctgagagagagctgctgtcttgtgccacattttatagctggacatggaaaggcatggacagtcatagcctggcagaagatagcc

SEQ ID NO: 1563020 - DNA, 4001 bp, Homo sapiens
actctgagggcccctgggcaggaaggaggccaaggtttccttctggccagagtgctcagctccagctctggggcagtggggaagaggttgctcaacgttggggtggggccctggcagggaagatggcgccgaactgggagagggaggaaagagatcagcttggtgactctggggcagggcaggagggggagccccttactgtgtgtcctctccctaggaggatgaagaagcccccaactcaaaggagggtggcgtcagaaagtcccagggaagagccctaggataggatgaggtcccgcagcagcagatttgtcccgcagttcttcatccctcactcttccaaagactctcatctgaattccgttttctttaaacctcccctgagttctccatctgactgcctcagtttccctgaatctccagccaaccctttggttctttccaagcgtttccctcgtatcctcctgaccacagcagctggtggcatagtgtgcgtatctgtgggcaggagttagtgaaggcctccttccctccctccaaagccccaggccccacggtctgccacccgcaaaattccaaccacgagggggcgccttcctgcccgccgccccgtagggagacccggcctaggccgctggagttccgagttccagggtccttgtgatggaagggcgggcgcggcccccacacctggtcttccagccctatccaaggaggactgccagacagtcccgctctgaggtgcaggaggccgggccgcctcggctaccctgaatccacccgaagctagagggcccgagcccggggggcggtcgggtgctcacctccagagcttgcccagcgtcttgctgagctcagcgttgtgcaggtgcgggtactggtccgcgagcttcctgcgcgctgcctgagcccacaccatgaaggcgttcatgggccgcttgacgtgcggcttgcttttgctggcgccgttgacgcgcacgggcatgggcaccagcgtccagtcgtagccgctgagcacctggctgacggcctcgcggatgcacacggggaacttgtcatcgtccgcctcgccgtcctgctgctccttcttgaccttgcccagctcgcctggccccgggctggctcgcaggcccgatccgccgccgccgccgtcgggccctagcgagggcgcgctccccggggacaggcagcggggctcctccgagcccacggggctcagctccacctccgataggtcctgctcctccgccatgtcgcccccggccgccgccgccgccgcctcggccgcctcccccgggccagccgccggggtcctcgcaaagagtccaacgcccacctggatggaaggagggcgcgatggagcggccgcgcgcgcagccccgagggcggcccgagacaggacgtgggcacagccccgaggtggcggcccttcctgctccagctaaacccatctggcccctggggcccacgcacatgccagactctaggtgggtgcgtcccgcctctgtgtcttcccaccacctggtcccaaccgtctcttggtgtgggtggctttttttttagcctccttttttgggtggaggtttgttgatgataaggaagaaaaaaacggagcctttattttgctctaatcccggcccctggaatttcccaccttttctctcacctttccttcttccctcagcctgccccaacggggtttagaggagagccaggtggggggcaagggcggggtgtcgcctctctccacctcacagcagggtcccaggcctgggcgggccagggaggagcaggctgcgcactcacctcctcggacctctcctccagtctggggctcgtccttaggaagtggaaaaccgtgtcccaaggtgtgcggtccagctcggggctgggaggtgacgctggtgggctgggagggaggggcggggggccctgagcctcaggccacggcctcgttaggacggagcctgaatccttaccaccaaccaccctggccggacagcccgagactgactgagcgactgagcctgagccgctgcggagggctggggaaggaaggagggggagaggggggaggggagaggagggagggaagggcagaaggtggagcctccaggctttccttcatccccaacactcagggctcctccacccggagcccaggcccccccacccagctccctgccctactgcccaggcccatcttgctgaggcttatcttgggcttagtctgggaggtggaggggaggttaggccgaggaaggaagagatgtaggctggagggtcagaacctgttggatggaagaaaattgggcccaaccaggactcctaacgtctgcctcaggtggcaggatgggcacttggcaggggactagggagagacgtgaaggcggtgagggtcctgggggcccgtgagggtggctggccctagctgcttcgtctgcgaaatcctgttgagtgcctagtgtgtgccaggcactgatgcccagctcctcaccctgcctcctaccttttcccaggcagccctttctgccccatcctgcacagtaagagagacttctcagggatccctctgagaagtgcagagccccagcttgacccctggtcccttctctgcagacacccagcacacgcgcgttctggtctggttcaaggtggaaacacaagactaaagctgccaggaggccaaggtgggacaggttgggggccctctctcagtaggtcttagaggcattttgggttgctacctactgggacccagctccttccacactgggctcaccctgtcttgggagagggtaggggagtcctagtcctgattgtcacgaagtcctctactcccccaccccaacaaggggtggggacttgccctgcctcttccctcctctgcccacctctccctccctccccttttctttcctgcccatcctccgttgacacctttttctctctctttccttggcctctcctccaaaggtcgcagtgctgttctcttaactgagggcagccccgccggggtgttgaggccgaggtggggtgtatgtgggttatgtaatggagctggggtcgcattggcaaccatgtgacgttctgagctcctcaacagcagggcaaagccccaagaccaccccaaggggtcctgtctggagtgggctgcaaagggtctggggaggcaaggcctcatgcttgggaaagtccaaaggggtgtagggggtgggaaatgggacacaatgaggtagtcacacgaggcagaggcatgttgggggtggggggagcagacactggaacacacacacacacacacacacacacacacacacatgctcacacacacaaccagccagacaatcgggccagtgtgtctggggcctcggagcccagtgaattaggagtttgataagggttttctctttctctcgcttgctggccttggacaatctccccccagttttcctcgacgccacccccggcgctgccaaccctcctccccccgcctcccttctcttccctgtgcccagactcttgttcggggccttgaaacagtgagctgtctttgttcgaaatacaggtgaacggcaatcatgtgattaacacacacacacataaaaagctttttaacagcgcccgctcggcctcagaaccgcccggagaggagccgccctggatggacagagggacgagggacgagcatctgccgtcgtgtcccggctgccctgcagtcgcctccaacacccgctgctgcccgcccgctgcctgcctgcctggcatctctctctcccggtgggtccccactcatccttccacccctcagttcctcctctttgaggaaaggacctccccgctctctgctgtgtctgtgactggcctgagacccgcctggggcaggaggggtggttgtggaaggaaagagcccagagttaggaggtggaatgtggggtcccacagctgccccctctctaactccctgcttcctcctttgccctccttggtccagctgtgcc

SEQ ID NO: 1563021 - DNA, 4001 bp, Homo sapiens
tttttttggaggaaaaaaatactggattagccatttattgaaacaattttacccacaacaatacttctcctttcactatatacccttctatgttggtttggttattttacaacatacatgtatattgtaatagctgtttttttttttttttgagacagagtctcactctgtcgcccaggctggagtgcagtggcgagacctcggttcactgcaccctctgcctcctaagcaattctcctgtctcggcctcccgagccgctgggatcacaagcgtgtgccaccacgcccgactaatttttatattttttgtagagacggggtttcaccatgttggccaggctggtatcgaactcctaacctcaggtgatccacccgcctcggcctcccaaactactgtgattacaggcgtgagccagggagctcggccttgttatatctggtttttgtttttttgagacggagcctcgctctgtagcccaggctggggtacagtggcgcgaactcggctcactgcaacctccgcctcccgggttcaagcgattctcctgcctcaccctcctgagtagctgggattacaggcgcgcgctttttgtatttttagtagagacaggatttcaccatgttggtcaggctggtcttgaactcctgacttcaggtgatccgcccgccccggcctcccaaagtgctgggattacaggcatgaggcaccgcgcctggcctggtttttaattacgaagaaaaaattactatagtccctttggtatcacctacattggcaaaattgcagtccccctccactccctgaagccaccagaaatgactgctgttgtctacaaagcctacagctctgatttcatctcaagatgtgtcctactgggtgacagcaaatgccattttttaaaggcttgtatctgttataagcttgggaaatattatcatggcttaagaggctcttttgacaaaagaaaacactgttccctgaaatcacctgggctgttcacgggaatcttttcctcgcccttctggtacttggacaaatgatcaaggatatcaacaaatcaaggttccccgcatttgaatgatcacagaatttttgcgtgttctgtaaatgggctaaaactactggaaactgatttcttttcgtcatctccagggcagcttgcccaacgtgccgcgactatgatgtcttagacttaactacttaaggtaatacaattaccaaattcctggaaacgcaaaatttcctcagacaggtaccggattattcacatccaacctgatgcaattaaccacgtctcaagaaaaaaggacgttccgtccgcctcgggcgccggccacagcagaagcagcaccggcagcaggcccggggtccgccgcctgtggcccctgctcctccgctctgcgccctcggggccactgaacaacgctgtccccgccccaggcaagggacccgggcgatggggcggcagccccagcctctcccggagcggcggaaaggcaagcacgagggtcgcacccggcctgtctgcacacagtcaagccgcaagcggggtcccagaaccagctgaaccccaacaccaacggacgaaggccagtgggtctcggcggcgaagcctgcgggttgttccagaagccccgaagcccagaacgaggacggcgcgggaagggaaaggcgcaggcgcgggacacactggaggggcccaggagcagagacggcgcaggcgctgggcctgccggggtctgcggggacgcccgggcgcggcagcgcgggcggcgctgaggcgataaaccaacccgccagcgaacactgcgggaacccggctgctgctcttaccgcgctgcaccgcatcgctccctcgcaatctcctggtttgggctgggcggtgagctcacccggtggctcagccgagacccgttgagtccggcctcaggaaagcagcctaccccgcagcgccgcttgccgggccgcccggcctccctcgcgggccccgcccttggccagccccttcgcgcccagcagggctgcggccgtctgcgcaggcgtcgtggaggccccgcctacattccttcactgcgcaggcgccgccgtcccccaccaccaccccctccccttcccccatctccggctcgcgtccgtctcggcactgggtcgcgcagccgctctgccacttggccggtcaagaaagtagccggccagccggtgcgcatgcctcaggtcttgggctggagccgggcaaggcgggtcccttcagaggccccactgggcccagcggaatgatgctcagagtccgctagtcccaaaagttctcctcagcgtgtttaccgtgtgccaaggactgtgctatgcatgagccagacagcagtgaggaaaacacaaagccctgtcctcctggcactcccggtacataagggaacagacaaaaagaataagcgagcaacatatatgtatatatatatgtatatacatatatatatacgtatatatatatacgtatatatatatgtatatatatacatatatatatacgtatatatatatgtatatatatgtgtatatatatacatatatatatgtatatatatatatatatatatataaaatattaaagaaattctgggggagttcgagttccatcggcccccatccgggccaccctgccaccttagcggctgctcctccccagaatgctgatgcctaagaaaaaccggattgccatttatgaactcctttttaaagaggaagtcacggtggtcaagaaggatgtccacatgcctaagcacctggagttggcagacaagaatgtgcccggccgggcgcggtggcttaggcctgtaatcccagcactttgggaggccgaggcgggcggatcacgaggtcaggagttcaagaccagcctggccaagatggtgaaacccgtgtctactaaaaatacaaaaatattagccaggcgcggtggcagacacctgtaatcccagctagtcgggaggccaaggcaggagaattgcttgaacccagggggcggaggttgcagtgagccgagatcgcgcccctgcactccagcctgggcgacagagtgagactcctctcaaaaaaaaaagaatgtgtgtgcccaaccttcctgtcatgtagtcccgaggctactacgtgaaggaacagtttgcctggagacatgtctactggtaccttaccaatgaggatatccagtatctccgtgattaccttcatctgcccctggagattgtgcctgccaccctacgccgcagccgtccagggactggcaggcctcggtctaaaggtctggagggtgagcgacctgcaagactcacaagaggagaagccgacagagatacctacagaaggagtgctgtgccccctggtgccgacaagaaagccgaggctggggctgggtcagcaaccgaattccagtttagaggcaaatttggtcgtggacaccgtcagccacctcagtagaattggagaggattattttgcattgaataaacttacagccaaaaagacttaaaaaaaaaaaaagaaaaaaattgtattatgtcgcaaatgaacctgttgcaatgatcatacaggttttttcctttgatagtttgtactactttaatagttttttcttttattacataatcttagtttcctaggaaaaccccaacttggtcgtgatacatgtttaatccattgctggattatttgctaatattttatttagcgtttttgcatatatgtccataagaagttagtccatacttttgcctccttgtactatttatgtctggtttggttttaagcctatactaaattcacagtgagttggggagaattccatttgcttctttttctgaaagattatctaggctgggcactgtggcctacgcttgtaaaactagcattttgggaggccgaggtgggcggattaccggaggtcgggagttcaagaacagcctggccaacatggtgaaaccccatctctactaaaaatacaaaaaat

SEQ ID NO: 1563022 - DNA, 4001 bp, Homo sapiens
aaaatgaactggaaagtccttttactcttctgttttctgaaagactatatacaattggaattatttcttccacaaaggattgattcaattcactagtaaaaccacctgggcctggagttttctatgtgggaagcctttttattttaaacttttattctgaaataattatggattcccaggaagttgtaaagatagtacagcaaagtcccatatactcctcattcactttcccccaactgtctgtggataatgaattccctcagcttttgtttgcctaaataattttacttttactttttttttttaaatacacagaattctaagttgacagggtttttctttcagcatttgaggatgccattttgggctgggcacagtggctcactttgggaggccgaggaaggtgaatcacctgagtccaggaatttgagacaagcctgggcaacatggagaaaccccatctctactaaaaatacaaaaattagccaggcaccatggtacgcacctgtagtcccagctactcagggggctgaggcaggagaatcacttgaacccaggaggcagaggttgcagtgagccaaggtcacgccactgcattccagcgtgggcgacagaactagactccatctcaaaaaaacaaaacaaaacaaaaaaaaaacacaaccattttgttgtcttctgacttgcacagtttctaactagaagtctgtgatcattctcacctgcctgtccttaagagtttcttatcactgtttttcagcaatgccttaatgggcatggggatgagggtgtttgtatgtttatatacgcttgtcttgctttagcttcctgattttcttggatctatgagtatataatttccatcaaatttggatggattttggctattatttcctcaaaaaaagaattttttttaagatggagtctccctgtgtcgcccaggctggagtgcagtggtgcgatctcagctcactgcaacctctgcctcccgggttaaagtggttctcctgcctcagcctcccaagtagctgggactacaggcacacaccaccatgcctgtctaattttttgtatttttagtagagacagggtttcgccatgttgtccaggctggtttcaaactcctgagctcaggtgatctgcccacatcagcctcccaaagtgctgggattataggcgtgagccactgcgcccagcctatttcttcaaatgtttttttcagacacacttcccactctgccccccgacccgcctttttttcttgggctccaatttcaggtatgtaggaccacttaatttcatcccacaagtcagggcttcagtttatttttttccccagtctttttacctctctgttactcattatggacagattctactgctatgtcctcaaacatactgatcttttcctctatttcttttttttttttttttttgagatggagtcctgctctgtagcccaggctggagtgcaatggcacaatctcagctcattgcaacctccccctcctgggttcaagcgattcttctgcctcagcctcctgcgtagctgggattacaggcacacaccaccgtgcctggctaatttttttgtagttttagtagagatggggtttcgccatgttggccaggctggtcttgaactcctgacctcaggtgatccacctgccttggcctcccaaagtgctgggattacaggcgtgagtcaccatacctggcctcctctattctttttcatatctttcacttctctcttcatctgtgcatgcttcccttcacatacttaagcagagatcatatttacattgctgcatgctaatcctatcatttctatccgttctaggtctgcatctattgactgatttttcccctggttataggtgacattttcctgcttcttcattgtctagtaattttttattgcatgccagattatgatggagtcttatattttgctgtattcctttaaaaattattactttggcaaataagtacactactgtattagttacctatgctgcatgacaaattacttcaaatctttagtggcttaaaacaatccatttatgatctcatagtttctgtgggtcagaaagcttagcggagtgcctctggttcaaggtctagcacgaggaggcaatcaggttgtcagcagggctgcagttatctcgaggatcgaagatctgcttccaagctcatctacatggctgctggcaagcttcagaagatctgttcccacacttcctaatgtgggcctctctgcagggctggctcacaacatgggaactgggattccctggagtaggtggctctaagtgatagcaagaggaacattcaaggcagaagcaaagctttttgtaacgattttagcagtgataaccttatcccaccacttcttttgctttgccatattcactggaagcaaatcacgagctgcagccaacactcaacaggagcaaattacacaaggagcaactaccaccaatgggggatcgctggggaacattttagaggctgcctactatagctacttaaggatctccttggtccttctgcatcttatttttaaagatcttttacggcagatctagaatactatttactctgagggtatttagttctatgatactttcaggtgtggtcctttaggagtctataatgaatgccatctattcaaagaggtgtctccacagcggctggtgggaactcaaatgatttcctgccctaggtgagctaccagaagtgtttgtgtgatagctccctgttcctggaaattgttcctggaaaattattcttgcggggctgttcctggaaaattatccttgtggggtttcacccaatgcaggtgcaggttggtattcaggaaaagactcaaagggatgcctacgcagatttctatactcctttctctatgcagctccctcctcccagtatctgccctgcaaattcgagcagtcgccttctccttgaatgttgatttgtgtctactcagatccaattggttttctcttccctgctccatgtaggttcatcttccctgcaccaccacctggaaattgcctccaggaaaagactgtgggccacagtaggacttacctcattttaaaatttttgttcagggatcacagttacgtacaatgtctgaaaataattgtttcttatattttgtccatctttctattaatcgttgtttgtgatggcagaataatccagcctgttactcccacatagctagaagtagaattcctacccagggagttttgaaaaactaacaatcccaagcttaggccccagtccccagagattatggtttaccaggatgaggtctgggaattttacctgtttaaaaactctccacatgatttttatatacgattaggtttgagacgcactgtactaactaatcatgtactaaaaagctactgaatgtagctcataagtattagttttttgcaacttgtagaaatatttttcacctcctatctttacaaagatttacaaagtgatgcctcatacattaaacgtcaactgataaacaccacttaaagttcatcttatttgaagtttattacatttggcatctttattttgcttttatctatattttcagaattttagatgaagtttgattaatagagagcacataaaaaaagcattaaatcagctgcgcacagtggctcacgcctgtaatcccagcactttggaaggctgaagagggcagattgcttgaggtcaggaatttgagaccagcttggccaacgtggttaaaaccgtctctactaaaaatacaaaaattagctgggtgtggtggtgcacacctgtaatcctggctacttggaggctgaggcatgagaatcacttgaacccaggaggtggaggttgcagtgagccgaaatcatgccatttcattccagcctgggcaacagagtgagactccgtctcaaaaaaaaaaaaaaaaaaaaaaaaaaggtcattaaattggtggaacagtattcccttcc

SEQ ID NO: 1563023 - DNA, 4001 bp, Homo sapiens
aatttctttctgtgcccttgcaggtaggcagctatagacatacagtactttctactggctgtgtaatcttcagtaaattaatgaaccaccctgggcctcactttcaggatcagtgagagggagatgacaagtataacagttctctctacctgacagggttgttaggaagattgagaacattaacgtgtataactgtttaacaccgtctggcacagaagttctcaaaacatgttagctgcccttgctatgttcccaacccccacctaccccatcccccatttgttaacccatttctgtatttagaagcacttagcaaagagtctgtggttagaactggggcttcaattaagggtcttatcacactgcccacatgaccaaaatggaaatcaaggacaaaccaaggggagaaatattacaaaagcaaaatgggaaaatggcaaacagatccttttcaattagctgctgcatttatctcttcccccaaaagagaatcttctgctgcttctgcttcttcatctgcacaacggggatgtagccatcatacatgcctgcaaggctgtagtgagatcctggacatgaaagcattctgaaaactgaaaagtacaatgcacctgtgtttctgcctaagctctctaaggtgagtggccttagataagtcaacatctcctggcctcggcttctttaattaccgtattaaaatagaggtaataagagtatctcacaggattgttgtgaggaagaagtgaaataatacaaagcattttggggcctaaacataagagtgcaactatccagttaataagattactagcctagtcaactggactctttcttgaaaggaggggtataaaaaaaccaatactggccaaggaactgcaagaactaggctctaaccagctgggtgaccttgagcaagccgctgaccctctccaaatcgttgttcccgtggtcgcaaaattagtattttaagagtggatccctgggctcctaccagctcttccactccgctgttaaggcgctggaacaaaggccacccgctccccagcccgtacccgaggggccacaactcaaaatttcttctgctcaattccccttgcagcgtgacagcaggagcgcccgggtctccatcccggagagatgtgtccacactccgccgccactgctctcttcatcagcaacttgcttctgcagtcgctgcccaaagtttcgcggagcacccggcgacctggccgtcggtcaatcctgagaagcccagggattcggggcgcggagactgggggctgggccccgggaatcccaaagacgtccccgcggccaggaagggagtgacaggtgcgacgcgcggtcgcgggcggcgggagagcggaccacggaaaccgcgtgtgggcgcgcgagggaggcggcggccacgcgctctccttaggccgctccctgagacgcccccgcgacgtccctagccccgcgctctggaacccgcgaccctcgcgccgctttcggccccgcggcgccccagatcccacggcctcccggagcggcgcagctgggtcgggctcacgctcgcagcgccggaagggttgaggaccgccgggggcaccgtgcgcacggggttcttcccgcgcgaaccggggctgtcggggggtgggcgcacgcgcacccgggcgcgccgccgtaaccccttcctccccgcgcggcccccgcactcccacccacccaccactcaccgtcgatgtctcccagggtcagctcgtcgcccagctccgtgagggtctccatggtctccagaccacccagctcgccgctgtcgtccatcgcccggctcagcgcagaagccccccctgccgtcccgctcagggagacgcgggggcggtgccgtcgccaccgcccatgacacccgacaacccccgcccggcaccgcctcaccgacgggtgccacccgccgccatgtttgcgttgcgcccgggcgccgcacagaaagggcggggcgggattcccccgccccagcccgcgccccctgcggccccgcctccaggccgcgcgcccccctgtttgttgtcaatgggaccaggctcatctcagccaatgggcgagcgaagcggtgcgtggggtgatggcgcgtcatcgatcagcagctcagatttgcatagtgaggtccctccccccgcggcctcggagcgaatgcctggagtagccgtccggtcatcatcttaaccttctccgccttgtttaaaggagccgctgccttctccgttggatctgcgccacacgcaagtccgtccactggcctgggagtgaagggttaacaggccaccctccacctgcgaccgctggccgcctccaggcctggctgggagcacattacgtcatcttcccagctgcctacccccgccctgcccgcctgagaaagccagcggagtcaaacctggaccccagcgctcgggacgggagtccgggtcatccaagtcccgcttctcccagcctccttacaaaggcgggcacggaggcttgacaaggttgcagattgtcccagggcggtcaggattttacgtcttctgctttgcacccgccgtgacctcgcgcttactccagtggtcctcaatctctggcacctcggaaccactgaggacctgaaaaccacgccagtgcccaggcccaccgacggcctcctgagaggggggccccgggcacgagttttttgaaaaagttccaccgggattctgaagtgcagcccacccactccttcaagcacctcactgccccatcttgcagctggtcgtgttgtaaacttctaggaatttatccaaaggaataaaaattacaagtgcttaaagaagtgctgtaactaggaagaagtgagaataaggaaatgaatatgtaaattacatccacacgatggaataccatgggatcattaaaaattacgcacacaaatgtatatttattagcaagaaaaggcgttcacaatatattgataaaagggaaaagttgaagtttcctgccagtttgtgagaggcagctgttgcttagtgatcaataattaagaacacacaggctgtgtggaggcagacacatggatccactaattcactgtgaccttgggttaattgttctaagcctcagtttagtcatctctaaaatggggataaaatagcatccctcatagctgtggttaagtgagattatttgcacattcaattgacaatatttattgaacatctctgtggcagggaaacaaatggttcctgccctctgagagcttccagtctagcaaaaaaaaaaatcagaaatcccacacccgtattaaacataaaaataaattacagatgatggtacaagtgatcaaggaaaggtaatggatgtgatgaaactaacaagggccctgacttgtgctgtcaagaagcctctgaagaagtgacatttaagatgaaacctaaaattatgagagaactgcagctgttacagccaaaggggaaatgatgacatggacaaaggcctcgaggcaggaggagctgctggcagccagctctcggcataagctttggcatacagtaagtgccttgcatactgctgtattgcaattgaaaaaataaggatctggccaggcgcggtggctcacaccggtaattccagcactttaggaggccgaggtgtgcagatcatttgaggtcaggagttggagaccagcctgaccaacatggtgaaaccccgtctctactaaaaatacaaaaattagccgggtgtggtggcgcatgcctgtaatcccagctaaccggtaggagaactgccggaacctgggagatagaggctgcagtgagctgagatcatgtcgctgcactccagcctgggagacagagcaagactctgtctcaaaaaaaagaaagaaaaaatacaaagagagtccgggcaaggtggctcacgcctgtaatcccagcactttgggaggctgaggtgggcggattgcctgaggtcgggagttcgagaccagcttggccagcttggtgaaa

SEQ ID NO: 1563024 - DNA, 4001 bp, Homo sapiens
gggggatatatgttgaatatgtccagagccagagcacatactgctggggctcagagactgcaggagagagtatgctggaggaggtccttgattcccagagagagatctgggtctattctcagtctacaacagagcctagcatagaattgcagctcaataaatggttgttaagtgctcagaattagcctttctgagctttagtttcctcatctctaaaatggggataaaaatcattcccaacacggaggagtttagaggcataaaatgggttaacattcttagcccagtgtctggcacatagcaggtactcaacaaatggtatttgttattataaatagttttaaggggaaagtaaagagacaaaaccaagtgtctgggctttctttattcaagtcaactggttttacagacccagagcaaaagaaagtcaacagtgaattaaaatgaactggatttaaactgacaagccacagccagagacagtgattatggggttcagaaaggagtacagagaattgaaagtcggcccagaggctgctgcacgtttctcacagagggtagagagttctgatgtacacaggaatgctttatgaactggtaaatgcgtacacagatatgcgtgtaaaatgctggctcaatctctactcagagcgatggtgattgcaccacacttgggtgttgggagaagcaaggagctcctggggaatactgaagcagttgaggagatcgtgacagtgtcaagggatatgaaaaatgccttgagttttccaaacccctaggcacattcactctcactggcatcctctgagagcttaaaaataatcgcaggtgctttttattcaggctgagccaaatggtcagcaactttctcttcagaggtaaactctgggacattactgcctcttgaccctaattctaggggagaggagcacacaaaattaatctaatttctccccttgtgacggcccttcggatgctgatcttaagtgctaactaaagctgttatttattgagcctaaacaaaactgcgaataaagataataatactaaataacaataataagtaacatttattgagtgtttcctctgtattaggcactctctatgtactttctaaggtacagagcaaggtatgtgagaatctgggctgggataagcaacaagcataatggaaagctggaagcactggtttttgtcacaaagacctgggtttgaaatctggttccacacattttctttgtctctttgagaatcagtgagctaccagggtcctagtatgcctgcaatgtttaacataaagtgtgtagaatgattaagctaatgtcaggcacatagcagctgcctgatgatagcagtcacgtgttcatgttgcttccctcgtgtcaccaccaccaataatatcaacatcggcataatattaatagcaaacactggcacagtgcttaccacgtgccagaaaatggtttccgtttactaattcattgaatcctcaaaacaaacctacgtatgtactattttcatccccatctcacagatgagaaaactgaggcacagagattataaattgtccaaggtcacgcagctgtaaccgtaataaaaggaaagacgacctttaactgagcgcttactataatccacatctttaatgagctcgttacctacgttaactcttcacaataactccttaaagggtgtgcattatatctccactctacagatggggagactgtggctcagaattgcccatgggcgcaaagattccatcagggccgagcctgcactcactcagcctcccagatgcgacgaagcacgactccgctgtcagactcgaactccgcctcggggccccggggcgccgcctctctcccccggggcgccgcctctctcccccggggcgccgcctccctccgccgcggccgtcgagccgcggagcgcctcttccgcggagccgccgcctgccaggattccagcgccgcagctgcggccgcagccattggtctctgacgtcagcggcgtgcggcgcactcggcacgtcatcgccgcgcgccggcttgccaggagctggagggggaggtaggcggggcggcgcgtgacctaaggcctctctgccgcgcgcgcaggtacggggcagaagtcgcaggtacccagctgctgcccacatttctggtccagagtcccgaaccccgagcactgggatgcctggctactccggtgggtgggcggcgctcggagcgcggggataccgaggggcgggcccccagcttagagcgtgacccgaccccgcctaatccttaggcgttcgcccaccatttcccagtcccgtagagctggggccagacaccgcacagccctagtgctgttaccagtcgctgcctgcgccccgggggctgcgcccagcagcttcctggcccttttccagccattagcgtccgttttccagccctgctgccccactgaggccccttcccacagcagtatcaccagccccagccccgcgttgttactattacttcccaggctaccagatccttttctgctcatgttccgacgtctcttcctactccagggccattattggtctcttctggacctttcagagataagagaggacctcggtagtgtagggcccagtcctctgggaacaagggatggggagttttaggctgctgtccttggttccagtaacagagataccccctccacaggcacccaaatatgctccatagaatacaatgagtgtggtcctgtggaggcccaatccaaaatatctagagctgagaagagatagagattttacaggccgtcaaatattcaatgggggtcgtctctagagacttttaacaaactgtattgtgtacccacagattgcagaatggtgagcaaacatttgagaccatgttgctaaagcattaagcttggagaaagtgacagtaagaattagacaatagttttgaagtgaccaagaggttgtcacatggaagaattagaccttgttttgtgttttcctgcagagcgttatccagactagcgagtgggaggcagatgtaaaatctggaacgcagattttagtttgttggaaggagaaatgtaacatagtgaaccacgcatctctggagggtgtaaagcagagacagccaaggtaatttttggaaaagagtgcaggagagtagagtaaacgatgccagggttccttccgactctgaaattccgtgatacactgagctgtctttctcttgtggaagtttgaaagccatttgataaagttctcttcattttttagaaatttgccctgctctggaattctgcatgttcaggttacttttggactgtcaagatgacagttccttaatttgggttccattattaccacagcaactggtttatttgtatagctgtccacacctagagcattttcaccctgtcatttgattttatcttccgtgaagcttgtggtgtgtttcccttaactgttcgagaaactaaagcccttactctgaagtctctgcaagcctccctctttgattttgaagcatgattgtcaccctcacagaaagctcttttgaaatataccattcgtttaatcctgctgggtcacatgctctctcacgagttgctgaaatatctattccttgtgtttatttcagagccaaggcactgatgtttgaactggaaacttcaaaacgtttaataagagtcttcaggatgggtttgaactagacaagctagaaatttctttagaacaccagctctagcatgcatctcccacttttggctttcctggagaggagcttgaagaggtggttctgcagacagccacagtgatacttaggaaaccagaggaatggatttgacttttctgctaggattctctgttatagtttctccctgagttgtaagaggcatggaaatatacatgaaactgaagaacctgcaaggaagggaagtggaactttccatgctgagtgaaaactaaccaagtggcagttgtgactgaaaacact

SEQ ID NO: 1563025 - DNA, 4001 bp, Homo sapiens
agaccctcctttgtaccagggcatgcagtcgcccctcccagaacccctggccccctcctggaaaaccctgtctccacccttatctcagccggtcttccctgtcaaagtttgaggggcccaggcagcagaagcagggaaattacagctttccacgcacgtaagccagacctgcaattgaggtgccgtcttttctttagagctggaatcctgtgcatgatctagttcatccttgagaaggagggacttttcctccctgtctggtttatctttggcacaagcttgcctgaaagctgggggcggactccttggaggactgttcaggaggagacagcacagagagggtgagtggctgtcctgagccgcacagccctaacagttcagggaggccaggcaccccaatcattctccatttgcccatctcccacccgctagaacactggctcttgaaggcaggggccctgaatgatttatttcttaaccccagaacctaggacatcacccagaacagccataaatgtgaacagccaagccgttcaacaaggagagctccaaggtgggacattgtccccggatggaagcctcagactcacatcatgagatcctcaagaagcccaagagggagagtttttagagaggaagaagttgaggctcagagaggttgagtaagctgcaaagggtcacccagctggagagtgggaagccagaattcgaacccagttctatctacttctaaaccatcagtacctcctggccacactggctcctctgaaggcctcaggctgagaaggatcaaaggccatgacagtcctgaatagtgcagggcgatggcccctggctctctgcttgtcctctacatgcttcggccttccccccaaagacacctggcttatgcttgccagtgccgactgactcactggcaccccaggcctggggcctgatcccaggagcacaccctacaggcccagcgctgggggcttgggctctgctgcacagcgatgatgccaaattgctgtgtgacctcgggcaagtcacttctccccgctgcacctcagtttcgtcatatggaagacaagcggacccacctcccagggttgtttgcagagattaaacggaggcgtgccaagcacagtgccgggtatggagggggagctcaggagagctgccacgtgagctggggaagccaacgacatgatacatctggctccctccagccctgacagcctgcgattctgtgattccgagatcctagaatcatggcacgagattctgagactaacgcccctgcccctgcagccgaccgggaggtcacaggaaggcctccctcctgcctccctgggagtccccaccctctgcctccccagccccagcctcccaagttcatcctgggcagaggatgggcttccaggaccccacccttcgggacatcatccgggccccagcctccttacctgcccatggggtgagggcttccctccttgccgccaggctggttatcattctgctgtcccctctccctgcccagtccccaggtgcccccagggcactcctaactagggtccccacaaggcacccacttctagaccgcttgcgggctcaggttccctcccaggccctcggccacggctgtccacagagcctctcccatctggtctccggccctgacttcccaaccagagcctggtacgtcaccccccatctccaggacacatcctgggggggcaggggcaaggataggggggagaagcttcccagggtgaggaagagaagaggggagcaagggacacagaagccaatagaaatagaggggaaagggggtcgggaggaggtggagaaagagagagagagagaaagagggagggggagagagagagagggagagggagaggagaccgtgagtaggaggaaaggcagaatgagggggagtgatgagagatgcgtgacagggagaagacgagaaggaaagagaggagaggagacacgggtgagagggagagatgcagagagaggcaggagggaggaaggagaatgagggggtggcagggagagtgacagagagggactgtgccacagatggtgacatggagcccgtgaaggagggagtaagcagggaggggctgagggccggagagcaggtgtggggggtgggggcggggtgcaggttaagggaggaggcccggagagggagcaggaggggcgcagaccctgttaccggggagatttcagccacccacgcccgctggccttggctcctgcagggagttggagagaagaatgtgctcagtgctcaggggagccgaggctgccagccagtagccagagcagctcgtgaggccactgcggcacaggtcccccggggcagcagctgtgtcccaaggcaaggctgggtgtggggctggccagcccgggagtccacagtccagccctgcagtcgggcacaccggccgcagcacggaccactggggaggccgggtgggggtcattagtcctgggattggttacatctggagagccccaggcagggtgaggagtggaaggacagaacagagaaccaatattttaggctttgagggcaaaatcattgtgcagtgagaaaacagatttttactattttgtaactgacaaaactcaaaatagaataataataattgaggccagtattttgtaatgtaggtccactcatgagaagaatagagttctttttacagacatcaccttttgcttaattggagtttagagttagtgtttcatcaaaccgattgcaaatgttcatccgtaaaaaccattctcagctcctaggctgtacaaaaacaggcagtgggtgggatttgccccgtgggccatatttactgatctttggtctaagagactctgccgtacagtcctgagcacaggcccagatgtcttgggatgccgtgcccctgcctgtgctgattcctgcctcagcacaggagtgataaggaaaggaacagtcagagacggaagggaaaaggacacacgtcttggctgagcacctactatgtgccaggctgtacctaggctgctttccaaactgggccattccctgggaccagggctggacctcctttgtcactaggtacctggcactgcagagaactggaagttgaatgcatccagaggtgccaccatgcatgcggcagcacacagtaggacacacccacttccagccggagccggcctggtctcttaacgctgcccgtccctttgccttgtgcccgggacaaggcccttgctccaggtctcagcctcccattgtccttgtccgtacaagttcatgaggtgtgggtgggctcctgggagcgtgtcctcagggtcaagggtgggttttccatggcactgaccacccacccctacccacggcttctcactgccctcagaataaagctctctcgccgcagcccacctggcactgcatccttgattcctgccgcctgcgcgggcctcctcctctgctgatttcactcgctcctctgtgccccaggcgtacccagcctcatgtattcattcacttattcctgcaggttggggtataggggctgaagactggacaggggagtttgagccccagctctacccctgccgtgcactgaacttaaacttcggttttctccttcagtagattgtacacacctgactgcctggcctgggggttcttgcgaaggttaaaggagtgaatgctcatcagtgtgccccctgccacacacctccccagcaccgagccttactgctccagcctggaacccgtccactgctctccatccacaggctcccgtctgagccaggccactgaaggggttcaggacacgccaccccagaatacaccactctggcatattgatttctctgcactaaaggcacttcagaaacagcaggtgcagaaagggggctctgacctccccttttcttcctgaaagcaggagctaaaacgccttgtgaaagacgccctccctatgccaggaggaggaaagacattaccagataag

SEQ ID NO: 1563026 - DNA, 4001 bp, Homo sapiens
ttcttagtgtctttctcatcccatgcctgcgcagaagaagctggggctcctctgggctcccctgcgagactctgatcccctcccctgtggagtctccagccagctttggaccctccccattgctttctgccccatcacttccgcacaggcacgagctctgcctcagtgtcaggcatcaaatgaaccagagaagccttcagtggaccaagcccagtgccaagggggaatgtcaggccccactgaggaaagccacgctcaggaggaggcccaggcagagccaggctggatgcaggagcctcctctggggtctggaccacccactgcaccccctcttcctaatgatcccccaatcccctggctcctggctgtccttggattctccctgcagaaaaccctgaagggaagataaatctctcagaggagaagcccttcttctaatatccctgacactgggcctgcacttcctccctccaatgggagctgtggtccgcactgccctatatggatgtcactgttgatgtgcaaagctcctgggaagggaaggcaccccaaatccaaacaaacgcctctgagcacgcctggctacccctgccccaaggacctggggctgcagcgggctcagagtgccaggctgggtgaagccaagggtagcaaggaacccctaggccgtggcttctccagctggctgggttcagagcatctcctccctgttcttggggctgggagaagagaaggattctgagcctgggtcatcccctaacctgtcctcaacccatccttctccccaacccttcatcaggtctcctgagcctgggacagcagcactaagggaggggcacctggacagtgggctagaggatcctaacagtgctgccagctgctcatcactgagccctgactgtgccaggtgccaggctaagctggtgagctgcagtatcctatgatgtcctacgagggaggcactactgtcatccccactgcacagatggggagcaaacgtgaggtcacatgttctggtcacagctaggaaggggcaaatctggaaagatctgtagtgaccacctctacgcccattccacaggctggcaaactgaagccaggcctgggaaggcacccacctgagtgcccagctggcatccgctttcccagttgcccccagggctttgagctatgaggatcatggactcaaagcctaatggaccttagagatctaaaaatagaattttgaattcttagaacaggcagagaatcttacagccataggattttagactcagtatccttgaatcagagaatgttagaattccagaatgctagaatgagtccttcttagacctggaattgtgcaacctggaaccttagagtcctgcctccctggtaggggacccgcgtcaccatccaccttgctgccctgtgctgtgcacagatcctctttatagcatccctgctggtcagccaatcacaagccagggctagatgagggaggggagcaccaggctcctgagagaagcaaggagctgggcaggcctaatttccaggcttcagggacatatgcccctggggtagcccgctgggggtaagctctgaggttgccccacccccacgcctgcccagcacatgtctgtgcacccacaagcgcatgcgctgacacacacatggtcctggcaggaacacggcgtgcctagccagaccctcctttgtaccagggcatgcagtcgcccctcccagaacccctggccccctcctggaaaaccctgtctccacccttatctcagccggtcttccctgtcaaagtttgaggggcccaggcagcagaagcagggaaattacagctttccacgcacgtaagccagacctgcaattgaggtgccgtcttttctttagagctggaatcctgtgcatgatctagttcatccttgagaaggagggacttttcctccctgtctggtttatctttggcacaagcttgcctgaaagctgggggcggactccttggaggactgttcaggaggagacagcacagagagggtgagtggctgtcctgagccgcacagccctaacagttcagggaggccaggcaccccaatcattctccatttgcccatctcccacccgctagaacactggctcttgaaggcaggggccctgaatgatttatttcttaaccccagaacctaggacatcacccagaacagccataaatgtgaacagccaagccgttcaacaaggagagctccaaggtgggacattgtccccggatggaagcctcagactcacatcatgagatcctcaagaagcccaagagggagagtttttagagaggaagaagttgaggctcagagaggttgagtaagctgcaaagggtcacccagctggagagtgggaagccagaattcgaacccagttctatctacttctaaaccatcagtacctcctggccacactggctcctctgaaggcctcaggctgagaaggatcaaaggccatgacagtcctgaatagtgcagggcgatggcccctggctctctgcttgtcctctacatgcttcggccttccccccaaagacacctggcttatgcttgccagtgccgactgactcactggcaccccaggcctggggcctgatcccaggagcacaccctacaggcccagcgctgggggcttgggctctgctgcacagcgatgatgccaaattgctgtgtgacctcgggcaagtcacttctccccgctgcacctcagtttcgtcatatggaagacaagcggacccacctcccagggttgtttgcagagattaaacggaggcgtgccaagcacagtgccgggtatggagggggagctcaggagagctgccacgtgagctggggaagccaacgacatgatacatctggctccctccagccctgacagcctgcgattctgtgattccgagatcctagaatcatggcacgagattctgagactaacgcccctgcccctgcagccgaccgggaggtcacaggaaggcctccctcctgcctccctgggagtccccaccctctgcctccccagccccagcctcccaagttcatcctgggcagaggatgggcttccaggaccccacccttcgggacatcatccgggccccagcctccttacctgcccatggggtgagggcttccctccttgccgccaggctggttatcattctgctgtcccctctccctgcccagtccccaggtgcccccagggcactcctaactagggtccccacaaggcacccacttctagaccgcttgcgggctcaggttccctcccaggccctcggccacggctgtccacagagcctctcccatctggtctccggccctgacttcccaaccagagcctggtacgtcaccccccatctccaggacacatcctgggggggcaggggcaaggataggggggagaagcttcccagggtgaggaagagaagaggggagcaagggacacagaagccaatagaaatagaggggaaagggggtcgggaggaggtggagaaagagagagagagagaaagagggagggggagagagagagagggagagggagaggagaccgtgagtaggaggaaaggcagaatgagggggagtgatgagagatgcgtgacagggagaagacgagaaggaaagagaggagaggagacacgggtgagagggagagatgcagagagaggcaggagggaggaaggagaatgagggggtggcagggagagtgacagagagggactgtgccacagatggtgacatggagcccgtgaaggagggagtaagcagggaggggctgagggccggagagcaggtgtggggggtgggggcggggtgcaggttaagggaggaggcccggagagggagcaggaggggcgcagaccctgttaccggggagatttcagccacccacgcccgctggccttggctcctgcagggagttggagagaagaatgtgctcagtgctcaggggagccgaggctgccagccagtagc

SEQ ID NO: 1563027 - DNA, 4001 bp, Homo sapiens
aattggtggggagctaaaaattgaaaaacttcttagaggaaaaaaatacaacatacaacgctgacagattgtaacgagttttttccttagaaccagattgttgttaagaaatattctttgagctatttggtaatcatgagctcatcttcccacacaaaaatatcacgctgggtgaagtggctcacgcctgtaataccaccactttgggaggcgggggagtcccttgaggccaggagttcaagacaagcctgggcaacttaatgggacccccatctctacaaaaaaattaaattagccaagtatggtggctcgatcccgcactgctagccacctgggagactgatgcaggaggatcgcttgtgcccaggaattggaggctgcagtgatcccgccactgtatgcggcctggacaatacagccaaaccctgtctctaaaagacaaaagtcactaaacacataacgttcacagcagcacctcttaggagtcgcaatggtctgcatagttgctatttatccctgtttagtgcaatttgtatgtcatcttttcagttccccattagtaataattttttaaaaagtcatcttagggaagacttccctgtcactttttctcttcggtgctccttcaacacataaaatgctaattactattatatagtaaatatcaaaacgaacttttctatttattcgtctaaatagacagtacttatactgtttcctagcaccaggcacaatgccttgtcaattaactccttgcacgtagcgaagtactctacagttaaagacaacaagattatatcctggaaacatgccaggccttaagaaattatttttctcagacgtgtttggagtgataacactgccaagtaacggaggtataataagtgattctcaagataattaatcctacgcagctacaaacgctgtaaggtaaaaacaatcatttttacagttatcatttttattcttactagttttgtaacttttaacttactagtgttatattattataacacgacgtaaaggaatagtgcgtaaaggaactgctatgtaccaatgagacctgagcagggcacacaagactgaaagaaaaacaaccccacgcaaaatctaagtcttgcagttttcactcctcgcgtctccagtgtccacgcatccgcagtcctgtttttgtatttcgcccaagatacacccctgggcaacctcagggtgcgaggaacccagctctgcctcctgctccccgcggctcctgtactacccaaggctcgcgatcttccatgacccctcgaagttgcctccctttcccgggcaaagaaggggcagcgaccccgcctcgcccgccggaccgagccaggtccagcctggctcccccctggggccgtgcttcccccgcccccaacggtcctcaggcctgggtctcacctctccacccactccctcaggaagcgcatttcctcggtgtgcagaacgctcggatcctgcttacacattttcacaaaggcccgaagctcgttcactttgcgggggtccatggtagggaggtggtgggcgaaactgggggggctacggcccggttccaggcccaggcgctggctcggcgtgaccgcgcagaagggggcggctgccgcaagacagaacagactagaacctccccggccgctggctcctcccacccaacggtctcgtgacctcgggtcctccgcctgctcattcctactccctctgcgctgctcctgcgcgctccctagaatcttctagaagcgtggctgttcgtgctgttgcctgcctccctgcgcatacattctcatattcttaactaggaaccagctccctggatggggcaaccccagaaatgggcgacttcaaggaggcgggagataacatcccctccagggggcgacgtccaagagcatattgtgtggctgcgtgcactgagtagagctcaacgcccgggacctaaaaaaaaaaaaaaaaaagggcgtggagccggagggtcggtcccagctcggggcatgacgtcacaacctgcgccgccgcgcaaggaaggcccgcgagccgcctccgccggaaggggaggtgcggctggcccggtttcctggcgacgcggccctgcaggcggttgcgttccccgtcgttaccctctttctcttcccgacgcgtgagttaggccgtaatgccttggctgctctcagcccccaagctggttcccgctgtagcaaacgtccgcggcctctcaggttagactcttctcccacggtctcctcccatggtgtcccctggagggacccaagttggtctcaggcgatccctggttcggctgacccttctcctggtggggcctccgctccccaaccctctgtgctccgcggatttcttctataccggctgctcctggaaaggggtgggcccagtgtgttctctaccgttgaggtattttgtgaagccgaaatgactgcagagagaaaagtgtgccatcccccagaggggctgtcttccaagttactcggactccgaagttgtggcaattatcacacttaagtgacaaagtgtctcacatcaagtagctcttgtttctgttaggcgtgagagcttgctccagaatatacacgaagcatgtttagtaacaaattctttcagcagctcctcttaggagaggtaactgtttcgaaatacttctggggcgttctgtgtctgaaagtcctgtttgcaaagacaagacgaaggataaggagaataattttttgtagggtgtcctctattgcgagcaattaatctgatgaacataaagcttaatcagtgaaaactgaatcaccttccttgcaggcggatctgccattggatcgtatttcagttttttgggtcaatatatgaacaatgtgtgaaccagaacgtatggtatttgacatcaaagctatgtcttggcatatgtttatgttgatatacttgaattcatttaaaatggaatgttaattacatcgacttcttactataaaaaataaaaagttattgtccagtgcacagaacttgttcttcagttctcatagtaaagctgcagaaagacaactctccgtgggattaggtgaaaagaaagatgtgcaatttttcagtctttttttgagacaggctctcattctgttgctcagactggagtgcagtggcaatctctgctcatttgcaacctctgcctcctgagttcaagcaattctcgtgcctcagcctcccgaggtagctgggattataggcgtgtgccaccacgcctggctaatttttgtaattgtagtagaaaccaggttttgccacgttggccaagctgatctcgaactcctggcctcaagcgatccaccctcctctctgagccaccgccccaggcctggaatttgcttttatttgaaaggctctccccagcctgactaaaggagccatactaccagaaggaacacttgcaaaggcacagaactctaaaacggagtggccagcactaagcgttgcaatcgtttagtatggctggagaagcttttttttttttttttttttttttgagacagagtcttgctcttgtcgcccaggctggagtgcagtggcgcgatctcttgccttactgcaacctccacctcccgagttcaagcgattctcctgtctcagcctcccgagtagctgggattacaggcgcccgccaccacgcctggctaatttatgtgtttttagtagagatggggtttcaccatcttggccaggctggttttgaacccctgacctcgtgatccacccgcctcggcctcccaaagtgctgggattacaggcgtgagccaccgcgcccggcttaggaaaagattttttgaaagatgttctcaaacaaaatagtaggcattacacgaaaatgattctgtgatcaaatacttttggggaatgctgcctttcataatgtacataatagtttaattctttttttggagatggggtcttgccatgttgcccaaagtaaacttgaactctcacctcag

SEQ ID NO: 1563028 - DNA, 4001 bp, Homo sapiens
ttctccctccgcagagaccacagctcaatgggattctatgatctgcccagggtcactctgctggtaagccgcaaaactgcattcaaacccaggacttccaactccgaagccaggttcttaatgtgtaagcactgatgcctgctacaaatccatccccagtagcagatggaaggaaaggaaaagaaaatatgaactgggctaccagaagtccacttggaggggcctcagagaagtgacacaaacctcaaaatccctaagtggctgagacttccagcattttaaagcctccaagaaagaaggctaggtccccctccttcttgggccctcacggttttccaagggcaacggagcacccataaggcaggggagaggctggccgtggaccgggagacctagctagacctgacctctgtccctcagcaactgtgtgactccgaacaatttgtgccttctctgagcctctgaaaaaaaggtgtaagagtccctcacagattaacagcgatagagcacttggcccgcaggacttaatgagtggccacagaagccaacgacacgcttagccattcctaaagcattttaggtcccaccccatgcggcgactggcatgtgctcaagatagcagcccatcgaacgctctgttctccaaccaacaccctccactgagagtccctactccaatcttcctcagaagaatgtcagagacctgccctcaggtgtctggaactccatacagctacaacagccaagcctacagcttttcctgaaactgcccgactgctggtccggcgtgaccttagagccagacaccttctaaaccacgctgtgattgcctcaaatacagtggcaacaaggaaatcccagggcatgtttacagaacaggaaagctgctacctcctttccctaaaaacctcagatggggtactatacaatctcctacctcaggtctggaaacagaccagcctagctttaattcccaggtcagccactcaccagctgagtgaccttggaccagcctcttcccctctctgagcctctgtgcctagactgtaaagtgggaatgaccaccactagctcacacagctgttattgtgaaagtgacgtcagctaatgctgggaaatgtgaatgccccaggtcctgcctcggtgatggaggcagccctgaaacaagagaatgtacaagcaaggcactccaggcggggactggtcccatcccccacccggagcccaggctggaaaggagggacgttacgtttccacgctgaaagccctgacgcccatgttatctcccttcccaggtgaacaccaggactttgcactcatcaaaggttgggcaggattcaggaacagagaggttgagtgacctgtccaaggtcacacagccagccaggtaaagggagaagcagggatgggtggcggccctgggcccatcctcctgcagcgccggccaaataggctccatctccacggaaggggccgctcccgaaggtctctgaccttggtttccccagatgagaaccaagccccttcccacccccaccccaccccaccccgccccgcagggatccgagcatcgggagagcggtgggcacggcaggggcggaggccaagggcgaccacccggcccagcagaagccccgggcgcgggcgcggcgtctacgcggccgcgctgcagggctggggcatggcgtggcgggcgcggtcggcgcggggctcaccggacttggggtaggtgacgatccacacgtcgctgggccgcaccgggaagttggcgatctcctccatcttcccgcggcagaagggcggcagccgcacgccatggaactcgaagtacttgctctcgaactcccccggggtgctgggggtctcggcctcgctctccgccatgccgccgccgtcgccgtcgccgccgccgcctcccggctcgcagcccgcacgcgcccgcgcccgcgcccgcgcccgcgccccgcacacgctcgcgccccaccggcgcgcggcggcagctccgcaggcgtgacgtcatggcgccgccgacgcgcggcggaggctccgcgggtatgacgtcatggcgccgcccggcacgcggccgcggcgctgcacgggcgtgacgtcatggcgccgcggagccgcgtcctccccgccccgcccccggccggggtcacccacccgctgccggggctgacagagaccctggcccgcggtctgcagcctcctcagtcgtgcgtgcgttcattccgctcatagcttctgtcactcagcaagcgctcaacacagacgcatgagataccctggctggaaggccctgaaaggtagtcgtccattcaacacgtgcttagcgcgctgctgatctgtgccaggcactgggccagggccccgacacgcgtcagggtagaagcaagcagaagcctggccctgttggagcttacattggtaaataaccaagataatttcaggtaaatattaggtcctattaaaaatatgcgtcttcgccaggcgcggtggatcacgcctgtaatctcagcactttgagaggtcgagcacgggcggatctcctgaggtcaagagttcgagaccaacctgggtaaatggtgaaaccgcatctctacaaacatacaaaaaaaaaaattagcagtgagctgtgagcttgcaccactgcactccagtctgggcaacaggacgagatcttctaacaacaacaaaaaaaaagtatgggccacctagtccagccaaaaaaacaaagtgctttttttttgcttttttttttttttttttttttttgagatggagtctcgctgtgtcgcccaggctggagtgcaggggcgcgatctcagctcactgcaagctccacctcccgggtttacgccattctcctggctcagcctcccgagtagctgggactacaggcacatgccaccatgcctggctaattttttgtattttttgtttgtttgttttagtagagacggggtttcatcgtgttagccaggatggtctcaatctcctgacctcgtgatctgcccaccttggcctcccaaagtgctgggattacaggtgtgaaccacctcgcccagccaaaaagtgcttcttaatatcccatgagtaggggaggggagtgttggattgcaaattccaggaccccagatctatggagaaaaattacaaaaatatacatttagtaaggcacttcttgtgcaaactataatttgagagcaaccgagttctagagatctcagtgcaaccccttgccagtcatgcactcaacagacatatatgaagcacctactaacatgcctggggaagcacaaagatgaaaacaacacagcctgctctcattctctgcagccgagcatcatcagctgtgtaaaggaaaagaatgattcctacctctaagtagtgtagccaggaagatggaaggagtttacaccaacaagaatctggagcagagtggctggacgggacctattcctactctctccttcttactgtagagtgagacacgtgcattctgacaccaaagacatacacatgggctgagaagcgcaggccatgtgtacatagcagacagagagaggaaacagcaattaatcctgacttgggaagcttgtagatgtctttccaaaaaagaaagaggacattccgagcacccagcctttattcagaataattaggccaatggcaaaagggcatctagccaaaagctagagggattgagtgaatgaatgaatatcctgatgtttcaggtgagggttctcactgtgggagaaggaaaatgtaagtggggaatgcgagaaggcagggaagaactctatggtattggattggaattggaggtattgacatgagtttatgatattttaaaattcctatttcttatatttgctggaaaagcctttaggcagtgatatctcaataatactaggcatacccactgcccagatctttgctaaatacttccctcaccaaatgaacctggggtttcttggagaaaaagccaactccagggc

SEQ ID NO: 1563029 - DNA, 4001 bp, Homo sapiens
gggaggaggagggcagcatgaattacagtcagttccggtcaccatgtggggcagaaatcaaggctctggaactgataatgaggacaaaggaagccaaagtgcaaagatctggcaagaggtagcattctgtgacatgaggaagattaatgaaccactcaggtctagacacccgaattcaaagtccccgactgccaacatggggagtctcaacgttagtgcctctgctggcccgtacaacaaagtcacttgggaattcctagcacttgcttgtgacttttgatcacttctaatattcctggttgatacttaaatgaccagttctctgggttgtgtggtgagtatagaagtccacttcccaacccaggctgcagaaacccgaaggtctggttagtccagctagaaagtcctcctctgaaaaacaagcagcctcatgtcctggccttgttggcatcttcccaggtcagacgcccatctggcatcccctctacttttagctggtgttggaaaagggaccgattggtagtaggaaaagcaggaagttggcctgggtccttgtctctattcctgtccttataaggtaatctcccctcccccctccctgccccgcccgtacggtccctacctgaaggctccagctgcccacacagggactcctcttagcctctgtcctgctgaaggaggtgacacctttgcccagggcagaaacaaggcaacatgtttataccatacccaagctgccgctgggaagaactaaatattctgatggaggttgagcggggagtgctgaaaactgtcagcacccgcctccgccctcccagaactcccagagatgcctctcagtctttcctgcggcatcctggcatcacaaaacagtttaccattgagtctgggtttcacaagatgaaaaaggtcgaggccccattctccaaaacaagaagtgagcctctgggagctgaaatctactactgcgaatcataatagacaccacccccgccccacctcctccctaacaatcagttaggaaacgctcatcggaaagcatccttccccacttctcagctgggcgacttcctttctcaattccgcccttccccatcacaaacatctccatccatcttcagacttaaaccagatctggggcatcttcctcgtgacatttccactccctgggcacagccaggccacacgcccttgtgggacctgccaaacgcccggtgctaactccctctgccctcattcccacaggccaaacctgcagaaattgtcaccaaaggcgcgcctcctggctctctaagtcacaccgcgccccccattgctttgttttgttttgttttagaactgaacaaaacgggccttcctctgaggccctgagttctgacaggcagaggctgggaactgcctgtccctggaaacggcctgtctggcacaaaacccgtaggcgctgcccggggccgggttggggcagtcggcctttgccctcctcctcccgggaggctgcccgggaagtcccgcccgcagacaccgccctcccggctgaccagtggcgcggcaggcggggcgggggccaggaggtgagtcagggcgcgggccgcggacccgggtggaggctggatccggcccagcacgtcccggagaggaggaagcaggcctggcggcgcggccccgcccgagtggcccgacggtgacccggggtcaggccgggccgcggccccccaaccctctcctgagctcgcccgcactcacctgctgccgcggcggcttctagcccggccgggggcgtccgaggccaggccgccgccggggcgcgccccctttccgcgtggggatcccgcgggcggcgctccgctcagggcgacacagcggccgggcccggggcgcgcgggcacgcgaagagcggcgacgcgggacaaggcgggcgggcggacaatgcggccggcggaggcccgcgctgcgcgagtggggccgggcggcgcgcgtgtggccgactctgtatgtgtgcgcctgtcagtcaacgctgacaggccgcagcccattggtcaggccccgccggccgtcaccgcccaccgccgccacccattggccggtttgaacacaaagccccggctcgccccgccctcgcgtgggccccgctgccctgcgcgctcagcctaggagtccgcgcgtgggaggcgctgggcgggcggggaccccgggctgcgggaggacgcgacgggagcctgtgctggggctcgggctcagcagggcactggactcccgatctggcggctcagaacacctgagacagctctgagcgctcccacgcgcgcctgcagcctggttcaccaggccggcgtccgaggggagggtgggagccctgggagcggcagcgcgcgggtggcccttggtgcactctcggtgaggctgtcgagggcttgctcaacacccggcaccagtgccgttgtcctcttagccggccatttctacacccatttttcagacaaggaaacaggttgctaatttggggattccagacatgctgggaggccctgcctcttcccaagctttacccagagcacccaagtttcacgacagctcttctattttttgtttgttttaaacagattttctattttatttaaatagagacgagatctcactatgtttgcctaggctggtcacgaactcctgagctccagtgattctcccgcctcggcttcccaaagtactaggattacaggtatgagccaccgcgcccggccagctcttctgttttaaggacggtgcttgctgcacttgagctgtgggaaggcagggctggccactcattcttctaccttactcagacttggaacgagtgctcagcgtttgagtaaaatgctgcctgactccgggggtcctgttccttggctccccatccgccaactgtacagatagagcaggtgcacagcttgggatgaatctctttctgtgccagcccttctaagggcagatgaacagtcgttattttacttttaaagtaccaagaggaaacgagacaagaatgacaaaatcaccgaggcaggaacaggaaggctgtggggtcggaggattgaggaaaggcaaaaccctcatgctaaagcggcttcagcccaactccagacaagaacagtcccctttcctgggcctccattgcctgctctggaaagagaagagtctcctgctcttccaccctcctggagaccacggtgctggccattatcactcctaggtttagactgcaagctctttgaggacatggacaagctctccagagcctggtaccgagcctggctctggtctgagtgtctgctggatggagcaatgaaaggagaattcaaatcagacgtaggggcagcatccaggtaggggaagggcctctctgactcctcatctctgggatgcgcaactccagaattctgtcctaaccacttctatggagttgccacatcctacctcctccattgcacagcctgcttccccctctccgggggtcctggcagacaggggggtctggccttgctggggtcgggggggagtccaggtcccctcccaggatgtgctgagtggatatgtgaggctcatgcccacaggctgactgaaggcaggcccctcttaaactctgcatcctctgggggctgggagcaggcagaataatggtcgctacaggaattcggtactaatgcttggaatctgtgactgttatctacatgcaaagactttgcagatgtgactaaagattttgaaatgagattatcctagattatcagggtgggccctaagtgtaacacaagtaaccctttaagagaaagataggggctgggcactgtggcacacgcctgtaatcccagcactttgagaggctgaggcaggtggattgcttgagctcaggagtttgagaccagcctggccaaattagtgagaccccccccccccaccacccatctctaaaaaagaaaaacaaaaaaagaaaataattagctgggcatggtggtgtgtacctgtaa

SEQ ID NO: 1563030 - DNA, 4001 bp, Homo sapiens
acctcggcttcccaaagtgctgggattacaggcatgagccaccacgctcagccaaaaggatttttcttttcttttcttttaataatagagacagggtttcaccaagttggccaggctcccacctacgtcctgatggcgcttgcactgtctgtccccacggtgcacactgtgctgccacatcttggtaagatgatgataaaatggtaagtgtctgctgggaccgggctccttgtatacctcatttatattattagaagcaaggtaggtatcattactcccatctacaagggaagaacctggacactgaggcaatgggtaacttgtccacagtccccagcctgtaagtgccaaagccagggtttgggctcagctctgacaggctgtagggcctgggtctttctactcaggcataaagttttccagttgtttcaggaatgtattgaagattctagttgtgtgtcctcagctagaatcttttttagcctcacacatgcgcaaaacaaggctgtatacaaacttgttacacaacaaatatttgttagcaaactaacaaaatagggaggaggagggcagcatgaattacagtcagttccggtcaccatgtggggcagaaatcaaggctctggaactgataatgaggacaaaggaagccaaagtgcaaagatctggcaagaggtagcattctgtgacatgaggaagattaatgaaccactcaggtctagacacccgaattcaaagtccccgactgccaacatggggagtctcaacgttagtgcctctgctggcccgtacaacaaagtcacttgggaattcctagcacttgcttgtgacttttgatcacttctaatattcctggttgatacttaaatgaccagttctctgggttgtgtggtgagtatagaagtccacttcccaacccaggctgcagaaacccgaaggtctggttagtccagctagaaagtcctcctctgaaaaacaagcagcctcatgtcctggccttgttggcatcttcccaggtcagacgcccatctggcatcccctctacttttagctggtgttggaaaagggaccgattggtagtaggaaaagcaggaagttggcctgggtccttgtctctattcctgtccttataaggtaatctcccctcccccctccctgccccgcccgtacggtccctacctgaaggctccagctgcccacacagggactcctcttagcctctgtcctgctgaaggaggtgacacctttgcccagggcagaaacaaggcaacatgtttataccatacccaagctgccgctgggaagaactaaatattctgatggaggttgagcggggagtgctgaaaactgtcagcacccgcctccgccctcccagaactcccagagatgcctctcagtctttcctgcggcatcctggcatcacaaaacagtttaccattgagtctgggtttcacaagatgaaaaaggtcgaggccccattctccaaaacaagaagtgagcctctgggagctgaaatctactactgcgaatcataatagacaccacccccgccccacctcctccctaacaatcagttaggaaacgctcatcggaaagcatccttccccacttctcagctgggcgacttcctttctcaattccgcccttccccatcacaaacatctccatccatcttcagacttaaaccagatctggggcatcttcctcgtgacatttccactccctgggcacagccaggccacacgcccttgtgggacctgccaaacgcccggtgctaactccctctgccctcattcccacaggccaaacctgcagaaattgtcaccaaaggcgcgcctcctggctctctaagtcacaccgcgccccccattgctttgttttgttttgttttagaactgaacaaaacgggccttcctctgaggccctgagttctgacaggcagaggctgggaactgcctgtccctggaaacggcctgtctggcacaaaacccgtaggcgctgcccggggccgggttggggcagtcggcctttgccctcctcctcccgggaggctgcccgggaagtcccgcccgcagacaccgccctcccggctgaccagtggcgcggcaggcggggcgggggccaggaggtgagtcagggcgcgggccgcggacccgggtggaggctggatccggcccagcacgtcccggagaggaggaagcaggcctggcggcgcggccccgcccgagtggcccgacggtgacccggggtcaggccgggccgcggccccccaaccctctcctgagctcgcccgcactcacctgctgccgcggcggcttctagcccggccgggggcgtccgaggccaggccgccgccggggcgcgccccctttccgcgtggggatcccgcgggcggcgctccgctcagggcgacacagcggccgggcccggggcgcgcgggcacgcgaagagcggcgacgcgggacaaggcgggcgggcggacaatgcggccggcggaggcccgcgctgcgcgagtggggccgggcggcgcgcgtgtggccgactctgtatgtgtgcgcctgtcagtcaacgctgacaggccgcagcccattggtcaggccccgccggccgtcaccgcccaccgccgccacccattggccggtttgaacacaaagccccggctcgccccgccctcgcgtgggccccgctgccctgcgcgctcagcctaggagtccgcgcgtgggaggcgctgggcgggcggggaccccgggctgcgggaggacgcgacgggagcctgtgctggggctcgggctcagcagggcactggactcccgatctggcggctcagaacacctgagacagctctgagcgctcccacgcgcgcctgcagcctggttcaccaggccggcgtccgaggggagggtgggagccctgggagcggcagcgcgcgggtggcccttggtgcactctcggtgaggctgtcgagggcttgctcaacacccggcaccagtgccgttgtcctcttagccggccatttctacacccatttttcagacaaggaaacaggttgctaatttggggattccagacatgctgggaggccctgcctcttcccaagctttacccagagcacccaagtttcacgacagctcttctattttttgtttgttttaaacagattttctattttatttaaatagagacgagatctcactatgtttgcctaggctggtcacgaactcctgagctccagtgattctcccgcctcggcttcccaaagtactaggattacaggtatgagccaccgcgcccggccagctcttctgttttaaggacggtgcttgctgcacttgagctgtgggaaggcagggctggccactcattcttctaccttactcagacttggaacgagtgctcagcgtttgagtaaaatgctgcctgactccgggggtcctgttccttggctccccatccgccaactgtacagatagagcaggtgcacagcttgggatgaatctctttctgtgccagcccttctaagggcagatgaacagtcgttattttacttttaaagtaccaagaggaaacgagacaagaatgacaaaatcaccgaggcaggaacaggaaggctgtggggtcggaggattgaggaaaggcaaaaccctcatgctaaagcggcttcagcccaactccagacaagaacagtcccctttcctgggcctccattgcctgctctggaaagagaagagtctcctgctcttccaccctcctggagaccacggtgctggccattatcactcctaggtttagactgcaagctctttgaggacatggacaagctctccagagcctggtaccgagcctggctctggtctgagtgtctgctggatggagcaatgaaaggagaattcaaatcagacgtaggggcagcatccaggtaggggaagggcctctctgactcctcatctctgggatgcgcaactccagaattctgtcctaaccacttctatggagttgccaca

SEQ ID NO: 1563031 - DNA, 4001 bp, Homo sapiens
tgggaggggctgggtcattgcaggctgagcctctcgatggtctgggcccccaacctccctggggaacccaaccagccagctgtccctgtgccctcctgcctgtcctgggtccgaggggctccactcagccagtcagtgggtctgagccctcagcatgcacagggatgggggcgtggggccccagtgcccggcctcctgggcctcccaacctgcagatcacactggcgtctgtggggctggacatcttgaagtgccgcaccacaaagtccttgccgcccatcatggatcctgagtagggcaatatctccaggcagaagtcccggaaatccaagcagcaggtgccaaggccagagcacgtcgggtggcaggaacatggcccgtccagggcgccacagcgcatggagcagctctcttgggcatctggaggagaggatgctgagggcctggcccggcgggtactggactggctgccccatgtgcagggcctgtctctgtttctcccacagcccattagacagcagcatccccaggagaacgctggccaggaactgcacaggccaccaggtggacacagtagaaagccacagggcccgtggggatgggatgaatcttagcacagaccatctggctgttgccctgactgacgggctagaatgcagcgagaagaggcaaaaagctgcatccgctcagccctgcagggtcaggagaagcccctgggcatgactgcccttcagccaccaagtcctctatcccacaggcaggggtcctcagtgggccacggtagctggagccctcgacctctcttggctccccagggtgtctgtggtcagcacgccttctgggggccctgaagcctgcagaagaacccctcttgcttgcctggactggggtgggggatatggctgccaagagtctcatttgaggcctggtagggaatggtgcagggtctgaacgtgacacttctcgctctcccaggggctgcaattgagaccccaaagagagctccgtgctcagggcagaaggccagggccgctcccctcctttctggggagaggagggacatttcaagcaggggtcccagcagtggggaaagggaagtgggggtgcacaccacaaggggctgtgggcgccgggcccaaaacttctcctatgggccataagaccggtgggcaaggccatatttccaggggctggcatgaaggaagggttgcagggagggactggggcaggtgcatgcacccaggctggaattgcacttccctggcccttccccatcccccatcaaaagaggccagtcgagggccaggcctgggcctgagccaccccgctggccccacttcaccaagtgcagtgcctggcacttaaaagcaacaataaatatgtactggccaaggatttggtggcgcacaggggtcgggggaggaggccgagagatgcttgcaagtgagataagtggcaagagggtcgatgggaaatggggtgggggacggggggcagcctgggaccagtgtcctggttctggagttcggggctttccctagactttcctggattcagccccaccctgatgaggacccacaatcctggctccccctccgtgatcccgccctgtcagggctggggacacaggcggaggcctctgctggtctcccccgcctccctcctagctaccagcaggtttagggtgggcccggctcagacctcccatccccatgggctgcccctccacatggaccctcagaatttcttcccatcacccctagcacagccacagatggcctgacagatggacagaggctgagcccagagggatgtcagcccaggcctggctgcagacagatggacagacagacggggacacagaagggcagggaggcatacctgctgtgggtccggggcccgggccgagggctgtcgccagcagcagcagggcccagggcaggagggctggcttcatggtgcagcctgtgtctgcagccagcagtgcagtggctccgaggcgaggcggccagacaagctcactccctgctggcctggccccgcccgccctgcactctgcggcaccgccccgccccgcccctccccgcccctccccacccagtcccctctcaaagtccacaggtgcctgcgtggaccagcaaggcccaagttgccccgttagcacattcctggcccgcaggcctggatcggccctgggaccctgtgggagggtgaggaggccggagcctccagccacaggacctttggcaggcgatgagccggatgtccagagggcgaagctcagaccctgggtcccagccccgccttgcatgcagggcgagcccggcggggctgaagcagaggatgggatgcgcagggtgaataaggcagggctgttttagctccagggaggattccagactctgtggccctgacatagacctccatctctagccctcatcttcctgcaggaaggaggtgcacccaactcatcctcagggggaggcaggagctgtttgggtcagacacaggctgagccctggggcggaggcagctctgcaggggtcccctctggagggaggaaggaggaaggggagagaaggtacccaagcccagcggggggcccggaagggagacagggcccatccccgggctccagagatgccaccaccctggggagccttggctgtcccagccacacctaatcctgccgctaagagtttgcataatttaatcagtattcacctcccttcttgagcagatgaggaaactgaagctcagatgcggataggcaaggccgagccaggcccttggtggcttctgggagcccctgcagccagggcgggtggtaagggctgcggcctgggactggtcatttggaccctgacacctgggctggacatccagacaggcgggtggtcctctcccagctgcagcttctcaaggtgtccaaaagggacccttgccacacttgcagggagtcagaggtggccccagggcatgagcttaggccatccggtctgtgatctgccccagcgcttgcggccaggccagcccattgttccccggcctgttctctctcttgcctgggtggtgcctgctgggaaccacagggtgttggcagccacccgtggctccagagaggtggcccctactgaaagtgttagaggcgtgtgctgggggacttggctcctgagtccccacacagagctgttccagggaagccacacccgcatttgatgttttcccacctcccaaagacatttggtgagaggcccccaagaccttcagcttctcagggactgtctccagaggggagaaagtcccttaacccacaatggcgctcagggcacctctgcaggtgagtgtcctgtaagtggacgctcaggtgctgagccagggagagcctgtctcctggccccaggctggcgagggcattcatcccaggcccagggctgaagttgctccctacagcactgggtgcaggggagggtccgaggtgtccgtcctcctataggtgaggctccagggaggggtgctgggggatcggctgagacagttcccgggaactggaggagggagagctgctgcttcctgtttttggcctgggcaccgttgctgcgcgtgtctggagacaatggaagtgcggtaggggctaggtgtgcagtctgggaagctccataccccaggccctgcagggagggggcgtcagctgagtaactggggctggcttatctcagccccccgaaaggcgggttcagccagacccatctggggccaccaagcctctggttccaaaagggcggtgcccagccctttacgcctttcctcctgggtggtgggcatgtccagcccatgaggggcacagggcagtgaggagggtccccatctccatcctggacagagagcctgctccatgggaggtcccagggccaggagggcccctgcggtgctgggaggggaagagagttgtgaagggtgccagctctaggggcttaatgctctgtggggcctgccttaaa

SEQ ID NO: 1563032 - DNA, 4001 bp, Homo sapiens
taactccctaataaatggcaatgaaaagtttcttcttgtaacaacagacattcttggtttgaggagaacgataaagctttatcaaagctgcatgcctccctaggggcacctaggcatgtgactgaggccacatggccacagtgtcctcaggaccctaagacggcacagagacagtggatggagtgtagaaggcctgggaacgtaaacatacatgcagtggatggacaaggtaaggacactgagagcacaagtatgagagtggcttaaggggtggttgatggttggggtgaagcagaggcatagaaaagacatgtagtttctataagtggggcgttggggtggccacaggtagatttggggatagagcatgagactgctagaaggatggaggctgggccggagtggcactggatctcagaagagggatggatctgaaaaggagatccagggagagggtgtgagagctgatgtggaggaagcagccacaggattagaattcacggcatttcttgcctaatgaggttgcctgggatgactgggaacgggtggagaaagaggcctgagcccgcaccaaagcacaatggaacggagcttaggatgggtggcggaagtgtggggcgggaggagcgtggggcgggaggagtgtggggcgggagcgtggggcgggagtgtagggtctggcttgggtatcactttaggtgtgaaggacgggggttgagcgagtcagagcctagagtctggtttgtggtctgagtgtcttgcctggtacgaagagtttctaacagagtctgggatccctctgagaacaaggaatgtgaggggataagagggatgcttggtgcagagatgtgctcttttgtacgggatgagagcagcacaggaagggaatgcacctgtgatgtgggagagaagtcttggagttgggctatgaagagtctgggcgggtcctgaagtgcaggtggaggaagccagaggtgcgtgtgggaacttggggtgtgaggtggtgtgtggactccggggtcccaggtgtggcaggtgtgagggtaagaggggcaggctgcacggaatgagaagcccagggtgtgcagacttcaggatcaggagtgtatggtgtgaggacatggagattaggttaagggggtgaaggactgaggtgagggatgtaaggtggggagagtggggtatggagtgtgcagtgaggggagcgggggaggggtgaggcggggtgaggcggggtgaggaggggtgaggggtgaggcggggtgaggggtgaggcggggtgaggggtgaggctgggtgaggaggcgggtgaacggtgacgtgagcgatgaggggtgaggggcgaggcgggtgaggcggggtaaggaggggtgaggcggggtgaggggtgaagggtgaggcggggtgaggggtgaagggtgaggcggggtgaggggtgaggggtgaggcggggtgaggggtgaagggtgaggcggggtgaggggtgaagggtgaggcggggtgaggggtgaggcggggtgaggggtgaggcggggtgaggggtgaggggtgaggcggggtgaggaggggtgaggggtgaggggcgaggcgggtgaggcggggtgaggaggggtgaggggtgaggcgggatgaggggtgaggggtgaggcgggatgaggggtgaggggtgaggcggggtgaggggtgaggcggggtgaggggtgaggggcgaggctgggtgaggaggcgggtgagcggtgacgtgagcgatgaggggtgaagggtgaggcggggtgaggggcgtcgggggaggggcatggggtgtggagtgagtggagtcgggtgagtggagttgggtcgaagtcaagggtctggcttgaggttggtgccaccgcgaacgctaggacagggtcaggcggagcccagccgtcagggcgcgttgggagggccggggcccaggggggcgcggcctcgctcacctccagcttggcccgcgctccggtcctgctctggcgcccccagcggccgcttgaggaacaaggccgctcctcgagagggatgccccgccctttccgttagcgaaccctccccggaagtgacctctcgccctcattgggtgtcctcgggaaaaggggcggggcattccgcgctgctcccacaggtctgcggcgtccgagtctgggactggcaggtgcggtgctggggacgtcctgaggttgagggagaatcctgcggagatgaagagcttcccggcctgacagttttgcccccacctccttcttgagcttaaggatttatacgcagggccccgtttgcctgctgtgtccccagtgtccaggacagcgcccggtaccaaaggtgctggtaaacatttgtcgaatgagtcgctgaacgcccagctatttccactgtcacagcgatcatgtgtggcggacattatgtggcatgtatcttacagaggaggcagcccgggctcagggagacgaggcagaggtgcacgcaggtctatgtgggctggaaagtgctggggcctcccgggcgctcctggtctccaggcaagaactggaagcagagccactcaacacctagaagggcagtgacagaaagctctggctgggaggaggctgaccagaggccagtctgagctcagccttttttttcagagggacgtgggcaccctagaagggtggtaagtaggcgagtggcagagttaaaaggtctctggctgccgaggcgggtggcgacggggccggccgttgctgttgtttggctgagtggtggacagggtcaaagccattccaaggtcgacttgacagggcttggtaatgtgggagggagggagaaagaagcaaggggctaatggccggggtgataccactggcagagatgtggaagagtgggagaagctagcttggaaggttaactttgattttgaacaccttgtgtttgagaatcctgacaaaccttagaccccctgaattttctctcagggattctgattcttagcagcctgattgcagaggaggaaaaatggctggggttgagccagacagttctgggcaaggagtgagcattcgcttgtttattgaggaggctgctgcctgggccacactccctccgccagctgccaggttcctgccccggttgaacccggttttctggccatccctttccacctgtgagctgctcttcatacttccatttgcttatacagcccagagccgatttctgttacagcagcccagagaaacatgaatagggaataattctttttttttttttttgagacggagtcttgctctgttgcccaggctggagtgcagtggcacgatctcggctcactgcaacctccgcctcccaggttcaagtgattctcctgcctcagcctccctagtagctgggattacaagcacatgccacaacgcccagctagtttttgtatttttagtagagaccgggtttcgctatgttggccaggctggtctcgaactcctgtcctcaggtgatccacccgcctcggactcccaaagtgctgggattacaggtgtgagccactgtgcttggcccgaatcaggaataattctgatggctaaggaagacagcttccgagagagtaggagaaagggcacaggattccaggcagaaggcccatctagggcaaaggcgaaggtgtggctcagcctgcctcctttggggaatggcgagtgtgttctgggctcagggttcttggtaagggacagagaagactcgggaaagatcagttgagctggaatgtgcaggctcttgagtaccctgctcaggagctggaggtgggctaccctgcaaactccaggccatgaagcccaggaagatgtcaggctggtcttcccatgcccttgtgtatctgagaccaactgtcactaaatgtttcctttacgccctggacacacagctagactctacttctcagattctcttgaaatacaagtctttagccagagggtgtggagggaaatgctgtgtatcactttgaggttgaggcc

SEQ ID NO: 1563033 - DNA, 4001 bp, Homo sapiens
cactcatgacttccccatgtccagctgccagagtgttggttaccccagctcccaggtgagtccctagtcaggaactgtcctgctgaagggacatcctagctccctccctaggaccagcctgcacccactggctgatcaacattaagcttcaaaggcctcgtctctttgtctcatgggagggattgagacctctcttgcactgcaccatagatcaacatctccctctgcccagttctgcttcccttatctgcacaaaaatctcagaagcgccaagtctttttccagggaacccaaaccatgacaggtgagtacaatgatttccttttaaatcagaaaaagaaggttcatgaaggttgctaatgtccccaaagcctatggctaaagtgactttctggtctgatttcccagcgagcccttgttctttctactacaccaatctacacacagccttgcctccaatggctgagactggatctctgtgaaacagaaaggggagcccaggcagaggggaagggcacacagagggcttgaagatgagaaaagaagagcagaggcacccttcagaggcctgatgacaagactgaggtcacaggctccagaaacaatatcaaaatgatgtgcaggctgcagaagcaagcattacacgggcagcatctctttgcctgaatccatgtccagaagccagggagcagggctcccgggcagagggggctcccttaagcagggaagagtatttgcagccaaggaccagaaaacaactacaacttaccagctttctgatgctccggcctccatccattgtccccagagctgccagagggacctgatcactgatcagaattcttccacggccctccttcattccaggataaaattctaaatattctaaggctgcactttaaggtctgtgcaggttttagcttcctgccatgtcgagagctcatttcctacctacagcaagacccggtcctactccattatctgctgtagaattatctgatgtgctaggtcaggacaccggaccttttcagtttctttacctttacacaagaaaacccacctggaattcctgctccctatcaactcacagtcccaacacacttttcagcctggcaaaacctccgacttccagtcaatgctcacctcctctctgaaaccttcctggcttcctcaccgtcctcttctccatctcgagtcttccgcactaccctgcactgcaattgctcctcctactgtccctcttagccccagaagctccccaaaggccattcttcatgctgctagggcttggcacagttcctggcactcagaaaaagccaagtaagtgctggatagatacacgaggtgctgtatccatagctattctctgcttctagcttggccaggaaaccactctgaaatttcatcctgcccccaggatgactggaaatcggaaatggcatgacaaacctgacctcccaaacccaaggcaacaggtcatgaggggtctggggacctaaggcaggtcctaggagccggcgcagagcagaggtccggccgctgcggttcctggtttcccgcaagctcttccccgggccgggcgctgggtggaggcagtcttaggatccacagtcttgcgcgcccccggctcccgggcccggcagacggcccccgcacgccgatctgtctgtcccagggaccggcccagggccccggcagcggcagcctggggagacaccgtggtgcgcggctccttgcctccctccctgcccctccgtgcgcccgcatcccgcggacacagagccggagctccaggggacgcagcccgacgcgagaacgcaccagcagcccccgctcgaggtggggtctcccggctgtcagaaaccccacaaagtctactttgcggcgccgcgccgcttaccgtgcgagccgccaggaactcggcgcccggtggtgcctcggcgcggcgcccgccagtcgatccgctccgggtcccgggagctcagcctctgcccctcaacgcgcgcgagcgcccccgcccggcggcccggcctccccgcgccgcggcgccccattggctcgggcaacgaggcccccggacggccccgcccacccgcgcccactccctcgcccacgcctctccccaacgccttgctgggttcacctctccaggcagggaaagttgcttctagactctgagctctcaccggactcaggagcccagttagctaataattctgggtcccaggagtgtctagacgcccctcggggagtgcgaagaatgcagtgtccttggaatccacctttgggaaagtcagctgacctcccggacctcaggtggcacctcagagaaaccagggccccttgtcaggaaatgtcccaggttgtgggctaggccctagggccaggatgcaacagggaacaagacaaagtctatcgtcctcgtggactttgcatggggtggaggtgggggtaggttatatacaacaaacgaaaaaaacaagagaatgtcggctgggtgcctgtggctcacgcctgtaatcccagcactttgggaggccgaggcaggtgaatcacgaggtcgggagttcaagaccagcctggccaagatgataaaaccccgtctctactaaaaatacaaaaattagctgggcatggtggccctcacctgtagtcctagctactcgggaggctgaggcagaattgcttggacccgggaggtggaagttacagtaagccgagttagagccactgcactccagcctgggcaacagagctagatgccgtctccaaaaaaaagaaaagaaaaagaaaggggtctaggactgctatacctagggtggtctccgggccgcttgtgatattggatacttggaggacaaaaacgattccagggctgaagcaagagcattgctgacagaggggtcggccgatgcatggttctgaagctggaactggcccccagggtggctgagtgaggtgagcaaggggagagtgggttacagccagagaggtagactagtgtggaatcaccatcacccagaaccttgtaggccaccgtgagggtcagggctttgtcatatcaatctggagggaacaattcaggcaagagattatggtgatgaagaccagggtggtgacagcaagatacggaaaaggtggacctcctgcaatgtgtgtcaaaagtagcacaggaaggcttgatgatggattaggctggatttaggggatgctatggtttaaatatgttccccaaagttcatatcttggaaacttaatccccaatgcaacagtgttgagaggtgggacctttaagaggtgattccattaatgccaggagtggccctctccccacccctctgctgctctcttgttctgccttgtgccatggggtgactcagcatgaaggcccttaccagatgcagcccctcaatcttggacttcccagcctccagagccatgagctaaataaattgttgttccttataaattacccagtctgtgatattctgttatattggcacaaaatagactatgacaggggttgacgtaaagggatgaaagaagaaaatctcctaggtgtttagcttgagccactgtggagtaatggtactatttccaagatcgggaaggttcttacccagcatcttccacttactgcatgagcgttagtacatgatctcagtaactaagagggagtgactctaacctcagtaactaagagggcataagactagctgaaggatcacaaactttaataccgacgtggccgggtagtcatgtactaagtgaggttggcagggtataatagaaaggagggatggggcttgtgacagactgaggtatgcacacctgcctaaggtgacagtcactgctcagctccaactgatttttgccatatgtgaatggagacccacccagagttgccagatgttctgttttttgtttgtttgttttttatcgagactgagtcctgctctgtcacccaggctagagtgcagtggtgcgatctcagctcaccg

SEQ ID NO: 1563034 - DNA, 4001 bp, Homo sapiens
gatttgggaggggccaggggtggaatgatatggtttggctgtgtacccacccaaatttcatcttgaattgtagttcccataatcctcatgtgtcatgggagggacccagagggaggtaatttgaatcctgggggtggttacccccacgttggtgttctcattgtagtgagtgagttctcacaagagctgatggttttataaggggcttcccccttcacctggcactcattcattctctctcctgccaccctatgaagaggtgccttccaccataattgtaagtttcctgaagcctccccagccacgtggaactgtgagttgattaaacctctctcctttataaattacccagtctcgggcagttcttcaggcagtgtgagaacagactgatacacctactatgtggccacctttggagacatgcacatgcgaccctgttctccatccccaaaagccatgtatgagtccactgtcagacttttctggttcccatccatgtattcctctgctctggatgcaatgcttccatctccatagttgggctcacttcctgaactgcaatttctatgtctccagctagactgataacatttatcacctctgagtaccaaacagctgggatagacttattctccaaatgcagctccacataagcaggagcctgttccctactatacccatgcatctcagctatgcctggcaccgaatcagtgctcagtaaactacctggtgaatgactgctacagtgatcttgacacaggtatcaggtctctgccactgtggaacttaccagctagggagcactgtctgagaagaggctggcagtggtcatttctgcccacctttggtgttcagaagacaggctctggagccagactgccagtacctgggagagctgagatgcacactcaggcactctgatcccaaggtttgggataaggactgtggacttgtattgctttcttttatcctcataacaagctcattttatggaaggagggtggctgaggctgacaggttaatctgccaagtactgccagacgtatttcagatattaaaagttttccatttttaggaaggtaatatggtgaatataccatattttatataacacttccagcaggctctgaactatactccatatcaaacacattcagatgcttgcagcaaatcatatgaacaaacacacttagtataattatagcctcactttcctgcagattaggctttgctaccaaaagaattgcaaaacattttctagtttccagagtgtgttggatttgggatttgcaggcgagggactgtggacctgtaaatataaagcccttagaagagaatgtggcactaagtaggtgctgtgggcctagcatgcagcagccacttggtacatgttagtttccttctctccagccaggctctgatagcacccaagcctctcatagctctccccttctatttccccaggagatgagataatccccactcctctcttgccccagaaggtggtagcacttgcaaattcctacttaccagtctgtatgggcatcatcgatcaccaacaggatcctgggtctttgaacaatgggcgtggagggacctggaggctccatcagtcctgaggtggcctgaggggcctgcttcatggcactggagagggagctaaaaaggctggatcctggagaggagaaggaggcagccaggggctgggggtgcctcctctccatggcgggggaagcaggtgagctggtggagctatctgggcgttgcaggtccgtcatatagccattaggcaggttggccatgaagctgctgtcagagagacgtcgccggaggaaattcatggctgtggatggatggagatgactggctcctacccagacgtgtgtaggtgaggcccagaagacaggctgctgccaggtacagggagtggtaggactttagccagaagagccagggggattttgcgcaaccagcagtcagctttagctgcctttatttacctgctggaaataagccaacaaatacataagtggaaacgacctccacccccttaagagcaaacagatacagcgctttcctgccccactgcaggtggtaatgtaaattaggacatccttctggaaaggaatttggcaacatgtattaagaggatagctttttaacctacaatttccattttctggaattatatcgcaaagaaagattctaagttacagaaaaagcttcatgcacaaatatgttaatcacaggttatttacactagcgaaatactgggaagtatctcaacattcaaccacagtttaacaaataagtcaactacagcacagttactcaatgaacctattgtggctatttttaaaggtgccctgaagaacggattttggtaacagaaacaatttcatgttctaatgacaaatttaaaagataatgattcaaaattataggaaccaaatgactacaaagatgtacaagttgaaagaacaaaactttggaaataaaagaaatcaaagtgttaacagtgattatattttggtaacgcaagtacatgcctttttttctttttctttcctcttacttatatttttctaattttctagagtgcttattactatggaccggcatgtcccccacctcaccaaatttatatgttgaagataatgctgaatatgatgcttcggaaatgagccctttgggaggtaattatggttagtggggtcatgagggtgtggcccacgcgatggaagtacagcccttataagaaaggatgccagagagcttgctttccctgcactgtgtgaaagcaaaggtaaaaggcagccatctgcaaaccaggagagagccctcaccagaaccaggcaaagctgacaccctgaccttggacttcccagcctccagaactgtgagaaataagtacctgttgtttaactcacccagcctatggtattttgttatgtcagcacaagcagataatatacacatctattgcttttctaaacagagtaacataagtttaaaaaacccacactgttcatttgagatcaaaacatcccattgagaacaatgactatttaaaccatggaattagattttatattttttgttaagattattatatacaattttttttttttttgaaacggggtctcacttcatcacccagcctggagtgcagtggcacgatcttggctcactgcaacctctacctcccagattcaagtgattctcctgtctcagcctccaaagtagctgggattacaggcacccaccaccacgcccacctaattattgtatttttagtagagatgaggtttcaccatgttggccatgctggtctcaaactcctggcctcaagtgatctgcctgctttggcctcccaaagtgctgggatcacaggcgtgagccactgtgcccagccagtatttttattgcagtaaaatttacttaagattgaaatgcacagttcttaggtatacacttctttgagttttgataaatgtatatactggtataatgtttattatatttctacacctcagaaagttcttttgtaccccttctggtccctccacatctcctaacaggcaaatactcttctgatgcatgtcaccgtttattaattttacctgttcttgaacttcatataaatgtaatcaaatatattatgcttttgttaataactgcttccctcaatggttctgagatgcaatatgttgtatagcagtcattctatttttaaaataactgaataccattctactggatggataaaccacaaattgctactccattctcctgttgataaaaatttgaggtcaggcatggtggctcacacctgtaatcccagaactttgggaagctgaggtgggcagatcacttgaagccaggagtttgagaccagcctggccaacaaggcaaaactctctctctactaaaagtaaaaataattttttttaaaaagctgggtgtggtggtgtgggcctgtacgcccagctactggggag

SEQ ID NO: 1563035 - DNA, 4001 bp, Homo sapiens
tttccacgtcctctcccctggatgtgcatatgtataaaccctcatcccaccaggcccaatctgacatcaccttcaccatgaaatttgattccacagcagggagacccctctcctggctcttgcggcctctgcctgggggcacctggctcactccccagtgggactgtggcttcccgagaacaagggctgcttctgagtcacgctgccttcccttggggcccagcagattcaataaagctttgctaaatgaaggcatcagaggcagaaatgacccaagcagacaagccccctcacaaagccagtggcttcgcccttccaggccagaggcccaggggtgggcagactaaagcagtgaacgcagcccacccgcctgatccggcaggtgccccccagggctcccacctttggcaagggtctgttggggcatctggggagcaggagactggcacagataaatgaattcagagccacaaacacagatgtgctggggtgcccggctctgtgcaggcaccgacacaagggttaaaggaactgggctttcctgccctcaaacagctcccatctgacggcatttgagaagaaaaggctttaaatggggtcatccttcgcagaccagggatacatacccaagccatcctaccaaccagaccctgaaaaccaaggaaaggaggaagcttgggcaccctgaggtcacagctggccttggggtagcccctggggtccctgacagtctagcccattcctagtctaagcccacaaggaacgggccccaggcctgcagaggccagaacctcgagtgggagtttctgggatacagccagccaaacccagggagccccagaaaccccctctccagaccccagcagggcttctttccatgaggtgccactcaaggcacctgaacccctccctctgtgctcactgtctctgacccatcctctccctgaccacccgtctgaacaagagcccactcagccctctgcactgaggaccctgccccccagctaggctggaggccaccctggcctcttcactgtgggagcagacctttctcccagacacccgccttgggcatccaggtgcatgctgagtgggaggggtgttaccggttcatgaaatgtcagagcccaagggggcctcaagaaggctccgcccaccttgtctataaattgggaaactgaggcatgagagaggagatgacactccccacctcggaattgaagtcctcatttctcgagaacatttcctgggtggctcccagcccaaggtcacgcagagaaggagaggcagttcccgggtggaagagaggtactcagttcccgactcatcgctccacacgggccgggctaggcaatacgaacccggttcccggccctctcctcctccaacgtccatcgcaggcgcggcatgcaccccaccgagatggtccacgccctgatccaccccccaaaaaaggccaccttaaaccctggctccgtccccacggtccccagtccgccctggcggccgcgcacaatccgagcctttcgcggcatagccgcggcctggaggtcacagcaatcggggcgggaaggggggcgcacgaaccgggggccccaggaaaccagggctccgggagccggagcggcgtctcccgcgagcaccagggatcccgcccgccccgggcccgggaaggaggagcggcggcagcgggccccgcaggcaggacagctcctcgcccgccgccgcgccgccgccgggggcccgttggggtcggggtcggggtcggtccgggcgcgccgcctttgctcacacccccaccaccccggcctggcagagccgtcggccagtccgtccttacccaagacacgacgcgcaggatggtgtgcggctgccggaccagggtgtaggggtcgaaggcgcccccggctttgcccgctccgtacgcacccccttccatcgtggctgcacccgcgcggtgccccccgctcggcgcgcgccgccggcccgtgcgcgtgcgcggcgcccccgccccctcccctgcgcgcgcggccggcggcccagggctcccgcgagggggcgtcgtgcgcggcgggcgcagctcgcggggcgcgggcggggggctgggcagcgcgcgacctcgggcgcgggggcgcgcgtgctgcggcccggggctcagggcgcgctcgcagccagtgcggtgacctctttgcaaagtgtttgggggagggcggtgcgtgcacagcaagtgtgggccgtgtccctgccccgcatccccggtcccctgccccggtcgcagcccctctgagccgtcggctctgctgaaaccatcttcacgcttgatttgtttggctgtttcctgccactttgtcggccccaaatataatgagagggcaggagctgtgttcgtccttcttagagggtgcttggtacgcagtaggcgccgcatgaatatttctcgaatgaatgaaccacgagtgaatgaccctctcttacagccctccagagcagcccccacctcccaggaccacccttcccctgcctcttacgatgacgtcatgtgtgtccctgtgcccgcgcaccctcccacccccagcctggaggggcctggcacagaggcggcggctgagacttcctcttccccatcccctcctaccccagaacgttgcccctttcctgaatctagcaattaattacgcaatcatttgttcatggcctcttctgctgctagtctgtgagctcccgaggcccaggtgttgtctaacttattcaatgccttacccaagggcctagcatacagtaggtgctcagtaaacagagcctagtccccatcaccccatcacagcttgggctagacctccaggtttcatggaaacggaggctagatggaggagtgctccctgcaggggaagggccaccttccagggctggctctcctgctgccctgtagctctatggcctctctatgtctgcagtcaccttcactggttccaggagcaggttggatgaggatatgggtggaggcttttgcttctctggtatcctgccattctgtgatgacaggacacaacatctgtgtggaggaaatgtgtgctgggcctgagggtgctccttataaaaattacatagtcaatgtccatcttaggctcagctgattgtttagtctctaccaggccttgtgctaagggctttacatacattttcacatttaatccagcacacttataaggtgtctactatgactatataaaacttttagaagaaagcacaagagaaggccgggcgcagtggttcacgcctgtaatcccagcaccttgggaggccaaggtggatggatcacaaggtcaagtgattgagaccatcctggccaacatggtgaacccggtctctactaaaaatacaaaaattagccgggcgtggtggcgagctcctgtagtcccagctacttgggaggctgaggcaggagaatcacttgaacccaggaggtggaggttgcagtgagccgagatcgcgccacagcactccagcctggcaacagagcgagactccgtctcaaaaaaaaaaaaaaaaaaaaaaaatcatgaagaacatgattcataaaagaaacaattgataaactggactttatcaaaattaagaacttctgttctttaaaagacattgttaaaagaatgtatgaaaagacaaacgatagtctgggagaaaatatttgcaaagcatagatctaaagaacttgcatcccaaataaagaacgttcgaactcaataataataagaggacccactttttaaaaaatgggcaaaagatttgaatagttatacacctcaccaaagaagatatacacacggcaactcagcacataaaaagatgcccagcatccgcggtggctcacgcctataatcccagcactttgggaggccgagacgggcagatcatgaggtcaggagattgagaccatcctggctaacacggtgaaacctcatctctagtaaaaatacaaaaaaaaaaaaaaaaaaattagc

SEQ ID NO: 1563036 - DNA, 4001 bp, Homo sapiens
caacatggtgaaaccccatctctactaaaaatacaaaaattagccaggcagaggctgaggccagaggattgcttgagcccaggaggtgaaggttgcagtgagctctgattgcaccactatactccagcctgggggacagagggagaccctgtctcaaaaaaaaaaaaaaaaaaaaaaaaaaagaaggggctgagcgcggtggctcacgcctgtaatcccaacactttgggaggctaaggtgggcagattgcttgagaccagcctgaccaacatgatgaaatcctgtctctattaaaaatacaaaaattagccaggtgtgaaaaagaaaaaaaaaagaaaaagagcagatgggggaggaagtcgtggggtttaggctcaatgatgataatggggagcagagccgtcgcctgcaaatgccacatcccttgcagcctgctggtccacaagtggggaaactgaggctcagggaagggaaggaacatcactgaggatacagaagcagtcccttacagtctcctgaaccccctgcagggctgtcagctgccctctgtgtcaagggtttaacttctccatttagcagctgtaccccaccctgagtgggagctcccccaaagcacgacacaagcctcaggtttctgcccctcagccactcacagtacatgggaggaggagcagagacttgcccagggcctgctgtgtgcccagaaatgtatgctcttcactccaccagctcaatattcttattcccatttcagagccgcttctagggacctgcacaggtctcgcagctgggcaggagtggagttgaggcttgaacctgagtctctctggatccaaagctggtgccctgtgccaggcagcatccctgagtcacttgctaaggccagatctgcagggacagcaaggggcacacagagcagccacaaggagacactggagaaccggaaatgaaaccagaatgaaattccacactggccacagcagccgagacactggggaaaattcatccaacaagcggatctgctgtggggaagggagacaggtcttcagaggcagagccagaggcccagaaacaggggaggatggagggtgatggccaagggaggacccaggtcaccagcaagcagagggaaaacaagcttccctcgagctaaagcaaacgctaaaaaaaggcatcaaggtaaacctgccaagcctctttggtttttttccgccctctttaaaatccaatcccgagtcttttttaaaaacggattccagatggcgcttggtggagatctatgtcaaactcagaaaaacaaatcagaaggaatctcagaatcttggatttcaggatccttggctactggattcagagacacatagaaacagagaccccagaagcaccaagccctttgtggcctaccctgatctcatctgtccccctccccaccctatgcagccaccacagagggctgagagtgggtggtgtcctcaggctgtctgacaactctgcacctgccttcctaccttcttcatcttcaatgggagcgaactcctctttgccctctgaacgctgctgggatatagtgactcccagacaccttcagggacaacccacttcccagtcactctttcccaccctgagccttggtcactcctggctgggacctatttacaagtctgtccccactctgagaccctgaaccagcccacagcctcccaggagctggtgccaatggaagaaggcacctaaatcatctattttaatccccataaaaatctgcaaatcatccccacaaagcagtcttatacttagagcatttcacagtcagggaggctaaggctcagagaggccctgcctctcgctgacccacagcagatggggaacctgcctcacatccgggcctgctcctccagctcacccacgacctctgtgtccagctgcctatccatgaaggatcgaattccagaatcccaaactctaaggtcaacatgagaccaaggaggcatgcctgctggtcctgagccgtgtcccgcagtgcaaaagggcacaggcccactttacttgaggggagatggtatctcccctctgcagacagaccacccagggtgtgcctaggacccactgcagggcgtcggctaacgaaggctcagggcgagctgtgcccagccagcatgggggtggctgagatcactgtaacgctgccaggaacctcctagaggcctcgttttaaacgtttttagacaatgctggctttccccagataagctgcagagagatgacatctggagcccacggcactctgtcctcccagctccaaatggaaccgtctacctcgccctgcgcaggaacatccctgagctgggtggctcgggggagccctggtccctgccctgcggtgcaggcagccaggcagctggcccctgcccatgtccaggtgcctgacaccaccacagcctcctctccagcctcctccaggcagtccccaggcagcagccagggggatatcacccactccaaacctcaacaatccctccgctggctgaagataaagtccatcaccctagaatggccctgaggtccccctgcttgggccatgagtccttcctccagtgccccaggctctctcagcctccccagtgatctctctcagcctccccagcaccagctgctgggccccagtcctgggttcatactcgacccctccaaccagtctgacattcgggccagctgcttcaacctcctcccaaaactgtcaagtccctccaccctggggcaggccactgtcacccctctccaggcaatgacagcagcccatatgtccacttgcacccccacactctgtcccctcatagcagccagacaatccccttaaacccaagtcaggtcatgtcaccccccaggtctagactcttggattgatgctcacccaccgccccctgcccaggtaaagaccttcccccaccaaacgccagggctcctgccttcctctgaagctccccaacactctcctcccaagccctcctgagttcatccctgcctcagggcattcacactcggctctttcctctgcctgggatgcctgtatttctccagatcttccttcagctggctcctcaacacgcacatctcaacacaaaagacacctccccagagaagccctccagaccagactccagatctaaggtattctccagtgcctcaattaattttcttggtaacatcacaatataacttctttcctatttgttggttcagttgttgggtgcacgtctctcccccagacccagggagagggtcaggaaaggctttgaggggagtagacagcaagtctgatagtcagagagggccaggcagcacggggggtagaaaggagaatcatcccctcctgagcgtccttggctggcacctccgcttgcacacccctgtgcacagggagctcactccctgaaaagggggctgccgagccctctccccacaagctgaacccagccttcctgcccttgtcctggtgcaggcatccatcctgcctcctggggaaaggctgagggaagaagggagcggtcacactttgagaaatgagtcaggctgccaagggccccccttcacaggaacagggccttgtcttcccccagggtcaagtgaggaaaatggctgaagccgcatggacacatgatgggtgttgggcagccccttgtcttcctgaagagtctcactctggggaaaaggtgggggtggggcaggtgaggctccaggcccctcccccaccccgcctcacaccgggttgtgcagccttggaagtgacccactggggattaggcgtaatctccgcaagctgtcgccccgagtgctcggtggtgggggtggagtggactccgctgggcagggcctgggcgagcagacccctgcctccccaaggtgctgaggctgggcctgggtgatctgcaggcccctccctctttccagaatgccccatcttcctctcctctggctgagtaacctcaagggggccttggag

SEQ ID NO: 1563037 - DNA, 4001 bp, Homo sapiens
atccctgccatccctttgccacgcaccaagatgcaatgtgtttaaagctaactattcttgctttaaaaaaggccaccaccacctggagaaacacattctggggctagtagagctggccttctgcctaacacaattccctttggttccatcacatctaggaaggggagaagctggcagccacctactctacatgacccaggtggctgctctcttctcagcaagccaactcagcctgcaccatttacaattttccctcccaatgtcacaatccaaccagcgtttcccaaatgctaactagagtggggacagttatacagggaccttgccctctgggaacttacaaagcagagggccagccgtctaaaatcaatgccaactcggtaacaagacagacgtgcccagcagtaataaaataaaggagtagtaaaggtgtggaggggaagacagcaatccccactggggaggcctgggaactgtgctcctgggagaataatttcaaggctctggttccaggttatccctgagccaatgtctactcacctctgtgacgccaagggcgagcactggacctggctacaaacctttactcatcctttcacaaatgtatttattgagtgcccagcacatggtgatagataatagagacacagcggtaaacaagagatcacaggtccctgtcctcaaggagtttactttcgttttttttttttttttttttttgagacacagtctcgctctgtcgctccaggctggagtgcagtggcccgatcttggctcgctgcaagctccgcctcctgtgttcaagctaattctcctgcctcagcctcccgaatagttgggactacaggcgcccccaccacgctcggctaatttttgtatttttagtaaagacggggtttcaccatgttggccaggatggtcttgatctcctgacctcgtgatccacccgcctcagcctcccatagttctgggattacaggcatgagccaccgcgcccggcggagtttactttctagtacaggaggcagacaagtccatagacaattctaacagtgccatgcataggaaggacccaggaggccagcaccctaccctggtaggtcagagtagtccatggtgccaacatgtgtgtgcatctatgtgcacatacgcgtcagaggacgcagggcctggaagacagcgccaaacccatgagggtccagaccgggggtagggatgagtctgaagacaattcttccactcagcgctctcgccttaggagaaggaaactgaggctgagggagacacagtcagagccaggaccagaacccagtgacagctaccactggtcattcctttagtacagcccaggggttaagggggtttctggaatcacactgcctgattttaatcctgcctcaatacgtaccatttgtgtggccttaggcaaacgaccacctcagtgtctcagtctgtcaaataggaataacagtagcacctatctcagggggctgctacgaaaatgaaactgacaaatgtaaagcaattaacacaacgccggggatgcagtaagcggtacactgtggatgctgctgttattatcattgcacgtctgctcggtgtcgcagtgggctcgagactcggatagctctgctgccgcccgccgtgttcccttctggctccaggacgctcccgccctcgacgcccggcagcagcagcccacagccccggcgcccttgacccgggggccgggcccgccgcgcacacacgccctggcctcgggaacgagggggccagcccgaggagaggagaaggtggctgacacaccccaccacggagagggtggctgtccaaactcggagaaggagccgttcctgcacccgacagcacccccgcccaggctcccaaccccaagcccagagagcgggcctgttcctcacactctgcagcaagctcctcctctgcgccgccatcttggaggaacccctgcgggagcgcccgcctccccgcagagcagcgagtggggcggctagagcggcccgaaggaggcgaggatgaccgcgctgccggggagcatgcgcccagcgccaccccacgcccgaagagggatgggggtcgtagcggaccgtgtgcgcaggcgcgctcttgcacgttttgttgttgttgttgttgttgttgttttgttttgtcttttcctcggggccgattgctcctcgcccatctttattattttttgagatagggtctcactctgtcacccaggctggagtgcagtggcgcgatcacagctccctgcaacctctgccttccggcctcaagcgattctccttcctcagcttcccgagtagctgggattacaggtgcccgcctctcctgccccagcctccggagtagccgggactacaggcatgagccaccacgcccggctaatttttgtatttttagtagaaacggggtttcgccatgttggccaggctggtcttgaactcctgagggttctttgtgaacacagttggtaaggggaggacaattcattcactcagcaaatgctacctaggtgaccctgcttggctctatagtgggttctgcagcgagcaggacaggccttcaaaaagctaacattttattttattttatttcatttcattttattattattttatgttatgttatgttatgttatttttgagacggaggcttgctctgtcgcccaggctggaatgcagtggcgtgatctggactcactgcaacctctgcctcccgggttgaagcgattctcctgcctcagcctcccgagtagctggggttacaggcgcccgccaccacgcccagctaatcttttacattttttgtagagacggagtaccgctatgttggccaggctggtctcaaactcctggcctaaaacgattcttctgcctgggcctcccaaagtgctgggattacaagtgtgagccaccccgcccaacctaaaatgttaacattttaattggagaggacaacatttatgtatataagacattctgccgggggcaggcgcggtggctcatgcctgtaatcccagcactttgggaggccgaggccggtggatcacctgaggtcaggagttcgagatcagtccagccaacatggtgaaaccccatctctactaaaactacaaaaaattagccaggcatggtggtgcacgcctgtaatcccagctacttgggaggctgaagcaggagaatcacgaacctgggaggtggaggttgcagtgagtgagctgagatcactccactgcactccaacctgggcaacagagtgagactctgtcttaaaaaaaaaaaaaaaaaaagcacacttgtcacgggagcccactgtggcttgcacagagttggaggagagagatgaaggggttgtagggacaggctctgaccaagtgggccccaggcaggagtttattcatctggaggacagagggaagttgttgccttctaagcaagccattgacagggtcccattggtagagagatgtttgactcccaggttcaagcgattctcctgcctcaacctcccaagtagctgggattacaggcatgcgccaccacgtctggctaattttgtatttttagtagcgatggggtttctccatgttggtcaggctggtcttgaactcccgacctcaggtgatccacctgccttcgcctcccaaagtgccgagattacaggcgtgagccattgcacctggcacctgcctgctttttataaaattaaacaaacattcatttgcaagccatctctccctgacccccaccatttaaaaaaaaaaaaaaaacaggttctcactgtgttgtccaggctggagtgcggtggcacaatcatggctcattgcagcctcaagcttctgggctcaagtgattctcccacctcagtctcccgggtagctgggactacagcatgtgccactgcgcccggctaatttttgtattcttgtagagacaggctatcaccatgttgcccaggctggtgtcaaacgcctgagc

SEQ ID NO: 1563038 - DNA, 4001 bp, Homo sapiens
gcgatctcctgcctcagcctcccaagtagctgggactatgggcgtctaccaccatgccccgctacttttttttgtattcttttagtagagatggggttttgctatgttggccaggctggtctcgaactcctgacctctggtgatttgcctgccttggcctcccaaagtgctgggattacaggcatgagccactgcgcccagcctcccttgttgtgtttctgacccctggctgcagcctaatgggccgactgctggacagcggtcctgagtcctgtttgaattggtgctgccccgacatcctctgacctcagctaatgatcctgcctgccgagggcagacaggtctctgcaaccctatgggtggtaggggtggtgatgagaggagaggtagtctcacttgcacagattttggtgtatggttctgtcttttgcactctttcaacagaggtctgtccagtccctcttgcaagtgtggggagggggtggtgcaggactatgaggtaactgtgagaagaggggctccagcagaaccagggtccaatggccttgaagagatggctggggacagctggactcattacgtctactcctaaatggaggaaacgacccctcagctacacagcacctgagccagaatgtcaccatggtgctgctccacaggatgacagctacctggtttgtgagggcccctattctagggacagctacttcattctgccctcccagagcagcaagcaacaaccctatgccaggaggccaattggcacgtcaagtgccagctccaatcgattgatagtagctgcctggctctgaaaggcagctgggatcgattcaccatgctgccagcacacagatggacccagcggtggtcccagcagtgagttcttgccttgggccatttcattttctttgtcctggccaaggaatgattggatgaacacactggactcccaatatgggtggataagacaagagtgtctggtcacacccctccaccactcataagcatggttgtgggcagtttggttccccaggcggccttggagaatgcaatgagccgaggaactggtcatctccaggtgcatccagggcaggaaaggatgacagcatgcgtgagccagggtcactggctaagaagtcatctcaggacctccccctagaaaagcccactgggcagcatccctgctggttcccccctacaccacaaggttacgcagagctggcggagggtcatggtcccactcatgtcaggtgctcttaatctggcaaggaaatgtaacctacgtgaatctcaacaggcagtgaagcaccgtttcttcctgactccaggtagggtgaagaaaatgggacagtagtacggggtgcgggcataaacgcacaactctgcctccccagacgcagagctgtggggctgtgagaatgccaggaggaggtaagaaagggcggccccatggggggcctgcagggtgggacaagcccaagaggtctctacatccaggcctggtgggggaggtgagcccctggtttaccgagggggtcccttcctgccctcggaaatactgcagctcctacctccatcgtctccccgctgcggggacccaggggcgtgaggatgagagagcccccaggccccagggtcagacgactgtgttcaagcaagtgagaacctctctgaggctgtttcccaactgtaaaatggggatagcagcagaactctctctcgcggcttgcgtgaagaatacaattcgatgtcgacaggagggagcggcgcgcagcgcgcagcgagtagcaggcgctgaagaaggatacctgtgaactgggagtggtggcggaggctacgcggccagagtccggggaaggggcgccggctctgccagtccctgctcggggctggatggtcgggggatgttctcgtaagtcggctgggagggagcggtcccgcgtaccctgccaccgccgccgcagaggttcgggcaggtgcggggccgcggcccctccgcgagggggccggtcatccgccgggactgacatcccggaggcccaatggcaagccgtcatctccgcgcatccgcccaatcggcgccggttgccgtgccgcgccgggtctctcgaccaatgggaaaatttgctgtcagatggggcggggcggagattcgcgtcgccggcccggtccgctttgcgcacgggccgcgtgagggcgggagggctggcccggggtctcgggttgcgcgctgggcctggagggagggggcggcccccgcaccggtccgagttgcggccgcgtggactgcgacccgcgccgcgccgcaccgcgccgcgccctgggaacgccgctccccgcgcgccaacggacccggggaagcccttctggggtccgaggccgcgctgcggggccgcccacgctgcgctccaggtaagcctgagccagtgggcggggtgtgggacccggggctggggcctcgggtcggagccgggactgggggcggggctgcagatatgggacgcattccgggcagcggtccggacagggtcctatccctggagtcgagatccgggcgagggtctgggccggacgtcggagccaatctccgccccacccgcgtcttgtccgcgcgctctgcggcgtccgagaccccgggccggcgggggcgggtctctttgtgcgtggccttggggccctaccctacccgtccgggcgtcttgcactgagcactccagccgagcgcggcccgaccccgcagccgtgcccgccccgcgcgacgcttggcgcctagctgccagggccctgcagccgccgaaactttccaacagcccgaggggcggcaggccgggaactttcctggggcagcgcgccgccgggaagctcaggggcaccgacggcccggaggtgtcctcgcgccgcgctgctcctgccgcctcgggggtgagagagggcgcgccacccggacccccggcctgggtccccctccccacgccgccctgcgccccctcggtgccggtgcggagacatgtcatctccactctgagggagactgctcggtttgctggggagtcgccctgggcaggtggcctgagagctccagcctattttaatttttaaataattaaatattggctgcttacaatatttcaccgtttcttagctatgtgtaatgtaacatacttaaaatggaactaaaggacttcagctccctttccctacatccaggcatatttagaaataaggaaaagaaaggtgccccgtgggtattttttagagtaggctcttaatgctgctgtctaataacctcaggtgagtacccaggctgctgtgggggaaacctcccctatggtatgggccaggggggtgcagtgggagcctccacctctcccgaccttagcttctctggggtagctgcctttacttcttcctacttcttaactactgccttatctgcctttactctgggatctgggcggtgtttagaggtctggtccaaacaaggcaggtgttacctatcttgtactcactctattggagctgggatggtgctgaatgcaggggggcagtcagcgctctcttgcccggtgtgccatgccagtggccggtcagctcctaagcaggtgatccaggccttagatcaggcgacagtgtgagccgcagcgtgtctgggaaggcatttcccccagtcttgccccatcctatccgcaatgtctgctcccagctgtcccctgtccccaccctacccccattctggggtccaccagcgcccagcagaggactgggcacagaacattcgctaagggactcaagtcccagctgagagggtagttgagcacagccaagccagcccctgcccagctcttggctgagctgccctgtcaggcttttcagcataaacacaaggaccttctgaccaaggttcctcctgggagaacaagttctgaccctcaatcctgctaaatttgagtctccccacccaccacatctgggctgcttggctcccatgtttgctctggcac

SEQ ID NO: 1563039 - DNA, 4001 bp, Homo sapiens
aacctcaaaaagcagctcagtctttctggggtgaccttgttttcacggagcccatcctcatggtagggataggcttgttttcaagacagcccaagccctatggtaggggccaacaaaggccaggctctgccatgctgctgccatgtgctgactgacacgtcaccaaaggatgggccctgcttctcatgcatctggagtgtcaatgacaagcatggccctacttcgagaagtcttcccagcctccctatcccgggccatttctctccagaccccttctggggtccctgagaagcccctcatatccctgtgggtgttttcagaagcagcacccttgggtgggcaccggggtgccctccaagttcgccgtctggcgcagaagccgggcacaggatcaagttcccaggacactgcacgtgattccacacactgcaaaacgtaatcagaatgacagcccacaagtgaagaccaaggaagcacaagaggctgggcagcccaggaagagctgacagctggtcaccttagctcagggaagggctatggccaccacacatcacagcaggcaggggcttggtctgaggggcctgcagtctgaggacatgcaagtaacacaaagctgtgtaggggtcaaagggggtgggggcaccagggcaccctaccctggaccaccagagcactaggatcctgtgggaacagaggctctgctgtgtccatctaacaacatggtcaccctctccagctgctcccagcccacccaacacagacgcaggacacagacacagggacactcctaagagagtggcccaggagtagtagaggcactgggagcaggccctggctctgaatgaccttgggaacacgatctgccaccttagcctgagttttccttgtatgagcaggactggatcaatgaatgcttgccccaaaaggctgcccagaggcaaatgagctagcgtgagaaagccttccaaagagctactcagctacccccttatagctgccgtcacatctgcctcatggaagagggcactgtgcccagagtggcagcaaaacagtggtcagcaggtctagagccacacgacagtgcaaacaggcctggccagggcagggcatgtgacattcctgaagaggaagggggcctgaggcccagggacttgtccaagggcagacggttcactctaaagcttgtggtccagcaggaagccaagggagcacaggagaggtgctaggggcagggaaggtgggggtctcagcaaacagccctctgtgcccacttcctagaggaaaacgggcaaagcccaggctgctacaaagcccagcggtggggcaaggactgccctgagtgcagccctgccagcccctacctctgacgctctggagttgggggtgggggatctaactacccaaacctccccaggaaggccgcatccaggcgcagggatgacccagcacttactatctactcacacccacattagctgtcaccctgctggcccgcagcaggccgcgggtagggggcagagtgaccgggcgccagagctgtccctgatgctggccaaggccgagcagcccacacaccctgcagggaccacgcagctcccaaccctgccgatctcagcctccccgcagcgagtctggtcccacctgccagagtccctcgcatcccgtgccagcggggattatcaaaaacaccttccagtaacgcgcggggcattttcgtcggccgggatcgacgtggttgcccctgacccagccgcctgattctataccatacctcagaaaggggaaactgaggcagggtgaggaagtgcggccagcccacccaccttcaagcagcctggcccggtccgcgcacccagagcccagagcccggagcccccgagcccaggccggccgggccactagcggagtcggccagccccggagccgcgcactcaccgcctccgccaccgccgccgacttccgggtgccgcgcccgcgcgccaccgcagccagcccagtaccgcccagcccgaagccggcgcgttcaccattgggccgcgcagcgaggggcggggcggcgcgccgcatgccggcgtcccgttggctgggcgcgctgtcgctcggaggctgccacctcctggcgccccgcccccggggctgcgccaaagcttcgggctgcgcgggcgtctgagcgcttcctgatccagcggccttcggggactccgcggctccctgcctgcagggacgccatgggaggtcgcagccgcccctgagtccatgccctcatggacaccatctgtcacctgctcaccctgcggcctctctcggaagaggtacaggaatgctcacttccggactggccccctcagactgcgtcctggtctccccatcctgttcactcaaccccacctctggacctggccatcttcctcttggtcatcccttccttcactttatggcctccaggtcggctctttcctccctgatgtccctgccattcccagtatgtacccccagaccctggactaggcatttgagcactataccctgcacacccaccacctcccccacttccaccccccagtgtagcctttgagctcacatccaggtccaggccccagcgacgaggggctggcccagcttgacttgtgcagggtgagcaggtgggcactgactggggccctcccaacaggacagaggcattagctgggaccgctgctcctgtagcctctgggctgtgcctgggcctatgtggcagaaaggtggagagtcaaagcccagaggctcaggccctgcctcaaagtgagcattcaaaaaactatgacatggatgacaaagacattagggataatgataatgtgtaaagcactctaaacccaatgtctgggtcagcagttctttcatcccactttatagatgtaaacactgagacttggagcagttatgtcattcagttgaagttgaaaaaggtggcaagcaagagaggccacattagcttcaacctgtgttgaagacctaggtgccctgatgccctgcagaaaactggggctcagggatgggaagagcctggctggtaatcagcaacggcaagagtctaacctggacctacatgcgggcccgttgtgctccacacttttgctatcttatctgtgtttcccctggaacccaacagaaccttttacaaggactccagatgcccagggactcatggccagcgggccgcagacccagccagacatggttgtctctcccaccatccagcagtgggatcatgtggggctggtaccagtgatttccctctgagcagccaaacctatgcaatctatagggccaagaggtggtggtggtggacaagtgggatctggggcttgggggtgatggactgtgccctggggttcatggcagcacctggagaatgggcttccccaaagcaccaggccatgcacctcaaagctggacatgagttgaccaaggtttccctttgcccacaaagagggatgcagtaacatgtcagatggtggtttgcatcctgttctgtcataccttgtggccttgggccatccccacccccagccatacttttcccagctagacagagccagagcagacactctgatcttctttgtcaccactgacactccagtctggatgacatgcgatgccaggaagcaggtgacggcagatgaaatgggtctaggatgggcacctaagccctgggatcttggggctgcaacaggctcactggcatccaacctctaattgcacacaaactcagataggaagctcactaccttctgtggccactcttttgatttcaacagctgccactcttgaaaagttcttgacacccagctgaaagcattttctctctgtggctttctccgggggcctcacagctgtccgcatggagctaggtgagaggatgagagagggagaacactgggctactggtccctgtggtctcccttgctgtgtttttcttatctttttcttttttccttttttttgagatggagtctcgc

SEQ ID NO: 1563040 - DNA, 4001 bp, Homo sapiens
tgagctcttccttccaaggtcccataaatgcaactgggaactcctttcctagatctcaagaccacacacctccctgggtcctaatcccaggtgactgctcctcaattcaaaacactccaggtccccactaagttctcacaagtgaatccctggggaactgtgacaaagcatcagtcagggtgagggttcagaatgaggggtgctctctctgagtcctggactaaacctagcctgctgtgagccagtagggagatactggaggagacagatccagtgggtgagagggaactccccttaggggaggggcctggatttctccaaggaagaaggaggcctggtgaataagaggctttagggctggggaaaatcccggaagtgacaggggttcttagacagttaaagcgcttccataagtcatgagagagtctggggtgaccttggacaatctcaattggtcagagaaagggagaaaggatattctctggagtagggtcatggcagggccccaggagctcctactggtgattgggatggaaagcacacatcaggagggagtcttgtcagttctgtgcacaacactggtctcacgtgacaggacagctgggatgggagtggggtatggagtccatctttcctaaggggaccgccagcctgtacacatgatctctgaggcctgggctcgggggattctgtggggcaacatggggcccagcttggaggcaaggtgctgttccactgccccacatttctctgtctgctagctgggtgtctgggtgctctcgggataggacatcggggggtgctaatatgagcagggaccctgctgtctccctgcctgcccccgtcccacgcccaagatctgcccttgggaggaggcgcatacatacacaggacatacacagagcccatctactggctcctgtggctgctggagctgatggtctgtcctagtggtggggctccctgtcgccctgtacgtgctgggaagggggagtacctgcccacctgttgccagtgccagtggaggaagctgtgtatgagcggatagggggcccttctccgacccttccatgaggagaagggactgtctgtcccaggatggagctgaggggagggaggtgaccaatgtctgtccatccagaggtctgtatgcctcgaggaaagggtcagtctgtcctgggaaggggtgggggcggggcagtcagtcctgaagtcggtctgaggtctcctggtgtgggggcagtgaggcggggagacaagggcgtctgtgggtttgtgggagggggaaagatggagaatgagtgtctatggaggggggcgccagccatctgggagcctgtcggggtggcagaaacaatcatccctaaggtcttggcggcaggggtgggtttggggcagtctgtcattctgttccacggctggaaggagggcacagtcggtccttcctgggagcgggtcagtctgtccggagggtggaggtggcgggtggaggtgtgggcccgtccgccccctgggtcggaagtaggactgcgaagggggcgggtctaggaaggcaggggtggtgggggtggggcaggggagggaacggggattagtggtccctgcctgggagggggacgtgtcggcaagtcccgagggcgcctccgtccgtgtcgaggcccctcgcgtgggtggcgcgctcagtcccgacccccggcgctactcacgcgccctcggcgccctgcgagcccacgatgaagccgaacttgtcgatgcggcgctcggcgaagccgttggcctccgagtcagacccgagagagctgagttcgtcggtggttgcggcgtcggggccctgggccaggctctcccgggttcccgacaggctttccccggccgcgggcgcgcgcggcccattctctccgttgctcttcgccatcccagccgcgcccgccgcctgagctccagcggccacctcagccgccctgctgccgccgacgccccgcccacgcgcggcgcctattggccgccgcaaggccggggggcggggctccaggcccaccccggagctctccccccacgcccaatgggcgccgcggaccccgggccccgcccaccctcccccggcgggcgccaacaagcccgaagtgagggggcggggcagccgtcaccgcagccctccccgccctcctccgggctgccaatcacaagaactcacctggacgagctcgggcctttccgggttggctccaagcggggcctgtcacctactgcagagcgcgagccggaggcccagggcttcctccatggattcctcatctgcctcctgagccccgctccctgcgagaccccaaggacgtggtagggattgtttgccccattcatttatgaggaactctgaggaggcccaagtgagttcagggacgcagagcggcttaaaggcccagcctgagccagaagtctggcagtcccattgcactcactgcttctggggctttaaattacctcgtgagacctaattattaataatcaccagcgtttactgagccacgcacgcccgaagctctacctactttctcctgtagtcttttccccagcagttttatggaacataaacataccataaattcacgtttaaagtgtacaatgatttttagcatatttacagagttgtgcagccatcacaacattctaattttagaacattttcatcaccccaaaaagaaactcctaccaattagcagtcactccgcatcctggctcccccagtccctggcaaccactaatctgcttcctgtttctatagatgtcccttttctggatatttcatataaatggaattatacaatatatggccttttatgtctggattctttctcttgaacattttcaagtttcatccacattgtagcatgtatcagtgcttctggattcacatctgccccaggtatgtctgactccacccctccctttcctgggataggcccacaccgccatgaaagacctatactgcccctcctgggagctgggactataccagattttgtttttccattcatcagtgatggtcattcgcgtgtttctagtttttagccattatgaataatgctgctctgaccattcaggtacaagcttttgtgtgggggccttatgtttacatttctcttggatagataaggaagagtggaattgctgggtcatatggcaactgtttaacctttcgaggaactggcaaactgttttccaaattggttgcaacatgtcttgtaatctcttagcaatgaggtatacaccattattagtcccattttacagttaaggagactgaggtaaagtcagttgcctaaggtcccagaattagctgtgaatatagccaggattcgaacttagctcttaccaactgcctatatttggagggatgggccgattttatctatatgggcttagccccaagcagctgatttctgaccctagagattgtcaactcttggatctataatataatgatagctcctcgcttatgtctagtactttatggtttacaagtcacagtatattgtcatctgacactccctgcagacctgtgggagagacaggcctagagaggggaagggactggaagactcagacctggctgcagggcctgggacagactattcagggccccaaggcaagccccaagagggggtcttgagccttgagtgatttcaccttgatgccatgtggcctggacattcttgatggcgtcattgtacaatcctcacattccatgagcttctggctttccataaacaaggcaagaacagacatgggagtgggcacaggctattttggtcttaaaccctcagtctaggaggatgttccttctcttcagtgactccagacagtggtgggctcctggtcccagctcccaggaggggcggtatgggtctttcatggtggtatgggcctatcccaggaaagggagggggaggagccagacatacctggggcagatgtgaagcctcaagtacagcaaagaaaag

SEQ ID NO: 1563041 - DNA, 4001 bp, Homo sapiens
aaaaaccctatttccaaatgtcacatccatagtttccagatggacataaattcaactcagtataaggacaaattaccaagagccacagccttcaatccaaaggttgagtcactgctgtaactccacacagcagctctgttattcttacatctaagctgattaagaattagagtttagactgatgaggaaccaaaaccttaagacctaaaagtaacacataaaagttacactgtcatgtggctcctcttccctggactcttatgttctacagcatttgttcctgtcactaccaggacctcctacccaccaccattccagaatcttcactcaccttggaccctgacactggttttgttgaaaggtcttactgttctcgaatcaagcacggtcctgtggagtcgaatagggtctccggccacctttgatgactcccttcattctcaaagccactgtctgagctgtcagtaactcacgctgctaacccccagatcactcttaaaagtaaactttcctttttttttttgagacagagtttcgctcttattgcccaggatggagtgcaatggaacgatctcggctcactgcaacctccacctcccaggttcaagtgattctcctgcctcagcctcccaagtagccaggattacaggcatgtgccaccatgcccagctaattttgtatttttagtagagactaggtttctccatgttggtgaggctggtctcaaactcctgacctcaggtgatctgtccacctcgacctcccaaagtgctgggattacaggcgtgagccgccacacctggccaaaagtaaacttttctaactggatgcagtaaattccaaagtttatcattcaaacactcaaacaataatatttattatgaaacaggagtacaaaccattttactgtgtttatgaatgattctactcagacttatcttcgtaacacaattcataattttcagcattccagacttcagctttggaacagaactatgttctgaaatcttgacgtttgcttatctctgatctgttttcaccagtggctgattttatcctaggtaccctccacgtaatgtctcattccctagggccctggcatagctcagcgccacagcaatcagacaaggactctggagctctggagctgtatagcatctagggtgtacccaggtcattccagccgaagaaaaaaaaaaaaaaaaaaaaaaaaaaaaaaaaaacttcctgctaacacaacataggaggtggttttgacaccagcaagcagaaacatggaaactcacagggaaactctagtcctcttctatgctcaaggcaagagccgcagccctcaagagaccacaggcaaatcaagtgggtcaaaaacaccacaccccctgcagaaactgatccacccagcagacggggggcctcagcccggccagcttccggactccaccaaacttcacagcatgacccgaatcagttccttccagcctccccaaggagcccaggagtttctcggaaagaagcctgccagtgtcaggaaaaacgccaatagctcctcctcgtccttgcaagcctcgatcctacgtgcagccactgtcacccccagaccccacgctccgacctccgagccccccaacgcccgtcacaccatccagcagtctcctcagagtccaagttgccctctccagacccccgactccacccgcagcccaggaggccaacgcggccacctgacctctgacccctgaccccgacctggccctccgcggcacacccacctgcccgggagcttgctgttgctgcgcttccagaattgcttcctggccccgtcgctggccatggcccctcctcatccctcagacccgcggcccagacaccccgagtgcacccggccctcccctagcggccctttcctgtgccccgggtggcccctcactgctcccgggactccagagcctagagccgagaagctcttccgcctccttccggaagttgtgcctacgcgcgcccggaagtcccgcctaagtccctggtggcgagtgacgcagcactccgagcgcccgtcgttattaaagggcgacgccgcgcaacgcacgttacacgcatcgcggagggagcggaggtggttgggtttctgagtttgagtctgtcgctcctggctctcccgacacaacagcggcgcccacctgcccgcaacggactcccaggagcctcgagctcctcatttccaaagctgaactgccccgtgtctgattccgatttctcttgagcgcgtttcggagccggcccagaacagagggaagccagacacaccatacccggcccaacagtggcagggcggctgcgggtgctggtcaagctgggtcacccggcactgagtgacgatcagcaaatactcagtggacgaaatatttgcagtgcagtgaggtgaggggcataaccgcggagcgtattcgaagagatgagagagactggggattaggccaggcttgaagggaagaatggtttgagcaccgaggacaagaattaattccccaggcctgggttccagccttgtgcggctatcacgtgcttgaaacctggctagtccggagtgagatgcgctttacgtgtaaaatacaggattccaaagacgtcgtataaaataatttgtatattgtttgcatgttaggtaacatttttaatgtattggattaaataaaatgcattaaaattatttttacattccttttactctttttaaaattatttttaccttttttattctttttttccgggggggactgggggtgggtgtcttgctatgttgcccaggctagtctcgaactcctgccctctagtgatcctcctgcctcaccctccccagtagttggaactgcaggtgcacacgttatgactagatctttttactgtgtgtgtgtgtgtgtgtgtgtgtgtgtgcagaaaatcactaaaaaaaccgtgtctggtttgcattacatttctgtgcttcttagaccaaagattgaatgctcagggactgtcatttcagactggagctttagtgtatttggagctcctgccagttctcttttaaaacaaaaatctaagacatattttctgattaagaatttccctggaggctgaggcaggagaatagcgtgaacccgtgaggcagagcttgcagtgagcccagatcgtgccactgcactccaggctgggcgacagagcgaaactccgtctcaaaaataataacaatttcccatgcctcttcatttactggtaagtaacattgacttagtacttactatgtgcaaggcgtcctactctcctagaatcctctcctagtagggctcagaaggccccaggggtctcctcctgacagagccctgacagcctcagacagtgaggtcccctacagacaacactgaggaccatggcggttctttccagctcagtctggcttattgcaagaaccagtgagcgaggtgacagcaggattaacctgatggaaggggaaaggaaggaagaactgaaacaattgacagaggaaaaactggcagcacttagtgactggttacaccttagatccgggtgctttttatagcttaccgtatactttgctagctactgttttcaggcgaaggagtgaggctgagattgacttgaaggcttcaaaaccagctaagcaaaggattactaggatcacaacagaaacgtgaagatggaaaaagaaagtctgagtagaaggccagttttgaaagccaaagtaatacagatgttggagtctacatatgggacctaggaattgggacagattctcaaatcccagaggtatggaatggaacattttttattcatttttgcaacaagtattgagcagcaatgcaaattaaaactaaggacataccatgttacacttaacagattggcaaaaacttaaaaacctgtctttaccaaacttaataaggatgtggatttgtgagcagagcagaactctcttgcactgccagtaggagtgtacgttcatt

SEQ ID NO: 1563042 - DNA, 4001 bp, Homo sapiens
tgttccatttaattctcttcctcactgtgcacgtgtgtgaatgattaagcattttaaaggtacaccgtatctttgaaggaattaacttccaagaacacagcacattctctcacgacaaaacccagctaggtgacaccctcttaaaagctagtgagctgctgtaaaggtggccttttctctcagctatttaaaagcatgacggctgaggcaggcacatctggctgatgcacaagctgttacagtggctctagtgactggttttggaacacaaaactaactcactatagagattaattctaagagaaaacaaaatgcggcccacagccaacaaccctctaccagcccttccaggaggcagctgtggccgcacaggaatcacctactgcaccatcaataaacctgagaacttggcagcagccagacccagtctcaaaacagaagaggtggcgctctgtgctcttcctccaccccgagaaagcaactcccaaggccccagacgtgagcaggaaaatagtcatagattctataaaactgtggttgtctctgaacctttcttcctcccagatcccttccgtattcggaaagaagcaaggccagatctcctcttgactcccgaccccaacagcataatgtagggagtcccaggcaactcgctagcctcccgccccaaacacattcacgtgaaaacaagggcagcgggtgcaccaagccctcgcggaggagctgccacccctaagagagccacagtgacaccaagggacccaccccctttccaagaccgggtcctctgccctgtcctctccacacatcccgagccactgatggctttcagccaaggatcaggagctcatccagacgactgcaataaacatcactcgcctcatctaggtgaaagccttagagccagcaagcctattttattttttagtttagtaaaaatgtttgataaaagaaggcccatttcaaaccagcacagcaaggagtagaggcccaggtgcagaaagctgcacggcacacttaaaaattctatcagcatcggccgggctccggtgcacacagcgcacatgagaaggaagaggatggcggagggcgaggcagcgctcaaatgaacccaagcatgagcaagaacacccaggagggacccgtgggaacagagcggatgcagtcgggggcccagaaatatcaggggccccgaagccggaaagggctctgccttggatgggcctgaaggtgaacccgttcccctaggagctcggggccttgagcagaggcccaccttccccactgcaggccgtttacggaaggcagactcagggaggagagggcgcccagcaatgcctggccctgccccggggggctgccatcagtaacaacacagacgttctcagcctctacttcctacttaataaggaaacccacaggtattctaagcaactggactcaaagggcctacgtgccccttcatgaaccgcagcactcggggtggaatttccatgtttatcaccagaaaagaggaaacatttcagaaagggggaacaaaaagtctggggatactcaaaatgaaagttccccacagcacggggcccagaaatgggaagagcccaggcagccctgttccctctgggcctcctgatacctctgcctcttgtctgcaaagagaacaccaggggggacctagaacaagctgctcacctcactccagaagaatctctgctgccgagcacagcaagcctggttttcccccagcctggaggagccaggcctcaggctgagctcagcagggctccaagggcaggcaggcccagcaggcagcagcctgagttcaaacaggaggatgggtgcgggggcgggaggaacacctccacccaagccagcccacagcaggatcagattcctggtgagtgagtcagctttctctgtaataatttcaacacctgttaagtcccctagggaatggaggagataaggatgaggctgtgatgggtaagggcacagacttctaaggttcaaaccccagctttgccacttatgagctgtgtggctttgagcacgtagctcagcttctgagtttcctcatttgtaaaatagggaccacacggtaccacccccagctgctatgaggactacacgtgtggttgcatgtacagtgtctagcccgccgggtgcagtggctcacacctgtaatcccagcactttgggaggccaaggtgggcggatcacctgaggtcaggagttcgggaccagcctggccaacacggtgaaaccccatctctactaaaacacacacacaaaaaaatgagctgggtgtggcggcatgagcctgtagccccagctactggggaggctgaggcaggagaactgcttgaacccgggaggcagaggttacagtgagctgagatggcaccattgtattccagcctgggtaacagggcaagactccatctccaaaaaaaataaaaataagtgcctagcccaagggaagcactccacagacaatccctagcgtgaggtgtgacaccaaggccccagccacctcagttctgagcgctgcagggaacacctgctctgagcctgctccgcacacagacacgctccccgactcctcaggaaaaagaactacgcaggtgggtcatcttgtgctcccagggccaagcacggtgacattccccaccctgtgacaggacacgggctcctgttcctgggctccccactgcacctagaagcactgcacgatgcagatctccacggcctgtgttcagggggtgaagggctgagctgaggaggggcagagatgctgagcctgccagagaaggaaaggaggggcaggtgtcactctcaggccacagagccaggacaggcccctgcaagtgagcactgcccttgtcctagccacaggcaggccgtgctacactgtggccgttcagggaaagaaaaacagagatgacttcttttcaacacaaatgcccatccatcaacaagtggataaaggaagtgtggtgtggccacatgcagtggctcatgcctgcaatccctgcactttgggaggccaaggcaggaggatcaggaggtcaggagatggagatcatcctggccaacatggtaaaaatacaaaaattagctgggcatggtggtgagcacctgtaatcccagctactcaggaggctgaagcaggagaatagcttgaacccaggagacagaggttgcagtgagccaagatcacaccactgcactccagcctggtgatagagtgagactcccatctcaaaaaaaaaaaaaaaaaaaagtgcggtgcatgtgtgtttgtgtatatatgtatatatgtatatgtgtgtatacatatatatgtatatgtgtgtatacatatatatgtatatgtgtgtatacatatatatgtatatgtgtgtatacatatatatgtatatgtgtgtatacatatatatgtatatgtgtgtatactatatatgtatatgtgtgtatacatatatatgtatatgtgtgtatacatatatatgtatatgtgtgtatacatatatatgtatatgtgtgtatacatatatatgtatatgtgtgtatacatatatatgtatatgtgtgtatacatatatatgtatatgtgtgtatacatatatatgtatatgtgtgtatacatatatatgtatatgtgtgtatacatatatatgtatatgtgtgtatacatatatatgtatatgtgtgtatacatatatatgtatatgtgtgtatacatatatatgtatatgtgtgtatacatatatatgtatatgtgtgtatacatatatatgtatatgtgtgtatacatatatatgtatatgtgtgtatacatatatatgtatatgtgtgtatacatatatatgtatatgtatatatacgatggaatactacttagccataaaaaggaatgaattactggcattcgcagagacctcgatgagattggagacaacaattctgggtaaagtaactcaggaatggaaaaccaaaca

SEQ ID NO: 1563043 - DNA, 4001 bp, Homo sapiens
tccctgcgcaccggccgggcgcagggagggccgggggcggagcctggccagccgagggagccgaggacacgaggacatgttggagaacttcaggccactgggtcgtatgctgccccccggcacccagcagccagcctgcctgccgggagaagctctatggcccgaccaggctgggcagagtgaggccgaggcccgccgctctgcctggtttctaggcccaggcatcccagacgccaaggcctgacttggcctgtgcgtttccccacctactgtctccagggtctcctctaaccagttcagcgcacccatggctttcctgtacagggcctctccagctgggtgtcaacctcagctctgtgcctctgtgccttgctggagcctctgtgccttgctggagcctccctggtgctggtggtcagggccactgtttgcaaggcctctctgtatacaacctcattgcagccttcgcttgtgcatgctcaggatgggagtgggaggcaggcaacctctcccagggtttttaggatctcaggacctcagaccctgggctggagaggatgctggctgggaactgggaaggcccagtaacgggctggggggctgggcgccagtggggaggctggccctgggcctgaggttcaggaacgcatgtgagtccagggccgcagtgggtgagtatacgaatagtgctgcctgtctgggatgtggtgtgtgttgctgcctgtatggggtgcctcatgtcctgccccccacaacccctgccgcctgcagctggagctttgtgggccatgtcagaaaagggaagctgtccttagtgcatttttcttgccctgagtagtcattctgggccatgacagtgacaatgacttatgtctctcagtgtcactgaggggacccagggacaagtccagtgaggagtgctgtgtggggatggaccagctggttccaggcccctttccttcctctctgagcaggaccagccattgtccccaggagctgctcctgcaggaaggacagtcccgtggaggcgggtggtagggatgctggtggccgcagatttggtagtgttgcaggagacgtgcctgtgttggcagtctgcacccagagaggcctgggccagtcggtgggggcatgggggtggggctcctgcatgtgccccagcctgagggtatgcccaagcttgtgtcctgtgtacatctgcacacacctcagggcactggccagatgtggggcctgtgggtgaggccaacattgaggagggagaagtgaaagtgaaaaaccctggggcctcctggagactctgggtcagccgctcaaggatcggtccagaggtccccagacctctgtgcctgaggtttgtagggaggagcagagcccttccagcccccattaaccccttcgtgcctgagcaggacctgcaggcaggcaggggcggccagcttgccacagcagagaagaggccgtcagggtggaggaaaccctggtcaaccagaagggcgacgggaagaggtgaggggccccacccagccggctctgttggccgaccctaccccaccggctgcctatactcactcgcttgatttcggacccccggaccccgttgctcaacgctgggaccctccaggagccctcggctaaaggggcccggaagccctcgaagcgcgaggccgtcccagcctccagccggagccgccgcctccaccgcctccatcgcgcagcaggatagggctcctccgaccctccctcccgcctagggcaccgccccgccgcgctccgccgccccgccaccccgccacccgcccacactcctcttcacctgccgccaccccacccgtcgtgccctcccgcagcccggagggagcgcgcccgtcggatggccctagcccggcacacgcgggttccgcacgcgaacgcagcgcctcagcacggcccgcggcaagtgttcctccctccctcacctggcccggccgcggttcccttcctcctcgctccccctgccggccgcacctccacacccgcgcgataggaggcctgactgggagctcccttgcgtggatcaggaaggtgaggcgcggctaggggtcgcagggtctgattcctcagggctcgatgcaaggctagggcctgggctgagacatctgctcctccgcatgcaatgcgcagcgaagacaagacgcccatttctcccagcgcagggggcgagatgggagctatgataccattttacaggccggaaaaccgaagcttggcttccactcgggtaggtaaggggtggggagcagaggcttggctgagtgcaggaggctgaagggagggatgcgaccgaggacccgcggcggcctttgctgtctgggctgcacctcagccctgccccaagggagtccagtgtgctgagactcgccccccaccccagtcttcgtagttgtgggtgaagcaaaccctaattccagaagtttttttccctagcgcaggtaggctgccgctggagaattgtggccgcccatctgtctgcccagttccgcctcccctgcacacacgtggctccctcaggggagccttcagacaggcaccctcacgcccacccagcaggacccccttcccctcctatccataaaggcacagcacctccccactgctcagaattctgagcaccgctgggttgccgcgcaccctcctttacctcccgtgcgtccctggtgggcagacagtataccaggatctttgggctgggctgtgtttcccaggcaagttgcgcccccagcattggtcccaggctacttggggcaaatatacacacagaagggaccggccggaggttcgaggtgcacgggggactcctcctctaggcctcagagtatggagagagcagaatcgggctccgccgcgcaccgtgcaaagggaagcactgaggagccgggctttacttgaccctgctaattcgttttaggatggaccgcctggagttgcttacagcgccctatttggacgcggcctcggggtctcggggaaggcccgccgccaggagctgccctcaccgtcctccctcccgccatcagcagctcagccccgggccccagagaagggcgggcggctgggggcccaaacctcgccggaacccggacaggaccgcgcgcccaggagctctgccctctcctcccctctccactcccacctcttgactcccagccctcgggggcgggcgccaacacagcagcctcgggcgctccccaatcgtccctccatcccacgaaagtgcttggcccacagcaccggcgaacgcgacattccgggcgaccctcgtggccgtggacgagccgagaccccgagcctgggaggcgggcgggtggggccgcgtgccggggctgcccgcggggccgctgagttgtggcctctgccccttcgtcggaccccagccgccaagccgagagaagaaccgcgggcgggggtggcgggggaggagcgggagcgggagccggcacgggagcgagctgggatctgcatcaaagccgggtcggacattaggtcctgcatgcggaggcgttgacgggagtgctgtctccctctgtgcataggcagtgggtttgcagcctctggggcgggtgctgagttagaactgggggctggggactcctggagtggagggacccaagccagagccagaacaggggccaggtccgcctccagggagggctggagacagaagcggtctacttccctgcctgccagggcagggcgcatttgggtccaccgccggatctcctgtgccaccgcaaacactgcctgcgatgaagaaggaggccgttcctgttacccagcctggggtctcaatgggagtcctccccaacctgtggctcaggtggtcccactgctccttgaccttgccctccctggacctctctcctccctggcgcccgcctcctgacacggaagtcctcaccaagcccacccccacgtgttctccttggtgttgggcctttactcaaactgctggggtcgtgggt

SEQ ID NO: 1563044 - DNA, 4001 bp, Homo sapiens
ggctggggaagtgatgcatgactggtttcctttgccccaccattgctaggtggcctttgagtggctgcaggatcatcctcttgggagcctttatcttgtccaccaggcttttctacccgacctgtcatggcttcccgggagacaatcaccccaacagtcttctcattaacctttgggttcccgtcggatgacaatggcatgtccttagcgcctggtgaggtggcctcttctcttgcggcaggactagcattgagtctggggggttcattctgagcaccttgtgccggtgaggagccagctttctcagaggctccacccttgtaggtggtgtcagagctggtgctctggccacttagttgccgcactctctcgccttgatcctctgaactgctggagcagcctccatctaatgactctgccataggggacttcagctgttcttcaggttgtgaggagccttcagaatttgtgcagctatctgctttcttggaagatgagggcctcttggaggtcttcttctgaggagtcagggcatcagaaagtaacatgtgctggacagtgttaggaagattggccacttgagtactcagagcactcaaactactcaacccaggatctgtcagtcgcttttctggtaccccttctagtccaaaccctttgaagcctgcagcatgagaattaggactgggcatcattgatggggttggactgagttgaggcattaactgtaaaattctgtttctggaacccataggcacactgccttgcccacactggagattctccccagtctgcatgagaggagatggggtagaactacagcttggagactgaaccacagaggcagctggagaagggttagaaatggggctgaagttctggtgaaactgcatgggggacctcacaggaacctcaggctggttgtactgccccacttggctttgcaggggcagcttggtggcagcgttagtatactgcatcacatgctgagaagggtgttgttgttgctgcggttgctgctgctgctgcccctgttgggtcccttgtggaatctttgcctgttcaaaattcttcatagattgaggctgatagctgtaattggattgtgttccataagcctgtgcattagaacccacattgtgtccttcatactgagatccagcattcacattgtaactgccatcatagctctgtccagactggctaaaacgctgtggtgaagggaaggaggaggaggaggaggaggaagcagaagactgatagtgttggccaaactgacccactcttaactggtaaccagcagcagaggatggcagagttgagggccgctgcattggctgtagatgggatgagctggatgctggttggccagtggcctgtggcaggggctgatgggactggtaaagctgttgtctcaactgctggacttgctgctgctgctgctggctggaagcctgctgttggtactgagcactccctggagagaaaggcccagtgtaatcctgctgataatgtgacacaccgccaaggccagagtgctgtgcttgaaactggcccacatgaccctcactcccatactgattgccaaagctgctcccctgggggggtccatagctctgcacaggcccagaaggccttcgctgaggaggctgtggggttcctgtagtcacggggtctttgttgcctgccatgtagtaaaaatctccagcctctttcctgaaaccctggtaaccttgatggccagaggtctcgctagccatcgctgccgcagcagctgctgctcctcgtcgtccaccaccactgccactgccactgctgccactactgccacctgtacctccaaaattctggaacatctgggcctgacgagggctgaactcttctagccgggatgagccgtgtacctcctgtgggtagctttgctggtttccgtggtaactgctttgctcccgaaaggactgcatactgttcagcagcacagcagcaggccaacagccctcctagaaatagaagaaagaaaaacattagacacgcatctccttggtacaaataaaatcaagtctagatgatggagggaataaagatgaatcagaggcccagatgaagctgactggtttgaatttctattttttttttttggttttttgagacaagagtctcactctgtcacccaggctggagtgcaattgcacgatctcagctcaatgcaacttctgcctgcagggttcaagcaattctcttgcctcagcctcccgagtagctgggactacaggcgcatggccaccaggctcggctaattttttgtatttttagtagagacagggtttcactgtgctggccaggctggtctcgaactcctgacctcgtgatccgcccacctcggcctcccaaagtgctggaattacaggcatgagccaccacgcctgaccttgaatttcatcttttatattttatcctatccacttctgaaaatgcacatatgcagagaaatggcctaaagagtgaggcaagaatctgtagtagaatgaaaagcagcactctgagtgcatacaaacccaatacagcaaaaacatgtatgtctcatatatctaataatgccttattagacaaatgagcccccaaactcaaccagattaaaatatggggctgtgttattactgtcaatgaaaaacagcaatttttcaataagcctcccagttatgcgggggagggggtgtggggtaagaaaaaccaaatccttttttttttttttttttttttttttttgagacaaggtctcactcttgcccaggctggagtgtgcaggggcacagtcgtagttcactgcagcatcaaacacctggcttcaaatgatcctcctgcctcggcctctcaaagttttgggactacaggcataagccactactttcatttctctgctttcatgtattagggtgatcactgaactgcgggttttaacactggctgctgatcgccactccccaacactgagaaacagacctggccagagaactgcagccaattccttatgtccaagtgcaaatttttgcagctttactataattgccaactacctgtgatgactggtgactccaggacactcagcccatatgggttccacacaaactttggagtcaacctcttcttggcatatgactgtgtctacagcacccctctctccaccactctccttcaattcccaggtacaaagggctagacttaagccagtgaatagcagtgactattcttccagattattttgggaggtttccaagaagttccagcacctttacccgccatgtggtatttgtatttgccagttttttaaattcacagttattactggccattactatgaaagaattagaagcaatcatcttggaggacagcaaaaaacagagaggaaaataggaattcatcaagcctaggacccagactctttcaaagttatctgactgagccaccactttgtattacctattataatccctcttaatcaatcaagctgattttttcccctttcacctgggcctgtctcctcagagtcagagatgaaagggacaaggccaaattgctccaagtgactttagaaccaattacttaaaaaaacaagttccaaaatacatatagggtaaagtgaggtgtaatagacagtttagtttagttacaatggtttatgaagctagtttcctagttcccctgaaggggagctgaaaatggagttgcctgcaggaaagtcaacaacctttttaaaggtaagtcagatttatcctctccaatccctggagtggctcccacctcattctttgggaaactggtctcaaaggcccctgctcccacccccttgacctctctgagctcctcccctatcactctctgctctagccccacagttgccttgttcctggaacaggcctaccacatatctacataggaactctgttctcacctgcacgttcttctcccagagccagatagcttgctctccttccagtctttgg

SEQ ID NO: 1563045 - DNA, 4001 bp, Homo sapiens
acatacatatagagctttaaactgggagagcaggtgtcatgggatccttccttgtactacaccgaggaggaaggcaggggagcattcttagcccactttacagataaaggaatgaggctgggtgcaattaagtgactcagtgcagatatttgcaccccaaaccccagttcaagattccccagaccccaagggattggggctcctgtggggtcaggttaatggactaactgtccaaggctgaggaccagatcagccaggaggaagagctcttgctggttgaacccagaactcccctggggactgtccggacatgaaccaagagctggggttcctgggcccagacctgaggtgtctgattgcatttatggaacacagatgagaggcttggagttctggccgggcacggtggctcacgcctgtaatctcagcaatttgggaggccgacgcaagagtttcacttgagcccaggagttcgagaccagcctgggcaacatggcgaaaccctgtctctacaaaaaaatacaaaaattagccaagcatggtagtatgcacatgcagtctccagctacttgggaggctgaggtgggggaatcacttgaacccacaaggcagaggctgcagtgagccaagatcgtgccactgcactccagcctgggcaacagagggagaacctctctcaacaaaaaacaaaacgaaaacaaacgaggcttcaagttctaaaaactaagttcagcaaagctctggaaaaggtggagcaccctgagtgggtcactcagcccctccaaccctcgacttcttcacttgacacctggacatgactgcacccacctctcagggtttccccagggtctcaagagaccatgggggtgaaagtgtattgctcaacgtaatcctaggtgcagaggaggagaaaaggcgcgtgggcggcccaaagttcccaaagcctgccttctgcctcctgtctgaaggagcagccctgagcctctaagctcagactcatagacaggtcccaggagactgtgctccaagagaccccttggggcacagagctggagcaggcaggacctccgaaggctcacttcctgctgcctagaatgtgtgtcccccactcctttcctgccagctccttttcttccttcgagtttcagctcccatgtgtcctcttggtcttcagaaagtcttccccatgcccagctattttttaattttttttattttttgtagagatggggtctccctatgttgcccaggctgaccttgaactgttgagctcaagcgatcctcccctcccgcctcagccttccaaaatgctgagatttcaggtgggagcacctaaccatttcttttgtctgtcccccttccctagaacataagctctaggatggcagggattagacttgtctcatgctttgcacgttccccaaaggctaacactgggcctgacacagaaaaggctcagtatgcgctgaatgaatgtgtgaacgaatgactgaattaacggagatcttgtctggtgaggagtcaaacatataatcaatcacaataggatgtgttaaatgctgaggtccagctaagcccaaactgctatgggagcttagaagggcaggtaagttccctcatcctatgccctagccaccccactaaggacccaggaggaaagaggcacaggatagaggcgagttactcaccacacatctcagtgagggcccccaggacccccagaaggaagaggaaggccccaaggtgcctcatggcagcagcaggtgggtgagcagtgagcaagaatcgggaaagactcctggggctggccctgctgaggctctcctgaccacagctggtcaccgctccgagagacgcagcttcctgtcactgattaatcctccatgcctgcaatgcacggctaagtctgcagaggggtggggcgggggaaggtctgtggtggcggggaacataaggccaaagaacagaggaaggaagggcagagcagccctcctggaggtagggaacaaagggaggaggagggctagtgggaccatgtgagacatcttgaggccattcacgttcctgcttaaagagcccgggaccagcgcagagggcctgatgcctgatctgtcaagtctgtccgaccgtgcctgtctgctgtccccccagctgttccagtggtggattggcaggaccgggtgcctacccggtactccttaccaaaggagcccctggtagtgcccacctagcccaggacaaggagtggaacgggagctgcagctgcagtggtcacgtgagcagcattgctggagtcagctgtttttcagcaccgcctccctcagttgtggcgggaggggattgtgggggtgggggagttgggcagttggggagggggagttgggcagttcggtggggggggggagttgggcaattgaggggagggtgggtgccgctggccccagaccagccaggccacttttctcaaccaatccgaaagggctgggagcctcctggagaggacaaaacaaaacaagttaaagaatgggattaagtccgggcacggtggctcacacctgtaatcctagcactttgaaaggctgaggcgggcagatcacttgagctcaggagttggagaccagcctgggcaacatggggaaacactgtctctacaaaaacacaaaaaacacatacaaaaaaccataaattagcctggcgtggtggcagacgtctgtaatcccagctacttggggggctgaggcaggaggatcgcttgaacccaagaggtggaggctacagtgagccaagattacaccactgcactccagcttgggtgacaaagtgagaccctgtctcaaaaataaaataaaataaaaagaatgagattgaatcgagacacaaagctaccagaagcaggggtacttgccagaactcggaaagtaacctcaaaaaaaatctctgcaaacagggaagagaacaaaagattcctcatctgcccagccccacaggagaatcaatgtatacgagttaactagtggtggctgtgtgactttggccaggtcacttaacctctcgagtttaaaatagttcttcctgtgtgagaagagagggttaggcaagatcatcctaacagttccctttcagctcaatttgtgaagacactatgaccttaaaatatctccaatcatttccatgcacaatctgcattgcaattattttatggtaaattgccaaggttcactcttttaagacaatctttttgagcctgatttatcacaaaccaagcccttgacataaataaatacagcaacgtgtgtctgtttacggaactacttgaaaattttaaatgataggttgtccagtcagaaaggctggatgtggccactaggaggagcacccctggaggttctgaggaaggagggaggccagtggggagcccaacttccgcagaaccgcacgtttggaccttcaggggagtcatggtgaagtgtgtgcaatggagccaccttggtcctgggtgggactgccttggctcccccaaccctctgcctgtttccagtaacaactattatgattcctatttccaggaaggcagcctggaggaggtggccatggaggatagccttcgttatcgtcagcctctggtgagaagcagcagcatccttccagagagtcacttctgatccccaaggtagttagggtgtcgaagtaaaggagggagacacccccctgcctacctacctggactcagtgctagagggtgggggagtaggaataggaagacagcatatttcccatacatattagaaatactggtggctcatgcctgtaatcccagcactttgggaagccaaggcaggaggattgcttgagcccacaagtttgagaccagtctaggcaagatggtgagaccctgattctaaaaaacaaacaaaaccaaaaaatgccagggatggtggtgtgtgcctgtaagtctcagctaatctagaggctacaagtgggaggatcacttgagcccagga

SEQ ID NO: 1563046 - DNA, 4001 bp, Homo sapiens
gcaaagctctgcctgaaaccttgggcggtcccctatgtgccaggccctgactttgctcatccacagtgagggagggggacttttcggctattgcagggccccacagaccagctgggagccagagaccggcagctgctgccacacttcaaaggccttgttatcctcatctgaggagcagtgccccgagtcgcccctgagaatcctccctgccccactggcagcctcgcccttcatgtgtgtgctggggggcatcctgggacaccttgggggagccaggagggactgtaccacccttcctgggttcctggaccaaggaggggaccctctaccttagcttttggaaatgtgttcagctctgcccacccacacaggccactcagagatgccaaaaaagtcagctgtggcttgtttgtgggtgtggactccaaatgggggcagatccctccggctgagttgcagagggcttcgctgaggaggtgggcttctcatggtgagcaactggtgtccccagtgctaggaggccacaggagcgccttctgtgacactcttctcagagggtggcctggactgtcccaccatttgacagcatggagtgtggtcggaggggcctgagcccagagctgcgtgcgagagctccggagcccctgccctaagctcccagtacgtccttccccgttcgggcaatgtctccctggggctagaacctgctgaccctcctttcctggcttagcccaagcaaacccacacccagttccagaggggtgaagggaggccgggggctgtgggatctgtctcctggctctggtttgggagtgggctgagagcgtcctgtggaaggaaggagtcctgcggggacaaccagggccacctggtgatgctaggtagcaggtgctggcacagcaggatgagagggaggcctgagaaaggtcccctgagaggacaccccaggtgctcaagtcagactcaggcagcaaaagccagctgggcccctctaaaggcaaggaggagttggagccctggggacctgggggtgacctctgacttctgggaacagaagagatttggagagagatttatcagtattctccgccaaactaatctggccatggggttcccaggcaggacttgggagacacctggtgctggccaccaggtctgcccctcagtccacgccctcctctctcctccctcgcgcgttttgcctgtggtatcctaggaacgcagggcttcgagccttgtggtcctgttacataacagtttccatcccatccatgagttcagccctccggcaagcgggagctgcagcaggcgcaccaaggaaagcctctgcttcagacccaggctcctgctgcccaaatccacagtccctgccgctcctctgccacccccagcgtacagggggagggagcttcaaaagcagtcagcatccagccagattctttcaataggaccccctgtcctgtcctggtcccacatgagcacagcacctgtcagtggccacacactggccatggcttccccaaatccagcaggcctaggagagagtcccagagccggtgtgacacatgcctcctcgaacccctctccgcactctgcaccctgagaccaagggcgcaccactgctgagaccctccctggcttggagatgcctgtcctgccactgtgcctgtggctgccccctcgccccctcgagtacctgggcagccaatcaatgcaggtcacctgtgctcctacctgttctcttctctggccaaggcagagagtgctccagcagggacttgaggacctcaggcatgtccatggcaggggccactgagaaccagtcgcagctcacacagcccagcaggaggtgcttgctccagggagttcagaggcagctggagaggcaggggccgccagccgcaggctagggaggcaggcggggtgggagccttgaggcagccaatggccagcaccagtcccagcccgcccgtccacccccggctcggccacctgccagctccggctgcagccaggccttcccttcccgctgcttggcagggcgggcctggccctgcgccagctgcagcacgtggagctgtcgcgccaatcctctgacagagagcccagcctgttatctaactttggaaagggaagttctcccccaggctgggagccataactggggctgccaggtgagaatggtaagctccacgcccacagcaagcacgcatcagcatggaggtgccctggaggcccaggcacgcagtggaaaccatcccgggctgggacctgaggctccaagagaaaaggaggatgacaggcaaggacagcacctcaggcagccgagcacaagacaccctgtgttggcagatgcagggatgcggtcggacatcatgccttcacctgtgcgcttctgagcctcaagggcttgtggcatgttttgatgctgtgtttatgccatgcacacgtaccctacaaggcacgccagtgtacatatggcatgcataattggagctttataccatctgcacagcctgaagcctgttccccaaaaggaagtgataaaacctaccgcctcaggttctttggtcttcaggggagaggggaaaaggggcaggtgccaggagaccaggcaccactgaaaggggggcagctctgccagcctgcttcaggcttgtcctggatgaggaatccctgcttcccagtcattgtggggacttaaagtgccaattggctatttgctgtagttccctctcataccctcccaccaggacgctggcccctgtggtccttgggttacttgaatgggtgaagcaaaggttctggatgtcaacctctacgtcagaccaacatcacgtcaaagccagacttgccgggggatgccaggttctcgattctgccgtacattgctgtgggatcttgagcaagcgtggcagcaactctgggtctcagttcccgaaccaccgaatgcagtgacctctaaggtgccgttcagctctagttctatggctctgaagctccagatgggctgcaataaacatttggttttctgcgtggtagctgatttttttttttttttttgaaacagggtctttgttgctcaggctgaagtgcagtggtgggatcacggctcactgcctcatccttacaagtagctgggaccataggtgcatgccgccacactggactttttttttataaagacactgttgcccaagctggtctcaagtcctgtgttcaagccatcccccggtcttggcctccccaaagtcttgggattatgggtgtgaacactgcccctggcctgtagctggtttctaagcagtgctttgttgttttccaaaattccattttgtacagaatcaaaaatactccaagagccccttctggcttcttcctttcccaatgacctcagcttatactcttaattaccctccttccctccctaatgaccctccccaaattatgctctttcccaaattaattaaaaattaattttaacttttgaatacaaaaaacaatacgtggctcacagctcaaaacctccgataaggtttgtttatttatttgtttatttagagacatagtttcattctgttgcccgggctgcagtacagtagcaggatctcagctcactgcaacctctgcctaccaggctcctgcctcagcctcctaagtagctggaattacaggcacacaccattacgcccagctgatttttgtattattagtagaggcagggtttcgcatcattggccaggctggtctcaaactcctgacctcaggtgatccgccctcctcaccctcccaaagtgctgggattacaggtgtgaggcactgtgcccagcctcaaggaagtatactttagaaatgtcctttctatccctgtccctctttcccattccccaatgtttctttttgcaaaagtaaacatatatatgtatatatttatgacacacacacacacacacaaacatttaattttgcagagttgtatgttttgaccagcagagagtgtt

SEQ ID NO: 1563047 - DNA, 4001 bp, Homo sapiens
ggccagatggccttcctgctctcctcccttgagatctggactcctcactctgttcagaaatgactgtgacccatgtcgggtggggtcatttgggatcaaaggaggcaggagaaggcaggagatagaaaagcagccatagtgaaagacaggcaacaataagttccaggttttgcctggcctaagcaataaaggatactttaaatcagtgtttttgtaaggtggaattttaaattgtaagagataaaggactagtccatcactcaggtcatgcaacagtggctgccagcatgatacagtagaaagagcaccaaactgagggtcaaaagttatagctgtgtgaccttgaggaagcaccctcacctccctgagcctcaattttcctcatctgggaagaggggagaataccctctaggactgttaatgaaataagatgatgtcagcgtgctttgcgagcactctacgaatatcgggtagaattcttgttatggatggttattacctggtaatttcaaacaagaaactgtcagatgtgtacacctgtccctgcagcttgtctcagccccagatttggaacaaagcaccgtctcaaaaacaaacaaaagggtttgtgcacatgaggtcccaaagcaggaggagagaggctggcctcacctgatgtgctgaagctatttataactcaacagtgacagccacagggatgggagcctcagcatacacccaggaaaggaagagaaatggcattttaaaaaggaaaatccattccccaggccagacaactctcgaaggcctatccctttcccaaaccctgaataactgatggctcttggaaatgcaaaggtctcacactcaaagtatacctcagtgcacccacaaccccaccacaggcggccctcctgctgctccctgcaccccatctcccagggcgaaaaacaaggccagacctgctttccgtatacgccccagtgacgttcctggcctaggcaaaaagatgaagctcagtcctgccgccgtggccccagaatctaagggtcagccccaaccaaccaggcgaagggcctcagtggactcatctgaccctcatcgtttctctgcttggcccaaaactcccctcccaaggcgcctcacactactcgcccacaccccccccacccgctcagcagaagccccgcaacagaaaggctcccgttggacctagtagctggcgctactcacacccagggaggaagccaggtccctccgggaggggtaaggccacgtacgatgacagttcgctaccctaggcctgcgcttcctaaactttggtgtacttggaaaataatgggggtgcggtggggtgctccttaaaatgcaagacccctgtcccagtgaccgcagattgggtggggcgcaggaaccagcaatttaaacaggcatcccgagtgactccgatgcaggtggccccgggggaggggccctggagcgtcatttaagtgactgctcccgatccccttccgcctcctcaaaacctctccccaccctctcccgccagacccaccgtctcagcccgcccctgaccctctgtcctcagccccccggcctcgtcctccaggctcctggtcatccaggccccatccccctccgctggaccactgctccctgacccactgcctccccggccccgccctcacgaggccccgcccctgtataagccccgcccccagcccgcgcggaccacccccccgccctcaccgaggcgcgcctcgcgcggggggttctccatcagcttcttcaggaccagggggaaggaccccgacaggcccctttccccagctgcgcgccccggccccggaccgggtcctgcctgcgggtccacaggcggcttctttccgccgcccgcgtcggacatcgtgccccggactcggctcgcgcacctcgcctcccccgcccgccccccgagatgggccggagccgtgcgacccgctgcagctgccgacacgggcagctactgcgcaggcgcccaatggcgcccccgcctccttccatcgctaccccgcctgcggaccggctctggcacattaattattcatgaggccaggccagcttccccggatcgttgctctggattggtccagcctgcgagaggggcaggcgcagatcctcgggccgtgattggtcgggcagccgggataagatagacacgtgcggggccaggtgaggaccctcgcggaggccccgccccgccgcccctgtgtcccctgattggcgcctgctggagtctttgtggtgggccttcctcggcgcggtcccttccctcctaccagtgttcccccttcaccgccctcttcataacccccgccctccccaaccaccgcagcctctccctcttgtccccgacttgcaaccttcccgacgcgccaccgaagaggggcggagctcggagcggccaggccggccaaagcgacctatccgagctcctgctcgcgcggcgtgtccaccccccgcgggtcacgtggagccgcagccgagtctggtcgcggggggagggggcagaggaggaaggcgcgggaacagccaatggagggcgggggcggggcccggggcggtgcacgaggcgccgcacgtgcggggctgtggcggggcgggaggggaagggagggacgggtctttttgttctggggactctgcccagggtcgcggggcagggacgctgagcttagcccgcacttctgctcccacgcgacccagaggtcgcctgagggcagggccggggaccgcgacctgccaagtcgtagggatggcctgagcaggcttggccgccctagagcggggtgtcgggttgcccacgcatccagatcaacactagcgtggagggagcattcctgaagctctgacctgagccagggcccgagtacatgtttccgccctcccacttactagcttatgaccttgggaaagtccggttgcttcactggagcttgtttcctcggccataaaattaagaggttgggctagagaatctccacagtcccaaacagatgtgaaattcttttcctttctagaactctcccttcttttacctagaaaacaaaaacctccttgacaccaggtaccgatgccacgttttgtgggagaaccacctcctctcttaaaatataaagcctccccgggagttccgcagaaatccgtaaaaatgtaatatgtggcgcggtacacaaatggaaagctgctcctaaacagcgctcagaactttgtacctctttatagtacagatcagactccgctgcaaacccaggcaacattagactccccgcttaactcccggaaggcagagagcttggcttgtttatccagcatccctacagtggcccagcccttctagcaggaggggttgggggggtggtatagtgatagtccttggttcagggggtagatgcatgatccagacacccacagccagctaaaagttatcaagctgatgcaatcagaattttgctggggctgggcttggtgactcacgcctgtaatcccggcactttgggaggcagaggtggcggatcacctgaggtcaggagttcgagaccagcctggccaacagggcgaaactccgacactactgtaagtacagaaataattagacgggcatggtggctggcgcctgtaatcccaggtactggggaagctgaggcacgagaatcggtttgaacctgggaggtggaggtttcagggagccgagatcgcgccactgcagtcaagcctgggcgacagagggagactccatgtcaaaaaaataaataaataaaaataattttgcggcggggtaaggaggaaaaagaagttgggtagctgaccaggcctggaaagcaagagatttgaaggactttgggtggtggtagagacaggatgataggtctgattccaaaattcaagctctcactgccactgtaattgaacctcagtcattttctgaatctgatgcctcgattgctttaccttttcaggcctccttttctttttattttctt

SEQ ID NO: 1563048 - DNA, 4001 bp, Homo sapiens
agatgccagtacttaatggttctgaagtctcatcctttccagatcccaaaagatgctaaaattaagaaatagcttcagaaggctgtctggaaagtgtgcccaggagtgtgactgtgcgacctgttgttaaaacttcagaaagatcaaaggatgagggtattactctgtcaaacaaagggtgctttaaagagattaaagagatgcctgatatatcctcttaacagaaccataggacctctaggaagcttaaggctcctcaacaggagcctcagttaaaaaggggtgtgacttttgttcaatggagtgaacccctgtaagttttactgttgagaaaataacatcagcaaaatgttggcaacttcgggtaaaagggatagagacagtacaaaatgaaaagataccattgaacaaaaaataaaaataaaaaagacaagtcagagagtggatgcaagagtccagaaggcagagctgagagccatggagaattatccccaggccttgaaacctaatcaaggaatgtccaacatttgtgtggctggatttcaaaaccgctatggaacattgactccatgtctccattttcctcaattttgaataggaatgtcactagttcttatcctatgcctatcacatcactgtatgttaggtgtgttcagggcaaattacttagtttcacagatctatgatggggaagaattgaatctgagaagctgtacttaaggaacgacactggaggagcctcagccacacctggagctgatttatatgaccagattctagcttttaaactgatgctttaataggatgagaattttaaagatcttaggaggggatgactatattttgcatgtggaagggatgtacattattgggggccagagggcagagagtggcaggcagttgacatggctcccaatgatccctgtttcttggtataattctctcccctttggtgtggactggacatagtgatgaatggaatgtggcaaaaatgagggatgttgcatccatgatgaacttataagagactacaacttctgtctttttcacacactctctgcagctctcctcagctcatcttctctgacagaagccagtttccctgttgtgagatgccctatggagaggtccacagggcaaggaactcagagtggcctcttgccaacagctccagagtagctggatcctgccatgtgaatgggttccttctctggtcgagctttgagatgagactagagacccaagcaacaccttgattgcagcctgtgagagaccctgggacagaaaaatcaccaacactccaccggtattcccaactcacagaaactgtgagatagtaaatgttgtcttaagcccactaagttttggggtgatttgttgtgcagcaagagataactaacacaagtccatgtcaagcattctcacatctggtaaattagtctggtcttcacaaatacccagtaaggtgttcggagacactactaatttatcttctttcacagatggagaaaatgaggctccgaaaagacacaggacttcaccaggtggggctaaaattaaattgcacatcttcaagctaggtgaagttcaagttagctccaagttttctttctcctcctatccccagccaccaacctgacgtgcccacggcagctctgtacgtcccagtgcactgccagtccacagcagtctggacgggctacaatggaagtgtggactcacttccagtttctgacccagagagagagatcccaagagactttggtcaaagagggcgggaaggtaagtccagtctaggcagtcttcactcacaagcaactctgaatggggagaaggaagatgaaaccccatgtcctggaagaaccctggcccttcataagtctctgcctcacctctccaatctctttcataacagcaggaaacacgtgaaccacactgatgtgtgctgaagcccagaagtgcagatccccactgcagaactactggtgaagaccaatggatggttgctgggaagtggccctccccaagatgttcattggagttgccatggtgatcactatacacagggctctgttacctcagagggctgataggcccacccgtagggaaaagaggccaggagaaagccaggattgaggccaggaaaaggcaggaggggcttcaattattgttcactctctcatccactctagaatgtcagttgagcccccactacatgccaggtgtgccaggcacagggggctcagatgctaccaagtgcaaaagatgttcttgggagctcaaagcactaagtagggagaagaactagctctgtgtaggaaaaaggaggaaggacttatgaaagagccatttgagttggatcttgaaggatgcctaggaacttaacagttttgaagggatgagaatattaaaggcatggatgtgtataacagcataaatgtaggtcgaggtcaatggggaaggagaaagatgcatctggagctgtctgatttggacacccagggatcagggacctgggagtaaaactaaaggaagggtcctctctcctattcctaaacaacaagggctacagaaggagatcaacaaaattaagtgacttcttttctgcagagaagaaggaggcagaagtcattggtgccagcactggcccattcctgtctggctgttgctcagcctggacaaagagtgggtatagtgaacgcctcctgcaagcccagcctttcaggatttccccaggaaacagagagtgctgtggttaaacttggagtccccagaatctgggcctgtcacttattagataagagactggccaagtcctttagctgaacttccttcacatgtgaaacagatatcacccaacactaaggataagggtgatgggcgaataaaacaattttttgcaaaatgtagcacattgccttgcacagagagagacatcacaaaactctaagctacttccgcaagcaacccatcagcaagtccttcgaagtacactagatttggatgccttcgtccacctccacaactccccctactccctggtccaagccaccctcatctcttgcctaagtattatctattgctgcacgacaatcttgccataaacttcgaagcttaacatacaactgttatctcacagtttctttgggtcgggtgtctactcatggcttagctgagttctctgcattggggtcttagcaggctacaatccaagtattggccagggctgcagtctcatctgaggttccactagggaagaatatgcttccaagctcatgtggctgtgggaggattcagttccttgcagtctgttagactgagggtctcaggctctctctggctgtcagccagaggccatcctcagttccttgctatgtgggccccccaacaccaacatgacactgacttcatcaaagccagcaaagagggagtccccttgcaagatggggcattacaatgttgtgtaccatagtcacagaagtggcatccatcacctttgccgtaggctgttggttaaaagcaagtcacgggtcccacccgcagtgaaagggagagggtcacacggggcatgaacacgagggggcagataatatggggaccaccctggagtccaccatatcctctgacagtcttctcactcaacagcccagcaatcctgttaagacctatattagatcatatgtcacccctctaaacaaaaccttccagctcaaccacagtaaaagctgacatcctcccatttatctgcaaggccctacccaacctgtccaccatttttctctgacctctgctcctctcactttcccaagtgctccctgggtccctgccatgccaggctctgctgttttttgggcacaccaagcacagtccctcctcggggcctttgcacgggctgttccctctcctctcctgcaacttccttcccccacatgcctacatggcttgcctcttcacctccttcaagactctgctcaccttcccagaccaccttttcttaaaaa

SEQ ID NO: 1563049 - DNA, 4001 bp, Homo sapiens
gtgaacaaaatactactcctaacagtctatgattctttaaaagtacatatctccttgtcctagtcaatatcataaatatcacacatattcacacatacacaaaccacacaaaaataactaagtaggttattttgtacattattaccttagaaaatgagtaggtatcttcttagatcccagattcttttttctattactgaggaaagaattatatctggatccttggtggtcctaggagagtgattttttttagaatatgctttttgaaatacattacttgatgaaacaaaattttcagttttcctcacaaaacatgaatttcttctgatgaactgaaagactgtagtaattatgaacactattttaatagtcagatgtccagagattgatatagagaatctacctcacagtagctgggtgaccagattcagttgtctttcttaaattgggattaactaccataccaaccttagagaaggcttacaaagcaaattcaatgagttcaaaataagtgctcaagaaacgatagcttctactttagtcccatgattaggttaatcattgtattagtcagggttctctagagcgacataactaatggaatagacatacatatataaaggggagcttattaactattaactcacacgatcaaaaggtcccacaataggctgtctgcaggctgaggagcaaggagagccagtcaagttccaaagctgaagaacttgaagtccaatgttcgagggcaggaagcatccagcacaggagaaagatataggctgggaggctaggccagtctctcttttcacatttttctgcctgcttatattcttgccgtgctggcagctgattagattatgcccacacagattgaattgagggtgggtctgcctttccccacccacagactcaaatgttaatctcctttggcaacacccacatagtcacacccaggatcaatacttcgtatccttcaatccaatcaagttgacactcagtatttaccatcacaatcatcattattattatgggactagggagtaaacttagcaaagtgactgtaaaatcaggcaggctaaaatcgaagcctgagttcaaattcaactctatcagatacccagtgtatgagaattaaatatgcacgtgaagcgccaagcatggtgcactacacaataatacactccataggtgacagcaattgtgattcttgtcttgctgaaagcggccttaaggcacacggagttcactacttccacaggcagtgtcaaactctggtcacctctggcaaaacgttatctctgccttcttctactcactggtgcaccggttgggtgcaacgggtcccaacctcttccaggagtgtttaggacagaaggattttcagaaaagacggggaatctcaaatacataaagttaaataataccactgcctgcgtgggcatagtaaatggtaataagccccgagtagtcacaagttatgaagcctttatcagtagatgctaggtacatgctggtcgcttgagaccgattatcaactgtctgcatcaagacacttctgcaaggtaggtaccgttagttttcatgcttcagataagaaaaaggaggttcagagaagttagtaacttaccctaggttccactgctcatagggctcaaactcaggagtgctagaagtcaggcctcgggcttgtctctctcttgctgtctaggtttggtgaaggaagctcaggttcttaaatgaatccaagccctaaatcccagttgaccccaagcagcaccgcccctctccgtgcctcggcagagctgtctacgaaatggattcccctccccacaccccaacggcttggaccgaagctcgccttccctgagccttcgtccctactctcactggcgctgagtccccttgtggccagccgtgctcacctgtccgagggtccagcgtaccaaattcagcttcaccatccgcgcgagaagacgccgctcctacaccagaacccggaagcaccgtggccggcgcgccggaaatgacgttagtcgacagcggatgtcctgctggctgccagggcagcgtgggacgctacggcggatatggctgcagagcggccggctgggatcttagataggaggggtggatttgcaaggcctagaatagctggggagtggtttccccgcggaatcggcctccctgccgctcctgctttgtactgtgacgctcagcctgtgatgactggtgtggaatccgctgagccaccttggcctaaggagactttaccactctgagattgtaaatctgtaaaatagagatgtaggattagcccatacggtagttgtggtaaatactgtgagacaataaggggcctgggacacagcattcaaatgggaataatgaaggtcaagactgtgattcctgtatctttgacgctctcggtataagcaccgtcgtgggcacagggcagtggcctttatgcaggagtttaagagggaatgaaggaatgaatgggcaaactctggagttcccaagtattctctccaggagctgtttccattcttttcgtttccagcaggttggtaaattcattaatttattcattgatctaattaaaatatactaagtgcccctcacctgtgctaggccaatgtgatacaatgagcagaacagtcatgggccctccctgggaagccctcactagcccaaggactccttgtagacatttaagtgtccacaggctctggagttccaaccttgagtgcaatttagcagctgtggaccttgggcaagtcattacatctaagcctgttttctcttctgcaaaatggttaaggattcaataagataaaactgtaggcaatgaaaaccgtacctggtaacagtaggtgctgaagaagtgttagctattaatttttgcttaatttttctctctctgctctatgtgatgaaaagattcaagaggcaattgttggaatgtaaaaagagcacgggacttggagtcaaatacttaagtctaccatcaagtagttgttaagaattaaacaacaatttttgtgtacccagttaaatgtgggctgcttaggaatgatgactgtgtcttaatgatctctgtattcttagtgacatgtagaatcattgtgcctgacacatagtatgtactcaggaaagaaatggaaaatgtggttttagcattgaaggccgggagagagggtctaacagactacaagccctgccaggagcagagtaagggaaacagaggagaaaagtgtttttagtctgtgcctgaatgtatttacatctgtttgtagcccaaaagccaaaagcatacatacgcttggcttttctgtagctatgtttatggctttacagcagattttatggagctgcaattactttgatcatgagggactgatgctagtggatttacttcaccaaatggaactcactttgtggcttctgaagaagggacctttgtggactgtcatggagtagttaagagtgcaggctctgatttagtgatcagagtctgcattgtcaggaatgggacaaagtgaagttatgtggcacttgataggatgccctgagaagattgcaacatcacccctgtgatattcctgctgaagatccataacctggatgtaatcatgaggatatatcagacaaacccacgtaaagagacatgctgtatacaaaactgtaatcttagaaagtgccaaggtcatgaaaatcaaagatagaccctggaactgttccaaactggaggggaccaaagaggcatgacaactaaacacaacacatgattctgaactggatctttttgcttgaaaggaagttacagggacagttggaaaagtttaaatggggcctacaatgccgtggtaatgatgtgtccgtgttaatttcctgattttcatggttgcctgttaagttacatcagaggatgttcttgtttgctggaaagtaaatcaatgtatttggcaggggataaggcatcaaatggtcaccttaatttc

SEQ ID NO: 1563050 - DNA, 4001 bp, Homo sapiens
agctgtgttcattctggatgtaggctccggcgggtgggggcaggcgcagcatatacgctgagggggagactggccgtggttcgagaggggagggctgccgctctggtgaaggctgggcgctgcagcctgcttcatctgcctgggcacccaaggggcccagtaggtctgaaaaggggctgctaaggccaggctccagcctcccagctggggaggccggcaaagtggcaggtgctgaggcctcttccacaggaaagcaggtgacatcagcaggtggaggtggagaaaatggagttgtgggccctcggccctcggagcagctggtaagggggaagagagagactgatgggctaggctgagggcttgccagacccccctccaccagcccacctgatccacccttaacacccaaacccgatccacaggttctgtgtagcaagaaccctgtccagcgagactgctggcagacacccctagggcccagtccctcagcctaggggtgggagtggggcatcccccacccatatcacataccgcttcctgcatcgtctgagccggctgacttcagcggggccaggtgggtaactgtgtcctttggtcttggttgtccggcgcaacttggagaaagactcaaatatggtggggactgccccctcctttagcctgtgatatccactgcggggaaaagcaacccagatgagctggagagcaagtgctgcctccccaggccaatctgcccccagcagcagcgccgtgggatgctggaaggcatcgtgcaaacaatacgtctggggaacgccaagttacagctacaccaatcgcttccccgcaggactcctcacagtccaggtgtgtggaaagcctgcataagccgagctgggctgaccagccagaaagaattctttgatttgtggacttgctggcaagactggggctctgaaagatactctctggaaaggctcctgttttccccttgtgtcacaggcacagtgatcctgggggtgggtttcactgtgcagagctgggaacaggaaacagcccccttggacgcaggctgctcaagggacttccatgacctgcagctgtcccagtccgccgggagccccacatcctaccccagcgtcggccggcagggaggcccacctgattcccaccagctcaaagcagtcctcctcaaagtgtttggagcagaagtagatgtactcggatgccgggtcccacaggccctggccgctggggtccagccgctggcagttggccagccacaagcctcgcctcgggttgtccttcttgggaagtctgtggagccacaaacccgtgagcaccaggctgtccacagccctgggctcatgctgcccaagcaccccagaggggaaacgcagacccaacacgcgccgccacgagacctccctgcgaccccgccgggtaagcaccaccgcccgggcacagacgaggcaacggaggcctcgagaagaaaagcagtttcctcagcgtcatctggcaggtaacagagtggggcgggtccaagccggctagacttcccgtcctccccttcccgactgcattcagtcccgccgggaccgttccgcttcacctcccacccacaggttcaagcctcctcagtatctgagaaaggcgcgaagcctctacgcagttgcgacccgaggcgagcaacaactagcgcatgcgcacgtgagcccgcggcgcacgcgcgctgacctgtggaaggagatgccgcggttgcgcgtctcgcgcgtgtcccgtgtgcagcagccggcggcggagcagtgacgcggcatctgggaaagaggcgggagttaagtcgcaagcggctctccgggcatccggaggagcctcgcgcctccagccgccgctcctccccaaggggctctggcctgtcgggtcccccccggcccgttgtcgccccaaccccgtcccagccgattctcttgacttctgtcagcggcactcacgctctggccattgctgcgccgccgaagtctcgcgaggggtagcgcgcgccggaagttggtaccatagagactggagagccggaggtgcccccgccaccggggcggggcggggcgaggtcctagctagctgggttagtaagcggcgcgagcgtgcgagtttctgacgcgcccgcgtcgtcccagctccctggactaccagtattgtcgcccacgtgggcttctctttcgtccgctcaggcctcacttttctccgtaaacaccccggcacgatggagcggccccagcgttcgggagcggcccgggagcggaaagcggcagtgtcctgggagcctcgaaagccgcaggggcggcagctcgcctcggaatgacctctgacggaagaaataaaacggggcctgggacgcttgcacgaaagaacccgacaaaaaccagagcccgcactcactctcgtactggggaggtggacttcagggagggttatctggaggaggaatctctcaaagtacaacacaggagaaagacagtatcgcaatacagaaattttattttttattttattattattttcctgagaccggagtctcgctctgtcgcccaggctggagtgcagtggcgcgatctcggctcactgcaaactccgcctcccgggttcacgccattcggctgcctcaccctccacagtagctgggactacaagcgcccgccaccacgcccggctaatttgcaatacggaaattttaataggtaattagctctcctagcgttatggtggggaatacagagggatggttgcctgccgcaccctcccctcactattcttcgccttcttcagcctcagcttccacggaatccatgcccacatcttcataatcctccagagctgccagatcctcgcgggcctcggagaattcccccactgccatgccctcccccacgtaccagtgcactaaggcgcacttggccgaacttatggtccaggcaggcccaggcctccgtgatggccgtggtgttgctcagcatgcacaccgcccgctgcactttggccaggtctcccacagggaccaccgtggggggctggtagttaatgcccacctgtcagagatgggcagcatagaatgaagtttatattggcctcagaaatgggagctcattaaaaatcagagctgtggaccagttccaacactgtgttttaagaattgcttctatattttttggcattatctgttatctatcgacaattaatatcctttgacgacttttttttttcttttcttctccttcttcctccttctcctccttctttgttgttgttgttgagacagggtctagctctgttgcccaggctggagtgcagtggtgcaatctcggctcactgcaacctttgtctcccaggttcaagcaattctcctacctcagcgtcctgagtagctgggattatgggcatgtaagatggagcccggaagacggagatttcagtgagctgagatttcgccactgcactccagcctgggctacagagcgagactctgtctcagaaaaaaaaaaaaattattacccatattacccatacagtaaaacacatgaaaaagaatgagaaccctgtcttgggatataaatacatccaaggtatattgtatactttgtaaaaagaaaagtgagttgaagtctatgtatttatgtgtaaaaaaatccatgtaataacatacacaggctagaaccttgggcagctagggtagcatcatgccggaggaggacaaacgcctgctgaggtggtgaccctgccttgccctgccaagcacgtagcagttagcaccaactagatacagacacactccacaggagttggaaggggcagagagaagggttcgtaccctgatcagggagtgtcctcccacaactctaaggccaagcctatcagcccttccaagtgggagtgctgccagctttctgtttactgtgaccacctgtgtgcagcaattgggtctgtcacctacaggaaagggacatacatatctgctggccactgtcaac

SEQ ID NO: 1563051 - DNA, 4001 bp, Homo sapiens
aaaaaaaatttggactggattaaaaatttttagtaaacccctccccctcccccctccccctctctccacggtctccctctgatgccgagccgaagctggactgtactgcggccatctcggctcactggaacctctctgcctgattctcctgcctcagcctgccgagtgcctgcaattgcaggcgcgcgccgccacgcctgactggttttcgtattttttggtggagacggggtttcgctgtgttggccaggctggtctccagctcctgaccgcgagtgatcggccagcctcggcctcccgaggtgccaggattgcagacggagtctcgttcactcagtgctcaatggtgcccaggctggagtgcagtggcgtgatctcggctcgctacaacctccacctcccagccgcctgccttggcctcccaaagtgccaagattgcagcctctgcccggccgccaccccgtctgggaagtgaggagcgtctctgcccggctgcccatcatctgggatgtgaggagcccctctgcccggctgcccagtctgggaagtgaggagcacctcttcccggaccccatcccgtctaggaagtgaggagtgtctctgcccggccgcccatcatctcagatgtggggagcacctctgccccgccgccccgtctgggatgtgaggagcacctctgcccggctgcgaccccgtctgggaggtgaggagcgtctctgcccggctgccccgtctgagaggtgaggagcccctccacccagcagccgccccgtccgggaggtggggggcagcccccgcccggccagccgccccgtccgggggggaggtgggggccagccccagcccggccagccgccccgtcgggtcgggggtaggggggcgcctccgcctggccgccaccccgtccgggaggtggggggcgcctctgcccggccgccccttctgggaggtgaggagcccctctgcctggccgccaccccgtctgggaggtgtacccaacagctcattgagaacgggccatgatgacgatggcggttttgtctagtagagaggggggaaatgtggggaaaagatagagaaatcggattgttgctgtgtctgtgtggagagaggtggacaagggagactccattttgttctgtactgagagaaattcttctgccttgggatgctgttggtctatagccttacccccaaccccgtgctctctgaaacatgtgctgtgtccactcagggttaaatggattaagggcggggcaagatgtgctttgttaaacagaagcttgaaggcagcatgctccttaagagtcatcaccactccctaatctcaagtacccagggacacaaacactgcggaaggctgcagggtcctctgcctaggaaaaccagagacctttgttcacttgtttatctgctgaccttccctccactattgtcctatgaccctgccaaatcccctctgcgagaaacacccaagaattatcaataaatactaaaacaaacaaacaaacaaatttttaataaacggtagtagaggtggtaagttgatctggcaaagcctacaaagaccggacctgaaaggcttaagtgtgggaaatcctgactttggcaacacagtagagtgcctggcacaccgaagagcacgatatatgtgagctgttaccatcaccaccacccccacccccatcaggctacattaccacaatcaagaggctccaacgtgaagcctgaggatgctgcagcgaacacttttcggatgaggtaacagcgcagcgccgagaggccggggaccgcgggtagtgagggaggagaagccgggtcagaccccagcccaggggcgccctttgggcgatcagcacctcagtcccggagcgcccagccccgccccatctcccagccccactgcccttgtcccctcctcacctcacagctccaagaacctggcaccgggagtaagccactgccggaggcggagcaaagcttgcccgcgcaccatagagaaccggaagtaaggaaggggcggccgaccggaagcgaggcgtagaggccggaagctcagcgcggaggcccccgagggaggtggtggcgtggtgagactgtaaaaacaaagacacatgcttctcgttcactgtgcccagggcctaagagagtgtccagcagctagtgggcgctccaccgagtagttgaattaatgttgtgttatgtccaagataacacgaaagaacctggtagcgcggcggggaagatttcggcgctagaggatttgcctgcataaccttacttcttaattattatttttaccataatatgccacgccagtgaaggcaacaagtcagggagggcattaacctcattttacacttggctttttgaggagtgcatcaccagtttctccattttaggcctgacttgcccaggacagagtcacaactctaacgcagtatttgaaagcttcaggtatttcctacccctggcatgaactgtacaaacaaggcccaggattttttcgtgtaaatcctcatctggagctagtaacacgtgtcctgaatccctggttgtacggggccagttccttctccttcccaggagcaaggaggaaaatactggctcttttttatttttatttttatttgagacagagttttgctctctcacccaggctgaagtgcagtggcgcaatccccgctcactgcaaactccgactccagggtttaaaggattctcctgcctcagcctcctaagtagctgggattacaggcatgcaccaccatgcccagctaatttttgtatttttagtagagacagggtttcaccatgttgcccaggctggtcttgaactcctgacctcactcaagtgatctgcccacctcggacttccaaaatgctgggattacaggcgtgagccactgcacccaaccagtactgactgttgagaatagctcaagaacacagtaccctccaggagggtagatctgccatgtgggactaagcccaccagctctactgtgccctgcctcaggcacctgctaaagttccttgcagatgaagaaaagacactgatttatagtaaatatttaattgtttccatcagcaattccagcacaagttttcctggatggtaggcagaatcaagctacccaagggttcatgatgaggtatgggggtcactgaggagacccccagagtcactgacccctcccgccacctccacacaccaggtggccctgcagaatgagggttgggctgatagaatgtcaattaggggagacaggatacagggtgagggaacagggtctagcttgtatatttgcctgcaggaaggagggagggcaggagagactctgcatagaaggactggaactacacatttaagttttcaaccccaatatgcagggggaaacagccaagccactctccatctgtctagtattaggaacctctcttcaagtggtcttttgtcatctctgttcttcttcccaattctgtattccagattccaaattctacaattgaaacccaagttctgaattctaagttctaccttccgagttcctgttacgtgtctgtctcctgcccctaaatctttcctggctcccatccctttccccagcccctctgggcagaatgtctgaacctcctcctgaccgtggtgacgaggtttgtttgtatttgtttttttgttttggcagttccaggcttttctccagcaggagggacttggctcagactgtccagcaagtgggtggcccagtggaaaccagggaattcctgagggcctggcctggcctcctctcttcccaccccacctctagccactggacatactaccttttgtgcaactaagctaaacagaggatttccaagggtgataactggggactggtggccttgagatgaggaattttagaagataaatgaaggcctaaaagatcactatctttcattcagggaaatcagaaactacttctagcagggggagggaggcaggcagggaaagtaga

SEQ ID NO: 1563052 - DNA, 4001 bp, Homo sapiens
tgggaggatggcttgagcccagaagttccaggctgcagtgagctatgatcgcgccactgcactcagtcttgacaacagagatcccgttgcaaaaaaaaaatttggactggattaaaaatttttagtaaacccctccccctcccccctccccctctctccacggtctccctctgatgccgagccgaagctggactgtactgcggccatctcggctcactggaacctctctgcctgattctcctgcctcagcctgccgagtgcctgcaattgcaggcgcgcgccgccacgcctgactggttttcgtattttttggtggagacggggtttcgctgtgttggccaggctggtctccagctcctgaccgcgagtgatcggccagcctcggcctcccgaggtgccaggattgcagacggagtctcgttcactcagtgctcaatggtgcccaggctggagtgcagtggcgtgatctcggctcgctacaacctccacctcccagccgcctgccttggcctcccaaagtgccaagattgcagcctctgcccggccgccaccccgtctgggaagtgaggagcgtctctgcccggctgcccatcatctgggatgtgaggagcccctctgcccggctgcccagtctgggaagtgaggagcacctcttcccggaccccatcccgtctaggaagtgaggagtgtctctgcccggccgcccatcatctcagatgtggggagcacctctgccccgccgccccgtctgggatgtgaggagcacctctgcccggctgcgaccccgtctgggaggtgaggagcgtctctgcccggctgccccgtctgagaggtgaggagcccctccacccagcagccgccccgtccgggaggtggggggcagcccccgcccggccagccgccccgtccgggggggaggtgggggccagccccagcccggccagccgccccgtcgggtcgggggtaggggggcgcctccgcctggccgccaccccgtccgggaggtggggggcgcctctgcccggccgccccttctgggaggtgaggagcccctctgcctggccgccaccccgtctgggaggtgtacccaacagctcattgagaacgggccatgatgacgatggcggttttgtctagtagagaggggggaaatgtggggaaaagatagagaaatcggattgttgctgtgtctgtgtggagagaggtggacaagggagactccattttgttctgtactgagagaaattcttctgccttgggatgctgttggtctatagccttacccccaaccccgtgctctctgaaacatgtgctgtgtccactcagggttaaatggattaagggcggggcaagatgtgctttgttaaacagaagcttgaaggcagcatgctccttaagagtcatcaccactccctaatctcaagtacccagggacacaaacactgcggaaggctgcagggtcctctgcctaggaaaaccagagacctttgttcacttgtttatctgctgaccttccctccactattgtcctatgaccctgccaaatcccctctgcgagaaacacccaagaattatcaataaatactaaaacaaacaaacaaacaaatttttaataaacggtagtagaggtggtaagttgatctggcaaagcctacaaagaccggacctgaaaggcttaagtgtgggaaatcctgactttggcaacacagtagagtgcctggcacaccgaagagcacgatatatgtgagctgttaccatcaccaccacccccacccccatcaggctacattaccacaatcaagaggctccaacgtgaagcctgaggatgctgcagcgaacacttttcggatgaggtaacagcgcagcgccgagaggccggggaccgcgggtagtgagggaggagaagccgggtcagaccccagcccaggggcgccctttgggcgatcagcacctcagtcccggagcgcccagccccgccccatctcccagccccactgcccttgtcccctcctcacctcacagctccaagaacctggcaccgggagtaagccactgccggaggcggagcaaagcttgcccgcgcaccatagagaaccggaagtaaggaaggggcggccgaccggaagcgaggcgtagaggccggaagctcagcgcggaggcccccgagggaggtggtggcgtggtgagactgtaaaaacaaagacacatgcttctcgttcactgtgcccagggcctaagagagtgtccagcagctagtgggcgctccaccgagtagttgaattaatgttgtgttatgtccaagataacacgaaagaacctggtagcgcggcggggaagatttcggcgctagaggatttgcctgcataaccttacttcttaattattatttttaccataatatgccacgccagtgaaggcaacaagtcagggagggcattaacctcattttacacttggctttttgaggagtgcatcaccagtttctccattttaggcctgacttgcccaggacagagtcacaactctaacgcagtatttgaaagcttcaggtatttcctacccctggcatgaactgtacaaacaaggcccaggattttttcgtgtaaatcctcatctggagctagtaacacgtgtcctgaatccctggttgtacggggccagttccttctccttcccaggagcaaggaggaaaatactggctcttttttatttttatttttatttgagacagagttttgctctctcacccaggctgaagtgcagtggcgcaatccccgctcactgcaaactccgactccagggtttaaaggattctcctgcctcagcctcctaagtagctgggattacaggcatgcaccaccatgcccagctaatttttgtatttttagtagagacagggtttcaccatgttgcccaggctggtcttgaactcctgacctcactcaagtgatctgcccacctcggacttccaaaatgctgggattacaggcgtgagccactgcacccaaccagtactgactgttgagaatagctcaagaacacagtaccctccaggagggtagatctgccatgtgggactaagcccaccagctctactgtgccctgcctcaggcacctgctaaagttccttgcagatgaagaaaagacactgatttatagtaaatatttaattgtttccatcagcaattccagcacaagttttcctggatggtaggcagaatcaagctacccaagggttcatgatgaggtatgggggtcactgaggagacccccagagtcactgacccctcccgccacctccacacaccaggtggccctgcagaatgagggttgggctgatagaatgtcaattaggggagacaggatacagggtgagggaacagggtctagcttgtatatttgcctgcaggaaggagggagggcaggagagactctgcatagaaggactggaactacacatttaagttttcaaccccaatatgcagggggaaacagccaagccactctccatctgtctagtattaggaacctctcttcaagtggtcttttgtcatctctgttcttcttcccaattctgtattccagattccaaattctacaattgaaacccaagttctgaattctaagttctaccttccgagttcctgttacgtgtctgtctcctgcccctaaatctttcctggctcccatccctttccccagcccctctgggcagaatgtctgaacctcctcctgaccgtggtgacgaggtttgtttgtatttgtttttttgttttggcagttccaggcttttctccagcaggagggacttggctcagactgtccagcaagtgggtggcccagtggaaaccagggaattcctgagggcctggcctggcctcctctcttcccaccccacctctagccactggacatactaccttttgtgcaactaagctaaacagaggatttccaagggtgataactggggactggtggccttgagatgaggaattttagaa

SEQ ID NO: 1563053 - DNA, 4001 bp, Homo sapiens
gaattttcacagctatgtggtgagtgacccctcgcaccttctgctggctatcaacactctcaaacacagtgcctccagggcgtgggtcaatgccacagctttctcctcattttcccccttaaatccacccaaacttggcagtcccagaagctcggttagcgcttgcctgggaagcctgcagctgggttgggtctcagtgaaaagaatgaatttcataggcgcaggagatgatgcagactcggagtactccaagtttctcctgcaactttccgtgcacatggcgggcaacttttttttttttttttaactattcaatttcccagcactttagttagcattccaagttttgggaaccctttccccacccttctcttctagcccttcctccgttagtagtgaatggggacattttccagatgtcaaaaggaccggtaggaacctcacgacctaagttaggaaagcaaaggcggccaggggctccctcagccactgtgagtttcctctgcagggcatcttcccctctcagctatgccagcgcccccgcccaaggacatcgagtttctccactccgccccaaccccgtctgcccctctcctggggcagaggaaaggagtggggctcgccctgcctccctaagcagcgctgcagtcctggctgcagcgtggggctcgggcggggcaccaggagcgcttaccgatgtcggagttgcagaaggcgtcctgggggtggctgggcgagcatgtgcacgcctcggcgccccagtcccccaggctccagctgcccaggagcacgatgagcccgagccaaggggtcattgccgctgctgccgccgctgccggggctgctgctcgcctctccaaagttgccgtgcgcgccgccggcggggctgctgcagcccgagctcgctcgcccgccgggccgtgcggggcaaccttggcctccggcgcgctgccctccgagtgcccggcgggacgggatggggcgcagcgaggctgcctcggcgctggcgcaggactcggcgggcggcctcccggcgaaggagcaggagctggaggagcaagaggaggaggagaagccgtctgagcgcccgccgcctgcctgctgcccgctctgcgccgctgcctgggcggccgagtgatatagcgctgggcccccggggaccccgcctcgggctgttggggcccgccccctcagaccaatggcagagccgcattacctcatcggccctccaaaaagggggcggggccgggggcaaggggtaacggggcggggccgcccccggatcgttcagatccttatagggaataatgccgccgtgggcacgcgagtgggtgggctggggcgcgcccgggaccggtgcttgccgctgggtcctcggagcggagccctcgtgccccttctcgtctgcgccctggccccacgcccacctgggccactgggtgtctctgacccaaaccagaaccaactaacacccacccaccccagcaggaccgcttccacaggtgaggggtggccatgtcctagagaccttgactgtgcttggtggaaccagcgggggaatgctaactgctacccctccagtttctctggagagagcaggcacagaggagaaagacccaaactctctctctttctctctctctctggttcttactctctgggatatgggaagccatctgctgtttgcagctggctatgatatatgatagaagactgttttctgtgctctcccagagcaaacggggttctgtattcattcaacaaacacggttcaggatgctgggttaagcaacacaaagcccttgcccccgtggacatccatgaatgcacagggtgattttctgtgatgctagggctatgaagaaaacaaaacagagttctgggttggacatgactggggagggcctgctctctctgcgatagtaagggaagggctccctgaagtgccatcctcgctgagaagtggacaaagacaaggatcagctctggggcaagccacaggagagaggtaccaggcagggggaacagcaagtgcaaagaccctgggcatgtttgaaagacagaaagtagaaaggcaagaggaagtggttccctgcccatggctgacagagctccacccttcagcaagggatttgggggtgagctgatccaaaactgtagtaaaaccaggagaacgatccaggatcctagacgactagctataatagatgattgcagataactaacacaattactatccttattattgacatcttgattctgctttgtatttttaaaagcaggattctgtatctcaccgtattatagctctcacaataatctttgtgggtaggaaaagcaagcacaagtatcactcccactttccagatgaggaaccggcacagaaagatgggatgattggtggccagccaggaactcgtcacccctttccactgctccttcccatctgaagagagacatgcatttccctgaacgtcagcagctgttccatctaactgcaaatggccatttgcagctgggatcttccatctttctacacttttgtctctttccctttctcttccgcttcatcctgttagaaatgccacaagtttggaacaaatagaaacagggagaaatgcaagttcagcttctttctcagaactcctctgtttacatctcagacaagtgacattgggacagcagaggccgaagaattcgtgagagatggtatttccaagaacatttttgaaactcctttttcccctttgagcactttagccataggaaagggaaaccagtttccacatctttttgacttgtcccctccacccagctttaaaaaccttccctgccttcactctaactgtggcctaactcgtagagatgtttctgtctctcgatgtttttctagcactgttttcattgttttatggggtatgattctattgcttccccaaccacagtaggaatactttgaggcctgggatatttagccacactgctttttagccctctcagaaccaaatagggtctcaggagactggagagcatgggtgtggccaacagctgactgagtcctgagcagagtgccctggaggccactctaaggatccaggttgaatgagggcatacgtggtggaatttgagagattcgcttatccccgcgccccacatgacttattccacagtcatgtggaaggttttagaagactttccagaccaaatccactttggataagcatcttacatgatagaggccctctcttccctttcttttcacatttcagttttgtccaaagtgccgatattttctccaacggaaggccttgcctggaatataagtatcaagtagataacttctgctgaacttcaagcagcagttttctcatagaaagcatctgaagcgtttttttccagcagctacttaattatgaaagcacaagtataatctgatcttttttccagctgaaaagtaacgaaattaccttttggttaatttcttctcactccctatcctaagctggtccacacagtgtcttgaagttcagcgaattccaagagcttttcagttgggatgttctctcttattccaaacctgagtcagttcccctctgcccaccgtgtgaaggcagtttggttctcaccctaaggaaaagaaacagcaaactccatgaatccttgcgtaggggagtcctcctgctagggtcacccccttcagcaggcacccatcagtctggatgtcatggtgtccatgagcctaataatatgtaagaattggttattcaacatcacttaataagctaggtggggtgaacctgaggctaacagtaagaatgaagatgcaggctgggtgcggtggctcacgcctgtaatcccagcactttgagaggccaaggtgggcggatcacgaggtcaggagatcgagaccatcctggctaacatggtgaaaccccgtctgtactaacaacacaaaaaattagccaggtgtggtggtgggcgcctgtagtcccagttacttg

SEQ ID NO: 1563054 - DNA, 4001 bp, Homo sapiens
gcccagctattggccttccagaactcccacaccagatccccagtctaaaggcccagagctgtgactcgttttcaaaacaataaaaagctgtaccctgccttgccggggctgtttccactccagggaatttacagagagaaaatgagcacagcagggactggaaatagctctgagcccttctcagggtgagggactgggcaggccagccagagaccaggagcaaaacctctaagacagagagggagcaaacagcctccggacagaagcccctgctcacagaactcggccaataggaaagaactaggacaagtggctcattcacccttctgcctcgaagctcttctttctacttggttggagaaattcagaaggggctctttgaataacccaccaccaccgtgggtgcaacaaataagacatccagaatcccaacgactgcacaaatgctttgggggaattcacagcgccttctccacccacattagctattggagcctcgtatccagattggggtcactaaatcagtgtccatcttcccagcactgggagcccctagaaggcaggcaccaggtcccattgatcatcagaccgctatgccccagcatagtgcctggcacatagtagatgctcagtaagttgcaagacaagatctggcagcaagagagaggtcctggttaaaggatgattccatccaggcttgccacgtatcgtggagaagaacgtcatgaattccctctgggcctcagtttaccgcatctgcaaatagggacaactgttccttactcacacagctgctgtgcaaattacacaggaaaatatatgtggaaagcagaaaagcctcagatgaacgtcagtcatccttcaggcttcagctcaaccgtctccttatgagggagtctttcctgcggccacgatccccctccccgggaactgaacctgcctctgtactccttctactcctttgtttggtatttttcacatcatcgtgatcacctgtttccaaatctgattcccccatgcttgagagctccttgatggcttgggcatcaaatgtttctgtccaggtgggcacacatacctggctgctggggctctcccaccccagcgtcccaggtcccaactctgatacgcacagcaccctaggcaaggttcagaggtgcagagcctaggggttctaccaaggaagctaaataggtagatggaaagggacactgtaggcataacctgtcaacgaagtcacacctctgagacctgcgctgcctctgcaggtgcaggtgagcttgtttgcctggctgactctgcagcgcagggcctccagggcacagattgctgcttctttccttacaaaagcaccagcagtcagataaataatacatggccttcacctcaccacaggtatcaggcatgcaaatacctgctttgccccaaaatgccctggaaaggagggaggagtaaaacgtctggccttatacaacacctccagaggggatatgtattgggaatccatgcccaacccccagcataactgccttgccttggcctggagccacccagcactggaggtaagtggatccaagcgaggtaccaagggtgtgcccaggaggaaatgtacaattcacgggaaggatacagacacccaaaaccagtctccacggtccctttgggggcaaacatctttcgagccccaggtcccagtcgatccccttccaaacctgcggacctgtgtggcgggcgtgtacaccctccactcacgacgcagccccgaaagccccccgccgaccaccctcccaggtcactgccacccgcacagggcacggacgcctcccccactcactcggccgtgccagtcgccagcacacccacccgggagcacacaatccctcttgcaaagcgccttggtccatccgcctccctctcccggggccgccccccggacaggtccgattacactccaggagctgcccccgccacgttggcgtggaaagggagcgggcacacccacgggcgacctcgcggggcggagaggaggcacgggtggggagacggatgccccctccctccgcggccgcaccggcctccgtagtgccctccccgcccgggagccggcggccgaagccgggcgtccctcgcgcgggcctctccgaaacaagcagccccccgcgctcgggagtcgcagctcccccttggggctcccgggcgaggccggccaggcgggatacctcaggagcccatggcggtggcggcgtctgcggacgatgcgcggcagccggactctgcgggcggggcgggcggcgccgcagccccggagtctccgccgccgccggcgcgtcccgggcccagtggagtgcagccgcggcgcgcatgcgctctgggctcgccgccggggagggcggggcggcggacgcggctgagatcactgcctgggccttaaaggggccgcgccccgaaccccagcccgccgccccgaaccccagcccgccgccccgcgggttggggcgcgacccgggttctcttgccactcacaaaaccagctacgaccggcccccaaccgcgagagctttctgggctgcgatctctgcccctgaccctcgctggtgcttcacttcttttaaccctaatttcctccatttgagcctgttttgaagatgaaacgaaatacaatggctatttgttgagtgaaggatgcgtgtggaattgtggaatgaacgtggaccgagtgttgtgtgcaattaggccagatgaaatggcaaagcactgaaagaggcctttttttcccactccgcttagcagcgattctttcttgccccgtctggctctaggctgccgaactagcaaaagtcttcagatagggttcaagccgcctagtccatttctgtttgccggtccagacatcacctaggttaactgaacaagataaaatgcaattaagttctggcattgatgtgctcaagatccccaaatgtatttatgtctccagactcctcgcctgaactgtctacccaacacctcttccttggagctccagcaggcatctcaaagtcagcgtgtctgagctgagccaaccccacttccacacacaaaaacctgctccctctcagctttgcctccatcagctgttgacaattccatccttccagtccccaggccagaactcggagtcagctgtgaatgaatgccccccttctgcccgctacccaataaggcaggcaggagatcctgttggctctacctgcaaaatagatctagactcagatgtctgccactcctcctccagtgctaccaccctggtccagtatttgcacaggattattgcagagttctgctaacccctctcccttgttccagccttgccctctgatccattctatcaattcaggggtgagggagatccttttttttttttctcttttttctttttgagacaaagtctcgctctttgtctcaaagttgcccaggctggagtgcagtggcgcgatctcggctcactgcaagctccgcctcccgggttcacgccattctcctgcctcagcctcccgagtagctgggactacaggcgcccgccaccatgcccagctaattttttgtatttttagtagagacggggtttcaccgcgttagccaggatggtcttgatctcctgaccttgtgatccgcctgcctcggcctcccaaagtgctgggattacaggcgtgagccaccacgcccagccaagattcttttaaaatctgccgggcacggtggctcacgcctgtaatcccagcactttgtgaggtcgggtggctcatttaaggccaggagttacagaccagcctggccaatatggtgaaaccttgtctctgctaaaaatacaaaaattagctgggtgtggtggtacatgcctgtagtcccagctactctggaggcatgagaattgcttgaacccgggaggcggaggttgggttgtggtgagccaagatcgtgccaatgcacaccaacctgggtgacaaaatgagaatctgtct

SEQ ID NO: 1563055 - DNA, 4001 bp, Homo sapiens
ggggctctttgaataacccaccaccaccgtgggtgcaacaaataagacatccagaatcccaacgactgcacaaatgctttgggggaattcacagcgccttctccacccacattagctattggagcctcgtatccagattggggtcactaaatcagtgtccatcttcccagcactgggagcccctagaaggcaggcaccaggtcccattgatcatcagaccgctatgccccagcatagtgcctggcacatagtagatgctcagtaagttgcaagacaagatctggcagcaagagagaggtcctggttaaaggatgattccatccaggcttgccacgtatcgtggagaagaacgtcatgaattccctctgggcctcagtttaccgcatctgcaaatagggacaactgttccttactcacacagctgctgtgcaaattacacaggaaaatatatgtggaaagcagaaaagcctcagatgaacgtcagtcatccttcaggcttcagctcaaccgtctccttatgagggagtctttcctgcggccacgatccccctccccgggaactgaacctgcctctgtactccttctactcctttgtttggtatttttcacatcatcgtgatcacctgtttccaaatctgattcccccatgcttgagagctccttgatggcttgggcatcaaatgtttctgtccaggtgggcacacatacctggctgctggggctctcccaccccagcgtcccaggtcccaactctgatacgcacagcaccctaggcaaggttcagaggtgcagagcctaggggttctaccaaggaagctaaataggtagatggaaagggacactgtaggcataacctgtcaacgaagtcacacctctgagacctgcgctgcctctgcaggtgcaggtgagcttgtttgcctggctgactctgcagcgcagggcctccagggcacagattgctgcttctttccttacaaaagcaccagcagtcagataaataatacatggccttcacctcaccacaggtatcaggcatgcaaatacctgctttgccccaaaatgccctggaaaggagggaggagtaaaacgtctggccttatacaacacctccagaggggatatgtattgggaatccatgcccaacccccagcataactgccttgccttggcctggagccacccagcactggaggtaagtggatccaagcgaggtaccaagggtgtgcccaggaggaaatgtacaattcacgggaaggatacagacacccaaaaccagtctccacggtccctttgggggcaaacatctttcgagccccaggtcccagtcgatccccttccaaacctgcggacctgtgtggcgggcgtgtacaccctccactcacgacgcagccccgaaagccccccgccgaccaccctcccaggtcactgccacccgcacagggcacggacgcctcccccactcactcggccgtgccagtcgccagcacacccacccgggagcacacaatccctcttgcaaagcgccttggtccatccgcctccctctcccggggccgccccccggacaggtccgattacactccaggagctgcccccgccacgttggcgtggaaagggagcgggcacacccacgggcgacctcgcggggcggagaggaggcacgggtggggagacggatgccccctccctccgcggccgcaccggcctccgtagtgccctccccgcccgggagccggcggccgaagccgggcgtccctcgcgcgggcctctccgaaacaagcagccccccgcgctcgggagtcgcagctcccccttggggctcccgggcgaggccggccaggcgggatacctcaggagcccatggcggtggcggcgtctgcggacgatgcgcggcagccggactctgcgggcggggcgggcggcgccgcagccccggagtctccgccgccgccggcgcgtcccgggcccagtggagtgcagccgcggcgcgcatgcgctctgggctcgccgccggggagggcggggcggcggacgcggctgagatcactgcctgggccttaaaggggccgcgccccgaaccccagcccgccgccccgaaccccagcccgccgccccgcgggttggggcgcgacccgggttctcttgccactcacaaaaccagctacgaccggcccccaaccgcgagagctttctgggctgcgatctctgcccctgaccctcgctggtgcttcacttcttttaaccctaatttcctccatttgagcctgttttgaagatgaaacgaaatacaatggctatttgttgagtgaaggatgcgtgtggaattgtggaatgaacgtggaccgagtgttgtgtgcaattaggccagatgaaatggcaaagcactgaaagaggcctttttttcccactccgcttagcagcgattctttcttgccccgtctggctctaggctgccgaactagcaaaagtcttcagatagggttcaagccgcctagtccatttctgtttgccggtccagacatcacctaggttaactgaacaagataaaatgcaattaagttctggcattgatgtgctcaagatccccaaatgtatttatgtctccagactcctcgcctgaactgtctacccaacacctcttccttggagctccagcaggcatctcaaagtcagcgtgtctgagctgagccaaccccacttccacacacaaaaacctgctccctctcagctttgcctccatcagctgttgacaattccatccttccagtccccaggccagaactcggagtcagctgtgaatgaatgccccccttctgcccgctacccaataaggcaggcaggagatcctgttggctctacctgcaaaatagatctagactcagatgtctgccactcctcctccagtgctaccaccctggtccagtatttgcacaggattattgcagagttctgctaacccctctcccttgttccagccttgccctctgatccattctatcaattcaggggtgagggagatccttttttttttttctcttttttctttttgagacaaagtctcgctctttgtctcaaagttgcccaggctggagtgcagtggcgcgatctcggctcactgcaagctccgcctcccgggttcacgccattctcctgcctcagcctcccgagtagctgggactacaggcgcccgccaccatgcccagctaattttttgtatttttagtagagacggggtttcaccgcgttagccaggatggtcttgatctcctgaccttgtgatccgcctgcctcggcctcccaaagtgctgggattacaggcgtgagccaccacgcccagccaagattcttttaaaatctgccgggcacggtggctcacgcctgtaatcccagcactttgtgaggtcgggtggctcatttaaggccaggagttacagaccagcctggccaatatggtgaaaccttgtctctgctaaaaatacaaaaattagctgggtgtggtggtacatgcctgtagtcccagctactctggaggcatgagaattgcttgaacccgggaggcggaggttgggttgtggtgagccaagatcgtgccaatgcacaccaacctgggtgacaaaatgagaatctgtctcaaaaaataaaataaaatcgaagtcaaaacatggtacttttttgctcaaaaccctccattggctcactgtttcgctctaagtaaaagccttacaagtccttacaaacacttgatctgacattctactctcctggggattcctgatctcattcatctcttaccctttccctccacactgatcccttgctgttcctagaacaagctgagcacactcagccccgagccccctgcactagctgttccctctgctgcgatcgctgtttccccagatacctgaatggctcctccatcaccttcttcaagggtttgctcgaatgtcctccacttagtgaggcctgctgtgagcacccctagtaaaactaccagaccc

SEQ ID NO: 1563056 - DNA, 4001 bp, Homo sapiens
acctgcacctcctggagcgggtgagagtgcggactgaggcctcggggaggcgtcctggcggtgggttgggagacttaccgccccaggtctgggggaggagaggcgggaggcaccttggcgtctgagtggggccgcacctgcaggactacggtctgctcctggaatatggcccaggcctccgctgtctgcagcgcgtcctgggtgtggacacccgggttagactcggcggcgtcggggcgacaggcccttccccatccacactcgaaagcctaccctcctccaacagaacccgcttctgccctcacctgctgcagcttctcctcctgcaaggcgcatttggtctccgccagctccagttcattcttgagaaggacccagggaatgtcaggaggtccgcaggccggcaacccgctgcgcctccgggccccgcccccggccctcagtgcccgcccccaggcgatcatgaccccgcccgcgtcctcaggaccagtcgtaagcaacgccccaactggtcatggccacgccccctccgcgctccgcccctattctagccctcagagccccgcccccatgcgattgtgctccgcccacatcccccgccccgcccacgccttcagggcctgccttaagccacacccccaggtggtcacggccccgctcacgctgctgctccgcccctactaaagacctcagggtcccgctcaagcacctgcagcgtcaccaattgggctgcgagttgctgctccgtgctcttctggctctgcggttcccctccgtagaagagctaggggcggggcttgtaagggcggggtttaccgggcttctggaggaacgagtgtcaggggagacagggacggggagacaacaagggcgaggacaagggcaggacttccgagaggaaccaagagacaggccctcccatctcctgcacgtacctgactcgacagctcctcccactgctcctgcagctgcctgctgtgctgctcctgcggacggggtcctggggcggtgccgacctctccgccggtcctacctcaccccacccccggatcccgcccccttccgcccgccctgcctcaccccaccctgggtccagccccattctaggactcttcctcaccaagtcctccttgtggcgctccgcctcctccagtcttctgcgcacccgctccgcgcgctcccgcgccgcctcgcgcgcctccccttgcagaggctgcgctgcctggcttcgcctccgcagcaggctgcagagggaaactgaggttggcgctacaaggcggactgggtcgctcaggatcccgcagtcgccaggaaggaccagccgcaggctcatgattgaggactgggaagtcctggccgagtcccccacctgggtccgctgggtggatcacccgttcccaagggcctagagcagagatgcgggcccgggcggatcagcctggtactctgcgaagcacctcgcggcgctgcctgcgggaccgaccctcgcgcgcccgccaggtagaagagcggcgttccccgcgcacctccgctcccgctcgctcaggtcctgcaggcgctggttgaggctctcgctctcggcctcgagcccgcgcatcagcttctctagctcctgcttccgctggcgaccatctcggttatccttctgcaactgcagcagcagctcctgcgtcgcggccatggctgtggagaccgagcctaaatgccgcccgcctcggggacccagcctgcggctggcaggcgtcacaatgggcggcagggagcgcctagcgggctggatcacaatgggcggcaggggaagcccgagcgtagcccgacacatgccccttctcacgccggccggaggcgggtcaggccggatcacacttagtccatcactgatgaaaattgtgtcaaagagccgtaattggatcaatgaaaggttaataaaatactaataccaaatgcaggcaagttgaagattggttcccccacactgcagatggcacttgcaaactgatcgatctcttgtggaaaagaacccataaatatgttcgtagcttttgacccaattatccttctcctgggaaatttatcccagaaaggagaaaaaataatttaaacccactacacactaaatggttcgctgaagtggttacagtagccacaaaaaaaggaaacaattttaatgattaaaatgtgcttgggtattatgtggtatgcctagagctatgatgatgtctagtgaaaaagaatttgatttagcatttatgctaaagtaactaagataaaatacatgagcaagatccgtaaaggaaacaggaggaagataagctctttcattgcttggtgagactgtaggtaaactcgtccttttaagtattattattttagaggcaggtcctgctgtcaccaggctggagtacagtggagcaatcgaggctagctgcagcttcaatctcccaggctcaagtgatccttccgccttagcctcccaacttgtccttttaaaatctgcctttatttgtccagttacaattatgaacttggatgcaaaaatccaaaatacattactaacaaaatctaaagggaaacagaaatccatggaaaccaaacagagtttattccagagattgttcaacatcagaaaatcagtgttgttcaccatatggacaaacagggaagaactccacgatctcaatggcgcacttcaatagatgcagaaaacatgaagatgagggtcaccatctattaataattttttttttttctgagacagagtctcattctgttgcccaggctggagtgcagtggcacaatcttggctcactgcaacctccgcctactgggttcaagcaattctctgccccagcctccagagtagctggcattacaggcactcgccaccacgcccagctaatttttttgtatttttagtagagacagggtttcaccatcttggccaagctggtcttcaactcctgacctcgtgatccacccacctcggcctcccaaagtgctgggattacaggcctgagccacctcacctgaccatctattgataattctaaaagctctaacaaaagggagagataaaagcactctctagtctgataaaggccacagtaaacattatagtaaggaggaagtattaatagtatatgcttttttttgctttttttttttttttttagagtcagggtcctgctgtcaccctggctggagtgcagtggtacgataaaagctaactgcagtcgcacacttcagggctcaagtgatccttccgcctctcaccctttaagaagtagtagacggccgggcacggtggctcacgcctgtaatcccagcactttgggaggccgaggcgggtggatcatgagatcaggagttcaagaccagcttggccaagatggtgaaatcttgtctttactaaaaatacaaaaaaaaaagttagccgggtatggtggtgcttgcctgtagtcccagctactcgggaggccgaggcaggggaatcgaacccgagaggcagaggttacagtgagccgagattgcaccactgcactccagcctggtgacagagggaggctccatctcaaaaaaaaaaaaaaatgtagtagtaaaggccaagcacagtggttcacacctgtaatcccagcactttgggaggccaaggtgggtggatcacctgaggtctggagtttgagaccagcctggccaacatggtaaaaccccacctctactaaaaatacaaaaaattagctgggcatggtggcctataatcccagctactcaggaggctgaggcaggagaatcgcataaaaccaggaggcggaggttgcagtgagccgagatcgtgccaccgcactccagcctgggcaacagtgtgagcctccatcttaaaaaaaaaaaaaaaaaaatagtaaaagaggctggccacggtggttcatgcctgtaatcccagcactttgggaggcaaaggagggcagatcacgaggtcaggagatcaagaccatcctggctaa

SEQ ID NO: 1563057 - DNA, 4001 bp, Homo sapiens
tccagctcctccgcagcctccatcaccttcacctgcacctcctggagcgggtgagagtgcggactgaggcctcggggaggcgtcctggcggtgggttgggagacttaccgccccaggtctgggggaggagaggcgggaggcaccttggcgtctgagtggggccgcacctgcaggactacggtctgctcctggaatatggcccaggcctccgctgtctgcagcgcgtcctgggtgtggacacccgggttagactcggcggcgtcggggcgacaggcccttccccatccacactcgaaagcctaccctcctccaacagaacccgcttctgccctcacctgctgcagcttctcctcctgcaaggcgcatttggtctccgccagctccagttcattcttgagaaggacccagggaatgtcaggaggtccgcaggccggcaacccgctgcgcctccgggccccgcccccggccctcagtgcccgcccccaggcgatcatgaccccgcccgcgtcctcaggaccagtcgtaagcaacgccccagctggtcatggccacgccccctccgcgctccgcccctattctagccctcagagccccgcccccatgcgattgtgctccgcccacattccccgccccgcccacgccttcagggcctgccttaagccacacccccaggtggtcacggcccagctcatgctgctgctccgcccctactaaacacctcagggtcccgctcaagcacctgcagcgtcaccaattgggctgcgagttgctgctccgtgctcttctggctctgcagttcccctccgtagtagaagagctaggggcggggcttgtaagggcggggtttaccgggcttctggaggaacgggtgtcaggggagacagggacggggaggcaacaagggcgaggacaagggcaggacttccgagaggaaccaagagacaggccctcccatctcctgcacgtacctgactcgacagctcctcccactgctcctgcagctgcctgctgtgctgctcctgcggacggggtcctggggcggtgccgacctctccgccggtcctacctcaccccacccccggatcctgcccccttccgcccgccctgccccaccccaccctgggtccagccccattccaggactcttcctcaccaagtactccttgtggcgctccgcctcctccagtcttctgcgcacccgctccgcgcgctcccgcgccgcctcgcgcgcctccccttgcagaggctgcgctgcctggcttcgcctccgcagcaggctgcagagggaaactgaggttggcgctacaaggcggactgggtcgctcaggatcccgcagtcgccaggaaggaccagccgcaggctcatgattgaggactgggaagtcctggccgagtcccccacctgggtccgctgggtggatcacccgttcccaagggcctagagcagagatgcgggcctgggcggatcagcctggtactctgcgaagcacctcgcggcgctgcctgcgggaccgaccctcgcgcgcccgccaggtagaggggcgttccccgcgcacctccgctcccgctcgctcaggtcctgcaggcgctggttgaggctctcgctctcggcctcgagcccgcgcatcagcttctctagctcctgcttccgctggcgaccatctcggttatccttctgcaactgcagcagcagctcctgcgtcgcggccatggctgtggagaccgagcctaaatgccgcccgcctcggggacccagcctgcggctggcaggcgtcacaatgggcggcagggagcgcctagcgggctggatcacaatgggcggcaggggaagcccgagcgtagcccgacacatgccccttctcacgccggccggaggcgggtcaggccggatcacacttagtccatcactgatgaaaattgtgtcaaagagccgtaattggatcaatgaaaggttaataaaatactaataccaaatgcaggcaagttgaagattggttcccccacactgcagatggcacttgcaaactgatcgatctcttgtggaaaagaacccataaatatgttcgtagcttttgacccaattatccttctcctgggaaatttatcccagaaaggagaaaaaataatttaaacccactacacactaaatggttcgctgaagtggttacagtagccacaaaaaaaggaaacaattttaatgattaaaatgtgcttgggtattatgtggtatgcctagagctatgatgatgtctagtgaaaaagaatttgatttagcatttatgctaaagtaactaagataaaatacatgagcaagatccgtaaaggaaacaggaggaagataagctctttcattgcttggtgagactgtaggtaaactcgtccttttaagtattattattttagaggcaggtcctgctgtcaccaggctggagtacagtggaacaatcgaagctagctgcagcttcaatctcccaggctcaagtgatccttccgccttagcctcccaacttgtccttttaaaatctgcctttatttgtccagttacaattatgaacttggatgcaaaaatccaaaatacattactaacaaaatctaaagggaaacagaaatccatggaaaccaaacagagtttattccagagattgttcaacatcagaaaatcagtgttgttcaccatatggacaaacagggaagaactccacgatctcaatggcgcacttcaatagatgcagaaaacatgaagatgagggtcaccatctattaataattttttttttttctgagacagagtctcattctgttgcccaggctggagtgcagtggcacaatcttggctcactgcaacctccgcctactgggttcaagcaattctctgccccagcctccagagtagctggcattacaggcactcgccaccacgcccagctaatttttttgtatttttagtagagacagggtttcaccatcttggccaagctggtcttcaactcctgacctcgtgatccacccacctcggcctcccaaagtgctgggattacaggcctgagccacctcacctgaccatctattgataattctaaaagctctaacaaaagggagagataaaagcactctctagtctgataaaggccacagtaaacattatagtaaggaggaagtattaatagtatatgcttttttttgcttttttttttttttttagagtcagggtcctgctgtcaccctggctggagtgcagtggtacgatcaaagctaactgcagccgcacacttcagggctcaagtgatcctcccgcctctcaccctttaagaagtagtagacggccgggcacggtggctcacgcctgtaatcccagcactttgggaggccgaggagggtggatcatgagatcaggagttcaagaccagcttggccaagatggtgaaatcttgtctttactaaaaatacaaaaaaaaaagttagccgggtatggtggtgcttgcctgtagtcccacctactcgggaggctgaggcaggggaatcgaacccgagaggcagaggttacagtgagccgagattgcaccactgcactccagcctggtgacagagggaggctccatctcaaaaaaaaaaaaaatgtagtagtaaaggccaagcacagtggttcacacctgtaatcccagcactttgggaggccaaggtgggtggatcacctgaggtctggagtttgagaccagcctggccaacatggtaaaaccccacctctactaaaaatacaaaaaattagctgggcatggtggcctataatcccagctactcaggaggctgaggcaggagaatcgcataaaaccaggaggcggaggttgcagtgagccgagatcgtgccaccgcactccagcctgggcaacagtgtgagcctccatcttaaaaaaaaaaaaaaaaatagtaagaggctggccacggtggctcatgcctgtaatcccagcactttgggaggcaaaggagggcagatcacgaggtca

SEQ ID NO: 1563058 - DNA, 4001 bp, Homo sapiens
tgcaaatcagaatagccagagcacactgagcctggcagaggaaggaagagatgaggttggtgagggactggggactgggttaggtggagcctcataggctacggtaagaagttcagattttactctgagtatgatgggaagtgattggagggtggataagccagtctgagtggcatgatctgatgtcaggttaacaggactcgtttgtccagtatgtggccaaatagacactaagggggagcagtgacagcagtgagacctgtgaggtgcttattgctgtaatccaggcaagagatggtggagcattaattgaatgaggattgcaatgaagacctggctagtatattcaaaagctatgtataaattacagaaaagtgacccttctcaagagatgcagtcttgcaggttcacagtttagcaagtgaagtatggactagatttcagcatcttctcagttctcagctgggcatgcttgcacagtgcacaacatccccaactgtgtatggtggccctggtaaggatgacatgaagtggatggatgagcgagaaacaaagggggacagattattaggactgggtcagctaagagcagtaatgggtgacactaaggatgccatctctccctccccctgatttctggcttgccaaaggaccaggaatagtcaacaatcctagggtttatctctgaggtctgacccgagaggccaggctctgctcacagactcattcattcattcattcattcattcattccataaatatgtctagagcactgactatgtgcctgtgcattggatttacctgccactgcctgcacccctggcattggaacactgcttctccttgggcacagccctttgggggccacagcccaagacaggaggaaaattgcattgaaggccaacaggagccagcctccgaggagcatcacagctgagacctgcagggaagagacaggaggaaaattgcattgaaggccaacaggagccagcctccgaggagcatcacagctgagacctgcaaggaagagacagaaggaagggtgttggctgggacaggggcaggtggatgctcccctgctcattgaccagcttctgagtcctcgcagcatgtggtttgtgctattatgatctccattttacataaaaagaaactgtccaagaaaataaattttccaataaaagtccaagaaactgaagtcatttgcctcagaacacatgggtaattaagtggtagagccagaatgaagatccacattgactgaccagcatatagtacctttattaagcacttgctacatgccaggatcatcaggagaggcacctggtagctgctgttacatcacccttataacaatcaattttgaaggctgtatattcttccttagaggtgctggactaggagtcctttcccattctccccattgttgattttggcaatgtgcatcatagctgggactttaacaccttagctttcatttttaaacctagcagtgtttagagggtggccaggtaagagcgtgcaggttgtatactgcacaactctcagagacacgttgggggccatcatagatttgcaaactgattacagtgactttccagcagatggcagtagagcatcctaaagaaggggcaccttttcctaatttgcacgaaggtgctacattggccggcagctgcctttggaatcatcctgcatgtttgttaaattatcagtagccggaccccactccacgcctacagagacaggggctccgggtggagcacagaacttggcatctttgcaaagttgcacaggtgtttctgaagggctgtcaggttgaagaacttctatgctcagttctaaggagagtaatggcaaattcgaagccactgggacactcaggcagtgaggaaagcctcctcgaattccgctcagccagctttcctgccttaatgagtttaaacgagcccctgaagacccagtgacttggtgagccagctctcaccttccaggcaaagtcaggaatatcctccagggaactgaaggtcacgcagctctggttccaactgttgccctgaggccaggagcagtaggtgaggatgccaaaggagaaggtcggggtctggaaccaggcaggggagatgaggctgaaggctgaggtgcaggtcagagagagccccagagctacccacacactgctcaacattaggcagtatcgctgacctaggggtcaacagggaagattactaatggagactgcagggacaaggagagaaaggggctggccgaggtgctccctagccagggatctggtgttatgatcagaccccagatcatcagccccccttgagcctggagatgcaaatgggaggtactaataactgtggtctggtagtgggggttactttgccctagcaaattctagaagtacaacccccaagtcctagaataaatgttagccctgaaagacctttgaacatttgcccctccaccttcttcatggcacatcatcctcactggtccatgcagggctcttctcatattccgtgcatactttcatttgttcatttgttcgttcgttcattcatttatcgctttttttttttttttttttttgagacagattattgctctgtcgcccaggctggagtgcagtggtgcgatctcggctcactgcaagctccgcctcccggggtcacgccattctcctgcctcagcctccggagtagctgggactacaggcgcccgccaccgcgcccggctaattttttgtatttttagtagagacgggttccaccgtgttagccaggatgatctcgatctcctgaccttgtgatccgcctgcctcggcctcccaaagtgctgggattacaggcgtgagccaccgcgcacggcctatttatccattcttccatggagcctcctctgttctaaagggctgcttctacccagtcggggcaccttttaaaaattcacacacatagccgggcgcggtggctcacgcctgtaatcccagcactttgggaggccgaggcgggtggatcacgaggtcaggagatcgagaacatcctggctaacacggtgaaactccgtctctactaaaaatacaaaaaaaaattagccgggcgtgggagcgggcgcctgtagtcccagctacttgggaggctgaggcaggagaatggcgtgaacccgggaggcggagcttgcagtgagccgagatcgcaccactgcactccagcctgggcgacagagcgagactccgtctcaaaaaaaaaaaaataataataattcacacacatatgcccgcccttccttccttccttccttccttccttccttccttccctccttccttctctctccctccctccttccctccttccctttctttccttccttccttgcttccttccttccttccctccctccctccctccttccttccttccctctctctctctttctttctttcagagaaaaaaggttggagtgcagtgcatgatcatagctcactgccacctcaaactcctgggttcaagcgatcctcccacctgctgagtagctgggactactggggcagctaatttttatttatttttatttttttgcagagacgttccatcacatgtggctaattagaaaccttttttcttttctgtggaaacaaggtctccctatattggccaggctggcctcaaggaacacagatgctgtttatagcagccactttgttttttttttattttaattatttaatgtatgtcattttgtgtggagttaggtttgcaaaattggtgtggtgctgtatgcgtgcatttctcattgctgcagatggtattatctttttttttttttgaaacagagtcttgctgtgtgtcggccaggctggaatgcagtggtgccatgtcggctcattgcaacctctgcctcccagattcaaacagttcccctgcctcagcctcccgagtagctgggactacaggcacatgccaccacacctggctaatttttgtattttt

SEQ ID NO: 1563059 - DNA, 4001 bp, Homo sapiens
cccccctacccagtgagttctcacacaatggccactgcgtgttgtcaccatgtgccctgcccacaagcctcgcacggcttccatccacctagaacacagtccctaaagacccagggtctcagttttcctgtcctctttgctgaatgggaggtttgctccttgctgggcctgggatgttttcctttctgctggcctcgtggctccctcctttacctcctccaaagggtcagatgtcacctctccagagaggccttccctgggcactcccgtctctcctgcatttttctttatagcaattacagaggcctaaattgcctgatatgcaaatatgtcatttatctgcctcctccctgtctgtaagctgcatgagagcagagtctggtactcagcggacactcagtaattgttaaatgaatgaatgacaaggtcccagctccttcctccctacagaagtccaaggtgctgtgtgcatatgtggcctggccaacttctcctgcctccttttttcccaccctctcttttccccgtcgcaccccaaggacactggacttccattggtgagaaattttaacaatgggatggtagcaaacatttatggattaagagcagccagccggcaccaagagccctcgtggaccttgagccctgtcagtgcttgttcacggccaggcgtccccacactcttccttctgcctgggcccccacctcccaacctggccagctcttatgcagcccctgtcacctcagttcagacctcacctcttcgcagctctcccagagtgccctagaaggggcggctgcccctcgcgatgtgcagcttacctgtgggcactctctctttgcccctcacattgaactcctggaagcggggactgtgctccaattgccacaggggcctgaagcagtcccccagctctgagcaccatggaccccaccctggcacctgctcctcactccctcctgcccttctggccattggagggtctcgggtctgcctgctggaggctgagctccttggggcggggccgcgactcccccagcaatgcagatccggattcaaccactgcgtatgaactcctaccatgtgccagccctgtgctgggcagtgctgcaaactccactgcagcctccaacagcctggggtgcctactttgctgactctatttaatggctggggaaactgaggtagagagaggtaacatgacttacccgaggtccctcagccagggcagagcagagcagagcagggactctgggctagggccataggggcatctttcagtgaaaccattaggccctagagtcctgagagtgtgggggactgggtgggggtcccttccacacatataaacacactcacagacccacagatgtacacagatggagacacgcggagggatatacgcacatctattcatgacacaaaaattcatagatgcacgcccttcctacacagacacacacacgaacacacatacacatacatgccaactctgagcctgtgagcccagggtcctgggcttaagtcagtacataggtgcaatgtggggctccgggcctgtctcctacaccagaaggcccaggtggggtaccgggtgtggagggggcagcatgtccagtcctgcgaggcaggggtagggtggcctctcccttcctcctgtccctgccacctgaatcccaggccaccaaccacccagcactgatgctgtgcctgtccacacacctggtgtcaccctgcgtggtccctcccctccccagctctgtgggcccctcaccttctgctcactgatcaccctctggccgatgaggccctgcaggcctggcctcggagcagggtaggtggctcaggctgcagggagccaggcccagctcttagggtggacactgtcactaggtcatttatagatcccggtcccctgtcctggaggcccccgcttacctttgggagcggcagataggtgccgggcctgcacacaggcctcaggagcctctgtttgtccaggccaaggcctccccacccccacccagccagcccaggctggatcaatggcctagagccatgaccagggtgtctggcccttgtcccctgtggcctgtggcctcaggctccatggaactcctcctgctgggtcctggacagcactgtgactaagtacaggtaaacaggcaggaggtaggagaaggcagtgcctgccccgccccatcttcccccacccccgcatgggcaccccagaggctggcaggcaggtgcgggagatctgagctctcccccgaggcccgttgcctggtgacatgcctgcctggttacagcccctggtccccgagagcatgaggtagggacagccaaggactggggactgtgcagaggccggtgcaggtgagtgcaggggctcacaagggtgagtccaggtgcttacctggacaggcgagactaaaggagctgctggcctgagagagagaaaaggaggctgggcccatatactctggggactggagaggagaaaggggaggcaggggtggggtttgatgctattttctgtttagctgggaattatttgaattcctacctcgttcttttttttttttttttttttttttaagatggagtctcactccgtcacccaggctagagtgcagtggtgtgatttcggctcactgcaacctccgcctcccgggttcaagcaattctcctgcctcagcctcccaggtagctgggattacagcgcccaccaccatgcccggctaattttcataattttagaagagatggggtttcaccatgttagccaggctggtctcgaactcctgacctcaagtgattccacccacctcgacctcccaaaacgctaggattacaggcatgagcgaccgcacgcagcatgaattcctacctggttccgtagcgctgtgctgtccatgacggtagccgctggtcacccgtggctcttgagtcagtctgaactgagaaaagctgcacgggggagacgcacaccaggtttccaaggccaagtgcaaacaggatgtcaaccaacgcgataacaatttttatattgattttatgttgaaataacactggtgatcatgggataaataaaatgtattattaaaagcaattttcttctggctctcttgtttttttttttttcagagacagggtctcattaggttgccaggctggtctggagctcctgggcccacatgatcctcctgcttcagcctcccaagtagctgggattacaggcgcgggccaccacaccccttgttgcatgtggatattagacaggttaagtcacaagtgtgacctgcgttgttgttctatggaacagcgttgctgtggagatgggtttgagccatatgcgtgccgaagtgccggatgggagccagggctttctagggtgcgtgcagggcagcgggcgtctgtctcagacaaggctgactttcagcgagtctacatcctgaggccagaatgcggggtgcacgcctgagatgctgtgtgctgtgggcatatgggtcccagagtgtgtgtgtaagagagacagtctggaatttgtgtgtgtagattatgtatgtgtagaatgtgcgtgtgtgtgtgtgtgtgtgtgtgtggagcgtagggattgtgtgtggggtataagatttgtgtgagaggtgtgtctgtgaggtttgtatggtgtggggtggggggtgtgtgaagtgtgttgtgtgggcatatggactgtgcatgtgtgtgcagtgtgggtgctgggaatgtgcagtgtaaggtgtgtgtgtctttgaggtacgtatggtgtgaggtgtgtatggagcatgagaggtgtgtgcagctgtgtgtgtgtgtgtgtgcatgctcacagtatgtgtggaatatgaggcatgtgtttagtgtgaggtgtgtgcatagtgtgaggtgtgtgtgtagtgtaaggtgtatgtagtgtgaagcatgtgtggagtgtgaagcgtgtgtgtagtgtgagacgtgtgtggagtgtgaggtgtgt

SEQ ID NO: 1563060 - DNA, 4001 bp, Homo sapiens
ccccattcccagggtccagcacctttggaaaagcctgtggccctaccttccaaatgccccccaaagccagccccttcttggccccccatgactcccaccatcatccaggccaccgtcatctgtcacctcgactcctgcaatagccaatcacccacccccctacccagtgagttctcacacaatggccactgcgtgttgtcaccatgtgccctgcccacaagcctcgcacggcttccatccacctagaacacagtccctaaagacccagggtctcagttttcctgtcctctttgctgaatgggaggtttgctccttgctgggcctgggatgttttcctttctgctggcctcgtggctccctcctttacctcctccaaagggtcagatgtcacctctccagagaggccttccctgggcactcccgtctctcctgcatttttctttatagcaattacagaggcctaaattgcctgatatgcaaatatgtcatttatctgcctcctccctgtctgtaagctgcatgagagcagagtctggtactcagcggacactcagtaattgttaaatgaatgaatgacaaggtcccagctccttcctccctacagaagtccaaggtgctgtgtgcatatgtggcctggccaacttctcctgcctccttttttcccaccctctcttttccccgtcgcaccccaaggacactggacttccattggtgagaaattttaacaatgggatggtagcaaacatttatggattaagagcagccagccggcaccaagagccctcgtggaccttgagccctgtcagtgcttgttcacggccaggcgtccccacactcttccttctgcctgggcccccacctcccaacctggccagctcttatgcagcccctgtcacctcagttcagacctcacctcttcgcagctctcccagagtgccctagaaggggcggctgcccctcgcgatgtgcagcttacctgtgggcactctctctttgcccctcacattgaactcctggaagcggggactgtgctccaattgccacaggggcctgaagcagtcccccagctctgagcaccatggaccccaccctggcacctgctcctcactccctcctgcccttctggccattggagggtctcgggtctgcctgctggaggctgagctccttggggcggggccgcgactcccccagcaatgcagatccggattcaaccactgcgtatgaactcctaccatgtgccagccctgtgctgggcagtgctgcaaactccactgcagcctccaacagcctggggtgcctactttgctgactctatttaatggctggggaaactgaggtagagagaggtaacatgacttacccgaggtccctcagccagggcagagcagagcagagcagggactctgggctagggccataggggcatctttcagtgaaaccattaggccctagagtcctgagagtgtgggggactgggtgggggtcccttccacacatataaacacactcacagacccacagatgtacacagatggagacacgcggagggatatacgcacatctattcatgacacaaaaattcatagatgcacgcccttcctacacagacacacacacgaacacacatacacatacatgccaactctgagcctgtgagcccagggtcctgggcttaagtcagtacataggtgcaatgtggggctccgggcctgtctcctacaccagaaggcccaggtggggtaccgggtgtggagggggcagcatgtccagtcctgcgaggcaggggtagggtggcctctcccttcctcctgtccctgccacctgaatcccaggccaccaaccacccagcactgatgctgtgcctgtccacacacctggtgtcaccctgcgtggtccctcccctccccagctctgtgggcccctcaccttctgctcactgatcaccctctggccgatgaggccctgcaggcctggcctcggagcagggtaggtggctcaggctgcagggagccaggcccagctcttagggtggacactgtcactaggtcatttatagatcccggtcccctgtcctggaggcccccgcttacctttgggagcggcagataggtgccgggcctgcacacaggcctcaggagcctctgtttgtccaggccaaggcctccccacccccacccagccagcccaggctggatcaatggcctagagccatgaccagggtgtctggcccttgtcccctgtggcctgtggcctcaggctccatggaactcctcctgctgggtcctggacagcactgtgactaagtacaggtaaacaggcaggaggtaggagaaggcagtgcctgccccgccccatcttcccccacccccgcatgggcaccccagaggctggcaggcaggtgcgggagatctgagctctcccccgaggcccgttgcctggtgacatgcctgcctggttacagcccctggtccccgagagcatgaggtagggacagccaaggactggggactgtgcagaggccggtgcaggtgagtgcaggggctcacaagggtgagtccaggtgcttacctggacaggcgagactaaaggagctgctggcctgagagagagaaaaggaggctgggcccatatactctggggactggagaggagaaaggggaggcaggggtggggtttgatgctattttctgtttagctgggaattatttgaattcctacctcgttcttttttttttttttttttttttttaagatggagtctcactccgtcacccaggctagagtgcagtggtgtgatttcggctcactgcaacctccgcctcccgggttcaagcaattctcctgcctcagcctcccaggtagctgggattacagcgcccaccaccatgcccggctaattttcataattttagaagagatggggtttcaccatgttagccaggctggtctcgaactcctgacctcaagtgattccacccacctcgacctcccaaaacgctaggattacaggcatgagcgaccgcacgcagcatgaattcctacctggttccgtagcgctgtgctgtccatgacggtagccgctggtcacccgtggctcttgagtcagtctgaactgagaaaagctgcacgggggagacgcacaccaggtttccaaggccaagtgcaaacaggatgtcaaccaacgcgataacaatttttatattgattttatgttgaaataacactggtgatcatgggataaataaaatgtattattaaaagcaattttcttctggctctcttgtttttttttttttcagagacagggtctcattaggttgccaggctggtctggagctcctgggcccacatgatcctcctgcttcagcctcccaagtagctgggattacaggcgcgggccaccacaccccttgttgcatgtggatattagacaggttaagtcacaagtgtgacctgcgttgttgttctatggaacagcgttgctgtggagatgggtttgagccatatgcgtgccgaagtgccggatgggagccagggctttctagggtgcgtgcagggcagcgggcgtctgtctcagacaaggctgactttcagcgagtctacatcctgaggccagaatgcggggtgcacgcctgagatgctgtgtgctgtgggcatatgggtcccagagtgtgtgtgtaagagagacagtctggaatttgtgtgtgtagattatgtatgtgtagaatgtgcgtgtgtgtgtgtgtgtgtgtgtgtggagcgtagggattgtgtgtggggtataagatttgtgtgagaggtgtgtctgtgaggtttgtatggtgtggggtggggggtgtgtgaagtgtgttgtgtgggcatatggactgtgcatgtgtgtgcagtgtgggtgctgggaatgtgcagtgtaaggtgtgtgtgtctttgaggtacgtatggtgtgaggtgtgtatggagcatgagaggtgtgtgcagctgtgtgtgtgtgtgtgtgcatg

SEQ ID NO: 1563061 - DNA, 4001 bp, Homo sapiens
ttcccccagcagaggcttgggagcactcaccccttgggtcctcagccccatggagcacctctcctggggtggggggtgatttaccccaggagcataatcagggggaattaaactcctctgcaaagagaaataattggcaggtgagttcctggccctccagcccagtgccccgtggtttaccctgtagactaattagcccgctacctgaggaggcccccacagccctgtgctatctggggcactggcttcctgctggtggtgaaatgcacatggcgtctactgcctgcgttgctcaactctgggtagaatcactataagtcattgcaagcaggcccgtgtcagacctggggttcccaatagtgtcactcccagatgctggttccagacactcccaaccctgaccccttggatctaggcctacatggatttctctccactgctacaaagttggtccccaggttgctttcaacaggcctggaattccaccaggagattcagccagtaagagcactagctatcctttgcaggatgtttaatgggatgcttctgatcacgcaggcatctgggttgtccctcctgtggcttcccagccctcagcttcctctgtcccatcacatgctatgctttagcgtaaatgtcaggtctgatgccttggctaaatcacaaggacaggggctatccccagaacctggcacacaggaggtgcttggcactgagtaaatgaacaaatgaatgggccttctacagtgtacagtgtagaggcacagtccgatttggtttctccattacttcccactgtcaaaggcagaaggaagaggagagactccatcaatcttagagaaagataatagatgctcaagagcatttattccatgaatgaatgaacggaggcctggatgaatgggcccagagcacaggccaattgctccccgggcaccaggggactgactgagggctgtgacatcagggaggggccagccataattaaggacatggcagagggccccaaggctggctgctctccagctgcctgctccgtcccccattcatgctggaccctggagacccagaggggatagagctgtggtccccagcctagaggagaacctaggctaggctcaagtgagcagaggcactaattggtaccaggtaccattggtgcctctgggcctccttctttagggctgggttggctccaagcctcaggggcaacccaggaggactgcaggcaagggaaggcgatgtttatgctctgtgggctggctggctcacaagaactgggtgctaggagggcccactttccccacctggtggggagctttggggcactttgcccaagcaggaagcagacccgagccataggacctggagccagggtctgacagcatctccagctggaaggacagggagggagacccagagaacagaagtgacttgcccaaggtcacacagcaatatgctaagcacggctgagcctggaacccagtcctgtcctgctgtgcctgctacagtcaccccaagtcctccccaggtgcctctcccaggcggtcccacaacgttacctaggaaataccagagtagcacccccgccgaagccagcacgagcagggccagcagcacaaacaggggcaccaggcggaggtagccccgggcttttctcttggagtcctcacaggccttgaacatcccctccggctccgcttcctcgccatcacctccgtccccctgcccgccagccacctggggggcctcggccacgggcatcctgccagggaaacagaccaaagttggaaacagcctcgcatttgcaagggagcctctgctgagcaccggtggggcacggaagcaggacttccctgccttttggagtggaagagtaacaacatcaggcggcagtgactgcaagtgggtgccgagacagctcacagaggagggaagtgcatctcaggtcagctcgcaccagagggcaggcaccagagctggactgggtctggctcaagaaccccacctttgcttcccactggcttccctatggtcagaggacagacggaggtctcagtacctaaacacccacctccctagaggctgcacccacagacagaactgaagtacatggggtgcagacttctgtagacatctgacctcttgccctcatttcccgtccacgcaaggaatgctgtttcttgctcctggttctggttcacggagcttcccaccacgcccacacagtccatgcacttagcccccgccccagaatcccctgagctggcactgcgctgggccggggacctgccttccttcacagagtaccgtctctctcacctttctgctctcaaagtcttgtggcagaggaagggaacaaaaactaatattcatttcgtgccctcatgagacatctcacacttaattttcaggtcacccagggatgtggaaccattgtcccatgttttcttcctccagcccacaccacgtgggtacttcacctgctttatctcacttaaacctccagttctgcacccattgaacagataaggaaactgagacccagagtgttctagcactaactcagtctagggcttttcctagccccattttcccagtgtgatttgaatacctgacattcactcccagacgcattttacagattaaaaaaaccctgaagcccagagaggctaagccgcttgcccaagatcacacagcagggaagtggaggttgagtctagatgtctgactccctgctttttccacgaatctaagatgcctcccataaatgagctgttaattaacaaatcatgattaaatagcaactgaatgtcgcccctctccacgctccagggttccaactctattttgagaccctttcaagcaaacatcccaatgtatttggcctttgacgcaggtttccccacagtacagagaaagcctttgacccacccaccgggagagcaaaggctccagactactgcgaagttcatctcctcttactatatccataaataccgtgtagctttaaaatgcaccccagggccgggtgccgtggctcacgcctgtaatcccaacactttgggaggctgaggtgagtggatcacctgaggtcaggagttcgagatcagcctggccaatatggtgaaaccctgtcactatgaaaaatacaaaaattagccggctgtggtggtgggcacctgtaatcccagctactcgggaggctgaggcaggagaatcacttgaacctggtcaggggaggttgcagtgagctgagatcatgccattgtactccagcctgggtgacagagcaagactctgcttgagaaaaaaaaaaacataaaaaaataaataaaatgcaccccagatgcaggcggggcttcctttgggctgtatcttgggattttacacagcgggtttccaaaaacggggctctttagtaatgctcaaagtcctcccaggtggatgtgaagggccctggcccttctcccagcttcctggctccctccagctccccttggcatcgttcccagctaagggtctttggtgtcaagccacagtgactctgttgagcggcccccatcagatacaaggaagggagggactgcaggggaccctcactgggcatgacatccccctccacaactaagctaggacattcctgcatgtggagtgggccctactggcttttatggggccaaggccagggaatggtaaatggtaaacgtccggcaacgggtgggacagccccgcccacttcctcaaatgttcacagcatccctagtgagaaacaggcaagaaacagaccagtaacagggtgctgagactcttgcatgaggccacatggcaggtttgagtccccagcgcagagctgcctgtctgtcctgggctggccacctctgactgaggtggctgtcctcaaaatctgagaaggtttgctggattgggaagatcccaggtgatgggttggctccttgcccttctttcagtccctcgtcccctccctctgccagaggagg

SEQ ID NO: 1563062 - DNA, 4001 bp, Homo sapiens
ggtgcgtgcctgtaatcccagctattcgggaggctgaggcaggagaatcacttgaaccaaggagtcggaggttacagtgaggcgagatcgcgccactgtactccagcctggcgacagagcaagactcgtctcaaaaaaaaaaaaaaaaaaaaaaaaaaaaaatcaaacaaacacaaaaaaccacccaactacaaattaggcatcctcccacttggtcttttttcagattcattttggcttaatggtgccttccccattttaaaagcggtcttttactcatagtgccccagccttttgaaggcacaggaacaggagctgggctaccaccttcaagggctgtcaaagatggtgaggtctgaagccaaaggcaagcacaccaaactccatgggggctgaatgctgtggtctgtagtgtctgtgcttctgcagagttagcctggtcccagaaagagggcatgtgcatgctggagtgaagagctgaatttgatttccaagcccctggctgggggtccagagggagggcaggggccacctcctgccggctccctgctattgttgctcagggccggccgtcttggtggtcaccagttcagtggagcccagctctgtggctggcacagggacactgtggccaggtggggtggttcctgggtcttccccaggaggaggccaggcaggagctgtggcatcagagattcccggagacagaatgatgaccttgtccaggggctctggggctgcaggcagagggggtagaggctccgtactcagtcacagccttccctccctcccctagaagactcctctggaggggcagtcctccgtcaaatgaagcccaatgcagggtggggaggggtggcacctggctgaccctgagtccagaggcctggccagtggggagctggcagggcagggagttggggagctggggctcagtctggcaaactcttcagggatttatgggggaaccaagctccgttagactcccaaagggcaggacagactcctccctcagacggggcccccttcctgcaacctgtctcttcctcacactggggtctgtcagggcagagctgttcctggctccgaccagggtctcaggggcaggactatgtctccctccccagcctgagctcctcagcgcaaactcttttccactctgtctccgtttccccttaaagcccttctctccccctcaggggccatgcatctccccctagaccgtcccgacaccccagcccctgcgccccgctcagactggttcccctacacacggaactcaccgtccttgtctccgtcgggggcctctgcggaggacgcgccgcgaagccgccgctgtcgccgcctccagctcaccagacccaccaggaccagcgccaggaccagtgccaggcccagcagcgcgggggcgccaaagagcagcccgggcaggggcagcgccgcctcgccggcccccgcgcccaccgactcctgcggctgcagcgccgtcctgggcgcagggctgctggccccggctgcttcgggaggggacagggagggaggccagggggccgaggggagggaggagcggggacggggaggggcggaggggggcgaggctggccggggaggggagggacagccggggggcggtggacaaggggagggagagaggcggcggtgagggccacgcggtgatcgcgggcccctccaggccctgcccacagggtcctttcagccctcggcgcccccgggggtcggggctctgcctgcgccctggcgatcggggccccgttctccccgcagctgccggcgccgcgcgccccgtgggtcccccttacccggtttcggccgcggcgtgcgcaggagcccgcaggccacgcagtggcggaccagcaggtcgaagcactcggccgggacgcagggcgtgggggctggcgcgtccctgccccgcaggctccggggccctcgcctcatggtgccgacgccgccgcacaagctgcggggactgaggctgagctgggctccggggccctcggggaggaagcggggggcggggggagcactctgccctgccccgcccccgcctgctgggtgggaccgagctcgcctggggcccccctttcttttctttttttttttttgagacggagtctcgctctgtcgcccaggctggagtgcaatggcgctatctcggctcactgcaagctctgcctcccgggttcaaacaattctctgcctcagcctcccgagtagctgagattgtaggcgcccactgccacgcccggctaatttttgtatttttagtagagacggggtttcaccatcttggtcagactggttttgaactcctgacctcgtgatccacctgcctcggcctcccaaagtgctaggattacaggcgtgagccaccgcacccggcctggcctctctttctacctgtggttccccaattcagcccctcaaccagcaccgcctgggtgggccctctgctgggtgctgggaggtgtctgggggcagaccagagcctcctcttgggtagggagggggatggaccccgcagccaggacacagaccctgagtggttcctctgctccgtctagccaaagcctctccatgaccccgagtgctcccctgccatctcccccaacccacctgtctcctcctctcttcctgcccttcctggacagagctggttggggatatcagacacctgctttttttttttttttttttgaaaaagagtctggctctgtgcagtggtgcaatctcggctcactgcaacctctgcctcccagattcaagcgattctcctgcctcagcctcccgagtaactgggattacaggcatgcaccaccatgcccggctaatttttgtatttttagtagaggtggggtttcaccatttggccaggctggtctcgaactcctgacctcaggtgatccgccctcctcggcctcccaaagtgctgggattataggtgtgaagccacagtgcccagcctgacatcagacacttgtaccaggcccaagtagcatgtgggtctgccctgagggaatctcacacttgtgctgatgggggaagacagcctcgcagcaagggcaccagctcacgtcatcctggaaggtgggccggaaggcttcatggagagggcgatggtgaagtgtttgccagatggactgaggtctagggagcagatgggggtgaaggccaaaggggagcaaaggcttggaggcccaaacaggaagtccagggagtgctgggaccgaaaggctggactggggccttatctagcacattagggagcttggactgtggctgggggacacgagggagccactggggctttgtgcagggaggacccaggaagatctgcctatgagtgagggaactgtgactgcagtggagggaagcccgcccacacctgctccttttctccagggctatgtgtcctctcctgctcacctctgtgtctcactgcgggcccctcctgtctatctctgctccccagtgtttggggtccccaactgtctgtcacccgtgtctctctcagactgcgtctcagaaacacacacaagcccctccgccctcctggtcacatgctaccccctccccagggccagggctggagggaactctgggagctcagggctcagcagagagcatggggttaaatgccacacatgccacccagacccctaagcactcagggctggggaagcacagtgagaggagaaactcaggggctggggagggagcctgggggcagagggagaccctgagcagcagcgagggggaggcaaacactccaggcggagggctgcaggggctaaggcttggagagatgaaaggggagcctgagctgctctgggggcaggcatggccactgccacaggggatgctgggagggaggagggagcatccgggctgcggatgggcagggcaccagtcccggggcagtacagaacctgggggtgtctgggtaggagggagattctgagctgtacctgcaagggtccctc

SEQ ID NO: 1563063 - DNA, 4001 bp, Homo sapiens
aaaaaattagccgggcgtggtggcgggcgcctgtagtcccagctactcgggaggctgaggcaggagaatggtgtgaacccgggaggcggagcttgcagtgagccgagattgtgccactacactccagcctggcacaatctttgagactctgtctcaaaaaaaaaaaaaaaaattgagactctgtctcaaaaaaaaaaaaaaaaatttaagtgcttccatttgaatgagggaaatctttttcaagggcatgacatttatatgttaccacagaaaagcagctacggaattcctatcagaaaccactctgctcaaataatggtgtttgggataagcccttaataatagtaaagaactaagaaaatataaaagtattattatcatcatcaccacgtcccacgtgggacaagccagtctgatttgtattctggatattggtgagtgtgccttcgtgcaagtgggcactacacagccctcccactacctgcctacagcaatgctgcgcgctgtagagacaatgcgctaaaagttccgctctataagaggcatttacacaacactacccaaaacacatctgtactttcgaagccaagatcactgatgattctccaaatcaagagaaaccttatactactgaaatctcccacagcgaagagagaagtaacctctattagtaaactttcacaaaatgctaatgtctatcatttctacacactttatatatatacttaactgttggtgggggcactaatgtttcattcactgattcttggcttgttttattcactatgaagaaatatctttgaccaattttgtataattttgcttaaattataatacaaatgaccaacttgaaattcaccatcctctcgttcaatctctagcactgatgctaaaaagtaataaaacagccaaaacacatgagaaagcacgaacttaaagtcccaggctggtaacctgaattccaaagaattcagaataagctggtccttaaggcgcttgactagaggtgaccgttactggacgtctttaaccactacagcgtgtctcgctggatcggatgtccagcctctacagccgaataaaccggtagtctggaactgaagggcaccggaccacgggaaggtgtaaaaacactctccgtgcccctcgtttccttgtccagagtctgagccgcctccccaagtggccgcacacgcagggccctggcgaggggtgtggaacgcattcaccttgtcacgcaggtcctgcacacaggccgggacgctgcgcagggacccgaggatccgaggcctgacgcctccctctgccaccgccagccaggggcggacgcgcctccgcgggccgggaaggtgtccccgcgccgaggccccccggagacgggaagcgaactcgacggccgggccagcccacccggaagccctcccccagctcacacctgctggcgcgtgacgcccggagccgcgcgcgcgcccgccagtgcctgcccggccgttcggggcgccccggcccgcgcgccggacgtcgccccgagtccctccccgcccctcgactcaaatctcggcggcgcccgctcccgcggagcgcgcgctcagcgccgccggccgcaccagccccgcgcgcgctcacgccccctccccggcccgctccccgccccacgcgcgctccctcgcgaggacacgcacacgccgcgcctccgctcaccgccccgggccgcgccgcgcgcccccgggggcgccctcgccgacccccggccgccccgctccgtcccggcggggcgcgggggaggggaaggacggcgcggccgccgcacctcactcaccgccgagccgtgccggctccgagtgcgcggcgtttcgctgtgaggcgaggcgcgcagtctccgcttctccgcagactatggaggcgacgtcgtaggggggactgaggggcgcaggggtcactccctcccgtttcgccttgcagcagcacggggaccccaaaaactaaaaacaaaataaacaaactttcccctccgcatccctcccccaaaaccacaacacaaacactcgggggcccgcccagagccccactccattggccgcagggaggatgcttccggctctcactggctggcttttgtgcccgtcaagctgtcgttccgcccctccaattcctcgttgctgccttcgcccctcattggttaagtgcttcccgtttaacgagctaggattggctgagctgcctgagccaatcatgtggggacacaccccctcagcatcccagaggccgcttcctcggtcgaggacccagagagactcaggggaaattagagcatgatggcggccgaggtcgcttggcgcaaccatcgtcttttttctttatttttagctcattagtgccttgcctcggcgctgtttccctaagctcctctctccaaccagtactgccctataacggaatccatacgtgccggctccttgatttatcccctccgaagtgctgagtgtgggctggttgtgcgtcattggactgtcaggatgtcactccccagtcaaatcttcaagctattggtggaacagcaagaaagcccgtccatcaacaagggctaataccattggtttgactccactgtgttatttcctggcaccttattgggcaaataggtgcgtcagatccggattcgctctgctacggttaattgtttactggggatttggggtcaactctggttgtttggccagtagttgacgataatagtgactcccttgcctattttgtgccaagtattgggctgctttcttcacaaacattatctggttaaacctgggagtaatgcagtatccagtttttatagatgggaaattaaggctggcgagagcttagaaaacttgcccaaggtcatccagatacagagtcgttggtgggcctggcatctggtcctgggtcaaactgcagagacttcactctttttattatgctttagtgcctccaccttagacgatgtacttgtcagccaacctagcatcttaaaaacgtttcatttggaactcaaagtcttcagtcagtttctagaagtgactttgttggggacttactatggaaaggttgtcattgcctccaccacatcttcctccccaggacccattcctctcccctttaaggtagacatttctgcctccttttatgcgaagcctaggcaccactcgcaacccctgaccaaccatctacaactcattctttggagagagtcctcaagagctggaaaactaggagaaatcaagtctaaagagagagacagaataaatcgtcttagaaatgaataatttattgcatgcaaagagaacagcccttcagctcctggaaatcttccaggatagttgatgctgagcaagacgtgtgctcctggctggtggccactgggttctttccctatagcagcattcatcgaagtgaatccaacatttcagccagaggagggcaggacgcttaggacccattgccagtgagcttttgcgaccgaaatgatctccaggagcacaacgctggactctagcccacattccatcttgggtaattaacattttaccgtcccaaatccccatcccctgtagcttcagtgggatcaccgcccttgtttcacttcctgatccaagctgttgtgtaacctccttggcactgctttaataataaaacaaccattgtaacatagtaacaatgctcaacacttagagcctttcagcaaatgaagccaaggtatttcataaacgtcaattaagagtaagtggcatgtattcctagggcaactgcaagaaggacagaagaaagatcgtgcgtcaaattctaatataggttgtaagaacgtgagtccttaaaattgtatgcacataccccatattagccttccagtatggggattctgaactcaaaaacacaatgaatgagaaacattcagaatctaaaaccttcctaatcttcaaagttggttgcttggacccctattttagcacttaagttggtgcttg

SEQ ID NO: 1563064 - DNA, 4001 bp, Homo sapiens
tccttgcttgttagagacagagggctttaattatcttatgtattcaaatggaaagtctttttgttaaattagcgtgaaagtcccttcatctacacacaattggcccaaagaaacaggccattttcagcacaagaggccaatccattttaagagtgaataaagcttttgaaagcaccacacaccctcttccagactgtcaaattttcaaaatggtccagcattttttccactttatcttttttaacactttcaggcccagtaagcatctcataattagattaattaaaaaggaaacaacaaaaaacactgctcccttctgatcaaaattattccatttatgcttaattagctttaatccacgtctacatatttaatgatggggatatgacaattcaacccatttgcatattttaaatgccttttctaaactatactttgtaacagatttagaagaacagtctctttctcatgccaatatgccacagcataaatcaggaggatacaaattaggaaaaaaagagaaaagaaaacaaggcctctcagagccagggatgtgctcaggggggtggagtaatttacccaggggtgggggcaatttacccgccacatcacaaactacaatcctttcagcccaccagaccgagaagcattacatcacactctcacaatgatagggggaggaggctctgagaaagcaagttttcagctttctttcctccctgctctcaggcttccagaatcctgcattaggagtaatggaatttaacttcaggcactgcacagcttcaggggttactaacaatcacatagactgctacttatacatgtgaccctaaatgaccacttcgcagtggatacatggccgaaacaggcaaccacacactcacacgatgaatttatgctgaaaaactcagttttgcatctgtgtaaaattaaacaaaaattttatttcgtgaggaatgaagaaggctaatacacagggagaactgataaagaaataatttctaatcgcggtgaatagctgttcatatctttaaaacaccatgtttacaacatagtcctaccctttggttgaatccaggatcaaaataaaagcgcatctggctgcacatttgagaacacacacagagacccagtgcaaatgagcgcgcgcagaaaggagaggggtgagccacatattgcttgggaggttttcaagcaggggaatctacaaaccccaaacctcctggtgttcacccgcccccaacctgatgtttaaaatgtattaggtcttactttaggttttacatctctctaggaaggagggcccagtttaaaaaataaaaagatagaaaaaggctttcccgttctagggcttgccctcccagatcctttgtcggccttagcagccgaaagaatgcaaacccatttatatttatgcaaatttttgcagcagatttaaggggggagggggaggtctgtgttttttaaaaacctctttctaaatagcaaatttccaattactcgcagcttcatttattgcaagatagaaacgatgatgaaaatctgcatatacattaaaagtgcaattaaatcacttcaaaatctaaatattttaccacgtcttttccatttctaaaatgccgaaccaaagtacatcacgggtctgatttacacagatccacgaaatgtctgaagccagtctccatgctagacaaatgtcgatttgcaacaccaccagtgaaaacggttagacaagatccatataaatcaattggttaaaaaaaattgaaaatatttaccaacctcataaagtgcagcagtgcttaaatccagcaaattgaggcatacaaggtagaaatggaaatgaaaaaaggtccaaaaaatgaattctttttgtctatctgtttttttgtattttaaatattcagaaaccagcagagactctgtcggccattttggcttgaactaactctctctcacacactctccctcttgctctctctctccctctctgtctctaaaggaagcagctttttgtgaccttcaaatagaggcagatcatgtgacttcgggtaggtttgtcaatcaggaaaggggagggagctggagctgagactgccttaaaggggaagcagcccttttccactcactttcatttgtgaaatgctgttatctcatactctccgcctacagacactgcatgtgaaagtggcaacagcataagggtaacagatgaacaaaacagaaaaacctttattggtttatagaaatatgctcagttgctaacgattcttacagctcctggatcttctcctggctcgcttgctagttattctctagatgtttgggcaagcacaggctggcaaactgctctgtaaaaggggctgaaacacagctctaccaaacaagaggctttagctttgaaagaatgaggtgaaatacagggcacgactgatctctaagaaactcctaaaatgtatagaaaaagactgaaagaaacgcacaaaagtataaactgaactgcaattcagaaaggttaagtgacttatcccaaatcacacagctgaacagctgcagaagagggactggtttcccaattctgaactctacacttattgttttgcctgtatgtgtgttcagtacctcctcccccaaacccaaataaaaactatgcttcagcactgcaaacggagtttctctgggctagggcaggtctgagtcatctttaatcccctcccccaccgcaggaggtagctctgcagctgagggagcctaggcactaaattaaaacctacctggtttccaccactcctaatcccttctccttcgcatatacatctccactcctacccacttaagaaacccaagctcggtttgcatctccagcccccgcggctcacaggccgtgtaacttcactgctaacagcaagtaagtaagtcccttacccatcctcccaccctgcctggcctccgttttctcattggtagccggcggagattgggcttccctagatggtatctttggtttctttcacctctgaaactctgcacttggcttctttgagtagttctgttcatcttttcctggccatctcaaaagttcgcctccaccctgggaaggcttcttgaccctcgcagtccagaccaggccctcctgttaacactcccataatatcctttactacttcttcagagcaatggtcataattgcaatttatgaaagaatgtgcttaacattagtcttccccaggagactgtaaactgtataaggaaaaacaccacgtcttcactgctctgtgaggctccacaccaaacaccacataggaggtaaataaatgaataaatcaatgacttggaccctattcagaagggctgggctgagtaggaggaaatctgccacctgaatataaaaaatgtaggggaatgagggtcacatagttcccagaaactcgcattcatctatgttttaaggacggcttcaggaaagaaagtaactaaaatggtaaaaagcgcatgaggccgggtgcggtggctcatacctgtaatcccagcactttgggaggccgaggcaggcagatcacctgaggtcgggagttcgagaccagcctgaccagcatggagaaaccccgtctctactaaaaatacaaaattagccagcgtggtggcacatgcctgtaatcccagctactagggaggctgagcttagcaggagaatcgcttgaacccgggaggcggaggttgtggtgagccgagatcgcgccattgcactccagactgggcagcaagagtgaaactccatctcaaaaaaaaaaaaaaaaaaagtgcatgagaatgccctgtgactatcgactccacctatctctataagccagaaaagggaggattccctagtgtgcttctcccataaactaggctgccatgccagccagcagacaactgatggattctagaaacccggctttccttgaaaaggaacctacgaatgcttgtaaaatcccacaacacttgttgtcatcctg

SEQ ID NO: 1563065 - DNA, 4001 bp, Homo sapiens
aaggcaggaatcaaacccagttctcccgtcctctcggccaaagaaatttccagtcaagctgtggggaggcgccaggccaaggccagcagggcccaagcctcaccccatttctaatcgaagactgagtaaccagatccgggagagggaaataggaaaaggttcccaggcagagaagaaaaaaactgtacacctgacacctgagcatcttctcatactaaaattctgtgtgtctcctcccattgcaaggtctgctttacgaccagacttaccagatcctcggcaagctcccccgctgggtgttaaacctccttaatccttcctcccacacaagcttctttccccctatgcttcacggagggatgggggtagaagcccaagaaagcaataggattgtttttctgccggaaaatcagagatgaaggacccattcccagggtacggtgggtaagaaggagaaaaagaccgtttagatacggagtagcaccagagactggcctccacccgtccccaagctgaagcttgctgtgcggggttctggtttctcctgggggagggagagggcctgccggctgtgcctcctctctgcaccctccttcccctcccagatttctggtggtcaagggcacagttcatcctccggacaggaggggaaggagtttgggggtagggccccacctcgcaggcaccttaccaagataagcagaatccactcactggcactgctctaagggtacttttttctgcccaattttccattaaaacacttaagagtataaagagctcagccgaaacggtgaactctggctcagtggcccaaggacaatctccactgacctgtcccgtcgccaaagggggtgtccaccctccacccttcaggctccacagagccagaaatagagtctattaacaattaccaccccccttccctgcacacgggaaaagaagcagaaaaacaaggcctggatccccttccttcctcggatttatttaacggtggggggagttatgtttctttggagaacaaggaagatctagcgagtagctaggatataaagaaccgggggaggcggggaagggaggaaatgcaccccacccaggagagggccactcttggaactgggagaaaaaggagctcttgggcaccccaggagcacagatggcgtgagaagaggagctggggaaagtggggtctggagggaagctggatggggaaagaaaatgctggccaggcggggagggagcggcagcaacgtggagagtccagcaaagcgggagtggggcggggtggaagaggtagtccggccggctgggtctcggggcgggccccccgcccgcacgccccccaactcactcactcgggtctccgcggcggcggggcgctctaccggccgcggggcggcttctccctccagggtggcctgagcgcggggcggaggtcgctctcctttccttcccgggcgtcgccgggccaggggaccgaagtccttttcgtcgttgagggttgggggacgaagcagggggctatggactatgactctcaataatttctttcagctcttaggaggtcgggctcggcagcggggggcccgagggcgggcgggcggactagcggcgacgacgcggggatggcggatcggagggtggttcgtgtcgcgcaacggcagacggtatgggctgtcgccggcagacggtcctgccctcctggccccgcgtcgcccgagccacggcttgcctcagccaacaacccgcaccttcccgcgccccggcccgaagtgagcaaagtcaatgaaaagtttcacccttagcaaccctgcgcacggatccggcttccccacccctgcgtgatgcgtccctccgccctgcaggggcggggccagggcccggccgggactacttcccagccagccccgcgcctcagctcgctggtatctcgcggagcagctcctgtgcccttctgtgctcgccggtcgtgcgtccggctccccgtcttcccctccctgtcacagcgccgcgccgcactcctttccttcattcccataccactctgaacttgtgcgcgtcgtgtgaggtgttctcccaggggcgctccgtgagggccggggaccacctggggccgggttgctcacgagccgggcacagtgcactctccctttagttgtgtttgggggacgagtatcgcgggggaggggagggagtcaccatgcccgccggaaaccccccgctgagtcgtccgccctgcacctgcctcggagcccatggttcggacgtttgcccgagccgtttcccggggccttccctccagctccgagcgtctggccgtgtccgcggcgatagcatcgccccgttacggcctctgcgggagggggaactgaggggacgacgcgggctctggaaacatttcggacccgtttcgggcaggcatgagtcttccgagcgccttgtgattcctcggggggctcaacgtcgaaagaaaggcgagggagactctggggcctgggccacgctgtgcgggagtaagaggagccgaggacgaggctgacggccgtgaaactagccgagtgccacaaaggaccttcccctcaccgcctctggcgctcctttccttgcagcctggagggccggctctggctctgcgcaggcgcgcgggcgcagcccctctcccaactcttgtttgctctttctggccagcgaccccagtgtggggcacgcgggagagccccacatttcttctagtcgcagtcccgccggcgtggggtggcccctgaccgtgcaacgggcgcaaggctcgcacccactacggcccctcgggcggcggagcgaggctccgcgaacccgggactgggcgcgccaggcccgcgcgctgaggccccctcccccggctctggccacgcgggctgctctgcctctgtgagtgtgcgggacacagagccagggggagggagggccgtgttctgcggtcacaggcagacaggagtgccggaagatgcagtctggagcccccgggggactgtgagtgaggtcttctccccggtccctccttagatctcccatttcccagttctcccctcccgcccacaccttttttgtcattccagacggttccggcccagcagcagccgccatccccacgttgggtggcgagatccgaaagtttccagctacgaacagtttgctttttttttttccttgatcgctttttttggcaagggcggagagcaccagtagcgtggggggtttaaatgcactttccctgaatgcaacagagaaatgccgggctggagggcaaactccaccgggacagggaggcgggagatagcctgagcgcccccccatcccccacactctgagcgtcgcaaccccgggggcacctccagggactacttgccttgtgcgtcagcgagtgacagcgtcacacacacgccccctcccgcacatgcccgctgcaccctccctttccccctccccttcccttctctcttttcccctagctcttcccaccaggcagagaggctcagccgacccacacgctcccagagcactgaaagctaaaaatatagccggtgtgttagcaacagccttcccattggtcgggggaaagggagaagcggtgtctgattgggtttaggatccagccgctaagactgggcccttgggagtgtgcgtttgcgccagcgggcacggcaagggatgctggtatttgtagtcattgattaaggcagccatgtaaataggtgggtttacatcccagttcggctaccgactgtgtgatcttgatttaatgcagcaaaacgcttgacatcaccaaacctcagtttccccatctataaaatggagctcgtgtcggggattaaatatgatgctgtatgtaaagcctggctcaaatcgttgctattcttaatttaaagattagtgtttgggccaaattgcctctgcacatcctgcatatcctgggctgagtatggtgtccactctccaatgtgaaacttctgacaatggtaaag

SEQ ID NO: 1563066 - DNA, 4001 bp, Homo sapiens
ttttatatatatgtgtgcgtgtgtgtgtgtgtatgtgtatgtgtttcaagagatgggctctccctgcgtcgtccaggctggagtacagtggcgccatcagggctcactgcagccctgacctcccagatccaataaatcctcccagctctgcctaccgagtggctgggtgcacaggcacgcaccaccacgcccggctaatttctgtatttttttttttttttttttttgtagagacggggtctcgccatgttgcccaggctggtctcgaactcctgggctcaagcgatctgcccgccttggcctcccaaagtgctgggattacaggcgggagccaccgtgcccagcccagtgataataaatattacaactgtttttttttatatggcactggccatgtaccaggcattgttctaagtatttcacatttattaaggaatttaatcttcacaacaagcccacggaggtggggaccattattgcccgccaactacaggtgaggaaacctcggcccagggaggctgcgtcacagaactgtgagtatcctgtcaccagggtgcagagaaccacggaccagcagacaggcgccaggtgccctgggcttggcttggcccgagttcccggctgccccacctacggagcaccgagatgggctgaccaggagggtttgtccgaccactgtctgctcaggttctgagagtctgtgcgggtccatttgaggttgggtcgagaaaagagcccaggcggacacgtcctgagacccgggtctgtgaggcctggccgcgggctgtccggcgctgggcccctctggccagttggccccaagacgccaagcccggggcttcgcggtcctgggagaagggacttctagcccttctcaggtgtctgtgtccggagggcccggtgagccaggaaggagctggccagagcccaggcggcgggacccagcagagtggcccagccactgccaaccacgcagtccctttaaccacgaaaactttctccctcgattggggaccccagcagacgcacattggctgcgccgtgggcatccggacccaccctctctccttacctactggctgtcatatacatctatcacaagccaaggcttcctaatggcccaagttcttgtcaatcaagagtgggaggaaagctgggcggagccaggtcggagagctacacgccagcctccttgccctccctgcctccgtgactaggcacccggaggcttcccaggggaccgaagctgggtgcggagcaccggggcggagctgtggggggctccagggactcaccgatgcgctgtcccactggagagctgaacgggttccccaggagaaagtccattgctgctaccgccgctgccaccaaccccgggaatcagctgacagcaaccgccagcgccaccgacccgtcacgtgacgcactcggaggccggcgaggaggcgtgggcggggcggtggcaccgcgaagctcgaccacaagccccgccctgagacgccagggtcccgcccccgaggcggagggcgatgacctcactgcggcttgctcggcggcggcgggcgtcacacacgatgtagggtctggggtcggggcccgggaagcgcggtcctctttaagccacgcccctgaccttttagggcgaggtctaaaggaccctttacacatttgggaaactgggtcgtagaccagggaagtgacttgggtgagttacacagaagccgagactcttagggtcatagcccttagtccttgggacctcactgtgactgcacacctaccctgggtgacagcctctctgggctgttgtctccttgtcccggtaagactcttcctgtttgatgtcaaggtctccccgctccaagatgcaccctgctcgcagcccaaattatcttaccttaaatcagaggcaagggcaaggggtttgtcatctgttgagactgagaggcaatttaatgaattgcagcgcaattccctctagcgcccaggatggcaaaaagcacagatgtagtcacgagtggggctttaatacccgtctctgccataaatttactgtgtgagccaaacatagctcccattttctctagatactggaattagatcaaggactcgtaaccatttttaaaaaatattttatttaggtcacagtctcctttgagaatttgacaaaagccatgagcctttctgaagaaaaaaggcagcgatacaattttgcttataacctcagggagtttctggggtccctgaagtacaaccgtggaccccaagctaagaatctcaaaggcctttcccagcgttgtgattctaatctcttcagccttcctggctgtgtgtggtgtgtctgctgacacctacacactagatacctatctatgggttatgaccttttcttctggcatgtactccaaaaatacaataaccatggccttagtagtctggctactgtgggtgcttaagtacttattgtgatgtttgtggtttttaaatctgaaaggctagtaaattgactgcacaaattttggatgacagaaaacctaaattaagcaaggtgtggtggctcacgcctgtaatcccaacattttgggaggctgaggcaggtggatcacctgaggtcaggcattcaaaacaagcctagccaacatggtaaaatgccgtctctactaaaaatacaaaaattagccaggtgtggtggtacacgcctgtagtcccagctacttgggaggctgaggcatgagaattgcttggacccaggggggcagagattgcagtgagctgagatcgtgccactgcactccagcctgggtgacagagtaaggctgtgtcttaaaaaaaaaaacaaacctaaattagaacttaatcacctctgtagattcacttgtttgagcagccatggggtccgatgtctttactgtacaatataaaaactgctttgaagtgtttccacaacactcatgagacctgttcacaaatgcctttgcccccacgagtctggatgtccctgggggctgggctactatttctgttttgctccccactattgtctaacccagtaactagcacatgaaagcttaaatagatctacgtttcagtaatggtatttggagtataagcggggagaaggccatttaagatgaccttcaggtcaaggcactttccatgtctttcttcacttaaccttattgcttggtcatatggagttatgtttagcatgaacttcttttggattcttccattaacctttatttatttatttttagaggcaaagtctcactatgttgcccaggctggtccttgaacttctgagctcaagtgatcctcccacctcagcctcccaaagccctgggttacaggcatgagccaccatctctggcccttcctttaagcttttaacaagttcttgtaaactttattcatggtaaaaaaaaaaaaaaaaaaaaacaaaaaaaaacaaaaacagagacaactcatatgcccccaaacaggaagtggaatcataaactccatgcaggctgggcacggtggctcacacctgtaatcacagcactttgggagacccaggcaggcagatcacgaagtcaggagatcaagaccatcctggctaacacggtgaaaccccatctctactaaaaaaatagaaaaaattagctgggcgtggtggtgggcgccgtggtgggcgcctgtagtcccagctactcgggaggctgaggcaggagaatggcgtgaacctggtaggcggagcttgcagtgagcagagattgcaccactgcactccagcctgggagacagagcgagactccgtctcaaaaaaaaaaagaaaaacaactccatgcaaactgattactatatagctattgaaacagaaatggaagtatatggatttatttatttatttatttttaaagacagagtctctgtcacccaggctggcgtacagtggtacaactgtagctcaccgtagccctgatctcctgggctcaagtgtcttcccacttcagcctctt

SEQ ID NO: 1563067 - DNA, 4001 bp, Homo sapiens
gcaggggtcctttgagagggcagttcctctccctggttcaggagcttcctggtgtgtaaatcctggactgccacctcccccttggagagcattgattacaaaacctcggaagagccaccgacagccacggtggcgattacaacacagagccgggtcgacaagctttcgtgaggtttcgcaagacactaagaatggaaaatatgtctcatcttaaagttttcccagtctggacttaagacgaaaagtcgtcatcaaaaaagatgaagagtaatttcacggtaatgcgatggtttcttcatgcaagaatgcggaacacccaaaccatcctccggagaagtgtggctgtttgggtgaaggcatgtcggttctcatggtgttggtgcccaagaatgagcacctatgagatctactgccaagcgatttccagggattcctaaccttcacttggtgatctcaggaacaacgtgtgtgtgtaaatacatataatatatatgtatgtgtatgtatatgtatgtttgtatgtgtatatttttatatatatgtgtgcgtgtgtgtgtgtgtatgtgtatgtgtttcaagagatgggctctccctgcgtcgtccaggctggagtacagtggcgccatcagggctcactgcagccctgacctcccagatccaataaatcctcccagctctgcctaccgagtggctgggtgcacaggcacgcaccaccacgcccggctaatttctgtatttttttttttttttttttttgtagagacggggtctcgccatgttgcccaggctggtctcgaactcctgggctcaagcgatctgcccgccttggcctcccaaagtgctgggattacaggcgggagccaccgtgcccagcccagtgataataaatattacaactgtttttttttatatggcactggccatgtaccaggcattgttctaagtatttcacatttattaaggaatttaatcttcacaacaagcccacggaggtggggaccattattgcccgccaactacaggtgaggaaacctcggcccagggaggctgcgtcacagaactgtgagtatcctgtcaccagggtgcagagaaccacggaccagcagacaggcgccaggtgccctgggcttggcttggcccgagttcccggctgccccacctacggagcaccgagatgggctgaccaggagggtttgtccgaccactgtctgctcaggttctgagagtctgtgcgggtccatttgaggttgggtcgagaaaagagcccaggcggacacgtcctgagacccgggtctgtgaggcctggccgcgggctgtccggcgctgggcccctctggccagttggccccaagacgccaagcccggggcttcgcggtcctgggagaagggacttctagcccttctcaggtgtctgtgtccggagggcccggtgagccaggaaggagctggccagagcccaggcggcgggacccagcagagtggcccagccactgccaaccacgcagtccctttaaccacgaaaactttctccctcgattggggaccccagcagacgcacattggctgcgccgtgggcatccggacccaccctctctccttacctactggctgtcatatacatctatcacaagccaaggcttcctaatggcccaagttcttgtcaatcaagagtgggaggaaagctgggcggagccaggtcggagagctacacgccagcctccttgccctccctgcctccgtgactaggcacccggaggcttcccaggggaccgaagctgggtgcggagcaccggggcggagctgtggggggctccagggactcaccgatgcgctgtcccactggagagctgaacgggttccccaggagaaagtccattgctgctaccgccgctgccaccaaccccgggaatcagctgacagcaaccgccagcgccaccgacccgtcacgtgacgcactcggaggccggcgaggaggcgtgggcggggcggtggcaccgcgaagctcgaccacaagccccgccctgagacgccagggtcccgcccccgaggcggagggcgatgacctcactgcggcttgctcggcggcggcgggcgtcacacacgatgtagggtctggggtcggggcccgggaagcgcggtcctctttaagccacgcccctgaccttttagggcgaggtctaaaggaccctttacacatttgggaaactgggtcgtagaccagggaagtgacttgggtgagttacacagaagccgagactcttagggtcatagcccttagtccttgggacctcactgtgactgcacacctaccctgggtgacagcctctctgggctgttgtctccttgtcccggtaagactcttcctgtttgatgtcaaggtctccccgctccaagatgcaccctgctcgcagcccaaattatcttaccttaaatcagaggcaagggcaaggggtttgtcatctgttgagactgagaggcaatttaatgaattgcagcgcaattccctctagcgcccaggatggcaaaaagcacagatgtagtcacgagtggggctttaatacccgtctctgccataaatttactgtgtgagccaaacatagctcccattttctctagatactggaattagatcaaggactcgtaaccatttttaaaaaatattttatttaggtcacagtctcctttgagaatttgacaaaagccatgagcctttctgaagaaaaaaggcagcgatacaattttgcttataacctcagggagtttctggggtccctgaagtacaaccgtggaccccaagctaagaatctcaaaggcctttcccagcgttgtgattctaatctcttcagccttcctggctgtgtgtggtgtgtctgctgacacctacacactagatacctatctatgggttatgaccttttcttctggcatgtactccaaaaatacaataaccatggccttagtagtctggctactgtgggtgcttaagtacttattgtgatgtttgtggtttttaaatctgaaaggctagtaaattgactgcacaaattttggatgacagaaaacctaaattaagcaaggtgtggtggctcacgcctgtaatcccaacattttgggaggctgaggcaggtggatcacctgaggtcaggcattcaaaacaagcctagccaacatggtaaaatgccgtctctactaaaaatacaaaaattagccaggtgtggtggtacacgcctgtagtcccagctacttgggaggctgaggcatgagaattgcttggacccaggggggcagagattgcagtgagctgagatcgtgccactgcactccagcctgggtgacagagtaaggctgtgtcttaaaaaaaaaaacaaacctaaattagaacttaatcacctctgtagattcacttgtttgagcagccatggggtccgatgtctttactgtacaatataaaaactgctttgaagtgtttccacaacactcatgagacctgttcacaaatgcctttgcccccacgagtctggatgtccctgggggctgggctactatttctgttttgctccccactattgtctaacccagtaactagcacatgaaagcttaaatagatctacgtttcagtaatggtatttggagtataagcggggagaaggccatttaagatgaccttcaggtcaaggcactttccatgtctttcttcacttaaccttattgcttggtcatatggagttatgtttagcatgaacttcttttggattcttccattaacctttatttatttatttttagaggcaaagtctcactatgttgcccaggctggtccttgaacttctgagctcaagtgatcctcccacctcagcctcccaaagccctgggttacaggcatgagccaccatctctggcccttcctttaagcttttaacaagttcttgtaaactttattcatggtaaaaaaaaaaaaaaaaaaaaacaaaaaaaaacaaaaacagagacaactcatatgc

SEQ ID NO: 1563068 - DNA, 4001 bp, Homo sapiens
agatcaatgtgccaaagttaaaaaaaaaaaaaaatccaaattatcagcagttcaaacacttgaatttcaaacttatcccactgagacagctcaaacagcaataacaatctagatctttccaggaagtgagggtagagcccctggcattcctcctgagagccctgtgttaggtcctagaagtatctggaaaagaaaaggaggggtgtaaggcatcatacaggcctagagagcttattctcaccatacctgatggggccaacgtctacaaaaataatactgaaagcacagtcagacaactaaaagagcatgggcccgatcccaatccccacccacacattaactgttggtcaactcaggtgctacaacaggagccctcaacccctgggctgtggactggcactggcccatggcctgttaggagctgagccacacagcagtagatcagcagcaggcaagtgagagaagcttcatctgtgtttactgctgttcaccatcgctcacattactgcctgagctccacctcctgtcagatcagcagcagtgttagattctcataggaacacaaacccttgtgaacagtgcatgcgagggatctaggttgcaagctccttatgaaaatctaatgcctgatgatctgtcactgtctcccatcacccccagacaggactgtctagttgcaggaaaacaagctcagggctcccactcattctacgttatagaattatttcattatatattacaatgtaataatagaaattcagtgcacaataaatgtaatgcacttgaatcatccagaaccccccccccgacccccggccacccccaacccaccatccatgtaaaaactgtgttccatgaaaccagtccctggtgccaaaaaggttggggaccaatgtgttagtgaaataacttgcgtctccaccactggcaaaaagcccaaggtctgggctcacctgccgctgctgcagttgctgctgttgctccatttgcaacttctccgtctcaaagacaacgggaagaaccaggatcataaaggaagtggtcccaatccacaaggctgccctggaaaacctgcagaggaaaatccccagagggtgagcatgaagacatgcaaacaaaacaggcaagaactacccagtaaccaaacctctcacattacatactccaatgtttttgataaacgtattctacccgctccttacaccatactcctaccagagacaggaggagcagctatggtagctgtatcatctagtgatggcggtttaacattctcctgagttcttacaaagctccttattcattaattatctccaacaatctgaaataacccccacaactcccctgccaggtaagaatccccattttacagaagaggaaactaagaaaggatagggtacaagcccaaggtcacccaacacgggtctgctgcttccaaaccccgtgttctttcacagcaccacgaccatcccatgcacgtacccagtgcctttgccctcgttccttacctgtacattttctgagccacaaagagggaaagatcaaaagtggctccggccgcggaccggaccctctccggaaacatctccgtcaggccccatagtctctccgacagggtctcatctagctgtggtggagtagacgcgggtcttagccgaaaaagcgacatccattcctggccccgctgcggcactgggagccgccgagccccactggagctagggcacccagggcccagcagggcccctaaccccgcctcccaaagcagccgcttcgctccgatcccgtaccacgcggatcccacacccacgagcgggcccgcttcccgctctgcaccccgcgaggccctagtacctcctcatcgtcgtcctcctccagctcctcctcaggcttctccgcgtcgcctttcgggagcaattcgtccggggactggggttcccctgcaccggcagcagcgacggcggcagccatgactgtaggggacaccggaagcggaaaggaggtgagcgcagccgaacggcggacagagctgcttttccgggagccgaggcgcgagccgggcgagagcggcgccctctagccccgggtcctccagtgcccgcagcgggtccggcagccctggccttatccgggcgtcggggcttcggcgggcattagcagcagctgagaggcctgtgagaggttctggggcgccaccgcagtcattctgttcagcgggtatagggtgagctcagaaacttgcttgtttttctttttttcaaatgcgttgttttaattccaggtaatagagttcaggggagaacaaagatcaaagggctgactctggcaagattctgggggcttgttttactttaagttcacagctaaggtaggagtggctgagtgaaaacaactcaagagatgatgagccactgtatttttttttttaacaaaagtttattcttaaatttacaacaggctccaagacaacactttattcgagcataggtggccaaagatgtggccgggaatagagatgtttaaagacgaatggagtcaggcccaccatcaccgcaggcccaagggacagtggaacaggtcgctttttgtaagattttagctttttgttgttgttgttgttgttggttttgttttgagacggagtctcgctctgtcgcccagactggatggagtgcagtggtgtgatcccggctcactgcaagctccgcctcccaggttcaagcgattctcctgcctcagcatgcaccaccaaccacgccccgctaattttttgtatttttagtagagacggggtttcaccatttggctaggctggttttgaactcctgacctcaagtgatctgcccgcctcggcctcccaaagtgctggcattacaggcatcagccaccgcacctggcctatatatagttatatattatatataatatatattttatgtgtgtgtatatatatacgtatatatgtatatatatgtatatatgtgtatatatgtatatatgtgtatataggtatgtgtatatatgtatatatatacatacgtatacatatatacgtattatgtatatatacatacacacatatacacacacacacacacacacacatacatatatatataaagacagggtttcactgtgttgcctaggctggtcttgaactccgagactcaagcaatccgactgcctcagcctccccaagtcctaggattacaggcctatgccactgcgccccaccttgccggatttcttaattcggcctgtgaccagggccaaagatttatcttccttgtccatctccttggcctgcttcttgggctgttttagagagacactgatccagtttcgttttcctgagccatgttttacttggtaggaataaattagtgtcttgcaggtcttttgggaaaacatcaggtaaatcttccctatgtaccaaacaaaggtaagagttaacacctaaataccaggtgctctggtgcctgtgggtgtgggtgggtgcggtgtgtcctcctttaatcttcacagcagctcactggggtaggcactgttatccccattttagaaatgaggaaactgaggcatagtacatagatttctagtaagtaggtgagctggtcagaaagtatgcagatataaatttttgtttgagtttgtgtgtttgtttttgagatggagtcttgctctgtcgcccaggctggagtgcagtggcatgatctcagctcactgcaacctcctgggctcaagcgattctcccgcctcagcctcccaagtagctgggactacaggtgtgtgccaccatgcctggctaactttttgtatttttagtagagatgggatttcaccatgtcggccaggctggtctaaaactcgtgacctcaggtgatccacccgccttggcttcccaaagtgctgggattacaggtatgagccactgctcccagcctctatcagatgctttcataatagtacagtaaatggaaatgtccttgtcccacaccctc

SEQ ID NO: 1563069 - DNA, 4001 bp, Homo sapiens
ttgtcaggttcattgccatatttctggcacccagcatgcactaaatgcctgctgagggaatgaatgaacaaccaaggtgattatgactggcctctgctctccgttctggggaagttttgattctaccaaaatcagaggcccagaagtgaggtttaaaagagatttagggactccccttctctcaccctgggaagccagaggccaaaagggaaaactcgcagcagaggggcattgttctgtgagggtctgagtttcccatctcttccaaagtaggaaattttgtcctaaaatgtttcctcagattttctcatgtctatgccacagagtagtcagcaattatgtatgacataatgaggacacaccagggaccaggcagtcctgccagcatcctaggcagggatgctaataggtgctgccattttattggcctagactgggactgtggggtcagagagaccagagctccagtggctggacttggttgttctagaacccgtgccccaagcctgatcctgtcctgcctctgtgagcactctgatggaacagcagcccagctttgcttccttgtagcactcatcactacacttggtacagcttccatctacttattcagctcttgtcttacagctcctagaaagtaagtaagcagcaggagaacacgggttttgctttgtgcattctcacggtaaatagacagtgagcaaatactttgcgaggctgaggcaggtggatcacccgaggtcagcagttcaagaccagcctggccaacatggtgaagcctggtctctactaaaaatacaaaaattagctgggcgtggtggcgcatgcctgtaatcccagctactcaggaggctgaggcaggagaatcacttgaacccgggggcggaggttgcagtgagctgagatcgcgccactgcactccagcctgggtgacagagtgagactctgcctgcaacaaaacaaacaaaaaaagaaacaagcagatgtggcctgggagtaggcctagcagtggtctgaatagcattaaaattcctaggatttaccacctcagtaactttaccaaatgcttctagaatcaggaaaagagggaaacaaccatttcttaagctcctcctttgtagtaggcacaccatagctatcaacactattcaatctcgccagcaaccccataaggcaggtgttgtaattttttaaaactgtgagtaaatggaggttcagaacaagtcacactagtgtcaggtgaccttggcaaaagaatcccaggactggctggccatcaagcccaagttaggctggcctctcaggtcctgtttcaaaaggtgagaagataaaaaggcaagactaggaacatcttacctttcacttctgcgagaaattattgcccctggattccagctaatttgttcacaaaagtaccctacttcatttacagataacaggtcagagaacctgggtgccctcaaaacccagccagggcctagggggcggcgagtggaagctgcctgggtgtgtaccgcaccgatctgggccccggtggctgcacagcttccctgagcctcagtttccctacctgtgagactggtacagcagatctcaccctaaagagctgtgggagggttcgaagaagaaaagtattaaccacagcgcctgctccctgcaggcacatggcgggcccatctccacctccctgaacccccacagcaagccccgcgggagagtatcacccccgccagggaagaggcaacaagaatgcagagcccggcccgggcgctctcccgagctcgcgggtcctccgccggccaacgttcaggaaacaagccagaaaaatgcgtgcgcttcccgcctttctgagccgccgggcgagggtcccgcagcccgccgctcacccacagccgcaccgcggatccagctccggtccttgttcccggggcggctaccgacaacccctatttccgggtccagccgcttctggcgtccccgcgtccggtgtgccagcgtctgccctccggctccggcgggtcggcgttcttaggttccgtggctcgcggattccgggagcaccccagggagtggcacttgcacgccgcggaccgcagggatccccaagccctgcacccagattcttccccgccacggagagacaatcatgacaattatcattacaatgattatgaaaactggcatgaaaacatttatgctgttaataattaaaataataaaaatgtaccgatgtgtgtatagcaggcttcttttcgatgctgtaaaaaaatctgtggaatgaatgaatgatctgtgtaaaatatatttggaagatgaattctaaaattaagttatttatttatttatttatttatttattttgagacagagttttactcttgtcgcccaggctggagtgcagtggtgtgatctcggctcactgaaacctccgcctcccaggttcaagcaattcgcctgcctcagcctcctaaatagctgggattacaggcgtgcgccaccacgcccagctaatttatatgtgtatgtatatatatgtgtgtgtatacatatatatatatatttttttttttttttttgaggcggagtctcactctgttgcccaggctgaagtgcagtggcgcaatctcggctcactgcaacctccgcctcccgggttcaagcgatgatctcgcctcagcctcccaagtagctgggactataggcgcttgccaccacgcgggctaattttttgtatttttttagtagagacggggcttcaccgtgttagccaggatggtctcgatctcctgacctcgtgatccgcccgccttggcctcccaaagatttctatatttttagtagagacgggggtttcaccgtgttaaccaggctagtcttgaactcctgaccttaggtggtccgcctccctcggcctcccaaaatgctgggattacaggtgtgactcttcacgctcggccaactaatttatttgttagagcattaggattatggaaggtttaaaatacgttttatgatcttattttaaataacatacacacattgcccttgttccttgtagattttcccaacctgctgtttttttttttttttttttaaagacagggtttcactctgtcacccaggctggagcgcagtagcgagatcacagctcactgcagcctcgatctcctggcgtcaggcgatgctctcacctcagcctccccagtagctgggaccacaggtgccagccaccaagcccagccaattaatttttttttttttggtagagatggggtctagggggagggtctcactatgttgcccagattggtctcaaactcctggcctcaagtgatcctcctgcctcggcctcccaaagtgctgggattacaggggtgagccactgtcccgggccccaacctgcctttattggaatgatctgtgtaaagtatatctggaagatgaattctaaaattaagttatttatttatctaatttattttgataaataataagtagtctggatagaggctctggaaaaagaaaagttctataggcaaattaaggtttggaaatgtcacaaattatgagtcacggtgagacttcactttcaaagcagaactcctgattccaaacccacaccttggtaggttcttcgtctccaaaatggcaactccatcttcctggttgctcagggacagagcctgggagcatcctggaccacccacaaatcctgccattactgtctttacaatacagatgctcctcaacttcagatggaactacatccacataaacccatcttaagttgaaaatattgtgactcgaaagtacgtttttgacttatggtattttcaacttactatgggcttacccagatgtagccccatcatgagtcaagaagcgtgcagaatgcatactggttttgtagttgaaaaatcctgtaggtggaaattgtcctaaatcgaagactgtatatcggagatcccctcaagtctccctgcctccctgccaccaccctg

SEQ ID NO: 1563070 - DNA, 4001 bp, Homo sapiens
tgcaagctccgtctcccgggttcacaccattctcctgcctcagcctcccaagtagctgggactacaggcacccgcctccacgcccggctaatttttttgtatttttagtagagatggggtttcaccgtgttagccaggatggtctcaatctcctgaccttgtgatccacccgcctcggcctcctaaaatgctgggattacaggcgtgagccaccacgcccggccctccctccctcttcttaattgttccagagcatcccagcaggaacaacacaccattcagttagccaaggccttctgacagacatgtaagctgctttcatcttcttgcaatgacataccatcacaaaggaccatgcctccttgtgcccatgcatgaaaggtgccctagggcctcactagggtcttgcaagcagtaaggccacctgggaggctgctagtcccatgccttagaaggtacttaaccggctttttaaccagaccccaggcgtttccatgcacaatacgatttgagaagcacagctctaggtagctacctgtagggggtcggcgggctcaggggccactctccctttatatttcagcagatactgcaagtgccctcccaaagaccctcctgccagcagtctgcatgttccccttctgcaccaactttgtgttgccggaggttgccgtttttgccaagctgacgattcctcccattttccaactatggagactgaggctgaacgaggtgtctagacaaccagcgccaggggccaatgacctctaaggcctctcccagttctgacatttaggatctggccacagcctaggtgtcttcgtaccagcctcctgatcaaccactctcactctcagtagctgcttggagcaggaaggaggaaaggttacagctcacccagcaaaggaagcagagttcctgagggagggagcaggcttagtgggctggacatctgtgagcgccactggcaaggctgctgctatgccccttcatgtccagtcatgcaggacggaggaccaggctggggacagcgcaagccttgccccgtcatgaataacaggtaacgccggagggccgagcagaggagggaaagtgctccagggccaagaagccagatgagtccccaactttgctctcaccagttgcacatcttagcctcagtttcctcccctaaaaatgggctcctaccactcactgcagaaggctgcagtgaacacttatgcacagatcagtcaacaaacagcagccaccacctgaagccttgccttgggccggtgctctgttacttttattcaacttactatagcctcacagcagctgactggcactgttattctccccatttgacaaatggggaaattgaggcccagagaggtgcagtgctctgcccttgatcgaacactgagttatagccatggaaggggtatccttggacctgcaaagtcagcattactcatctgaattctgcctctgtggagctgtgtggccctgggcaaactgcttcacctctctgagcctccactttctcagcagtgaaatgaggacgtaacacacagagtggagaggggaagccatctgcaaacagagaatactgtctgcagaccccccactgagacttcataatgccacctccaaaacacccagcccaggaagacctgtcacctgtgggcatctctgatctttcctgagctctagctgcaacatgggccaggccatgcaaagctggtagcccccagagagggaaagccacttgctctagttgacacagctggtaagtagtagagagcagagccaagcagcaagagatgaggtttcaaacctgagagcggtacaggcagcagccagggtggaggcgagggtcaggctcgagctggcaggtggctggagtggggaccaccaggagctggcagacccttggtggccaaggtctctctcctgctggcttttagctgggaggctcctttgaaggatcagtcagccttgcgatgggcctgcctctcctaaaggctcctccctcttctggatccagtcttgttgctcacctgtggactggcagcgggcacctcctctctggggaatcagggcttctcttggcggctgtggctcaggtctcctaggccatgcagtctccctgtggccagacttgccctggtctctggaattccctcttgtcattttggccagaggatgtcagcccctgcctaaaaccttccacagaattctagctccttcctgtagtttgtaacagcgccacccaatagaaatgcagtgtgagacacacttcaaattctcagttttccagtagctatgttacagaagtaaatttaataacattttatttaactcaatatatataaaatattatcatcaatcaatataaacattactgagatagtttatagtcttttttttttaattacttagtccttgaaacccagggtaaaactactttcagcacatctcaatttggatgctaaattctcagtagaaatggctaatctgtacagagatttcataaaattgatagttgaacaaagtatatccacacacccaaactgttgtacacacacttaaaagttttccaagaatgggaatgagtatctgttctgaaattaaaatagataaagacttgaaattcagttcctcagccacagcagccacatttcgagggctctgcagccacacgtggtttgtggttgacgtggtgggcatgaaggttaataaactcctggccaggcacggtggctcatgcctgtaatcccagcacgtcgggaggctgaggcaggcagattacctgaggtcaggagttagagaccagcctggacaacgtggtgaaaccctgtctctattaaaaatacaaaaattaggctgggtgcggtggctcacgcctgtaatcccagcactttggggggccgaggaaggcggatcacaaggtcaagagatcgagaccatcctggccaacatagtgaaaccccgtctctattaaaaatacaaaaatcagccaggcgtagtgacacgcacctgtagtcccagctactcccgggaggctgaggcaggagaatcacttgaacctgggaggcagaggttgcagtaagctgagatcgcgccactgaactccaacttggtgacagagcaagactctgtctcaaaaaaaaagaaaaagacaaagaaaaagaaaaagaaaaaaaaatacaaaaatcagctgggcatggtagcaggcgcctgtaatcccagctgctcaggaggctgaggcagaagaatcacttgaacccaggaggcggagtttgcagtgagccgagattgagccactgcactccggcctagatgacagagtaagactctgtctcaaagtcagtaaataaacaaacaaacaaacaaacaaactccttaaggccaggacaacactcccaatccctctgctctcctctcttcccccgctcatatcgtattgtaattgtccatcttggagtttctcagtctctgcactatagacatttggaccagatcattctttgtggtagtatggggtggggctgtcccatgcattgtaggatgtttagccgcatccccggcctctaccaaggagatgccagtagcatcccctccctgagtcctgacaaccaaaaatgtccccaggcattgctgactgccccctgggggtgcagtcatccccatcaagaacactggtctattgcggggtaagagggggtgagactaagccgattctttccatctcccaggtacctgtccagtgcctgatgcacaaaggtgcccaagcctgtacctgaacagaagaggcttactccaccctgagactcacctcttccaggaagctttccacaatgccttagcccagttagtgtttctgctgggatcccacagccccctgcgctcaccactggtgcagtcccctccaagggtaggaaatgggccttgctcactgtttattttcaaggcctagcctggaagttggtatacagacctgagaaacagggatgact

SEQ ID NO: 1563071 - DNA, 4001 bp, Homo sapiens
gctgacaaatggatagaatgtggtatatccacataatagaatattatgcagccataaaaaggaacgaagtacttaaaaaaaaaaaaaggaatgaagtactgatacaggctgcaaggggctgaaccttagaaacattctctgaagtgaaaagcatcagataccaaaggccacatagtatatgactgcatttatatgaaatgtccagcacaggcaaattcatagagaatttgagagtcagtaagtggttgccaagggataggggaagaaaggattggggagtgaccatgaaacagcctttcttttgggcatgataaaaatgttctaaaattagacagtggtgatgactatgcaactctgaacatcctaaaaattacggaaacatatactttaaaagggtgaattgtacggcatgtgaactgtatctcaacaaagctgttataaaaaaagtttgcatgagatttttaaaaatcaggtgatacaaagatgtatattaagtaaacaacagtacaattggggttcagtggggtggggggattcagaaatgacccaacagttcctttaggacaatgaaataaacccagctttacagttatggaaactgagactagatcggaaggaaaatgcgtcgcccgggccacatcactactaaatccggtgtgtcacagatctgttcaaatccagaagcctaccctcgccagcagaccaccctgctgagatgaaagggttatcacatggaggctagggagaggtgtccacccacagcccagtctggcagacagacatgcaagggaatgtctgttgggaagtgagaaaaagggctggctaactctgtggggttcaaaacaggaagcacccaacaataccaggagaatgccagggaaggcttcccggaggaggtgctgcttgagggggcttctgtaggataagtaggagttcaacagcccgcctcctcaacatccccaaggacattaagtcaggaggcctgtgagtgagtttcagctctgccacatcctagctgtgaatcctagggtcacgggcaggtgacctctccaagcctcagtctccccatctgtaaaaggggaagggggcaagaggttaggcacggttctttctaatgactctgctgaggtggatggttccttccctagggaacgggcctttgagtgggaatgccagacctcgacctctgtcccatctaacaacgactctgccaggtcaggcgtgctcagcctctgagcccatgctcccagtcccctgctaccagtcccagtcccggctttccgggcacctcccatccagctcacaccgagaagcggagtttacggagggaggttgggggttggggtgggatcctcgggtcaaattcctctccactcctcaccagtgacctccaagttcactagggctccccaacccagtgctcccagcgcccacctccccagccgacgatttccgcccccaacgcctccacttctgacgctcctcgcaactccacggctgctgcaagttaacttccacgcgccctggcgcccgcctgggggtccccgcgcgcctgggcgaggttggggactccggaggcggggacgcgccgccctcccccccagtccccccgccaacagacgctgagcgtctcccaggcgctgggtccgaagcgggaagcgtggtaacgggggcccggtggatgccgcaccccgcggaaagcgctcgggacgccgagcgggtgcggatcccagaaccgcgcgcccgcgccgcctgcctgcctcccagatcccagctcccagccccggagcccgagcagtcgcgccgggcccggaggcagccgccaggacggagggctgccaggcgcccgaggccgacccgcacggcccccagcccgcgcccccggttgcaacccgaggccaccccctgccgccccagggccacctaccgtggcgagacgcggcgaggcagccccacgcacccagcgactcccggctctccagccgccccagccggggaagggggaggtgcccgcgcgggggcggggccgcggcgacgtgacgtacgggggcgggcccgatacgcggccccgccccgccccgccccatcccctccactgcgcctcgggaccgcgaggtgagcagaggctggtcgggaagtttcccggaggctcgccccgggaaccccgccccgccgccctggaagcccctgtctgctcgctggcttacccctaggacgggcagctcaccacttctcccggtcagttctgtttaagagaagttcctttctgcctgtaagcaatgaagtggaatgatcaccaaaaagtggtgtaagaaaagaaaagtagacccgcagcggggtgtattcgtgctactgtttgtgtaaaacacagaaaaaagaaaggggtggtctgatgtatagtcatacacaccagtggttttggagggagtttttgtggatataccacattctctccatttatcagggattttgccctgacatccctccaccaccacgacatttggcaatctctgaagacatttttggttgtcataactggggaagtggagaggcgatactggcatctagtgagtagaggcctggaatgctgctaaacattctgcggtgcataggacaccctttccacccccagccctgccactacccccccaaaaaaaaccctgcaaaaaatgccgaatagcgtaaaggttgtgaagccctgatatacacaaatgaaacaaaactcctgactgataaatcttagcacagtctaagttctataacctttcagtgcttctgcttcttcatgtgtaaaattggaaaaataatagagctatctatgcatcgtatgcttgtgcattgaatacctgaagaaaaggtagggtaggcatgcaggcttacttttcattgtgaactttggttctttgttctcttttaactttctatttgccatatgtatatattatctgtttaaaataaatttctgggtcaggtgcatggctcacacctgtgattctagcactttgggaggcgaggcgggcggatcacttgaggctaggagttcaagaccagcctggccaaaatggtgaaacctcgtttctaataaaaatacgaaaatgactttgggaggccaaggtgggtggatcacatgaggtcaggagttcgagaccagccaggccaacatggcgaaaccctgtctctactaaaaatacaaaaattagccgggtgtggtggtacatgcctgtagtcccagctactcaggaggctgagacaggagaatcgcttgaacctgggaggcaagggttgcagtgagctgagattgcactgcactccagcctgggcaacaagtgagactctgtctcaaaaaaaaaaaaaaaaatgcaatcccagcactttgggaggccgatgcgggtggatcaccaggtcaggaatccaagaccagcctgaccaatatggtgaaaccctgtttctactaaaaatacaaaaattagctgggcatggtggtgcatgcctgtagtcccagctactcaggaggctgaggcagaagaatcgcttgaacccaggaggtggaggttgcagtgagccaagatcgcaccactgcactcccacctgggcgacagagtgagactccgtctcaaaaaaaaaaaaaaaaaatgagcagggcatggtgctgctcacctgtaattccccctacttgggaggctgaggcacgagaattgcttgaacccaggaggcagaggttacagtgagtgtagatcgcaccactgcactccatcctgggtgagtacacacacacacacacacacacacacacacacacacacagaaactagggcacacagatattaagtaatttgcccatggccagccacatgttcattcattggtcattcattaattcattcatgtgtccaataaatagttagtgcttgccttatggaaaatgctgggactgataaagctgcctccatggagccagccattactggtctggaaacaatacaacaacattacatagtgtt

SEQ ID NO: 1563072 - DNA, 4001 bp, Homo sapiens
ctcggctcactgcaagctctgcctcccgggttcacgccattctcctgcctcagcctcccgagtagctgggactacaggcgcctgccactacacccagctaattttttgtattttttagtagagacggggtttcaccgtgttagccaggaaggtctccatctcctgacctcgtgatctgcccgcctcggcctcccaaagtgctgggattacaggcgtgaaccaccacacccagcccagcctgctgttttttaaagtttcctggtctgtgatgctttgttacagcagctagagctaagacacccatcttatccccttcaccccactagaaactgcctcccagactgcagcctagcttcctagtgcagaccaaaaactggctagcaccaaatgcagttaccagaaaaacccccatctctcaaccaacccactagaccggctcagaaagcccaggttccaaactggtcagacctgggggttgcagaaatgacaaacttggagggaccagggtgtggcccagagctttgacctcccctgcttcctgtttctgatgcctggcacctttggccacaggaaacccctcccggctttggcgggaccgcttcacgcaggtgtggcagagctgggagacgggaaacacacctgagccagagcccgaggcctccttgccagcacacctggcagcccccaacctcccaggacctggtcacagtcaatgcagagcccccacactgaccaccatgcagggggccccacaggctcctgccacccacccaccctgccaggccccctcctcggaccccacagcatcagggcctccggcgaggctggccagcatccccaccagtcacactgcaagggcggcggcagcaagcggggagcagagacacacagcgcagtgagcctggcggcctgcacggcctcttcagggacctgaaagctaggaggcttccatctggaggctaccgaggctgcgggagtccccgcagggagcttagcacctccacaagttcctggttgtttctgggacgctagtgcccagacagctcccactccatctttcttgtaagagttttgacaaagacacacggcagcttcatgatagctcagttaaaaagaccttttaagtttgggctgcgcacagcgggggacgatctggcgtccacttcgcccatatgggaaccccgctctgctccaattgaagggcaaaggcacctacagaagagcgaagccccaggtttcagcggggccggaggggacaacgggggtccggggcctcccgctcggcctcccccagcacccccagagacccgcaggcctgggccgccttcctccactctcacctcggccggctccaccgcaggcggcaggcgggggtggctggggccctcccgacccgcgaggaccctgggactcgaggtccgacccgcgccttcccgcgaggccgccgctgaccctccccgccccagccctggggggctccgctcctcggcagcgccgctcccggcagcggtggcaggggacgcgcggggcctgctcccgccccaaacctgacccgggcctgacccccacgacctgctcccccggctccaaaacctgacccgggcctggcccccccaacgacctgccaccccggcccccaaacctgacccgggcccggcccccaacgaccctggtctaccagccccaaaccctgaatctgaccctggcctgacccccacgacctgctcccccggccccaaaacctgaacctgatccgggcctgacccccacgacctgctaccccggccccaaaacctgacccgggcctgaccccccccgcccccggcccccaccccccgactcgggctcgctccccccgccccccacagtcaccccgcggccctgacccgggcccgccccccgctcggtgctgggccccgtcctcacgcacgcgccgtccgcgccgcgcggcgtaccgaggcgaggcagcggcgctcctcagccggcctccatgcggcgcgggccctcaacggacggggcgggctggggccgcggggcggggcggggcggacgggccgagggcgccggcggccgcgtggcatgccgggaagtgtagtcccacgcgcctcctgcttggccccggcccgcaacttcggactacacttcccagggggtagcgcgcggggcccccgcccccccccccccccccggcgctcccgggtcctaaggaacatcggcgcgcactcaggagggagggttcgagtcccgccgcggtcacggccttgcgaggcgcgcccacgttctctggtcgcagctcccaagctgtgaaatggggacaatgctcgcacggcgtccacaggatggttttcagtcgaatgatattgaaatgtaactgttctgtgagccgtcagtcccgcacgaaagggacagccgatagtgggacgcgaggagccgagaacacgggatcagggaacgcgctgccatggcctcggcctggcccccttccctctggggatcggcctagtccgtcctccgggggtcggcccagagcggtccccgacccgggactcatgcctcagcgggacctcggccttgccgcaggttggggcaccccgggaaggtcgggccccaggggccccgcggccagcctagcggacggagaaccgggaccaggtgggagtcttagggcgggccgacccccggcctcacggacccggacgctcagtcacttccgatcgtccggaggcctccagggggacccggctggccgcagccacgccgacgctagactctcgctgtgcgtgttcggccccgagggcagggggagacggccaggccccacccgccgcgcccgtcctgcccgggcgcccggccccctcgctgtacccagcctctaccggggcggccgggacccggcggccaagttgctgcgcgctgcgggcaccggcgcggacgggggcccgggcgcttcgccgccgcatgcagacgactcgctgcccgcaagctgctgcgccgtccgcctgccccgctctcctgcaatggtccggccgcgcatcccgggcccacgacttccttcctcctccacgaccccgggttcttggctgacctggcgctggcgctgggcttagtgcaggcgtgggcctggcaatggtttgcctgcgggctgcatgcgcggaccccacagccagctccccgaagctctgcgcccacctctacggccctgccccagccaaaggatcaggttcttggagcggggcctgccctggggccaggactccagtcaccgggggagggctgctgtgtcttcctgccaggcactgatgagttagttggggaaaggggccaggtggggccagctggggaaccatttagaagagggaggagggcgcacctctctactcgagtgccctaggactagctcctctctggagccacggggaggacctcagtgagggctgccccacgcaggaaccttcagcgagcctggaaggctgacccagcaggcctggggttgggggagtccaacgcagcgcccaggcttggtctgggtctgcctgaggccgtccaccaggactccgtgctggggagcctgcttccttccaggctccaggaagggaggccccggccccagccccaggttctgaggagctgccccggctcgggtggcctgcaggggtcccctcaggtccctggtcctgagtctgcaggtggtcctcccggggtggggcggatgggtgaaaatgcctgtccacacggcagcaggctgggctggctgcccactgagcattcttacacaagaggccccgccccctcctacagcttcctggtccccaaatggccaggcctggccttagagaggcctctgtcctccttggtgaaggacactcactttgggccctagggcctctggttcacatcctctccattgattctcattgttcgctgcctttgtggtcattctgcctttccgaccatctcggccacatcctcacaggagggcagcgggtggcagtcgccccggc

SEQ ID NO: 1563073 - DNA, 4001 bp, Homo sapiens
ttgtatttttagtagcaacggggtttcgccatgttggccaggtgaactcctgacctcaggtgatccgcccccttcggcctcccaaaatgctgggattacaggtgtgagccactgcatccggcccctaatgtcttttttggggaggtgggggcagggtcttgctctgtcacccaggctggagtgcagtggctcgatcatagctccttgcaacctcaaactcccgggctcaaatgattctcctgcctcagtctctgggactgagtaactgggactacaggtgtacgccaccacgcccagctaatttttttcttttttattttgtaaaaatgggctcttggccaggtgcggtggctcacgcctataatcccagcactttgggaggctgaggcaggcagatcacttgaggccaggaattcaagaccagcctgcccaacatgatgaaaccctgtctctactaaaactataaaaattagctgggcgtggtgcgcatgcctgtaatcccagctactcaagaggctggggcaagagaattgcttgaacccaggaggtggaggttgcagtggagctaagatcgccccgctgcactccagcctgggcaacagtgtgtctcaaaaaaaaaaaaaaaaaaaaaaaaggctcttgcagtgttacccaggctggttttgaactcctgaactcctgacctcaagtaatcctcctccttccctcaaagtgctgggattacaggtgtgaagcatcatacccttctgaaaccctggtgtctttctttctttttttttttttttttttgagacagaatctcggtctatcacccaggctggagtgcagtggcgcgatctcggctcactgcaacctctgcctcccggattcaagcaattctcctgccgcagcctcccaaatagctgggattacaggcatgtgccaccatgcccggataatttttttgtatttttggtagagacgaggtttcaccatatgggccaggctggtctcgaactcctgaccttgtgatccacccacctcgacctcccaaagtgctgggattacaggcttgagccaccgcgcccggccgccctggtatcttacttgtgcaagggttctcctttctgggtgcccctaaggccaccaacatccatgccctggagtggagctgggtcaggagaatcacttaaagatggcctccccactcacacagagccccagggggagggtggggggtgggaggaacccaacatcccaaaacacctgcagcttttggtgcccccaggtcacctgcccacatccatcctcacctgctgtgttccaggggatcaggcttttgtggccaatcttggtggagagctgaggaatttcacctcctcccctgggacagccagggccaaggctcctccatcatcagacctggagaagggaatgcggtgggggcgacagcaaggcacggtggggagagggctacccactggtccttccgtggccccagggtctctgatcctccccgggcggtcgtcctcccgactcctggtggtggaagaggggcgcatcggccccgcccgtcctgggcgtttctctcctggtctggccacataaaggagcgtcgcctagcaggagaacgccgctcattttcctgggggtgggtagggggctctactccacgtgcccctcgctgctcccgtttcctcccctacccacaaccaataggcagaatccttctctaaaatgcacttgagatgtggatataataatcaaaaccttaagcagctacacatgccccacccagagaatggacccgggaccctctccatccaggcattcagccagttcctccccggatccctcgacccctacccctcctgtaggcctccccctaccagctcctcttttctgaggcccagtgctaaccttggctgggtttccacgcacaggggctgccggggtgggagtgccagggtcatggcctctttattttaacaatgaatcagagcgatgctcgggaggtggaaggccacgcccctgccacgctcgcataggctctctctgggtgcctcatttacatgaagactgtgggactctgtgggactggacaaaccagaacaaggggcggggcggaggcaggcggggcgcagatacctctgagagcgggactcactgcacgtttagcctgggccgcctgcagcccttgcccgctgggggtccccagggagccctggagagggctggcactggcggatctggctccttctgacctctttcccgttggttcattctgccgacagtccgctgggctggctttagcacagaccttggactagagtcttaacctctctgtcatgacagttttcttaccgaggaggcggaggttgcagtgagctgagatagcgccattgcactccagcctgggcgacagagcaaaactcttgtataaaaaagaaaaaaaaaatagcctggcgtggtggtgtgcgcctgtagtctcagctactcagaaggctgaggcaggagcatcgcttgaacccgggaggcggaggttgcagtgagccgaaatcacaccactgcactccagcctgggcaacagagtgagactccgccttaaaaaaaaaaaaaaaaaaaaaaaaaaaaacttgtttcccatcttttttccttttggttgatatttgccaattgtggcgactgggatgggaggaggagggcgaaattcactggacagggaggaaggttgcagcaggagtccaggagagatgggtgcagtgatgagacagggaaggtaaactagattcagacacttgtaggcaggtgagcttggcactagggtcacagaaatcttagattattttgagagttgttggggatcacctgggggttggattcagacaggattggctgagaacctacattgacacaagcttgtgcccagagcagaaacagaaatgactaagatacaatttctcactcagaaagctctggtctggttcgagggacaaaccaggattcactgtgttcagtgtttaaaagaaggaaacacctactatcatgggaggtcaggtggagaaaggaggaaggcagagaaggcttctccttggaggtggctcaaaggtgaggagatcgagaaaggctgagaacagcctgcaaacctctgaaggtggctgggggaggccaatgctagctcagaacaaggcgggcatttctagcagtcctcacaagggagcaggcagtgagctctccaagctcaggaggaactgaagcccctcaccagagccacctgcaagccaaaggaaggtcaatggctcaaacctgggggcgtcaaggtcgtcagcaccactgggaccttggaaaggatggacgctgaggcttatatgaccccagaacacctgcccccacagttcctcacctcacccccctggggagagctcaggccaccccaaaacagatcgtaccaaaagaagttttattttaatgggctgagcccagcctcaggtaactatggccacagctcatcatgtactagcacagggcctgaccttggtgtgaaaaccgaggatggataaatgtctgctgtgactttagctccacacagatggatcccctcatgacagccctttatatatttggcttctgtgaaataatctgctgattataccccaacacccattctctcattttttttttttttttttttttgagacagattctcgctcagttgcccaggctggagtgcagtggcgcgatctctgctcactgcaagctccgcctcccgggttcatgccattctcctgcctcagcctcccaagtagctgggactacaggtgcccgccaccacgcccaactaattttttgtatttttagtagagacggggtttcaccgtgttagccaggacggtcttgatctcctgacctcgtgatctgcccgccttggcctcccaaaatgctgggattacaggtgtgagccactgcgcctggcctcattctctcatttttgagatggagtcttgctgttgtcacccaggccg

SEQ ID NO: 1563074 - DNA, 4001 bp, Homo sapiens
cagccaggatgaactcaatgaacactattaatggtgatcatagcctcctctctgctctaaaagctttcatggctctctattgcccctgtccaagccctagcagtgaggccctcctccccagaccccttccctacgctcttgctacttctcaaacatgaccacccgtttctgtccacactgctgtctcctcgctagtccatctccacctgacaaggccctataatcacaggaggacacctccctcaggaaggctgctgccaccagcagggatgtgctgtccatcttccaagcaccccacacgctgcttccggcagccttacccttgctcagcacgtgctgcccccaggacaggcaactgtgaaagaaagctggaacggacctggatacaaattctggcttagcctgggactcactgagttacctggggcatgacacttcacctcgccacaccttggtttcctcatctgtttgattaagatgttactaccaaccttcaaggatcaaatctggtaacgtgaaagcacccggctgagggccgggcaggcacccggtgggcaaggcaacttctctcctcctggccccaggacactgactcagctcctccccccacatcccttctgctcctgacagaaaaggggaggctgctgacgacaggaagggccagcagggaggtggcaggatgtccaggaggacgccgaggaagtccaggccatcacactcacagggcaggggctaggcgtgccacgccccccagcagcccagcccgcccccagcagcccacccactcctccgcagggtctccactcccctgaaagaggcctactgccgcctgtgcacacacacaccctgctcatcctcccccaggagggccactgggctgtcagagcctccctgaagcactagccagaaaccaaaagcagccccacccctcccttcccgaacatcacggtcagtgggccagaaggacagggaaaggagctactccttctcttatacttggggtgacctcgggcaactcaccagcgcccctccccaagcctcagtttatctggctgtgaagtggggagtccagcgaacccagctgtgaggctcaatatgctaactatggcacaggtaattgatggggcttgggtacagctcacccccatgagaaaggcaaacccctgccatcatgccccctactcagactcgcaggcttgtcccaaggccccaggaccgctgcaaagtgcaagcccaggaagacgtggtatcccgctgcttcagacgtcccgggactgcctcccgggctgtgggtggggcggtccggccacttctcgcccacccgacctcgggccagcggccacacggagggctggcttgcccaggcccgggtcagcgcgacccatccgcacccacgagcgcccctccccagcccaggcccacctccgctcctccctggggcccctggccgccttggggaatcgggtcttcgtctagggggctggaggggaggtgggaaagggtcgccccgaatccacccgtgactggtgccgcaagtgtgaggagggggcgcccgagacgggtcgttccgtcccctcagggtcgcctgggctcccgggggcgagtgggcgagggaaggcgaggaggagcctgcgggaagggtgaggccggtctggccgaaagcgcttcggaggtggccccgtcttccggcccagccctcctctcgccttcgggaaatgaggagggggctgccccggaggggagaggctgggctctgcctcgggtcgtcgcccttctcccggcctcgggcgcgggcggctgactggggcactcaccgtcatggcggcgccccagggcggcgggagcaggaggcaggaacgtggacgcggctctcgggccgggctccgcggcgcgggaaccccgccgccgccgccgccgccgcccctctcggccgcccgccgccgcgcctccggcccttcctttccccgacgctgccccggccccttccatccgcccataaaactttttttttttttttttcaaacttcctgggaggacccgagcgggccaatgggtggcggggaagccgagacaaacagcggcgggggccgcggcgggccaatggaagcgcgagacgggccgggggcgggacctgccgcaacgggacgggcgcgctagggcggcggggcggcgggacggcgggacggcggggtgggcggatggggccgcagggaagggagggcggtggcggccggagggcgggcgggcccgggccgcgggcgcgctgggaggaaggaagggcccagggtgcaggtgactccggcaatggcgcgggggcggaggatgcgggcggccgggcgtgggcacgactcgcccaggctgcgcttcccgacccggccccggagcgatgggtccgctagggctcggcgccgtgatttggcggggaccggggcaaagcacccagtactaacgactcagcgggtcccactcgccaagagtcgattttcgtcctcaccacagacttgggagggaggtcttattttgctaatgagaaaacggaggctcagaggggtgagccgatttgcccgaggtcacacaggaagaggcggaattcctagcgagtaagctggacacaaagtgagttcttggatggcagggtctctcccaaatgcccactcctcacaaatgggtcttttttggtttggggtttttcaggtgtgggcgtgcacccgttgctcaggttcccagaacgctgggccgtttgttagatgctcttttcctgcaggtgagtagggaccgtggtggaattggttgctaaatgcactaggaagttcgtgtggcacggggattccagcctagtgttaccttaagcaaggcacctctcggtgctcaatttcactctctgtaaaatggggtaatgctgttacctcatgaggttgctggaaggattaagtgttaattcaagtaaggcacctaggacaacctctttatccctcattagctatccttaggcaaggaggcagggaagcttggaataattggcatttcaattattctgtcatcttgatttggggttcaaaaattattgcccttgccgggcgcggtggttcaggtctgtaatcccaacactttgggaggctgaggtgggtggatcattgagatcaggagttcaagagcagactggccaacatggtgaaaccccgtctctactaaaaatacaaaaattagccgggcgtggtgtcaggcgcctgtaatccagctatgtaaaaggctgaggcaggagaatcgcttgaacccgggaggcagaggttacagtgagcagagattgtgccactgcactccaccttgggagacggagcgagactccctctcaaaaaaaaaaattattgcttttataattactgttcccattttgcagataaagaaatggaggcccagggagctgaagttctttcccagcatttgctgccaggagtctctccaccatgaggaatgaggccaaggttaagtccatctaactctagaaactggccttctggcaccccgggctgagttttctcaccctacccttgcacctcactcaggcagtcagtccttgggagagtgaatgaacacgcaggagacctcacctaccaccagggtcctggtccagtgccctgggcacctaacagcaccagcctcctccaggcttttctggcccctgcgactcctcctagtacccgcaacacagtgaccagaccacttccctgctcaaagttcttccacacatcaccaatgctgacagatcagtgctacattcctcttctaggcagtcaggaaccatcacaacctggctcctgcctgtcatcctggccttccagattctcatttgacaggctggagagacacatactttggtcaattttgcaaaatacaataagtaaataaagagatgcacagcactggaggctgggcgcggtggtttatgcctgtaatctcagcactttaggaggccgaggcgggtggatcacctgaggtcagga

SEQ ID NO: 1563075 - DNA, 4001 bp, Homo sapiens
tgcttggtggcttcggggatgtgcacggtgtcaaacggggctgccacagcacacgtcccgcccttgtacttgccgagccgacagcccacggtgttatcctccccatccaccccgacgccaaccagaaactcacacttattacgatactcagtctgcagggagagagagctgcaccttaccctggctgcccagcgcttgggcctggaaaccctgatttccccacaggggctggcagtcaaacaagaggaacagctgacaactatgtgatgttaccagaagaaaacacaaagcagggagatcaacaggaagggtgagcaaaagcaaagtttttcaaaacccaggataggggtttgtggccaccgaagtctagtctgacctgctggggtgatggcctgaccccctccagcgggcagcaggccttgttgtgcttgtgcctctgctcgagcagccagggcagcaaggcacggttggtgctcccgatttccctgtaagaggagcagatcggtggttggactccacctactgcccccgacccatgccaggccactccccaaatgtccaggctcctgacccctcctttgggatgtcattgtgcccactgtgacgtgggtgtcttgctggctagctcccaaaggggccgccagatcctgtgctgggcctcccaactggtgcatggacaggctgaggaagcacaggccgggcagagccctggccaagaggggcgtcttgcgcccacactcacttggcaagtttctgcagcacctgctcgcactccagctgcttccgctcaagctgctcagcatagggcactgtccatagaggggtcaccacgtcggccactcgtgttactggtggctcactctcaccctcctgtcgcctcctcctggccatggggtcggccttgggccgggccaggcgcacactgagtgggcggcctttccagagggcaccatgcaaaacgcgcagggccttgtccctctctgcagcgctgcggaatgtcacaaaggcgcagggtggttgcccaaagagtttggttttgtggggctgcagaccaaagcggcccaggaagcgccggacgtcgctgaagctggcgtggcgaggcacgttctgcagctccagtttaaagatctcagaggtaaacaagtcatccctgatgtagctgtagagcccgggctgaggccccggccctgtagccgccccagcgccctctttctccacctcctccagggctgccggggctgcagggggcaccgagacggtagggcagctcagggcactgctgctctcctggccacagctctccatgggcttcgggccctgtgtggggacagatggggtgctagggtgaggactaggccctgggggcctggccccccaagcttccttatgggacacccagacctccgtcggtgcactctgcactcagccctgcccctcccccagtctaccctcccgaccccattcccgtctcctttcctcccctatcgcacctgcctcgtccccacctattctctggcaggtttcctgacccaccccgcctcctcccaccccatccccgtctctacccagcgtctccccgcactctacctcgttgtcgaggttctcactcatcgcccaggcggttctccgcctagaccagggacgccatgggggccgcctggccacctcgtcctgggcctgtcacaagggaagtggcctgtcacaagggaagtgctcagaggggaggtgctcacagagccggtgcaacgccgcgaggtcgccgccacccccggcttcgccccaggcggggcgggactcgaacctgcgatgctcaggtccgggtctcaggcttggggctgtaccgcccgcccgccaggggcccgcgccggccgctcgcttcgccagccactcttagtccgccagcgcgtgcggcggaggccgagcgtctctatgatcctggcttctggcaacgtcatcgtcacgcgccggatccaacccccaaccactttagccagctctagaggcgcgcgtggccgggacggaagtgcgcgcgggtgtcgccgggagtgcgcgctcctctggctgacgggcgggccgggcatgcgccgcgggcgttttggcgggaagcgcggggcgggccggacaatgagagtgtccgcctcctgagccaataaagctgtactggttttgaatcgcggcgcgtttcccgccgctggggtcaggggtcgaggttcgggtcgtggggcggagggaagagcgggcgggcgggaggcgccggcgccagacgcggagggaaggagctacgagtagccgccgagaggccgcggagccagcgacgaccgacccagccgagccgccgccgccgccgcgcccccatggcggccgccaaggtgccgccgggcccaagcggggacagggtgggcgggcggggccggggccgttatcagcggccacgtgggcggcccgcgccgccgccaccaacctccgccggcctgcaggctcggccgtctgctgggcctcggtggcgcggagtcggggcgcgtggggtttgggggctcgaggcctgcggagttggggcgtttgggggtgcaggctctgcagaggcctgggggctgcagggcccccgcgtgaccttggggtgggttggggagcggccgtcgccacgcgggacggccccagcctccaggaactggtgcgggcggcgggtttcctccggctcggcccacttggggctccccactagtacggtgcatttattctttccgtcgcccacgcagcacttcattcattcggttcttacgtctggaaccgccactggcctctgtggcagaagctcgcgttccagcgtggggcacaggtcctagatgcgccgacccaggcggcggctttgttggctgcggtgtctggttgagtgcgggccgctgcagagccgcagtgctgtggggaacagtgaagagcagcgaaaagcttatgttttcttttccagtttgagtctagtggtgaagtcttgggtctcttacggacttctgggtgaccaaggcatgtgttctggaagactcgaacctaaaatatgattattggtgctctcttatcctctaaattgggccaggatttcatgactttcaccggtacaatttatctagttattaacttagttttctgaactgtgaaaaaattgctggcagagctgtgaatccagtgtaaatactagcagtcctgtagcgacttttttcgttttactaagcaagagcacaactatttcctaattagtcaaaactgaaagagttacattttgctttaaagtaatatttcaaaatctatttcgacccatcattgtgtcctttgatcttcacacagcaggtatcatctgcattttatggatgaggaagaaactgatgctcaaagagatgaggcagtttctgccaggccactctctgcaagtgttggcggcttgtagggtcccccatcagtctgtgcacagatctgattgatgtctgtgaatctgggggaggggccccaagttctggtgtctcactctgtgctcacatggagctgggcataaacgcagagctttcctagtgtggaagagtgggcctaatttcttgctttggggttgggcccatccttgtatctgaagtcccttcattgtcggagggctgaccactgcaggcactggttgggctctggttgtgagccagatccataggccagcagtgtaacctctttgtatctccacaggacactcatgaggaccatgatacttccactgagaatacagacgagtccaaccatgaccctcagtttgagccaatagtttctcttcctgagcaagaaattaaaacactggaagaagatgaagaggaactttttaaaatgtaagtaggctgatgtcccagaaataggactctttaaggttgaggttacaacttttatgggtgtccaggttttggcctgacttttaatcagactgaggctgcttaaagaaagggcctaaagttggtgactaatcccatgtggaaatt

SEQ ID NO: 1563076 - DNA, 4001 bp, Homo sapiens
ctaagacttagattctaagtgatcagatataaagataattaaaattttcgatattttgtaagagctgtaccacctagtttatgacctattttctaccttttcgattgtaacaaaatattcacccaaatattggaaaggccaactttagccctacaccaccttagcaaactacacaggtgcagaccctgtatgagaaagctggttcgtttaggtaggctgaatgtaatgaaagacagggcaaatgactgctgaagaaggcttcatatagtacccaaaacaacagaaatttgatgacaaagctttgtcaaaactacaccaccacacgcgaaagaccacccctatcccagatcaaccagactaatgtctacctaacagtctaaagcccctggtatagcatcttccataatcagggctaaacgtgctccaggctcctctccttccatctccatctggccagaaccagcccacacttgcaggcctctgtgattctgcttgcactgctgactgtgccgggagggccgcctccacctccaagtctctgcttagtgacatcctactcttctttcgactcagctgagcacctccatctctaggatgctttcctccactctcccttcctcacaactatttctgcttatggtccgcctacccttctctttggcacttactgtacctaccataatagctatggttattaacaatataaactaatagccactactgttttctgcgtacctcgtatgtgctgagcacgtactcatcagtatgtactatgtcatctaatccctccagtcaccccgtgaggcaggtgttagccgaattttacaggggacggcttaattcacttgcccaaggtcaggagccaaagatggcgcaaagcagagctccacaaacgtgactctgtgaatgaggcctcccgcggggagccacacaggtgaagttaaacaagtgctcatttcagcgccgggcccgaggaatgctaagcacccgtggggctccgtttagatgccggaagaaatgcaaatgctcctggagaaaactttgtcctccagcgagcggagaacacaggagacgctgaacaagcagacccgccgcgcggcagttgtccagtctgctgagtggggaggacaaggacctcccaccgggcggccacagcgtgtgcagaggtcaggcccccggcccggcgatcccagctcccctcaccagtgtccacggtctcacaggtgaatgtggacgccgcagatccgtgagaaacccttccctccccaccccaccccggcccgccggcttctcactgtgggtgggcgcgcgtgggtggagaggggcgcggaactgctcccaggtagtcggagctgcagtcgcgcacacctccgactacacaggtggagggcgaggagcctccgaaccaaagtcagaggacggggtatcctcctgccgacccgcgcgcaaccagcggcccagggagggaggagacgtgcacaacgccacgacggacggggacaggtttccggggacacattcgctcggcggggggcgggagcctcggacgcctcacctctccgcctcagcagcagcgcggccacggcgctgtccacgccgccggacagggcgcacacgacgtgccgcaaggcctgcatccgccagtcgcccaacttcgccagctgcagctaccgccgcttccgcgccttgccggaagtcccgccccggccgtagggtccgcgctagtggcccggccggaagctgcggcagcttacccgcgttccgtccggccttcccctgtcccgcggcgggttcccctgtctccggcctgcgctcacccctgaggctccaccgacccgcggggcgccgagactctgtcgggccgcgaggggctggctttttttttgagccgccgccttgccctccccacccgcgccccggcctcactgctcttcttctgcgctgtaaaccaaaaataaaattctaagccccccagccagccattggaggcctcctctcggccaagggcgtcctagagggaacctgaaccgcgagttcgggctctgatgggaaaggccgggtgggacccgcctcactagaccctcctcctccctttggaattcggaccagcattaacgtcaaaacagacttaagactgtctaggcggactctccgtagcaataggataccgacatgacagatggcaggccctgaaagatatcgaagtattttacagtattttaatttaatttaatttttaattaattaaatttttttgagatggagttttgctctgtcgcaggctggagtgtagtgggcgcgacctcggctcactgcaaccttcacctccaagattcaagcgattctcctgcctcagcctccctagtagctgcgattacaggcgcccgccaccaagcccagctaatttttgtatttttagtagagacggggtttcaccgtatttgccaggctggtctctcactcctgacctcaagggatccgcccacctcagcctcccaaagtggcgggattacaggtgtgagtcactgcccccggcccagaaaatctttgaatccacctatgacctggaagccccaccccaccttcgagttgtcccacctttccggaaccaatgttacatcttacatgtattgatttatggcttatgtctccctaaaacgtacgaaaccaaaagctgtagcaccaccagtttgagcacgtgttctcaggatctcctgggactatgacatgaataaatatcttcaaatcttttacagtttgactccaagcatactcagcactcaatccttaatgtctgtgaggtgtgttggacaggggttttgtgttctgtccactcctactccatgcccagaaaagcccctggcccagggcaggtgcttcataacctcgctgaataaaggaaggaggagagaatggaggtcatcccccaggggtgatattcaagctgagttcttctctacgagttagcatctagacaaggtctacctaaagcacagggagactctgaacgaaaaagatgttcatttgtgaatagggcattgcaatgggaatatgcatgccacaataagctatgtgggtattcagggaagtaaaggaagacaaaggtttttattttatttatttatttttttgagacagtctcacttggtcactaggctggagtgcagtggcgtgatcttagctcactgcaacctccgcctcccgggtttaagcgattctcctgcctcagcctccggagtagctgggattacaggcacatgccaccacacccagctaatttttgtatttttagtagagacggcatttcaccatgttggccaggatggtcttgatctcctgaccttgtgatccgcccgcctcggcctcccaaagtgctgggattacacgcgtgagccacagtgcccggcctaggaagacaaaggtttttaaagggaaaatgaggatcacatcattgttttgagataattctttggctacaaagatcaataacaagggtgacagcactccagggttggacaagcagttgctgggcagatgtccttgcaacagaagttttttgttttttttttttttttgaggaaggttacgatagcctttgtgtaaagttgtggtttttgcagtcttttgtgatagttgttattattaggcacatgtgcatgagaaccctcccttgtggtatgaacccaaagtacctgagacaggtttcaatttagaaagtttattttgccaaggttaaggacatgccagtgacacagcctcaggatgatgtcctgaggatatgtgcccaaggtggtcgaggcacagcttgctttgatacatattagggagacacaggacatcaattaatacgtgtaagatgtacactggttctgtctggaaaggcgcaacaactgggggtggtgggcagctcgcaggtcataggtagataagagataaactgttgcattcctttgggtctttgatcagcctttcactgaatacacaatctccatgtgagaggc

SEQ ID NO: 1563077 - DNA, 4001 bp, Homo sapiens
ccgggcgcggtggcaggcgcctgtagtcccagctactcgggaggctgaggcaggagaatggcgtgaacccgggaagcggagcttgcagtgagccgagattgcgccactgcagtccgcagtccggcctgggcgacagagcgagactccgtctcaaaaaaaaaaaaaaaaaaaaaaaaaagaaaacacaaataagccaggaacagtggctcatgcctgtaatcccagcactttgggaggctgaggtgggaggatcgcttgagcccaggagttctgcaggagactgcagtgagctatgattgcatcactgcactccagcctgcataccagagtgagaccctgtctcaaacaaacaaacaaaaacaagaaaggaaggaaggaaggggaagaaagaaaaaaagagaaagagaaaggaaagaaggaaggaaggaaagaaagaaagaaagagaaagaagaaagagaaagaaggggtgggaaggggaggggagggagggaggaaggaaggacggaagaaaggaagaaagcaagctaaagtgaaaagtaggctccctccctgcgagcccaagcccctcaccccagctggagaacccgctgtgaatactttctggtagatccagccagacatcctgcctcacgccaggcacaagtgtgtacagacgacaggacacagcacatgtgcacacacacactcccaggaaagaaagtggtcctcggggcacagtggagaaggcaggctgggatcagcctgcacgggttctggccctggctccaccgcgccagctgcgtgactctggacaaaggcttctttggcaagcctcagtttcgccgaacctccctgtggggctgccagcagccaggtggagactcaggggccgccttcccctgctgggctgaggctggctctcctgtccttgccacacggcccctttcaccgccagtggaaacctgcctcaggctgccctgtcccgggccccaccgactccacagagacgccgggcctcgcccactgttctggcagtaggccttcatgggcagggcttgctgtgtgccaggcaagctgggcggctgcttcctgtacaccacctcccctgatatcctcgccctgcctgagcccattctgggacagcctcaagtcctgtctctcctgccatccagcccagggcacgctgctggtatcccgtagccctggcccctggcaggctggccagaggggctccaggcccacgccaggccatggcctctggcagctgccctggccagcagcgcgttcacagcaggaagcccccgcttctcctacctgggctccggcttctttgcaaggggtaggggaagcagacaggtcccagaggctgctcggctcacagtaagacccgtctaggctgcaacgcacctgagccccgcactgggaatcgagggccagggggcctctaaccggctttgggcaaaataaacttccccgatctggactgttctccactacgaaacggggtgtctcggagatcaagagcccgaggtctcccagatattctgagaccctcaagggagttccgcctgggattgcccatccgcggaatgggcaggagagggagcgtcggccactcctgggaccgcgcttcctgcaggagaagccacgcggccaagggctgggcgtggcagggttgtccaagttttccctcccgaacccccagccggaggcggcccgcgctggaaccccggccgcggaggcccagactctgctgcccgccgccccctgacccggtagccgagccccaagtgctgccccgggtcgccccctcgggtgtccagtctgcggctccggcctcagtttccctctgtcccgcggcgctgccaagagtcgcagccatgcgggcccccacttcccgctgccccctccgcgtcccgtcctcactcaccagcggcgagggcacgctccgggaagggcactgcctggcaggagttagccaggccgctgtccccgcatccgccccgcccctcccagccgccaggccccgcccctctcagtcgcccggccccgccccgccccgcctggcagcccgggcactgggcccactcgcgtccccgcgggaccgggagctcactcctcaaagccacctctcccgcgggacgcgcttctgcctccccccggccgcgagcaagtctctcggctcctcctcctccccatggtgaccggtgacggccgcccggccagacccaacatctaaaacgttgccgtgtgtccaacggcgtgtcgtttgtcgtctcttctagcctcacttttcccatctataaaatgcagcaacaagaccgatctccgagtggggaattacctctcctgaggccaaggccctgagcgtcctgctgcccagcagccttggccccatttccggagcaccccagttccttgagctgttgacgcagggcacggaggcagcgcgctgcactcttagtcctggcccagccactttctgactggctctctgggcctccatctcctcatctgtaaaatgggcacaaagtcgtgggactgatgaggccgcaacgcggtgatgcaggcaggacacccctcagatgctcggcgctcagtgaggggaggctgccatcatcacagcccagaggtggcctccagctgcccaggtccactcccatgcagggtgtgtccagccccaggcccttggcactatggctgtcttgctgcagttcaaggctgtcccagctccctccagacaactcagcctggcaacgccccatcagcctgaaccagccacgttggcccaaactgatcctgcagggtccaaggagaactgtggctacttctacccagacacagaagccaggagcctccttggggaccagccaggctgcagtatggctttcctaggacctggcatttttgcctttgtgagcctcttcctctattaaaaaacaaacatacataaatctattttttactgtgttggcctgaagacaaggataacccaggcttggttccattcttcattcatctttttcttctgggtttctttttttttttttttgagacggagtttcgctcttgtctcctaggctagagtacaatggcacaatctcggctcactgcaacctctgcctcctgggttcaagtgattctctcctccctcagcctcccggtagctgggattacaggcgcctgccaccatgcccggctaatttttgtatttttagtagagatggggtttcaccatgttggccaggctagtctcgaactcctgacctgaagtgatccactgcctcggcctcctaaagtgctaggattacaggcgtgagccaccgcacctggcagctttgtttttttttttttttttcttttttaaaattccttctggccaggcacggtggctcatgcctgtaatcccagcactttgggaggccgaggtgggtggatcactaggtcaggagttcgagaccagcctggccaacatggtgaaaccccatctctactaaaaatacaaaaattagctgggcatggtggtgtgtgcctgtaatcccagctacttggaaggctaaggcaggagaatctcttgaacccaggaggcagaggttgcagtgagctgagacggtgccactgcactccagcttggtgacagagcgagactccgtctcaaaaaaaaaaaaaaaaaatcccttcttagccgggcgtggtggctcacacctgtaatcccagcactttgtgaggccgaggccggtggatcacctgaggtcagcagttcgccaccagcctaaccaacatggtgaaacccagtctctactaaaaatacaaaaattagctgggcatggtggcaggcgcctgtaatcccagctactcaggaggctgacacaggagaatcgcttgaaccgggaggtggaggtttcagtgagccaagatcacgccattgcactccagcttgggtgacacagtgagactctttctcaaaaaaacaaaacaaaaaataaaataaaataaaaataagacacacatgtggctggtt

SEQ ID NO: 1563078 - DNA, 4001 bp, Homo sapiens
ccatctctactaaaaatataaaaattagccaggctgaggcaggagaatcacttcaactctggaggcggaggttgcagtgagcccagctggagccactgcactccagcctgggcaatggagcgagacaccgtctcaaaaaatatatatataaataaaaataagaaattaagaatgacttccctagtggtctagtggttaaaaaaaaaaataaaaaagactaccgttttaaacagagagcacatccaagcattgtttgcaccatcaaaagtaaagaaaacacaaataagccgggcgcggtggctcacgcctgtaatcccagcactttgggaggccgaggcgggtggatcatgaggtcaggagatcgagaccatcctggctaacaaggtgaaaccccgtctctactaaaaatacaaaaaattagccgggcgcggtggcaggcgcctgtagtcccagctactcgggaggctgaggcaggagaatggcgtgaacccgggaagcggagcttgcagtgagccgagattgcgccactgcagtccgcagtccggcctgggcgacagagcgagactccgtctcaaaaaaaaaaaaaaaaaaaaaaaaaagaaaacacaaataagccaggaacagtggctcatgcctgtaatcccagcactttgggaggctgaggtgggaggatcgcttgagcccaggagttctgcaggagactgcagtgagctatgattgcatcactgcactccagcctgcataccagagtgagaccctgtctcaaacaaacaaacaaaaacaagaaaggaaggaaggaaggggaagaaagaaaaaaagagaaagagaaaggaaagaaggaaggaaggaaagaaagaaagaaagagaaagaagaaagagaaagaaggggtgggaaggggaggggagggagggaggaaggaaggacggaagaaaggaagaaagcaagctaaagtgaaaagtaggctccctccctgcgagcccaagcccctcaccccagctggagaacccgctgtgaatactttctggtagatccagccagacatcctgcctcacgccaggcacaagtgtgtacagacgacaggacacagcacatgtgcacacacacactcccaggaaagaaagtggtcctcggggcacagtggagaaggcaggctgggatcagcctgcacgggttctggccctggctccaccgcgccagctgcgtgactctggacaaaggcttctttggcaagcctcagtttcgccgaacctccctgtggggctgccagcagccaggtggagactcaggggccgccttcccctgctgggctgaggctggctctcctgtccttgccacacggcccctttcaccgccagtggaaacctgcctcaggctgccctgtcccgggccccaccgactccacagagacgccgggcctcgcccactgttctggcagtaggccttcatgggcagggcttgctgtgtgccaggcaagctgggcggctgcttcctgtacaccacctcccctgatatcctcgccctgcctgagcccattctgggacagcctcaagtcctgtctctcctgccatccagcccagggcacgctgctggtatcccgtagccctggcccctggcaggctggccagaggggctccaggcccacgccaggccatggcctctggcagctgccctggccagcagcgcgttcacagcaggaagcccccgcttctcctacctgggctccggcttctttgcaaggggtaggggaagcagacaggtcccagaggctgctcggctcacagtaagacccgtctaggctgcaacgcacctgagccccgcactgggaatcgagggccagggggcctctaaccggctttgggcaaaataaacttccccgatctggactgttctccactacgaaacggggtgtctcggagatcaagagcccgaggtctcccagatattctgagaccctcaagggagttccgcctgggattgcccatccgcggaatgggcaggagagggagcgtcggccactcctgggaccgcgcttcctgcaggagaagccacgcggccaagggctgggcgtggcagggttgtccaagttttccctcccgaacccccagccggaggcggcccgcgctggaaccccggccgcggaggcccagactctgctgcccgccgccccctgacccggtagccgagccccaagtgctgccccgggtcgccccctcgggtgtccagtctgcggctccggcctcagtttccctctgtcccgcggcgctgccaagagtcgcagccatgcgggcccccacttcccgctgccccctccgcgtcccgtcctcactcaccagcggcgagggcacgctccgggaagggcactgcctggcaggagttagccaggccgctgtccccgcatccgccccgcccctcccagccgccaggccccgcccctctcagtcgcccggccccgccccgccccgcctggcagcccgggcactgggcccactcgcgtccccgcgggaccgggagctcactcctcaaagccacctctcccgcgggacgcgcttctgcctccccccggccgcgagcaagtctctcggctcctcctcctccccatggtgaccggtgacggccgcccggccagacccaacatctaaaacgttgccgtgtgtccaacggcgtgtcgtttgtcgtctcttctagcctcacttttcccatctataaaatgcagcaacaagaccgatctccgagtggggaattacctctcctgaggccaaggccctgagcgtcctgctgcccagcagccttggccccatttccggagcaccccagttccttgagctgttgacgcagggcacggaggcagcgcgctgcactcttagtcctggcccagccactttctgactggctctctgggcctccatctcctcatctgtaaaatgggcacaaagtcgtgggactgatgaggccgcaacgcggtgatgcaggcaggacacccctcagatgctcggcgctcagtgaggggaggctgccatcatcacagcccagaggtggcctccagctgcccaggtccactcccatgcagggtgtgtccagccccaggcccttggcactatggctgtcttgctgcagttcaaggctgtcccagctccctccagacaactcagcctggcaacgccccatcagcctgaaccagccacgttggcccaaactgatcctgcagggtccaaggagaactgtggctacttctacccagacacagaagccaggagcctccttggggaccagccaggctgcagtatggctttcctaggacctggcatttttgcctttgtgagcctcttcctctattaaaaaacaaacatacataaatctattttttactgtgttggcctgaagacaaggataacccaggcttggttccattcttcattcatctttttcttctgggtttctttttttttttttttgagacggagtttcgctcttgtctcctaggctagagtacaatggcacaatctcggctcactgcaacctctgcctcctgggttcaagtgattctctcctccctcagcctcccggtagctgggattacaggcgcctgccaccatgcccggctaatttttgtatttttagtagagatggggtttcaccatgttggccaggctagtctcgaactcctgacctgaagtgatccactgcctcggcctcctaaagtgctaggattacaggcgtgagccaccgcacctggcagctttgtttttttttttttttttcttttttaaaattccttctggccaggcacggtggctcatgcctgtaatcccagcactttgggaggccgaggtgggtggatcactaggtcaggagttcgagaccagcctggccaacatggtgaaaccccatctctactaaaaatacaaaaattagctgggcatggtggtgtgtgcctgtaatcccagctacttggaaggctaaggcaggagaatctcttgaacccaggaggcagaggttgcag

SEQ ID NO: 1563079 - DNA, 4001 bp, Homo sapiens
atctctactaaaaatataaaaattagccaggctgaggcaggagaatcacttcaactctggaggcggaggttgcagtgagcccagctggagccactgcactccagcctgggcaatggagcgagacaccgtctcaaaaaatatatatataaataaaaataagaaattaagaatgacttccctagtggtctagtggttaaaaaaaaaaataaaaaagactaccgttttaaacagagagcacatccaagcattgtttgcaccatcaaaagtaaagaaaacacaaataagccgggcgcggtggctcacgcctgtaatcccagcactttgggaggccgaggcgggtggatcatgaggtcaggagatcgagaccatcctggctaacaaggtgaaaccccgtctctactaaaaatacaaaaaattagccgggcgcggtggcaggcgcctgtagtcccagctactcgggaggctgaggcaggagaatggcgtgaacccgggaagcggagcttgcagtgagccgagattgcgccactgcagtccgcagtccggcctgggcgacagagcgagactccgtctcaaaaaaaaaaaaaaaaaaaaaaaaaagaaaacacaaataagccaggaacagtggctcatgcctgtaatcccagcactttgggaggctgaggtgggaggatcgcttgagcccaggagttctgcaggagactgcagtgagctatgattgcatcactgcactccagcctgcataccagagtgagaccctgtctcaaacaaacaaacaaaaacaagaaaggaaggaaggaaggggaagaaagaaaaaaagagaaagagaaaggaaagaaggaaggaaggaaagaaagaaagaaagagaaagaagaaagagaaagaaggggtgggaaggggaggggagggagggaggaaggaaggacggaagaaaggaagaaagcaagctaaagtgaaaagtaggctccctccctgcgagcccaagcccctcaccccagctggagaacccgctgtgaatactttctggtagatccagccagacatcctgcctcacgccaggcacaagtgtgtacagacgacaggacacagcacatgtgcacacacacactcccaggaaagaaagtggtcctcggggcacagtggagaaggcaggctgggatcagcctgcacgggttctggccctggctccaccgcgccagctgcgtgactctggacaaaggcttctttggcaagcctcagtttcgccgaacctccctgtggggctgccagcagccaggtggagactcaggggccgccttcccctgctgggctgaggctggctctcctgtccttgccacacggcccctttcaccgccagtggaaacctgcctcaggctgccctgtcccgggccccaccgactccacagagacgccgggcctcgcccactgttctggcagtaggccttcatgggcagggcttgctgtgtgccaggcaagctgggcggctgcttcctgtacaccacctcccctgatatcctcgccctgcctgagcccattctgggacagcctcaagtcctgtctctcctgccatccagcccagggcacgctgctggtatcccgtagccctggcccctggcaggctggccagaggggctccaggcccacgccaggccatggcctctggcagctgccctggccagcagcgcgttcacagcaggaagcccccgcttctcctacctgggctccggcttctttgcaaggggtaggggaagcagacaggtcccagaggctgctcggctcacagtaagacccgtctaggctgcaacgcacctgagccccgcactgggaatcgagggccagggggcctctaaccggctttgggcaaaataaacttccccgatctggactgttctccactacgaaacggggtgtctcggagatcaagagcccgaggtctcccagatattctgagaccctcaagggagttccgcctgggattgcccatccgcggaatgggcaggagagggagcgtcggccactcctgggaccgcgcttcctgcaggagaagccacgcggccaagggctgggcgtggcagggttgtccaagttttccctcccgaacccccagccggaggcggcccgcgctggaaccccggccgcggaggcccagactctgctgcccgccgccccctgacccggtagccgagccccaagtgctgccccgggtcgccccctcgggtgtccagtctgcggctccggcctcagtttccctctgtcccgcggcgctgccaagagtcgcagccatgcgggcccccacttcccgctgccccctccgcgtcccgtcctcactcaccagcggcgagggcacgctccgggaagggcactgcctggcaggagttagccaggccgctgtccccgcatccgccccgcccctcccagccgccaggccccgcccctctcagtcgcccggccccgccccgccccgcctggcagcccgggcactgggcccactcgcgtccccgcgggaccgggagctcactcctcaaagccacctctcccgcgggacgcgcttctgcctccccccggccgcgagcaagtctctcggctcctcctcctccccatggtgaccggtgacggccgcccggccagacccaacatctaaaacgttgccgtgtgtccaacggcgtgtcgtttgtcgtctcttctagcctcacttttcccatctataaaatgcagcaacaagaccgatctccgagtggggaattacctctcctgaggccaaggccctgagcgtcctgctgcccagcagccttggccccatttccggagcaccccagttccttgagctgttgacgcagggcacggaggcagcgcgctgcactcttagtcctggcccagccactttctgactggctctctgggcctccatctcctcatctgtaaaatgggcacaaagtcgtgggactgatgaggccgcaacgcggtgatgcaggcaggacacccctcagatgctcggcgctcagtgaggggaggctgccatcatcacagcccagaggtggcctccagctgcccaggtccactcccatgcagggtgtgtccagccccaggcccttggcactatggctgtcttgctgcagttcaaggctgtcccagctccctccagacaactcagcctggcaacgccccatcagcctgaaccagccacgttggcccaaactgatcctgcagggtccaaggagaactgtggctacttctacccagacacagaagccaggagcctccttggggaccagccaggctgcagtatggctttcctaggacctggcatttttgcctttgtgagcctcttcctctattaaaaaacaaacatacataaatctattttttactgtgttggcctgaagacaaggataacccaggcttggttccattcttcattcatctttttcttctgggtttctttttttttttttttgagacggagtttcgctcttgtctcctaggctagagtacaatggcacaatctcggctcactgcaacctctgcctcctgggttcaagtgattctctcctccctcagcctcccggtagctgggattacaggcgcctgccaccatgcccggctaatttttgtatttttagtagagatggggtttcaccatgttggccaggctagtctcgaactcctgacctgaagtgatccactgcctcggcctcctaaagtgctaggattacaggcgtgagccaccgcacctggcagctttgtttttttttttttttttcttttttaaaattccttctggccaggcacggtggctcatgcctgtaatcccagcactttgggaggccgaggtgggtggatcactaggtcaggagttcgagaccagcctggccaacatggtgaaaccccatctctactaaaaatacaaaaattagctgggcatggtggtgtgtgcctgtaatcccagctacttggaaggctaaggcaggagaatctcttgaacccaggaggcagaggttgcagtg

SEQ ID NO: 1563080 - DNA, 4001 bp, Homo sapiens
tgtacctgagcatctgtcctgtgctcctaggccggagaccactgtgtgtcaggtggggcggttggctgagtcccagagaaaaacactcctcactgggcactcttgatgcttgcacacaccctgtggtttatttggtggtcagtaaggaacgtctttgctgctaagtggaagaaagctaatggaacgtaatcaaaatagtggtttaattgacgaattttacttgcacctgtgccttcttcagatcctacctgcctacttagtttacgtgaaggccgactgcaccatgccccccaaccccgacccccaccacacacaacggggccattgtcatgctaggtgcttgctttccccacctcagctccggagatgtgatggtctttggccctggaggtctcggccagcctgtcctccatcctgttctcgttctcgggcaccaccagcagccggtgctgggttttggctccaagcttgtggtcgggccggtggtcgggcctcaagcctgtcttggtgtccagtttgcactcagcgcggtacttgccctccccctccctcttgaaggaggcagaagacgtggctttgggcttggggggctgcagccacgagtggctgaggatctcatcgatgtggagccgctggctgacgtcgggctgcagcatgcggtagatgaggtccttgcactcgcaggtcaggttcttggagcgcgggaagtccacacggtgctccttctggatacgcagcatcttcctgatgtcggagtcgtcatagggcatggagccgcagaccatgatgtacaggatcacgcccaggctccagatgtcatacaccttgggctggtaggggatgctctgcagcacctcgggggctgcatatgctgccgacccgcagaaggtcttgctgaggatgatgcgcccattgctgtcccgcaggcagcgcttggagaagccaaagtcagacagcttgatgttgaagtccttgtcgaggagaaggttctcgcacttgaggtcccggtggacgatgtccaggtcgtggcagtacttgacggcggaggagagctgtcggaacatcttgcgtgccacgtcctcatgcagggctccctggcacttgatgaactcgaggaggtcgccctggacgccaagctccatgatgatgtagatccgtccgtcagaggtctcaaagatctcgtaagtcttgatgatggagccgtggttgacagttgccaggatgtccatctcccgaggaaggaatctctccacaaagtcagtaggtgttttcttgcggtcgatgatcttgacagccacattgaacttgaggcgctcagagtaggcagatttgacttttgcgtaggaacccttgccaagattgatgcctacgatgtaacccttcttccttaggactgtggcatcgtccatggtgccaggagcgactggcgccgctgccgtctacatccccccgtcatgtgggccagcaggcattgtcctcatttacactaccggaggcgtctggctgggctgccctgggctgggcttcgactcaggggtggaacactcagcattgtctccgggtgacttcagccaatgaactcataaagccaaggagtgggggcggggactgggctgagggagaacagggtctctggaaccgtggaagccaggctggtctggcaggagcacccactccccgcccgctggaaggaagcctgtccccaggacaggactctggtggccctgctgctgctgcattggtttccctgtcacaagtcaagctggaggggaggcggcccacgtccagcctgtttgcatcacctggctgtggggactgaccctgcattggtctttgtcccactagggtgggtttcctgcagcttctttggctatgaagaaaagcacccccagggctgtgtccttggtgtggtaggacagttgtccctgacagtcacccagacaggcctgcatagcaccccagttacacagacagatttccacagcactgccttaccattgagcacatagttaaatctagggaaatcagtgcccagacatcaaagctagaaatgaaacatggtcagcaggagccttgcatgggcttctcttttgctggagcaagccaaaataataggaacggttttacattcctagtgccaggacccatctcgggtcgacaaaatctgaagacaagttaagggaacaggcagctgtttgaatagatcaattggatagtctaaggcagctctctggaccaagctgtaaaggagatacaatcgaaataatcactccggtaccacagtagacaggccttgaaggcactgggccccttttaatcggacttagcaagcattttttttgcctctgaccttctccttggaacaaaattagttaccagtagacttaggtgattgctgtactgcatgtaggcacataaccccaacctatataaacagtaagaaaattgtagcactttgagttggtctgctggaattatctccagccttctccctgtatccagttacagtgataaactcccttctttcctagtttgtctgcttctcgttattgggcctcaagaaaatgcagctggacctggcttggttctgggaacagtggtacctgggagggactgccctggaccagtcaggctggcagtggtgccaagcctggtagacgaaagcagctctgtgtttgggagcagaggcggcaggcccctcagggtagagagccgggcaggtgagtcgctgctgctccagcgagcaagggcctgtgtatgggtgggtcggggctgcagtgcatgccagctgggtgcccagggtccagggcaggtggctgcatgtctgaggggtggggcagggcctcccttgggtagaggcggcaggaaggcacccaggcagcagagagcctgggagaagagagggctttttctgaaagtgactggaagtaggagggaagtgaaggagtctcggctttttctctaagcggcagcctgcccctgcaggtgcaagacaggaggagggccgtcccagttgtgttttaagatggtcagtggcagagagagagagacagaaagagtagaattggctttgaggtgagagtgggggccagtgcctttgaccaaatgagaagaggctgggccagggtgggcctcaggatcagcaggagacagagaaggtcaggtcttagtcttgtttgctagactgtgagtggatgggccttggtgctggggaatcctggggctgagagcgcccaggccatgcactgcaaagaccaggcacctgggtgaggagggggttctgaatcacatcagtttgggcctttgtgtggagtgagcagcagtcgcctgttggaaccctgacattgggtagcatttacgtctcgggctgccttttgcacctgcagtgtgaacatcctgtttcagtgctggtgtgtggatttgtgctttgggaaatgtggcatcctgtacatgtctcctcaggtgcgttggactgatgttcatttgtcatccatcacaggcatcctggattcacagggagcagctgggacagatgagctgtgtgttcagtgtttaggggagagggaggaaggcctgttcccaggtggggtttagtcctggaaggtttcaaagaggaagtgatgttggagctggggtgctggggatcagcagactccacagggttgacaagaggggcaggacatgtcagacagatgtgacatcttggccctggcatggctgtgtggacccactccatctggagtacacagggagcaccctgtgtttggaggtcactagggaggattgcagaaacagggcagccaaagtcaggatgctaagctgagaggctcagatgggcagggtgggccgacgtgcctacagtgactgccttccagcagtgacagcctcccagagtcccacccgaagctctttatagcatcggtggttaatagctttagtttgatgctttcctttttcctgggagcctctacggctgaaatgaccaacacttcactcctttt

SEQ ID NO: 1563081 - DNA, 4001 bp, Homo sapiens
ccttgaatccaccagctggaacctcttagattcaaggttctccagcacctgctcgtaggtcttgagcagggagcggtccagtgtggctttgaagacggccggttctgggcgtgagggctcggatgtcaccgggtggccctccttcagccagttccggaagccaccattgagcactgatacggtgcggtggccaaacacacggaacatccaccagacccggggagcatagaagctgcccaggtgttcaccatcatacaccaccacgtgcgtgtggttgctgatgcccaggcggcccacatactcggcgaagccagcctcgctgggcagcatcatctcgtagggcgacgccgtgtcccggcactcttctatgtcaaagaaagaggcgccgggtacgtggcgctcgaggtactccttgcgggcctctcgggtgcctggtgagtaccaggacgcgtccagcacccgcaggccgggccccagcttgccagtcctgatggactccgccagccacttggtggagaccagcgcccggtagagcacctgatgaaccatggcttcagctctgcgtgtcacctggcacgggtgggaaccaggaaagagagacaggcgtgaggaaggaagtcggtgtgtgcagtagggtgaggcctgggagaagctctttctccctccgcactcccccgggttccttgtttacagcaagccagcgaggctggggcgtgcagcgggataagtttgcagattccctctggaaagccggccccgcccctcccagccggcccgggggcccagcgcagaagcgggtggggcaagagtttccgaggactccaagtaggggcgcttcctggggcggggatctggctcctagaagttacagtactcgatcccgccaggaaagagcaatgaaagcatgcccgggatggggggcgatggcatcttgggcttagaatcccctttccttccaaggcagagggggtgggcgcacggctaggaagctccgcgagccgcgcacacgccatcgcctgcggcctccccaggcagcccgagctcgcccgcctccagagtgcccgagtccggcccgtagctcgctgccctctgccctaggtggatcaggggttcccggggcaccccgtcccactctcgcaacgctatccttccccgggcagcaggtggcccgaccggcggcccaggcgcccggccgctgcccccgccccgcactcactcgccccggacgccgcgctggcgctcgccccggccggctggagaagttggccggttcaaacccccggccgcagctccccaggcggcgcgcaccatcgcgccaccgccagagggggaccctgcgccgcccgccgccatcccgcgcctcccccgcgcggccgcttcgcgcccggcacctgccaacctcgcgcgcggggcctccgggacccgcgggggtctgagggggacgccgggtggcgcgggggccgcgcgggcctgggctgggcggagcgggcgtacccccacggcccggccagtggaaggcgcgggcagcagcggctccgagtggccgcggcggtgggctgtgccggagtctcctccctttggtccgctgcaggttggtggcgggaggaggggacagctgcgggcgcggggagggggcgccgcgccgcgggggccatggcggagccaggaagccgggagtccgagacccgggtaactgccgcggcgtggcggcttgcctttctggagggggagggagtggctctttgggggtgctcggcgcggggctcccgcgcgggacctgggcggaagagggggcttagtctaggagagaaggcgcgccgctacgttggcactaagggtgactgtccgcttggggcggcctgccgggtggggtcgtggcgagtggcgggtggggagccttgggtggaagtgggtgacctggtggcaccagagagggcgggggagagagaggaggacagggagacgagaccccgctgacccagaggccccaggaagagacactagccaataacttgttagtgagtgaaaggaactaacattgtccagccctgcttggtgtggcactttgctgggtactcccgtggtgtgacttaattcccacaataaccctgaggagtaggccagaaacttactaagacaggagagagcggcagagcgagttgctggaggacacacccagagttgaggccgggcctgatccctggtctgaagcccacgtggtaccagctgcctttgtttacctggctcttccctgaaggttcatgctttttaaaaaattgcctgttttgaacttagcccgtttaatcataagttgatgtaattcaatttttaataatagctgtatttaacaaccagttggcaaaattcctgaaaagctcgccatgggctcttgcaaactgggggacaccattgcccctccctagcttttgcagaggccagcctggaagctttccctgtttcccaaccctgaccttttgttttgttttgttttttgagacaggctgtggttctgtggcccagactggagtgcagtggcgccatctcagctcactgcaacctccgcctcccaggctcaagcgatcctcccaccttagcctcccaagtaggtgggaccacaggcatgtgccaccattcccggctaatttttaaatttttggtagagatggggtttcaccatgttgtccaggctggtcttgaactcctgggctcaagtgatctgcccatctcagcctcccaaagtgctgagattacaggcatgagccaccatccctggcctcatccctctttttaaaaaaaggttttgttctaaaatgctcacagcaatcctcaaagcctagtgtctggtggttgggggagggggtgggcaggagggaccaggctggggaggtccaagaggagctcccaagctctgctcctcaaggggtaccctggatccagcctgcggctcacgcttgcttcagtgcagctgtgtatccttctgacatgagcctggggcggttacgtcctggggtcctccactcccagggcaccctcacctacagtgatcccggcttctgaatcacacaggcacctggtttctacccctccctgacacccacagcctgccttcacaccctcctttatggcccacagacctttgtgagaagtgccaatcaagcagggagactggggcagggtgacctcagatctctgaagtcccaccaagccctgaaattctaagattttagatttgctgctggcagttccagggccaccaatgagagtaatggaagaaataatgcaatattattattattattattattttgagatggagtctcactctgttgcccaggctggagtgcagtggcgcgatctcggctcactgtaacctctgcctcccaggttcaagcgattctcctgcctcagcctcccgggtagctgggactacaggctcatgccaccatgcccagctaatttttgtatttttagtagagatgaggtttcaccatgttagtcaggctggtcttgaactcttgacctcgttatccgcccgccttggcctcccgaagtgctgggattgcaggtgtgagccaccacgcccgacctaaaccgtttttaatgattattaaaaccagccagatgtaatgcatggtggttgcccctctacatttattgtttaatcttggctctaagaggtggaggtgagaagctccattataaggaacagaaaccacccagagaccctacacacccacatcacacaaccagttaagcagtggagtggggtttacattgatttggggggctctctggctcctaaaccagggctctttctactgtaaatggatgattgggtgagggaaacaaggatcctcaagaataggggacagtgtttgggggtgcacaggggctgctgtggttcccacaatagggttcctcaggaaggaacctgcagcatctgccagcacagcgccccctagctgtgctgtaacgcagataatggggatcaccccttagcc

SEQ ID NO: 1563082 - DNA, 4001 bp, Homo sapiens
tcctgccttccaccactttatgtcctggcatctcagtccccccaccccccgctgccaaaacaggggcattgagctttgttcgctgagataatgcggtgccaagtgtctggcatgaaatggcagctgctgttacaactctgccgacgggctgcagctgcctggaaaggttatggaacctttgcaaacagcaggcaggggccccaggagagctagatttggggagagggggatcctgcggggagggacactgttgatgtctataagggtttctgcgggacgagagaggcctggagaagctggatgtgtccgtgggaggtttctgtacagcaatgcaaacgctggctcaggggcatgacacccttaggtatatcctagtacatgtggggcagctggtgcctgggagtggaggtggtggacatgtcaccagtgacttctgctcacacagatgctaggtggcttcttagcacatggctatgaggacacattcttgggtccttgtgcatccaagctgaaaaagcctttaggtttgtctccactttctggttttatcgatggaaagactgaggcctacatgggaggattgaaggcatgggacggaccctggagagggtcccagtcatccttactccctatccttccatggggcaatactccccagggaccacccagcactgggacacctacctactgcatccggctccggctcggtgcccaggaaccgcccttgagaccttgaatccaccagctggaacctcttagattcaaggttctccagcacctgctcgtaggtcttgagcagggagcggtccagtgtggctttgaagacggccggttctgggcgtgagggctcggatgtcaccgggtggccctccttcagccagttccggaagccaccattgagcactgatacggtgcggtggccaaacacacggaacatccaccagacccggggagcatagaagctgcccaggtgttcaccatcatacaccaccacgtgcgtgtggttgctgatgcccaggcggcccacatactcggcgaagccagcctcgctgggcagcatcatctcgtagggcgacgccgtgtcccggcactcttctatgtcaaagaaagaggcgccgggtacgtggcgctcgaggtactccttgcgggcctctcgggtgcctggtgagtaccaggacgcgtccagcacccgcaggccgggccccagcttgccagtcctgatggactccgccagccacttggtggagaccagcgcccggtagagcacctgatgaaccatggcttcagctctgcgtgtcacctggcacgggtgggaaccaggaaagagagacaggcgtgaggaaggaagtcggtgtgtgcagtagggtgaggcctgggagaagctctttctccctccgcactcccccgggttccttgtttacagcaagccagcgaggctggggcgtgcagcgggataagtttgcagattccctctggaaagccggccccgcccctcccagccggcccgggggcccagcgcagaagcgggtggggcaagagtttccgaggactccaagtaggggcgcttcctggggcggggatctggctcctagaagttacagtactcgatcccgccaggaaagagcaatgaaagcatgcccgggatggggggcgatggcatcttgggcttagaatcccctttccttccaaggcagagggggtgggcgcacggctaggaagctccgcgagccgcgcacacgccatcgcctgcggcctccccaggcagcccgagctcgcccgcctccagagtgcccgagtccggcccgtagctcgctgccctctgccctaggtggatcaggggttcccggggcaccccgtcccactctcgcaacgctatccttccccgggcagcaggtggcccgaccggcggcccaggcgcccggccgctgcccccgccccgcactcactcgccccggacgccgcgctggcgctcgccccggccggctggagaagttggccggttcaaacccccggccgcagctccccaggcggcgcgcaccatcgcgccaccgccagagggggaccctgcgccgcccgccgccatcccgcgcctcccccgcgcggccgcttcgcgcccggcacctgccaacctcgcgcgcggggcctccgggacccgcgggggtctgagggggacgccgggtggcgcgggggccgcgcgggcctgggctgggcggagcgggcgtacccccacggcccggccagtggaaggcgcgggcagcagcggctccgagtggccgcggcggtgggctgtgccggagtctcctccctttggtccgctgcaggttggtggcgggaggaggggacagctgcgggcgcggggagggggcgccgcgccgcgggggccatggcggagccaggaagccgggagtccgagacccgggtaactgccgcggcgtggcggcttgcctttctggagggggagggagtggctctttgggggtgctcggcgcggggctcccgcgcgggacctgggcggaagagggggcttagtctaggagagaaggcgcgccgctacgttggcactaagggtgactgtccgcttggggcggcctgccgggtggggtcgtggcgagtggcgggtggggagccttgggtggaagtgggtgacctggtggcaccagagagggcgggggagagagaggaggacagggagacgagaccccgctgacccagaggccccaggaagagacactagccaataacttgttagtgagtgaaaggaactaacattgtccagccctgcttggtgtggcactttgctgggtactcccgtggtgtgacttaattcccacaataaccctgaggagtaggccagaaacttactaagacaggagagagcggcagagcgagttgctggaggacacacccagagttgaggccgggcctgatccctggtctgaagcccacgtggtaccagctgcctttgtttacctggctcttccctgaaggttcatgctttttaaaaaattgcctgttttgaacttagcccgtttaatcataagttgatgtaattcaatttttaataatagctgtatttaacaaccagttggcaaaattcctgaaaagctcgccatgggctcttgcaaactgggggacaccattgcccctccctagcttttgcagaggccagcctggaagctttccctgtttcccaaccctgaccttttgttttgttttgttttttgagacaggctgtggttctgtggcccagactggagtgcagtggcgccatctcagctcactgcaacctccgcctcccaggctcaagcgatcctcccaccttagcctcccaagtaggtgggaccacaggcatgtgccaccattcccggctaatttttaaatttttggtagagatggggtttcaccatgttgtccaggctggtcttgaactcctgggctcaagtgatctgcccatctcagcctcccaaagtgctgagattacaggcatgagccaccatccctggcctcatccctctttttaaaaaaaggttttgttctaaaatgctcacagcaatcctcaaagcctagtgtctggtggttgggggagggggtgggcaggagggaccaggctggggaggtccaagaggagctcccaagctctgctcctcaaggggtaccctggatccagcctgcggctcacgcttgcttcagtgcagctgtgtatccttctgacatgagcctggggcggttacgtcctggggtcctccactcccagggcaccctcacctacagtgatcccggcttctgaatcacacaggcacctggtttctacccctccctgacacccacagcctgccttcacaccctcctttatggcccacagacctttgtgagaagtgccaatcaagcagggagactggggcagggtgacctcagatctctgaagtcccaccaagccctgaaattctaagattttagatttgctgctggcagttccagggccaccaatgagagtaatggaa

SEQ ID NO: 1563083 - DNA, 4001 bp, Homo sapiens
aggtggaggttgcagtgacctgagattgtgctactgcactccagcctggaagacagagtgaggctccgtctcaaaaaaaaaaagaaaaagaagaaaatttaaattaaaaatttaaaaaatcacaaagactacaaatactcaggtttaagcaaattcccacctttcttgaattaacagtaattcatatttgctttgtcataaatgtagatatttacctgccccaatggaatgaaatcctaaaagcctagtgttcccaaatgatgaagagaaagaaacatgcatattttaatttagaattttgattcagaattaattttaacctagctggagtatacataatcatttatgtatttatttacttatttaagagactgggtttcattgtgttatccaggctggaatgcagtggcacaaccttggctcactgcaacttgtacttcctgagctcaagcgatcctcccacctcagcctccagagtagctgagactgcaagtgcactctaccacacccagctaatttttgcggagacgaacgagtctcgctatgtttcccacactggtctctaactccttggctcactacagcctcaagcccctgggctcaagcaatctgcctcccaaagtgctgagattacaggagtgagccaccgcacccggcctagtggatagtgtatactaagcaacatgtaccctgcttttgcctaaaacatactgaaaacatggcattgaacacaatcacaaagttgggagctgagaaaaatcatatactgtaaaataaatctgagatattaatctcaagaagctcctgaaaatgtctcaagaactcctatgctgcactctccctaataatttagactttctacagatattttctgatcatctacagtgtgtcaggcaccatgccaggtaccaagatgccatggtgaggtatacacaaaaccggctcctgcttgcaggaagcctactctctaaaacagtgcttgccaagctcgcctgatcacaacttcggagcttgtttaagttcaaaatcggcttccctgctgtggtgagccacagtccgtggcattttgatcaggtgctcccaatgattcctacgctctaacgggtttgggaggcaagggtgggggtaagctcgagagcccagagacatcccgtccagcgggagccccacctctaaagtccatgtcgctcagcatccttccccctgactagtggcccaaacacagcacgaagctgaggtgggtggaacgcttttcaaaacaacgctctttgatgagccaccgacagacttgctcgcctccggggacgaagagctcactcctcacaaaccccaccccggaaaggtagcacctgagcatcccgggctgcgccgacacctgtctcaccgcgggtgccgcttaccgctccggtggactccagtccccagattccgccccacgggggctgggggaaaaggggaggcgctgggcgcattaggcgctgactgtataccgacaccccccaccccggtgtgcgcaggccaacacccatacacaccctcacacacccacacacatccacacacactctcgcggaaactgagccaggcaggcggcggaccaggtcccgccgcctcacggctcgcggctgggatcgaacccggactgcgagacgccttccgcctcgcaggcgctcctctgccgctgaggcccggcccggctcccaccgccggagtttcacaaagaaagtctcccggcccgagcccctcacgcactcaccggcgccgacgccggcggcgactctggctcccgccgccttcggctccttgcgggggtcggcccttgggtcggctcgggcgccggcggcggcgactgctccatccccacggggcccgggccgcgtccgcctcgagctaacggtcccgccagctaggcgcgcgcgccggttccgcgcgccatgttcccgccgtgctgcgcgccgccgcggcgcccctcactgcccccaaaccgcgcgcgcgcccccgcgggcccacacatgcaccgcgcacgcgcgcgttcgccgcgccccctccccgcgcgccccgcctcgcgccctctggagctggccgctgttcccagtgtctcgcccacccccgccgggcccgtcggactcggcgggtgagcgcgcggttcccggctccgcaccgccgcctgcctctctgcagaccaccccggacccgacccctcggccatttccccacactgccgctttcgcttcccccacgacgcggggcctgggacgacggtctgggccaagaggaacttccccgcaagaagtgtcgagttaaggacgctactaagggggcgggatcgccatcgtggaggtgtgcaagcacgtgcctgcgtcccggagacagccagactcaacggagaagctgagttcaagtcccacatctccactaacccttgcgtgttagggtcagggcttcgggacttgtttctcctaaatcttttttttttttcttttttgagacggagtcttggtctgtcacgcaggctggagtgctgtggcgcgatctcagctcactgcgagctccgcctcccgggttcatgccattctcctgcctcagcctccccagtagctgggactacaggcgccggccaccacgcccggctaatttttgtatttttagtagagatggggtttcaccatgttagccaggatggtctttatctcctgacctcgtgatcctcccgcctcggcctcccaaagtgctgagattacaggtgtgagccaccgcgcacggcctgtttctcctaaatataaggactcaatataataataagagaaagcctcagcaccgcgcctagcacttagtaggtagtgatcaagagagaagacctcttaagtggttttaatggttaaggaccacaggttctcaagaaagggaaatctcaattcaagtcccgcctccatctcttgaaaactgagaaaccttgaacaagtcactcagaggagccaaagatccttgatttctacatgtgcaaaaggggagtgtggcagtagcactgcacagggttgactgagctttcagggagatgatgactgtacgatcatgcctctcttaatcacgggatggttctgagaaatgcctccttaggtgattgcgtcattgtgcaaacagcaaagtgcatttacacaaaccttgtatagccttgtatagcctactacacacctaggctgtatggcgtagcctattgctcctaggctacacacctctacagcctgatactttactgaatatactataggcaattataacacaatgtaagtacttgtgtacctgaacatagagaaggtacagtaagaatagagtataagagattttaaaatggtactcttgtatagggcacttaccatgaaaggagcttgcaggactggaagatgctgtggatgagtcactgagtgtgaaggcataggaccttactgtacactactgcagactttataaacaccatatgcttaagctacaccaaaatattttaaagcttttcaataaattaaccttagcttactgaaatttatctttaaaaattttgccagtcgtggtgtctcacacctgtaatcccagcactttgggaggctgaggcaggcagatcatttgaggtcaggagttcgagaccatcctggccaaggcggtgaaaccctcatctctactaaaaatacaaaacttagccaggcatggtgatgtgcacctgtaatcccagctactcaggagactgaggcaggagaatcgcttgaacccaggaggcggaggttgcagtgagccaagatcgtgccattgcactccagcccgggcaataacacgcatggagctgtcatctcctgtgataacaatgccttcttcttccaaaatacttcctgaaggacctgcctgaggctgttttatagtttactattttttaatgtaagtagaagatatacattctaaaattacgaaaaacactacaccagggctgggcacagtgtctcatgcgggtaatc

SEQ ID NO: 1563084 - DNA, 4001 bp, Homo sapiens
aaaaatcagctgggtatgatggtgcgtgcctataatcccagctacttcggaggctgaggcagggcaatcgcttgaacccgagaggcagagtttgcagtgagtcaagactgcgccattgcactccagcctgggtgacagggcaagactccgtctcaaacaaaaaacaaatcgagtactctacagaggccggcgagatacaggaagggcaagtgagccaggtcaaacacaaaataaacaaacaactcagatgcccacagcagagtcccttggcagggcaggctgggaacaggagaggcacccatggcgcagctcacagcattccatcagtcctctcttgttcagcccgtaggcttctaagagctacctgagtcctcctgttatgtggatgaagtcagtatgcaggggcctcaccacccacgccaaggtcagcttaggtttctatcagtgcagttaggcccaggttcatcctggttctgcctgtaattcatggacaaccttcaagtcaagtaggttcaactctgagcctcagtttccccacttgtcaaggaagctagttggatcttacttctgagacttctcctagttctaaaactataggacccttcattggtagagaaatgactggtaatgtggcagaaggtcttggcacagcctaggtgaaggcagtatactcacagattcatcccaggacaggatcccacgtcctaagcagccgagccctgcatcagaccctcagcaggccacaatgggaggcccggggaggccagcatcctcaaaaaacatccccactgcacccaccgctgtccacccaccactcagagtcctggggaagaagggagagtgcagaggcccttttaggacgctgtggggggggggcagagatatgtccccaccctcccacgtcctccagtacaaagtgcacagatgtgctgccatctattgctaaggtcatggcgcaatttaaaaagctttccccatggccgggcgcggtggctcacgcctgtaatcccagcactttgggaggccgaggcgggcggatcacgaggtcaggagatcgagaccatcctggctaacacggtgaaaccccgtctctactaaaaaatacaaaaaaaattagtcgagggcagtggcgggcgcctgtagtcccagctactcgggaggctgagggacgagaatggcgtgaacccgggaggcaaagcttgcagtgagccgaaatagcgccactgcactccagcctgggcgacagagcgagactccgcctcaaaaacaaaacaaaacaaaacaaaacaaaacaaaaaaacagctttccccaattaaaaaaccttcccctagacctccacagaaggggccgcggcctctctcggcaggcatacctgggtcagcgtggcatcgaacagcttgcaggcttcgttgcttgtggtggagagcgggagcctcgcatccttccaggcctacagacggcaagaagggaatagcagtgccttctctccaggagcccttcaaacttcaacacacacacgtctcctggcccctctgacctccaccttcctcatctgtaaaatgggctcaggctcccagtcctgggccggttccaaggagccccttacctttgcgggcttccctgcgtccccagccatgcccagtgagctacgttttttaggaggtcttggggtctcccgagtaccctgacaggcgtcccttatttccctcggtggggactctacaagaagggcctcgggtcccttccaggcgttgccgcggacgcgcccgtgcgcccagggctcaccccacgccccgcgcccgggccatgtctcccgttattccgccagcaccgggccacccccaggacccggggcccgagggggacctggttgggggcagcctccgtgtacctggcagtcgcgcagaggcgaggctgcggccatgttgcgccgggtcggagtccaccgcgagctctgggcacccgggccttcctgggagtgggcggggcggtcgcggaaaggggcggggcggggcggccgcgctctcccgctcgctcactggtgggtttcggacagactggccctggtccaggatccgggcccgccccagaggcccgaccggacaactctgcaacgcgacgggtcccttgggagcagggagctccgggacagcggtcactttcaagtttatgtcgttgcggtcggcagctacccgcgcgcgcacggcacacactcacttggcgttcggggccggcttcactgggtcgtcccgccgcctccatcctcccttctcaaggatttgcagcggaaaaatcgctctgtctcctgcagtagcggcttctccctctggactggcccggtctggcccggcctgaactctgccatcagccacacaccagccccagtccaatgggctcccctagtttaatttgcccccgccccagggtgcacgaatcaagggcgtagaaccaagtgcacgggcagatctggcctttatttaaaatgctattttgttcatcatggactttttgcattagttttgatttttgaaatattgcactgaagtattatttgttttatgtgagagctgtaaagataaaactcttagaagaaaacagaagtaaatcttcatggccttggatttagcaatggattcttagatgtaacaccaaaaggacaagcaacaacaacaaaatagataagttggacttcgtcaaaattaaaaacttttctgaatcaaaggacactactcaggaaactgaaaagattaacacaatgggaaaaaacatttgtaaatcatatattgggtaagagtctagaatccagaatacataaagaaatcttggccgggcacagcagctcatgtctgtaatcccagccctttgggaggctgagtcaggtggatcacctgaggtcaggagttcaagaccagcctggccaacatggtgaaaccttatctctattaaaagtacaaaaatagccaggcgtggtggtgcatgcctgtaatcccaactacttgggtggctgaggcaggagaatcgcttgaacccgggaagtggaggttggagtaagccaagattgtgccactgcactccaacctgggcaacagagccagactctgtctcaaaaaaaaagaattcttacaactcaacagcgaaatgacaaacagcccaaatttaaagtgggcaaagaatttgaggtgacagttctccaaagaagacacacctttcctacagcgttttcaaggttcattcatactgaaggaagaggcagacacaaaaggtaacacttgtattagtgcatttacatgcatgtccagaatacgcaaacatagagacagaaagaagattggtggtgaccagggactgaggggatagggatgataagtcactgaagccttgaactcctggctccagcaatcctcccacctcagcctcccataaatggttacttttatgtgaactttacctcaataaaagagaatttgtcttgattattgagtttttggtgcccctccacccttaaattttgcacttgagctgagtactaatatggactaatacagtaaattggtaccattagagtggggtgttgccaaaaatatacctgaaaatgtggaagcaactttggaactgggtaacaggcagaggttggaacagtttggagggctcagaagacaggagtatgtgggaaattttggaacttcccagatacttgttgaatggctttgcccaaaatgctgatagtgatatggacaataaggtacaggctgaggtggtctcagatggggatgaggaactggagcaaaggtgatgcttgttatgttttagcaaagagactggcagcattttgcccctgccctagagatttgtgggactttgaacttgaaagagatgatttagggtatctggcagaagaaatttctaagcagcaaagcattcaagaagtgacttggatgctgttaaaagcattcggttttaaaagggaaacagagcataaaagtttgaaaaatttgcagac

SEQ ID NO: 1563085 - DNA, 4001 bp, Homo sapiens
cacgagaatcacttgaacctgggaggtggaggttgcagtgagctggcatcacgccactgcactccagcccgggcaacagagtgagactccatctcaaaaaaaaaaaaaaaaagaaatacagattcttagcagggcacggtggctcacgcctgtaatcccaacactttgggaggccaaggtgggtagatcacctgaggtcaggaattcaaaaccagcctggccaacatggtgaaaccctatctctactaaaaatacaaatatcagccgggcgtggtggtgggcgcctgtaatccaagctatctgggaggctgaggtgggaggattgcttgaacccgggaggcagaggttgcagtgagccaagatcgcaccactgcacactccagcctgggtgacagagtgagacggtctcaaaaaaaaaaaaaaaaaaccaagaatatggccaggcacagtggctcacgcttgtaatcccagcactttgggaggccgaggtgggcggatcacctgaggtcaggagctcgagaccagcctggccaacatggcgaaaccccatctctactaaaatttaaaaaattagcggggcatggtggcgcgtgcctgtaatcacagctacatgggaggctgaggcaggagaatcgcttgaacccaggaggcagaggttgcagtgagccgagagcgaccgcactccagcctgggcaacaaagcaagactccgtctaaaaataaataaataaataaataaagtaataacaatgtcagtgatgacttcatgttgagcagggcattcgttcacagcggtattgtcactgtccatctccacgcccgcactgggtgacagtaccatgctccacagtgactgcttaccagtgtctgtaatttgagggcagagaagggcccatcttttttttttttttttttttttttttttttgagacagaatctcgctctgtcgcccaggctggagtgcagtggcgcaatctcggctcactgcaagctccgcctcccgggttcacgccattctcctgcctcagcctcccgagtagctgggactacaggcccccgccaccatgcccggctaatttttttttttttgtatttttagtatagacggggtttcaccgtgttagccaggatggtctcgatctcctgacctcgtgatcctcccgcctcggcctcccaaagtgctgggattacaggcgtgagccaccgtgcccggccggggcccatctttttgtaccgccacaacccggcaccataatgtgctcatcaaacgtttcctgagcaaagaacctgctttgcaaatgccaaaagggctaacaatgataagatactttcacttccagaattaatctcctctaatgccccagctactctatggaaaaggatgactaccccgccctgccctcttagctgatagggaatcagagaggggaaatgtcttggtccagtcatctagagggaagacacaaggctcttgtctcctgccctgagttctctccacaggtacattgcgccctgcaaaagatgccaacagaaacaacacagattgcaaacgaatgggaaacgtgtaggaacaatgaaagtctgggataacaaataataaacataatgatgcaattgcaacagtcggacagcacgaggtaagtcataggaactcagcggacggagaaaggcacggtggttagcgcgggcttcctggaggacgcggatccggcaagcagcatctgaaccgcattttcgcagccgcgtagacactggcgcccacactctctcacccatgcgcactcgccagcccgcgcgcagccacaccctcggtgcccgggaggcggcggcctgggggacaggacctcacctgtgggctcagagcgccgagggactcggaggagcgccctgcagggatgcctcgagccgcgccctcgccccgcctccagcccctctccggcgctcgcaggagtacgcagccgactgccaggcgcaccggcccgccccgccccgcgctgcactctacttccagggcggcgccctggcaacccaggacgcgaccgccggcgctgcgactatttccggagtcagacttgcctggggctcctttgggctccatacctcgggcggccgctatgcccagggcttggatcctaggaaatgccaggccgtccaccctctcggggcccagaaaggagattgagaagggtctggagcacgggattaagtctaaaaagaaaggtagagcggtgtgatgattaggtccgaatcctgggttcggtctcaatccgctgtttagcctctcctaccccttctacctcggcttccttatctgaagaaatggtgatgttgcgccactgcactccagcctgggcgatagagcgagactccatctcaaataataataataataataacataaaaataaaataattttttttaaaaagtgtttatctgggccagactcggtggctcacgcctgtaatcccagcactttgggaggcagaggcgggtgggtcgcgaggtcaggagatcgagaccatcctggctaggctgaggcaagagaatcgcttgaacccgggagacagaggttgcagtgagccaagatcgtgccactgcactcaagcctgggcgacagaacaagactccgcctcaaaaaaaaaaaaaaaagacgtttattattctcgttatagacctgtgttacctcgaattctctatacaattattcatttttaatttcatcaatttaaagagttatgcaaacttgtgcaacttgtaagtgacagagtctggctttgaacccaggacacctgaccattcatgctgctgcctctcaggaggggtggtggtgtgctttcttagtgatgattggagctttgctaacatcacttcctataatctcccacacaaccgcctcccaggcccagagcacattcagcgcatcatcatttacttttggcaccatctagtggaaccaacacttatctggagtccaaattgccaattcatacccttcagctgctgtctggttgtgaggccttgagaagtcccaaggcttccgactacagtgttctcaccttaaacccaggagatgagtgaaggcttgcaagacgtggttagggcctggcatagtaaagtgttcaataaacattgtagccttccagcatgttgcctcatgcctgcaatccctgtactttgggaggccaagatgggaggatcacttgaggtcaggagttccagaccagcctggccaatatagcaagaccccatttctaaaaaaaaaagaaaaaatatttttaatcagccgggtatgggggcgtagccagcagtcctactcagttactcaggaggctgaggtggatcacttgagcctaggagattgaggctgcagtgagctatgatcccgccactacactacagcctggccaacagaacaagactctgtctcttagagaaaaaaagttaaaaaaaacaacaacaaaaaaagaattttaaggcagggcatggtgccttacgcctgtaatcccagcactttgggaggccgaggcgggtggatcacctaaggtcagcagtttgagaccagcctggccaacatggtgaaaccccgtctttactaaaaatacaaaaatttgccgggcatggtggtgcgcacttgtaatcccagctacttgggaggctgaggcaggagaattgtttgagcctgggagacagaggttacagtgagccgagatcgcactattgcactccagcctgggcaacagggcgagactccgtcttaaaaaaaaaaaaagaactttaagatggcgacagcagcattaaactaacttcagggcttgtctgagcacggggtcctatggttctgtacaggtcacaggcccatgaggctggccttaccctaagaagctggccacagctcccctcaatgaatccccacaagaactctgctgagttaatggtgttatcaccactttttaaaaaatagtggtaaattggccgggcgcagtggctcacgcctgtaatctt

SEQ ID NO: 1563086 - DNA, 4001 bp, Homo sapiens
gcaggagaatcatttgaacccgggaggcagagcttgcagtgagccgagatcatgccactgcactccagcctgtgtgacagagcaagactccgtctcaattaaaaaaagaaaaaaattatatatatatatatatatatatatatatatatatatatatatatatatatatgtatgtatcttcaagtttccccatcctttccagggcagccggcctaaggtgaggcaggagggctgatggccaggggtgtaagggcccacagcgctggcaggtgctgctgctgctggcggcctcctccacacctgggccagtagcagcaggaggcttcactcaggaagagctgcaagtttgtgaatggtaaagcagtgattcagctctgtccttaacggctggggaagggtcacggaaaaacactggctgccccttagtagggcaacagcaggcaaggcggcctgggcaggggacgtggcacggtggcgaccaccctctgtgtgccaggcatatttctcatgccacctcccatccttccaatactgtgggagccagatggtgtctcaccatccccttcccagatggagaacaggtctcagacgggcgagtgaccgcccgagggagggcgtgctgccgtggaggctggctgggcaggagctggtcattcccactgtgctccttccacgcagcccatgggaacctttttgtcctcatgaacaaaccaaggtcccttccacccagcacaggcctgggaccagagtggtcctcggaaagcatatggcagaagtgaggggcagaggaaactctctgttacactgtagcataaggaggtgccactcactgcacgtttccagcaggaaggttcctagtccaatcaggattacacagagaaaaactggctcagagaccgtagagtctggccagcagccaggctcagggactcctagttcccggcccgggtccctgttcttggctctggggtttccacttcatcacctgcgccactaggctcatctccgtccgggagacagcacctggaggagatgtcgggtcccagctaaagaaaacacccccccccccgccagcccgggaaggtgctgtggcctcagcctctgggcacgcaataaaaatccagggctcatccccagccaggacagtggggaacgctttggagtggaggaggcaggtgagccggatgggccgtcctcacaaaaagggagagaacctagaggcttctcaatcttttccatttttctttagatttctcctccacctctcacagcctgttttctttaacctgcaagatgaggggaccccgaggctcaaatcaaatgaaaaaacaccgaattctgtgaacccaacagttacagctacacaaattcacggggttcccgttgtccctgtgaggcagcggctgaaagaatccctctgaagggactctcggagccgcagtgttctcatctgtgaagtgggggtgatgagtttcactcctcgcagggctgtgtcaggctcgggtgtgtggaggacctaaagttcccaacgcagccctcagccggtctcgggcccgggcagatcagggccgcaggtaccccggtctcctgctgtcactcttcggcccccaactccacgccgctccagagctgcccaggacgcgctctgggtggctcaccgcggctcccgccgcccgggagcgctcttccctgtcccgcgccgcgggctcccgccgcgctcccaccccggccgccgcacgtgcccgccgcccttccccgcacctcgtgctccagcttgtgcaggaggcggccccagtaacgttcggggacccccgaagcgcgcagcgccgggccgtgcagcgccgcgaactcggccaaggcctgcgcgccctcctccggcgtctggcccgggctgctacgctccgcaggccggcgctcgggaccccgctcggcctccatggcgccagcacccgcgccgactccagcgccgccaccgccgccgccgcccgccgtccgtcggccctgccctcccgcctccgccccctgccccgccccgccctcctcccagcgcccccccccccgccccgccctcctcccagcccccccccgccccgccctcctcccagcccccccccgccccgccctcctcccagccccccccgcctccgccccccgccccgcccgcctcccagcacccccgccccgtcctcctcccagccccccgcccaccgccccgtcctccccccagccccccgcccctgccgcgccccctgcccccgccccctgcccccctccccaccgccccgtcctcctcccggcccccccgacccctcccctgccccgccctcttctcgccccctcaccccgtcccgccccgcccccagtccgcctccagcccggtttgccgcggcccccgggcaggccctgcgcatcggcggggtgcgtgcgagagcgcgcgagcttgccaggagggggcgcgcgtctgcgaccgcgcctgtggtttggctgccgccgtgtgcgcacgcgcacctgatggtggctgagcttttctcgctcagcgcgcggcgaccccggggaatgccgggagggcggggtgcctacgtatagggcgctgtcaggaccggaaaaggccccaccgacggcccggaaggtgtcctggggcccgaacccggtgaggcggcgcttctgtgcctgcaccgggcacacagagctcgcaggccccctgccttgggagctctcgattcttgtgagcgtttcaccagatttggatgctgcaaaatcgtggcccttctcaattacttatatttggattcggaatgtcagttgatccaattaagaccaagtgtacccgtcagaggaatttactcctacatgtcgggatgtttcgaagtgcagttgagctgggcgtggtggccgcgtctgtagtcccagttactcgggaggctgaggcgggaggatagcttgagcccaagaattcaagtccagcctcggcaacatagccagactccctctttaaaagaaaacagttcagttatagaatttcaaaagacattctcttttgaactctcattgagttttattgctccatagggatacatttcaatgtcttcctttttgcaattttgtaagaattgtaatttgctaaaaaacaaaggctgaaaattttttggagcttcagatgctattttgataacatttttgaactgagtttgaataaaatgcaccaattcacggacttgttcaattccattgtaggaagcaggtgggtctgcaaaggcaaaaatttccaaactcaagttggtgagggctgcagagaaaaacattttatttatttatttattttgggatggagttttgctcttgttgcccaggctggagtgcaatggtgcagtctcggttcactgcaacctctgcctcccgggttcaagtgattctcctgcctcagcctcccaagtagctggggctacaggtgtgtgccaccacgcctggctaattttttgtattcagtagagacagggtttcaccatggccagaggaaaaccctgattcctcggtttttgttgtggaagccaaggctgagattgtaccattgcactccaacctggtcaacatagcgagactccatctcaaaataaataatatagtaaaacagcatcacaatgctaggatggggcatgctggctcacacctgtaattccagcactttgggaggccaagacaggaggatcacttgaaataaggagtttgagaccaggctgggcaacaaagcaagacctcgaccctacaaaaagaaatttttaattagccaggtatagtggtacacacctagtgcacctcccgcttccacaacccttccatcggtcccgctggggaagacagactgagtctcagttgtgtcaggtactggtcagattatgtgaacattcctgacccagcccctttgaccaggagaatgtgaggctctgacagggcagtcctctttcacatgctcctccccaaatgtaaacccagttgtatcagat

SEQ ID NO: 1563087 - DNA, 4001 bp, Homo sapiens
gttttcagctaaacacccaaattcttaagcacgttcaaaataaagttttgctgtttgaattgttgatttaccaggcattgtcagaaacacgtctgtggatcacacattcaagcttgtgcacagggctgggttaagatcctcgacacgcccctgtaaacatcctctgggctccactctgtaccacaatggcattcagatccaaattaaagcatgcaagggaagcacttggaaaatcctaaaacactagctacctgctagatattataaatattaaatatcaattctagagtatgcagcctagcatttgcttcaaaattatggagggagggaataaatgaagtgagacaggtcagaagttggtaattattgaacttagatgatgtatataatcgctaattataccatttgctctccgtttgcatatgtttgaaattccctaccataaaaagtttaaaaataatgaaatctaagtggagtcttggaaatttgaattataaccctcttcatttcgcaggtaaaacaaacacatccagagaggttaagtgaccttcctgaagtcacacagctagctgcagagccaggagtcaaaattctgaactggcagctccgggccctttgtgtggcctcataccagggtcctcaggcagaaataggttcctgtggccaccctccctaatattcccaagttctttcagttcccaggggtgtctgggagcccgctaggaggagggagggtgctgacaaaactgaagctggaaggctagagctccgggggagccaggaggccctgggcacgggccaaacgtaacagggcggggcggagggggttctcgcctgctttctggatcactgacacctggagcaagcctgcccagggaacccgaccttggccatgacataggcttattctgccctcactctgcccccaatctttccagcccatctccctactgctgaaagatcaggggtccaggagggattcctgggattctgggctttgggaaagtggactgggggcaaatgttaaccaccaggggcactgggggcggagagggggaccctagaaagaggaactgagtgtttgcagccgcccctcagtaagatccaggggcgggggcagggaagggagcagccgcgatccccctaagccagggtaggaaacaggtcgaaggtcccctggcctttggaagcagagacttcttactcccaaagtccttcgactctgaccgctggaaagacttgggagctgctgagtgcgcccggaggaccccgccgcgctggggctgtgcgtgcagcaaacccaagccgctggccaggcttgcgagaaagacctccacgcgtggggggaccgtggcgccctaggtcctctgtcacattccgggccctgtcacattaggctgggttcggagacgtgactgcatctggccccccagtcgccccggcccagaccacccatccagaatccccggactcgcccttctctccactctgtccacaggctgcccatctggggaccccagaatctcgcccccttctccgtcgggctccccagggcctccctccccctcgtctgcacgcaaagctcccttaggtccctttaaggaacaactggcccctggtctctatttcccccatacgataaagggcaccgggtgttcccgcccgagggtgcggactcctcgaccctgaactgccacccccagaaggccttgagccctgcggctccaggaagacgggtccgtgcgcctccgcgtagactcggctctcggtcctacgcctgccgcgcgcccgcagcccgcctggccccgggaagcctcaccatcgctgccgctgtcctcgcccgcgcacctctcagctgggcctgcccgccccgactgctccagatacagccgcctccgccgttgtgacacaccgggagggggggacgccggggacaggcgcgccgggcccgcagctgccccccggcatcacagtgccggggaggggcgggcaggtcacaaaggcccctccccgcccacccgcggctcaaatctccgggtcctcggtcccgcctcagcagccgggggcgctcgcagcggggactgcgcccgcgggggaggctgccctattaccaaagcgcacgtgtccacgttccaacaccgccggcgagagcagccttcgtgaccccagctgccggagaaagaaatgtaaaatgcagccaggcgaatcgcgcgggtctccccaaacttccgttctcctccgacccgctggaaaggctcctgactggggtgcagctgaccggagcgggctgcagcgggcccgggtgccaaggtgccgtctcagctgggcgccctagggccgtgtgtgcttggcaagctgcagggcctctgctcccaaagcctgtgcctcctgccgccaaggcccgcctggttgctggagacggaaatgagatggcatacacagagctcctggtacaggcaggtgctgaagactgttcccgtttttaccctctccccggatacctcgcacctccaccgggattttcaaatctccccccttgatcccttcctacttttaagccccaaacgtgtccaagtcacatctcctatgtaatccagaactcataccagggttcccctgcctctgcccagtagtaagacccgccagatgctgttggttgccccctgctcgggaaggggtgggcacttggtaaaagcccctcttcacactttagatgttggccacgttgtcaccctgcccatctcccctcacttccccccaggtgggtgaggggctggatggtctttgttccttgttctcactgctgtttcttgttctttccctccagtggtcagttccattcatgttgaaaggtgtaccccagcctctctcttccactttcctcagcaccaagccaacgcaggcaaattcataggttttccttaagacaataccactttagccagacgtggtaactccccaagtttccaagcacagttagagatcttcctacccttctgctcctaagacatgcctgcttgtggccaatagagaatgagagcagatttctgcttacctatgcggcaatctgttctgttggccacccattcataaacgatagtacatgtgtcgtaatcatctttgcatttgagagagtaccaaacacagtgctttacccactgatacaaacggtacttagtaaagcatgcgttgaatttttgtctatcttataatgtaagatcctgacaattaagactcaggattaagctaattgtgccaagcacatgataaatggtcaataaaggattttggttattagtataactctatgtgtatttctcttccaaactctcccatagcatattctattacttcttccatagcatttcttttattttttattttttttgatggagtcttgctctgtcgcccaggctggagtgcggtggtgtgatctaggctcactgcaacctccgcctcccgggttcaagtgattctcctgcctcagcctcccgagtagctgggactacaggcgcgtgccaccacgctcggctaattttttgtatttttagtagagacggggtttcaccgtgttacccaggatggtctcaatctcctgaccttgtgatccacccatcttggcctcccaaagtgctgggattacaggcgtgagccatcgcgcccagccccatagtatttatcactttctttttcttttttttttttttttgagacaaagtctcgctctgttgcccaggctggagtgcagtggtgcgatctgagctcactgcaacctcgcctcctgggttcaagcgattctcctgcctcagcctcctgagtagctgggattacaggcaggcgccaccatgcccggctaatatgtatctttagtagagacagggtttcaccatgttgttcaggctggtctcgaactcctgacctcgtgatccacctgcctcggcctcccaaagtgctggaattacaggcgtgagtcaccgtgcccagccgtatttatcactttc

SEQ ID NO: 1563088 - DNA, 4001 bp, Homo sapiens
ctcaggacaatgcagccaccagactatccccccttttaccatgataaaaggaaggtcaccgggccgggcacagtggctcatgcctgtaatcccagcactttgggaggccgagacgggtggatcatttgaggtcaggagttggagaccagcctggccaacatggtgaaaccccgcctctactaaaaatacaaaaattagttgggcatggtggctcacgcctgtaatcccagcactttgggaggccgaggcaggcggatcaagaggtcaggagttcaagaccagcctagccagcatggtgaaaccccatctctactaaaaatacaaaacttagctgggcgtggtggcatgcacctaaatcccagctacagctactcgggaggctgaggtaggagaatcacttgaccccgggaggcggcggttacagtgagccgagatcgcgccacggcactccagcctgggcaacagagcaagactccatctcaaaaaaaaaaaaaaattaagccgggcgtggtggcaggtgcctgtaatttcagctactcgggaggctgaggtacgagaattgcttgagcccagaaagtggaggttaaggtgagccaagatcgcgccactgcactccagcctgggtgacagagtgagacactgtctcaaaaaaaaaaaaaaaaagaagaagaagaagaagaagaaaggtcacaggaagcattttccaaaccccgagagagatgaaagaggaaaaactaaacattctaccttaatagccagcccagagaggtccgcattgtctggcacggggggcaggcccagtcggacgtccatgtcataagtgcggctgtgcacaagggccccgaagagcgagacccgggtgtctctctcgaacctgtcaccacaagggtcaccaaatgagaagagcccgacggtgggcaggccagtgcctggagcagcctccataacctgaagtgtttcctggatcatgctgtgacacaaacactcttctctggagatcagagactgaacgtccatctcaaacacactcaggtcgtcgcaatcatagccgctgtacggaacgtttctccccacatgcttgttgttaaggaagtagtctcgttttctcggcagaacttgagggggaccactccctgccagctgaaccaggaggtccaaaacagaccccacctccaaaagcggacagcaaggggctgcttccagctcctccacaagctcctccaaacggtcggccttggggcccaggccacccactctcaagtcaaaggacaacatgaggatcttgtttctcgctggtagttttgacatgtcaggctgcagctgttgagtctcatcttgaaaaagatttgtgaaaagagcattgtaggccaccttcttgaggctccgctttgccctcttccggttcacactgcgctggcccaggtgagtcttggcagccggcaggagggcctcacacaggtcgtcgaacagctgcgtgatgctggccatgccccttctcagctccgggcccccggcgtgtgggaaaacacctcacccgggcttcactcacgctccggaagacagggagtgagagagggtccgaagaggctgaatgacaggcggcctctccaatgccgaagctcagaactggtattttttaaaggaggtcttgcggttgctctactcagagtaaacacgccctgccctccccagtccaagcacgctgcccggcgcccggcagcccaccagaagccagctcggcgtttcttctaattcagtagccctcaacctttagggagtcacagaaccgtggcaaaaccgaagaacgaaacgcgcgcccgcgcagtacagcggacgaactcggctttgcacccgttcttcgggacccacgagaggagacggccaggagagggtgccactccgagggtcgtgggcagcggagagtctgggggctcagccgggtgggtcccgggttctggcctgcacgtccacccgttctccaggcctcacccgtggaaagtgcccacggctgccgctctcgccgcctccgtcgcgtcacagccgcgccagtgtgaagagcactagggcgggcgcgccggaaatacgtcacgggaacgccggcagcgcgtgaagttggtgaggcctgggccgcggcatacttccggcctgagtccggcaccgcgggtgagagaccgaggccgagcgtgctcagtaaaggaggcagagccagcgtttcgtttgagcgatgtttactaacggcgcaagggcggggagcgaagcgcagcggggcgcaggggccggaacgggaccgagcgtgggttgcatgggcctcgatgggacgggccggggcgcgatgggtggggcgggggcgaggtgaggtgaggggtggagcgggggaagcacgggtgggagagggcggggcgcggggattgggagtgggcggggttccgtgccccagagtcgagggagccgtgggcttggggtccggatcgcggccgcggggcgctggcgtgcggtgtcatttctgcggtgtaaatgctcccaccttggccgatttcaagccaccaggtgaggatggcactacaggaggagccgagaagaggcgcgcagttggcctccggcgctggagctggttcagggcactcccctgccctgccctccccaccgatctgtgcggcagagccaggccccagggcagggccatgcctccgcagtcagcctcacctgcaacatcttccactgaggctccagctgccctctcaggtacatcagggcctggacgtcctctggggaggccacagaggaagggcctaggctaggaggtgcctctccattcagcacccgggccaggatccctgctagctggggtgtggagttctggaccaggggcgaagacggaagcagtcactggtcctttccctcgtcccaccccgcagcacctccaccctgcccagcttacctcctccaggagggccaggactcggccccctgccagcccccgaagcattgcagccaggagtgcagcgtgggggccctgcaggccatggccaggccccagcgccaccagcaccaggtcaggctggaagccataggccaggggcagcaccaagcccaagatgcagctcaggaaaccaccggtcatctgtggggacagcagagcccagctcctcatctacggacacctgctggctctggcctcccaacctcccaatctcagggcccctggagtaggagcagggagacaggaaggaccagaggcctgctatcatgacaatgccagcaaacagcagctgtacacatccatgggctccccagcacctgccttgccgcgtggcatggtcactcaccactggcagtggcgtggagacatggaacatggatagggcagccgcctccttgcccctgatgttcagccacagactcctccttccaggacacaggtgcataagtgtaaggccctgctcaccctcctgagcccaaaccgcagaggcagaggtggaagagcattcacggggccatgggcaggggtgctgtgactgctgagcctctgtgctggagacccacctggcattgcctccagcagcccttctcccacaccccagctgaggaaggctccattcagtaccacacagtgccccacccacccgtcaccctggggcccaggcacacgtccatcacatgcccgtccacatgcatggctggacatatgcaagacctgagagtcctacccgtcatgggcgaggtctggaggccggtccagctgtcccagggccacgcacagcagcctggaagaagagctggcctcaggacaggtgttcatgttgtccagagtccattcccagaactctctgtgcttggccagccaggataggggtgcccacaggtcctgccgtcagaggctcaggatggccaagtgaggcttacctctgggctccgtgggacaggcctctccgaacagccacatccagggtggctgctgcagcagaggctggagtggctgctataccactgttcacctgtgg

SEQ ID NO: 1563089 - DNA, 4001 bp, Homo sapiens
ctgaatttttaacttatgctacactggtttctcccaggatgcctcattcagagggctttgtccagcttttgtgtagttgggtgtctagccaggccccaaagatctagaaatgaaaaagcccaggctaaaattcagaaggccagagggacttaaatatctctaaagcaaactcagatagcactgaaaggaaactccttcctatgccctgtatgcttgggcaccacggtagtgacaccgataactttttttttttttttttgagatggaatttcactctttttgcccaggctggagtgtaatggcgcgatcttcagctcactacaaacactacctcttaggttcaagtgattctcctgcctcagcctcccgagtagctgggattacaggcacacaccaccacgcctagctaattttgtatttttaatagagacagggtatcaccatgttggccaggctggtcttgaactcctgacctcaggtgatctgcccgccttggcctcccaaagtgctgggattacaggcatgagccaccgcacccggccgacactgataactttttgccagcccttcttgcggttttcatggcaggatgttaacatcagcttatctgcagggccaggaactggtatacaccaaaagcaaggtgacagtcatatttttccaactctggtccatgctaaagatgacgctgagctttctggggattgagaaacagaacatgtgtttcccagcactaacagtcagctttgcagactgttcacttgtctgtcttccaccagactgcattccccttgagggcagggactgggcctgaccagtctgtatattgagtctacatatgagcagcatagaacatggccgtgggacacagcaggcattcaataaatacttgaacaagtaggaccctagtcttctgtggacccccaatactcactgtgcgtggaaatccacaaccactggtgtctcactgttgaccactcggtcttgaaagtcaggtccatcctggatattaaaggttgtcaaggagatcctcgtggtgtatattgtccgggctgggttgggtgttacagtcaggccaccaggactgcattgtggggtctgcagggctctggaagtgaggggtggccactgaccctgagagggcttcctggagatgacagaggccaggaacctcctcagaagaagtcgctgagccatctgtgagggaaagaggcagaagaactggggcacacaaaaggaagtcgacacactagaaaaagatttggggagtactcagggctcaggaagaggcagagttggaagcaaaatgcaaggaaatcatatgtaagatttgtagcgtggaagtgaggaagcaatgagaatcaaagggaaggaacagctaggcaaaccagaaggacaggaaaactggcttcacaaccaaaaagaaatcgggatttagattataacggaagaatgggaggaagaaaccaacagatttaataatgtatgtaaggaccaagtaccttacacacattattggtcttcctacagcaacttccaggaagttgctattgtactgcccacactgcgagtaagggaaggaatacgaggctcaagtaagttaagtgacatgcccaaagtaaccccgctattaaatgacagccaacactggaacccagggtcgtctgaaaagatgaaacgcaacaattcaaggaggaactaagagtgtgagaggaaccaaaaacgaagagacatgtactggagggaaccaataaagaagggacatgtgtggagggaactgggaaaaatcggacatcaccagggaccctggctctccggcgagctagatccccccgcccgcccggccgccagcctgcgcaggaacgcgctcgcggcatgcctcagccgcgacaccacctcgagccacccccacagggctcctacctccctgcaatgcgagcggagggatgcacagcctagccctccctgcctgtcaagggcacgcctgtcgtcacttcctcggggggggacgtacataacgtcacttccgggtacaggcaggcggaagagcgtccctctccaattttttttttttttttttttttttttgagccagagtctcgctctgttgccaggctggggtgcagtggcgcgatctcggctcactgcaacctccgccttccgggttcaagcgattctcctgcctcagcctcccgactagaggcgcgcgccaccacgcccagctaatttttttatttttagtagagacggggtttcaccacgttggccaggacggtctcgatcttttgacctcgtgatccgcccgcctcggcttctcagagggttgtgattacgggcgtgagccacagcgcccatctgtccctctccaatttgaggggcgtctgggattttccgccaatgggaatggcgggctgaggcacagttgaaggggcggggcctcagctacggaccggaagcaatgggcaggccgtcggggaacggattggaagaggcgggcgggccctggtctgggcgaaggcgggggcggggcggggcggaaacggaaggggtgggcgggccctagaggagggaccggaagaggaggtgatggagcaggggtagcaatggagggtacttaagggagaaaaggcagttgagaagtccccgtggttttggattttgcaaactcttgttgctttattttatttacatatatttatttattaatgacagagtctcgctctgtctcccaggctacagtgcagtggcgtgatctccgctcactgcaacatccaaatcccgggttcaagtgattttcctgcctcagcctcccaggtagctgggattacaggcgcgcgccaccacgccgggctgatttttgtatttttagtagagacggagtttcgccatgttggccaggctggtctggaactcctgagctcaagtgatccgcccgcttcagcctcccaaagtgctgggattacaggcgtgagccaccttgcctggcctcctgtttataactggcgctgtccacttcctacagatgttgacaggttctgtttctccatttaatatgtaaagctaagctcctcaaaggcatgatgccctttatatgtaaaagaactcaaccgggagtttaggggccatcctttaagtggccctcgtctgtgtccgcctaaaggaaaacaaatgaaaactgaggcgagcctaatttaagcagggagtttttttgggtcaagttcgaagactgcaactcggagcagagattcaagttgtcctgaatatacactcggattagcagcagctgaaagagcgtttttaaaagaacaggcagtttccaaattgttgatcaaagttttttttttttttttttttttttttgagacagagtctcgctcttgttgcccaggctggagtgcagtggcgcgatctcggctcactgcaacctctgcctcctgggttcaagggattcttctccctctgcctccccagtagctgggactacaggcgtgcctcaccacgcctagctaatttttatatttttagtagagacggagtttcaccatgttggctaggatggtctcgatctattgacctcatgatctgcccacctgggcctcccaaagtgctggaattacaggcgtgagccactgcacccagcctttttttttttttttttgagacggagtcttgctctgtagctaggctggagtgcagtggcatgatcttggctcaccgcaacctccacctccagggttcaagggattctcctgcctcagccccccaagtacttgggattacaggcgagcaccaccacacctggctaattttttatatttttggtacagaaattttatatttcaccatgttggccaggctggtctcgaactcctgaccttaagttatcgctcgcctcggcttcccaaagtgctgggataacaggcgtgagccaccgcgcctggccgccctgcccatttttgtatcggttttctgtgtctctagcactttcttttccacagcca

SEQ ID NO: 1563090 - DNA, 4001 bp, Homo sapiens
cagcactttgggaggccaaggcaggtggatcatgaggtcaggagattgagaccatcctggctaatacagtgaaatcccgtctctactaaaaatacaaaaaaaattagccaggcgtggtggcagatgcctgtagtcccagctactcgggaggctgaggcaggagaatggcgtgaacccgggaggcggagcttgcagtgagctgagatcgcaccactgtactccagcttgggcgacagagcaagacactgtctcaaaaaaaaaaaaaaaaaaaaaaccccaaaaaaacaactcatatggtttagtaacagactgggcacgaaagggctatttaaaaaacagttgctcctctggcggaaaggaatgcctggagactacttattttatttcttactgggaggaccaggatcatcatcctattttgcatagaaggttcagtttgttctttcccttaaaataggaagataagggcattatccccctaagtctcgtatgatattccccattctgagtccagaatacctagaaatttggaatttggctattgccgtgtctggactgtgagtatgggaaggggaagcttttctgtctgttgtccccactaccgcccctcacatccgtgattctgaaccccatgataaatgccctttgaacctttttcctccttttgatgccgaatccccttttatgggactccgccagcacgggtgcatttaaccttcctgagcttgcccacctgacgcatgcagccaagaagctttgaaagatggagtgccctggctgagggttccaggtctcagcaaggccacgaggtggtgactgcctcccagaactctgttgggccaccctccgtcctggagacccccaaaacctccatagcaccaactctgcccattcacacacacagtcagccctccctcccgagtccaccgcgggcagagggccagccaccatgcctcccatagccgccatccctgggaaggagccctgaccccgtccttacacccctctacactcactgcctgtggggagagctgctcgctgtcacaagcatccagggggctgggtcgaggggccccctgcatggtgggggaccatgttgtcgtgcatggaatgaaactggccacacataacagatatggtggcgctctggtcggatctaggggagtctgtcctacaggatgaggcttgaactgtcctgagtgaccagacacccagcctctgcttcgagtgctcagttatgattattgtcctgatttagttaactgttcttcaggggctccaggaggacgagtgtgtatcctcccattgctctgtgcagcctctaacctctagagtctaggggtctggggagaagttgggaagtctggccagtggggccggtgcctggtgacctcgggaggtgggatatcatcatcttcagaactgtagttgttactgggataccagctctgggagaccacaggtgcagtcagcacagcaggaccttagacaaggcacccagccccagtttccccacctgggaagggggctacttgtggctagaagcagcccggactcctgagcaagactagaccaagaggccggtatgtggacacccccgcgtgggcacccccacggggacaccctggccaccgccgcgcggacaccctcacgaggacaccccggccgcgcggacacctaccgcggggacgccccgaccccatcctacctgctgcgccccgcgccgcgccccgcaccccgcccgccacggcctgcgtccgccaccggaagcgccctcctaatccccgcagcgccaccgccattgccgccatcgtcgtggggcttctggggcagctagggctgcccgccgcgctgcctgcgccggaccggggcgggtccagtcccgggcgggccgtcgcgggagaggtgagagcgctggctagaccggggccgaatgcggccggattcggggcgggggccttcagacctagggtggaacactgggatagggtgtggggaattcggaccgctgtgaagtgatctgacgttgggtgggagtctccggacttggggtggggaatctggatgggaactggggaattcggaccttgggtggggatctttggaccggggtggggtccccagactccttgtggaaagctgaggttgaagatctgtgctgtgatgaggggctccagatagcggtgagagatcccgcttcaagactgggttgggggtccagaccaggaggataagcctctccctggagtagggcttgacctggtgagggtgtggtagagtcacaggggagggtcccacttggtccttgggctgggatcagactctcagagctggagagttgcaggaggcctgggggagggtctgtggagccccagactcagagggccttggtgacttctccaacaggctccctgttggaggccttggggtaccccagggcctttccctgcaagagagaggctgctccaccaggaaggggcccaggactccccagggtcggggggatgtgtggtgtgcaggaccacgtgggaatgttagagaaaggggaagtcactccgggcctgccctgctaacagacctgctttttggatttttccagccagggatttttgtgtcctgttgctttttattgtttaaagtgaccctccaagcctgagggaccgtaggagctgccctgcagagcccagtgagacactagttaatgcagaaaaaacagattttacttggtaactactgacaacatgagaaaaagctggctccatgctgatttgtctagatgtgcctggagtttaaagggagagtgagggagtgggaaggggtggggactcagtagagttagggaaacagaaaatcaccaaaactgggaagggagggttggcccctgtgaaaccaactgatctgggtttgccactggggcttaccgaagtcaggcccccaacctcccacagagactgggagacaggggccccatcctcaggtgttggctggaacacacaggaaattcttgtggcagccttgaacttctcaggcaggcactttagagggggctaggatcgttctgggaatgtggccttgagctgttaggagctatgttagtgttcgttccagcctagataggccagggtgaggcccagtggagaaggggactctaaggagcctggctggagtgtggggagggagggtctttgtcagcactccccctgtgcaagaagagcagagacctgcttctttcctctcaacagtccccgtccattttctgttctgtgttgtgttcataaactaccagcgggaccatctgttgagacttggtagcaaaggatttttgctggatgatgcaagcagtcaagcatttaatgaggaaacaaaaataacaggccaggcacagtggctcatgtctgtaatcccagcacttttggaggccgaggaggatcacttgaggccaggagtttgaaacaagcctgggcaacataaagaccccatctctacaaaaaatttaaaaattagcccggcgtggtggcatgggcctatagttccagctacttgggaggctgaggtgaaaagatcgtttgagcctgggaggcggaggctgccatgagccatgatcttgcctctatactccagcctgagcaacagagagcccctatctttaaaaaaaaaaaataataataaaataaaaaaataaaaagaaagaaagaaataaaaacaaagatgaatggagctgttgataaacccagtttttgagcctacagggcagcagttgaggtttctggccgttgggccctaacaaggccagcaggggcactcagggacttcctggtgtgtggtgtgaagtctgtgatgatggcataggcattggtatcccagttgtggttactttctggagagagcatgtggcatgcaggagctggagggggggtcttcctgggcggcctgtgtagcagcagctccaggcacaaaggctgcccctggagaatctgttgtggttctgagttctttcaagt

SEQ ID NO: 1563091 - DNA, 4001 bp, Homo sapiens
actgcagcctagacctcccaggctcaagtgatcctcctgcctcagcctcctgagtagctggaaccacatgcgtgcaccaccacacgcagcgaactattttgtagagatggggttttgccgtgttatccaggctggttttgaactcctgggttcaagggatctgccctcttcggcctccccaagtgctaggactacaggtgtgagccaccgtgccccgccagccatctgtgattttgaccaacttcccattttatgatcctaatcaaagttccactgatgatttcggcccaggcccagtgactcatgagtaaccttgaccagtgttctcattagtgaccctaatgatccaccagtgatcttttagtgattctggccagggtctccatcatcaacctggattaatgactgatccgtggcgccccgtacctgctctgggctctggatgacattgaatccaggaatagactccagcttatccaaggtgcctcctgtgtgccccagaccacgtccgctgatcattggcacctggtggtcagggatgctgagtaccctgcacagtacccctcccccacctctgtgcatcccttcaccttccctggctaggagtgcagctggatttggaaagtatttaagcagctataggggtgcccagctggtgagggaatggaaaggaagttttcttggttgagaagtgtcagtaggggaggaggttggtacctgtccttggggaaacaaggcttggggcagagggaggaaagtcctcagctcctcccttgggggagctgtctggggacccaaggggaaaggggtctgaattccatcagtggatctttttcctgctccaaggggcctggtctggagccagaggggccccaagcgctgtgctggggaacggggtggggagaactgtgctggggagcagggtggggagaagccttggtagggtcttggaggctttgggccaggcttgaggttgggagctgcctgtggatggactggttgctgcatgtgcggtataggctcccgtctggaaaggaggtggtttctaaccttgcagccacatgccgccagggcaggtgcgaggaccaggctgaccttgtcacccacaccccctgtggaatgcttgtccacaagctgctggcgccaggcctctggccactccagctgctgtcccgactgagccagggcctgggtcagcaccgaggtctcctccagatccatgccccgaagtcggatggccatcagcatggcccctggtatgtgggggtacgcgtgagggtggcagcccacagcggtggggcaccctggggccggtgctggtagtggggcaccgtcgcacccccagggacccaaagtctctcgggctgacctcccagtcggggtcaggaacgcccaaccctccccacgcaccgatctgtgcgccctgcgcgctcccattcaccacagcggccacgaagcccctgatgtccgcttcgctcaggcggcctccgtctcgcttcatgcggatcagctccgggagctgcttgggctctggcgaagggtcgggaagtccctggctcccttccccggagaagtcaccaggcgcgggtggggccccggttcccggggtcatcaaggctgccatcgctccgggcctgcggggatgcctgacacgtccggggtctgcggcctcccggcgtcggtgtctgagccacgtgctcctgtcccgacccctttcccgtgtctctccggtgtccgcccctcggtcccgtgtctgtgtcgccctcgtccgtgtctgcctcccgcttccccgcctcgcgacttgagccccgcccgtacctgcttagggcgctgccctcgcccgcttgctccggatcccagcccaggtacccggcctcgcccgcgggtcgggaccgtagggttcagggttcgcgcacagcggtccactgccggcggcggggcggcggcgccccaggacggcaggcgggtggggccgcctggagggcggagctcggcagtcgccgcccccgggaagccttgcacgccgcgccccggccaatcccccggtgcccccggacacgcggaacttccgggccgtcggggcccggggccgtcggcgggggtgatccctggccggtcccgcccggcgtgggtctcgggcgtctgtggctcccgagagtccccctcccgccctcggtggggtctcgacgttcggacgcggcgcagcgctggggtcccggcctcgcccgacgctcgggccccgccccgctgggttcggagttgggacacggccccagccgtggctccaccccaggccttgcgccaggacgcgcagagagagagagagagaggcggacacgatgcggactcgcagactttaagcaaacacgtgtggggccgctcccgcctggcgggtcagttgtccgcgtcggtcaccagcggggccaggtagtccgagtgccggatcccgaaactccagccgcggggcttccggtgctgcgggcccggagacaccgctgacctcgcggggccggcatcctctccgcgccgggacccctggacccccggggactctgatcccatcactccgacctcaggccctccccactctcctgactctgacccttgaccctgggctccaggccacctgatccacgttgtaggccgcgggccctggcttccgagtgttgtcttgggggagcgaagtccgcgccagaatcgtgaactggggggcccgggacttgtagacccctggactcacgacctgataggcgcaggggcccggggtctgcgagagggcagagggtgctggctgccgcctccactgccgcggaccagggaccccctgcgtccgccccggcccctcccccaccttgctgaggtcctcgaagaaactgccagccgctctgcggccgtagatggagcaagttggggcggagactttgccgatgacgcgcggacccaagagcgagggcaccgtataggccgcgggacctggggaggaggcagggctcgggggtagtgggtctccgcggacaggcgcagggtggtcccagctcccggagggcggtccccggtctcgagtgggaaggcccacagttctgggatgggccgttctgacctcacctgggctctgctgttccgcctggacaccccagtttcggggagcaatggtgtgccgaggcgcactggggtacgtcgcgttccccgctcgctccgggaagtacctgcctgcggggcggatcaagggtgtggggggctagaactgcgtgggagcctggtgggtacccgagatggggtcctgggactagtggggagtctgagccacgatttatcaaagccccgtggggttcggggtttgggatttgagatccggatatgggggtaccgaatatgcggtgttagggtatccgagggggactcggggttcaggtcgggggttcccaggtgggcctccctggaggcagttcggcgttggggtggccaggggcccgggggtcctgaccaggtcccggagtgaggaagggcgctgagcggcgtgggcggccgtagatggagtaggcgggggcgccgtcggtgccgcgcacggtcatgcgagcgggcaccaggtggcctggcccggggccgcacgtcgtctgctgcgtggggaagcgcgcgccgaaggtgaaggcgggggcgcgcggccgcgacgggtcatgcagggcgtagcctgggagcatccgagttagcgtctggccgggcccagccccaagccccatctgcaacacggaccctcccccggcacagaccccctctcccctctagcaggcacggttcagccccgagcgcaggcctccctggtctcttccccttccctcccccaggcgccgtcccacccctcaatcccggggcctgccccttctaccggtgttgggcggcagcttgtatttgggcccggggcctccgtagtgcgccgcgatggggccgcggggccggtgtggccgccaaaggcccacccaggcgtccgagcccatagcgcgggt

SEQ ID NO: 1563092 - DNA, 4001 bp, Homo sapiens
caaatacaccacctgaacccacgaccaggtatgcccacaccccatgggtggccttaacacacacaccctgcccctttctccaagtacaggagcagcagcccagacttccctcggggcaccgcggcctgcttgggactgcacagtgcctgggagggtgcctggggagggtcacaagggacttggtgctagaagcaggaaaagtgtagggaccggaaaagcccccgtgcatcctggaagggacatgggccagtttgagcaggggtgtgggagtccagccctggccttgccaggtggagaggcgcctgggccagacatccgcggcaggaggcgggggaacatgccaagaggcggaaggggcacgcggagacccccagggggcgccggaaggggcgcgccgggcggtcggcggcggccgttggcgagctgaggcctgccaggcgaagtctggagaccagccgggccgcggccgcaatggccaaggactcgcccagccccttgggcgcgtcgcccaagaagccgggctgctccagcccggcggcggcagtgctggagaaccagaggcgggagctggagaagctacgggcggagctggaggcggagcgggcaggctggcgggcggaacggcggcgcttcgctgcccgggagcgccagctgcgtgaggaggccgagcgggagcggcggcagctggctgaccgtctgcgctccaagtgggaggcacagcgcagccgggagttgcggcagctgcaagaggagatgcagcgggaacgcgaggccgagatccggcagctgctgcgctggaaggaggccgagcagcggcagctgcagcagctgctgcaccgggagcgcgatggcgtggtgcgccaagcccgggagctgcagcgccagctggccgaggagctggtgaaccgcggccactgtagccgcccgggggcgtccgaggtttccgcggcgcagtgccgctgtcgcctgcaggaagtgttggcgcagcttcgctggcagactgacggcgagcaggcggcgcgcatccgctatctgcaggcggcgctggaggtggagcgccagctcttcctcaagtacatcctggcgcacttccgcgggcacccggctttgtcgggatcaccggacccccaagctgtgcattccttggaagaaccgctgccccagacctccagcggctcttgccacgcccccaaacccgcctgccaactcggatctctagacagcctgagtgctgaagtcggtgtgcgctcccgctcgctaggcctggtgtcctctgcgtgctccagctccccagacggcctgctctccacgcacgccagctcccttgattgcttcgcacctgcgtgttcccgctcgcttgacagcacccggagcctccccaaggcctccaaatccgaggagcggccctcctcaccagacacctccacccctggctcccggaggctctcgccgccaccatcgccactcccgccgccaccaccaccgtcagcccacaggaaactcagcaacccgcggggaggagaaggctctgagagccagccctgcgaagtcctgactccctcacccccgggcctgggccaccacgagctgataaagctgaactggctgctggccaaggcgttgtgggtgctggcgcgccgctgttataccctgcaagaggagaacaagcagctgcggcgtgcaggctgcccctaccaggcagacgagaaggtgaagcggctcaaggtaaagcgcgcggagctgaccgggctcgcgcggcgcctagctgaccgcgcccgcgagctgcaggagaccaacctccgggccgtgagcgcgcctatacccggcgagagttgcgccggcctggagctgtgccaagtctttgcccgccagcgcgctcgggacctgtcggagcaggcgagcgcgccgctggccaaggacaagcagatcgaagagctgcggcaggagtgccacctcctgcaggcgcgtgtcgcctcgggtccctgcagcgacctgcatactggaaggggcggcccctgcacccagtggctcaacgtcagagacttagaccgcctgcagcgcgagtcccagcgggaagtgctgcgcctgcagaggcagttgatgcttcagcagggcaacggtggcgcttggcccgaggcgggcggccagagcgcaacctgcgaggaggtgcgacggcagatgctggcgctggagcgcgagctggaccagcggcggcgcgagtgccaggagctgggcacgcaggcggccccggcgcggcgacgtggcgaggaggccgagacacagctgcaggcggcgctgctcaaaaacgcctggctggcggaggagaatgggcggctgcaggccaagaccgactgggtgcggaaggtggaggctgagaatagcgaagtgcgcggccacctgggccgcgcgtgtcaagagcgcgatgcctccggcttgatcgccgaacagctgctgcagcaggcggcgcgcgggcaggacaggcagcagcagctgcaacgcgacccgcagaaggccctgtgtgacctccatccttcctggaaggagatacaggcgctccagtgtcggcctggtcaccctcctgaacagccctgggagaccagtcaaatgccggagtcccaagttaaaggtagcagaaggcccaagttccacgcacggcctgaagactacgcagtgtcacagcccaacagagacatacaggagaaaagggaagcctccctcgaggagagcccagttgcccttggggagtcagccagtgtcccccaagtttcagagacagtccctgccagccaacctctgtccaagaaaaccagctcccagtcaaactcctcctctgaggggtcgatgtgggccaccgtgccgtcctcccctactctggacagggacacagccagtgaggtggatgacctggagcctgacagcgtgtccctggccctggaaatggggggctcggcggctcctgctgcccccaagctcaagatcttcatggctcagtataactacaacccatttgaggggcccaatgatcaccctgagggtgagctgcccctcacagctggggactacatatatatcttcggggacatggatgaggatggcttctatgagggggagcttgacgatggccggcgggggctggtgccctccaacttcgtggagcagattccggacagctacatcccaggctgcctgcctgccaaatcccctgatcttggccccagtcaactcccagcggggcaggatgaagctctggaggaagacagcttattatctgggaaagcccagggaatggtggacagagggctgtgccagatggtcagggtgggctccaagacagaagtagcaacagagatcctggataccaagacggaagcctgccagctgggcttgctgcagagcatggggaagcagggcctctccagaccccttctggggaccaaaggggtgctccgtatggctcccatgcagctacacctgcagaatgtcacagccacatcagccaacatcacctgggtctacagcagccaccgccacccccatgtggtatatcttgatgaccgagagcatgccctgaccccagcgggcgtgagctgctacaccttccagggcctgtgccccggcacgcactaccgggtgcgggtggaggtgcggctgccatgggacttgctgcaggtgtattggggaactatgtcctccaccgtcaccttcgacacactcttggcaggacctccctacccaccgctggatgtgctggtggagcgccatgcctcgccaggtgtcctggtggtcagctggctccctgtgaccattgactcagctgggtcctccaatggagtccaggtcaccggttatgctgtgtatgcagatgggcttaaggtttgtgaggtcgccgatgccactgctgggagcaccgtattggaattctcccagctacaggtgcccctcacgtggcagaaggtctcagtgagaaccatgtcactctgtggtgagtccctggattcagt

SEQ ID NO: 1563093 - DNA, 4001 bp, Homo sapiens
tttaaaagaactctggtgtccgtcaggggtagtctggggaggagagcacttgggagggcacctgagagatgaggatatagattcagagtaatttcagtaacattagaaagcaaggcatgcactccagaaatcttttttttttttttttttttgacatggagtctcactctgtcgccctggctggagtgcagtggtgcaaacttggctcactgcaacctccacctgccgggttcaagcgactcttccacctcagcctcccgggtagctgagattacaggcaaatgcaaccacgcccagctaatttttatatttttagtagagacagggtttcaccatgttggccaggctggtcttgaactcctgacctcaagtgatccgcccgcctcggcctcccaggagtgctgggattacaggcgtgagccatcgcgcccggcctgcactccagaaatctttctaaatttaaatccacaagggttaatggacgactgcacctgggagtagggtaggaaagaaagccattaaccgaccccttatctggtgaatggtggtgtcactagcttaagagatgaggagaggtctgaagtcctctgactgttcttttgtgcccacttccactccagttttataaagttaatgtcctctctagcccttagggaacaaaagaaaggaaacgttcccagggacggagggaatgctcagagactgtggctccaagttcaatgtctagctctaccaagcactgctccgcctagaacgaaccccagctctttatctcccctcaggaaactggctcctgggcctttttttaatttccggcccgttgcaggccggcagcactacccagccgccgactcacagatgctggcggggtgggctacagaggaccttggcaaatccactggcaaaagtactaagccaatttagcatgtgttcctcaccaaaaggtgccaattagcgagaaagcaccctgctgcattcaagatccaaagtaccaaattattattataaactttggcccgttttgattcgaacgactgaaatcaaccgttatccccccaaaaatggcactttatcagggaggggagatcgggatgactgagtggaggagagggaagcagaaccgcgccgcgatcggggccgacctcaggccttcctggagttggaacttacccgctgtgtgactctgcagtcacaaggcgacagtttgctaggacccagcgcaattccaaacgacccaccaacaaactgacctaactttggccgcctggcctccttctctctttcctagcccgaacctcccagactcccgagctgcggccgggccaagcggagctgcaagcccggcgcgctgcggcccagggcggggcggttccgcggcgcgggctccgggcaggggctccggcgctcgggccttccccgaaggcgcccggtttggagcctcccaaccgggctctcacattaacgacgccctcagatcggaccgcggcctccgcgacagggggacgcggccaagctccgggcggagagtggcgtgaacgccccgggccgggctgaggggccgacagcggctcccagcgcggccttgcgctcccgcccaggctgcggcctaggccagccccgttagcaccttgagcctgcgcgcggcccagggaaccgacgaggccgtgtagggcaggaagccagacggcagcgccctgagaagccgccgcctgcctcggggatccggagcctaggacgccgccccacgcccggccgctgccagagaatggcttttaccttcatcagcctcctgctggccgccatcttggatttggtgctgctccttccccagaatgcatcgcggccggccgggcggctggagcccccgcacttcctggagcgggggaggggccgcggggcggggcacaggagcagagcggagcacctactgtgtgcttcccactgtgctggggggcgcgtggaggaacgcaagtgaaccgcacagactgggcctcagcgtttacggatcgtccaatcagatggcagttacaaccagtgcctggcacatagtaggagcataataaatactgattgcataaaatagttgaccaggcgcgggggctcacgcctgtaatcccagcactttgggagaccgaggcgggtggatcacgcggtcacgagttcgagaccagcctggccaacgtggtgaaactcggtctctactaaaaatacaaaaaattagccaggcgtggtggcgggcgcctgtaatctctgctactcaggaggctgaggcaggagaatcgcttgaacccgggaggcagaggttgcagtgagccgagatcttgccactacactccagcctgggtgacagaggaagactccgtcttgggggaaaaaaaaaaagttgaataaccaaggttacttcacactgccaagctctgtgaagaaaactgggtgataggaaagtgactgtggggacatactttgagaggtcaaggaagccaaattgaggaaatggccctactaagtgccagacctctctctagtgctttattttctttaacccttgaaaccatcctctgggatacgttagcattaacatcctcatttcacaataaacagaagcacagaagaagccagtgacttgcccaaggtcacacggccagctaggagcagagccaggctcctgtcacaggtgggctgctggctccaaagccaatgctgggacctggaaaatgggaaggaacagctgggaggactggaggagaatgtttcaagcagaggaagcagcactggcgaagaccatgaggctgtctcagtgtccagaatggagtaaaaggattatagggtgggagggaggcaggggacagaccatggagggtcttgtagaaaggggaggagttggtttctattccatgtgctgtgagaggtctttgatagatatgagtattgactccatggtcagatgattttttttttttttgagacagagtcttgatctgtcacccaggctggagtacagtggcacgataacagctcactgccgcctcgacctcctaggctcaagggatcctcctgcttcgcctcccaattaactgggactacaggcacgttccaccacaccctcctaagtttttttttattttttgtagaaatgaagtctcactgtcttgcccaggctggtctcaaactcctgagctcaagcagtcctcccgccgcaacctcccaaagtggtgggattacaggcatgagccaccacacctgggctgagacgcatgttttaaagagtactttggggcttggcacagtggctgatgcctgtaatcccagcactttgggaggctgaggggggtggatcacttgaggtcaggagtttgagaccaccctgaccaacatggtgaaactccgtctctactaaaaatacaaaaattagccaggtgtggtggtgggcgaacgtaatcccagctactctggatgctgaggcaggagaatcgcttgaacctgggaggcagaggttgcagtgagccaagtccgcgccactgcactccagcctgggcgacagagtgagactccatcttaaaaaaaaaaaaaaaaaaaggagtactctgattggaaaatggggaatggaggtgggtaagaggataagaaggggagcaggggccacttggaaaccggttgcaatcattcaggcaaagaggtgacagtggtttggacctcaggtagcaatgcagagagaagaacatagcttcagaatatactcagaccttcttaaggagtttttctcttttttttttttttttttttttttttttttgagacacagtttcactctgtcacccagggtggagtgcaaaatggcatgatctcagctcactgtaacctctgcctcccgggttcaagtgattctcctgcctcagcctcctgagtagcatagattacaggcacctgccaccatgcccagctaatttttgtatttttagtagagacagggttttagcatttttggccaggatggtcttgaa

SEQ ID NO: 1563094 - DNA, 4001 bp, Homo sapiens
aatcaagaagagatttttgtacaccccgtattcatagcacaattattcataatagctaaaaggtggaagcaactcaagtgtccaatgacagatgaatgaataaacaaattgtggtatggtatatacatacaatgaaatattattcagcttttaaaaggaaagaaatcctgtcacatggatgaaccttgaggatatcatgccaagtgaagtaagtcagtcataaaaggacttatattttatgagtccgcttctaggaagtacctagagtaggcaaattcatggagacaaagtggaacagagattgacaggggctgtgaggagcagaaaatggagagctattgtttaatgtgagtagagtttcacttttgcaagatgaaaaagttctgaaaatctgttgctcgtgaatgtactcaacactattgaactatagactgaaaaacggttaagatgataaaaatttggtttttttaaccacaactaaaaaaaaatctgtattagagaaaatttcttgacttgattccaaatatatatttagtagaaggaatgccacctactgacaaagcagtttactagcaactccaaaattagcaagctgaattagccatctcccaaaatgcaaacatagcatgttcccgcctaaaatctgggatggttctttactccctggcactctaacacagtaatttccaatcttttgtctttcttcttttaagcagcataactgttcagctaaatcttggccagaaccataacacaggaaatagcgtttctgggtgaacaaggccagaacagggtaggggcttgcttcccttgagtgcttctcactagccaacctatgtaagccatttcttctctttgaatataaaaggtaaatccgcacaaaggggcaacatacttaacaacctgcctgcagtttacccatgaacccgaccttctgccccttctttgctgctcccgatcccatctctcactttccttttcaatcccgagacctagcacactgcctggaacatatcaggtattcttgagtggatgaactcaagaatagaaataagccagggtttgacagtgacacacttgggataaaatctaacaatcattccttgtctttactaaaataaacaggtgacaggaagacaataccgtagagtgctttgcagccagacagacttggcttcaactctccagtccctacttctgtgactcgaataaagtacctctgtaaacgttagttttctcatgtttaaaatcatcatcatccttgcttccaaagggattgtagggattaaaagaaataagccgcgatgagggagtacaggtgttaaaagctgtgtaacaggaaatgtaccagcaggtattagcttccatcgttatcattaccgaacacaacaccgctgtacagattcgaaggcacgaacccgtaggcacggagctcacggagctggggcaagagctgggtgtcccccaagagcgggggatgcccactacggattctccctggggagcgccctgattctgttcccatccccagcaaccttgcaactaactttgggtttatggaaacctgttgcgcgtccagcacttgggaaacccgtgaatggacacaaaccttcctttctttcgtcaaggagggcaagtccggctgagacagaatgcgagccacgttcaggaccggcggacgcgaccacaggcggttagtggtcaagggtcctgcttgtgcccggtgcggccgatgagcctgcaggccggactcaggcccgggtgactcggcacctccgccgccgtcccgccccgccctgccccgccgggccctacctcaggccccgggccaaggcccagcccccgcccgctgcccgtcagcgcttaccatgatggacaccacctggcagactccgctcctctcaggcaatgcaacgaagaaaccccgccgaccgctctcccagccgccgctgccgctgccgccgcgccaagccggtacgccccagaggctcaccggaagtgccggacccgagacccggagggggggtgcccgggacaaagcgtcggctgcaaaagagaaaaggccaggcgaagacgctaggctctaaaacaccctcagtagaagcattaaaatgccctttcgtgatttatttccccttttataggtatttttaaacgttattttaaattacgtgttgacagtattcccctccagacgaatttagtagggcccattgtccttacgactacactacccacaatgcactacccagactgcctctgcttcagccatcgaggactcgggcggaactaagctacaaatccttcttcaaaccacaccaaaaacctattgcaaacgtaaatgctgccccattgggtatgtgactgagtttaatgtatggttagaagtatactttccctgagggttcccagtgggaggcagtaggcttctcttcccaaagtaaagatgtccgcccagcgtcgcttttctgggtaaaagcgagtcagagttgaagggggcaacagtgtttgcgttcggcctcagaggtgacgcttctttgggggcgggctggagttttctggccgtgaatggcagagcgctaatggccgcctccaatgtggcccaatcagaaagaaaggaaggctgggaactaagaagctattggttggtgatccctggaccaatcggaggagccgtgatttggcgggagtcttgaccgccgccgggctcttggtacctcagcgcgagcgccaggcgtccggccgccgtggctatgttcgtgtccgatttccgcaaagagttctacgaggtggtccagagccaggtgacgcccagtccgggacccccgccgaggccttgccggtggggaagggatgagggggagcgaccgtgggtgaccgggaggcaggggagggccggggttcgggtcgccgtgttcagccggtctgctcttccccgatagagggtccttctcttcgtggcctcggacgtggatgctctgtgtgcgtgcaagatccttcaggtgagttctgcggaccctaggagggcggggccggcgcgcgaggtgagggtgctgcgtgggggcgcagggcgggcagagtgtcaggatgggtgctgagggcttagggtgggagagggagcagggcaggaggtgaacagcaagtgagaggagagagactcggaggagaggttgcctccctgtcccaacggtgtggggtgggataaaggattaagtaaaaggtaaagagactagtttgtatttttgcaataagctattaatattaataggtgaacacagcagttgcatttgggggaaactttggatctgtcgtggcctctcaaatgggggatttgagagagaggaatctgtgacaactgtgggtatagtcgtgtcacaggtgttgctgggaatatgggagcccctagtctattagggaagatcgttagtttggttttgaatagggcatagtatttacgttgttttggtcaggcccttggatcaggaacttttcagaaggcctggaagttaaatcggcatttctccccgatgttttactttggtaatttgcaaaattcacagaatggtatggtaaacgctcatatccctagcacctagcttttcccgtaagcatttcactagctttaatgttatcccgtgtcttttgtctctcaacccgtctaatcttcctcagtttcttttcaaggtaaattgctaatgtcctaaataagataggctttgaaaacactctctctccaggccttgttccagtgtgaccacgtgcaatatacgctggttccagtttctgggtggcaagaacttgaaactgcatttcttgagcataaagaacaggtattgaagatgcgttttagaataacgtggctttttactcaattgtaatttcttgacacagcattctatttccacgatagattaagcgtgtatttaagtatcagctacattaggcaatatggaagagaaaaacatgctgtatttactggtgacttaccacgcccaagttgt

SEQ ID NO: 1563095 - DNA, 4001 bp, Homo sapiens
aaaactcagaggcaacccctcttaacaatgttttatgtctctttcctattttcctacgtgtatgcattacaaatacaatggtatcattctgtattttctgttcttcaacttgcctttttcacttaatacacatagcttggacatctttctccactagtacctacagacctccacatccatcactgaagctgttaaagagtctctcccgttgaaaaacagaagggagataggggggagagaaggtgaggaagaaagagaaagagggacagtgttccacatatgtccatgtgtttactcacttgctgtctctccctgctgcctagggagcttccacacatgcttcccctcagctcaggccttacctcctggccccatctcaggaactgccaacagccttatcatggctaaatccagcagacttcctgctgtcctcacccgctagacatttctgagccatctgatgcttctttcctgtcctgccccagagtcctcacctccagaatctcccacaaagtctctttctctgaccccttgaatatccaggttttccagcattctctccagcgccctcttttgtacctgctcctccttcacctggaatgaccatctccagggcagctcaacaagcccagcctcgcccacctgaggcccacctccacatagcaaatagcccctgagttatttccacctgcagaccctgaagctactgtagcaggttgagctgtgtctccatcctgacacctggaacctgtcattgtgattttatttggaaaaagggtcttcacagacgtaattaaggtcaggatctcaagataagatcatccgggattatccaagtaagctccaaatccaaagacgtgtgtgtgtgtgtgtgtgtgtatgtgtgtgtgtgtgtgtgtgtgtgtgtgtgtttgagacagggcctcactctgactcccaggctggagtgcagaggagagattttggctcactgcagcctcgacctcccaagctcaagtgatcctcccgcctcagcctgccatgtagctaggactacagatgcatgctaccatgcttggctatttttttaaatgctttatagagatgggtgtctcactatgttgcccaggccggtctcgaactcctgagttcaagcaatcttccagccctggcctcccaaagtgctgagattacaggtgtgagcccggccaggaagtgtctttttcagctttgtggacacagtgtccagcagtatacagccctcagaaagtcctggtgatgcacaagcttgcagggagtggaaaaaccagcgcccatggcttgccagtgggaaaggttccctcgccaactaaatgcagacagcctctatttccaagggtcagccagaggtcgggtcaccgcaagaaggatggtctggggccggacaatcagtacacctgctgggtgctctggttggagacagtgatccagccagacatccagaagacaagcccggctccggggaggagggttgggatggccacagagaaagccctggagagtaaaatcccgtccttttccttccggttctgggcaacgtgggggagaagagatttgtaaaggtcacgccaggattctgcaacccccaaggaccccggggccgtcccatcaagacctactatggtctctgcccgccaactcaggacttctcaccgcctcccctgagcccttcagaccctgaggccctccctgcctgctcccccagacccacactctgtggccccaagaccccattagcttagcctcttggctgcggacctgagttccttgccatagagaacgcgcttcacttcctgcaagtcggggagcggcaggtgcttctccaagcattcctccagcgacttccactcagcgcccgccatggccacggtccgccagtgcttgtgtccgcgcacgaactgcctgccctttgcccgcagtgggaggaggtgcccaggcccggtcaggcgcccttgcctttatctcttactctcgctcccagacagctcaagtgaggacacgccacttcctcgcgcagccaatccgccttccagggcttcgcgggtgggaccgcccctggcctttagcgctccttcggcacgtgccaggacacgttcctcttgccgcctccgcagcacacggccaatcagcctccagggcctcacgtggggagggggcgaaaggatccggcgcttgcccttcgccccttgcccttcgcctctcggttagcaagcgatgaggcacgcccctccacaggcgggactgcgcggagtcgtcgcgcctcggctgcgagtcaggactgaggctgtccccctcccgcctccctcaggggccctggcgcgggtgcctccaggttccacccctcacctgccccttggtgtcgggccgggaccctggagaggtcgtgagggagtcctgggcgcgggctccgggaggctgcggcgcgggtctgaggtaaacggcccggccgctgcgggcccttgcgggggctggttccagcagcaaccgccgggcagggcccctcccgaccgcgacctcctgtccgcaccgtagggcagccggccgggccagcctccctcacaggactaccgaggaaggtaagggaagagtttcagtgtcccacgggcacgcggcggctgcacctctgtcgtccggagcctttatgtctggggagttttaacccccgaggggccaggctcggagtccatgccgctacctgggtcgcgcgttcccacccccggctttggggccgctggagccgaaggtcagttgctcgcctgcggttccgtgcgcctcggtggagctaatattgtaaaatgcggggtccccgggtgagggcgcgccccctgcaccctagggccccttttcagccctgccctctgccgcgtgtgtgcaaatatgggcactttcctgcggtagggtgcgctttaaactgtcactgagatggtaggagtgagagccccatttgctgttaccgcgaatccagagggtgccatcccttcaggagcaaagaagcgtcctctttggggtcctattgagaattagggcagtaaggcccgcttacttcggcgggcagccgggtgaaggaaccagtctgtagaaatcctattcagccacttgtaaaccttgtgaccccaggaaagtttaacttagtcgctggaggcttctgttgctttatctgtaaaataggaatgcaaagattacgctgcggggttgtttaaaagtcagaaaaggccagcacggtggctcatgcctgtaaacccagcactttgggaggcctagaaaggggtattgtttgaggccaggaactccagaccagcctgggtaacacagcaagaccctgtatctacaaaataatgttttacaaattagcctatcatggtggtgcgcacctgcttcttgggaggcagaggtgagaggatcgcttgagcccaggagttcgaggctccctagctatgatcttaacactgcacttcagcctgggcaacagagtgagacgcaatctcaaagaaaaaaaaaaaagaggcaagtaaaatgagcacaaagggagctaatttatatctagaatcagctactaacattaaaaatattatacttcaggtattttgtttcagctgctaattcacaagttttgttccttgttttgataaatgttagctgacggtttctagtatctgatggagctgccttctcaagagtgcaaactctgaggactttctatgtgtaaggcactgctaagagagccatataaagacagataagacctagtaccttttctttgtgatttaaagtaaagacggctgggcacgttggctcacacctgtaatcccagcactttgggaggccgaggcgggcagatcacctgtggtcaggagttcgagaccagcctgaccaacatggtgaaaccccgtctctactaaaaatacaaaaatttgccgggcatggtggcgcatgcctgtaatcccagctactcgggaggctgaggcaggagaatcgcttgaacc

SEQ ID NO: 1563096 - DNA, 4001 bp, Homo sapiens
ctccctgctttgggcgctgtgtctgactctcgccttatcttgtgacattcctgcaaccccccatcccaacagacctttgtctcttcattgctgaaagccctggattctctcttgtgtaaaatgggaaaggaaggtcatcggtccaagggaaataacgtggaggcaggacccagctctcctccttactagatgggtgaccttggacaactcactctacctcttcagaccctagtcttctatgaaatgggagagaaattccctacagtgcccggagatcaggcactttagtttatagtcaataaacacatgctgaaagaagaaaaggatggtcccgaatgagctgttgtaaatgactggctgctagaaatgcaagagttgatgttggcttgtctcagaagctcaggatcccctccagggcaggggttggggctgggccacagcagcaggtccaaatgcatggttttgtctcagaaacaccaatcttgagccacctttcgaagcctcaggaaggaccttgggcttggggactagagagatcaggattcactctccagccctgggaggtccagggggggttattccacctctctgagccttgcttccctgctctgtaatggggattggtaatagctaccttacaagctggttgtagatactagctctatggtgtgcaaagtgcctggtatggtgtaggtgttcagtgactggtggtgttattacttccctcactaactggatgtccctgcaaggcaaggacaggtctgtggctgcagtacctgtttaatgagacgactacaggcatggagggttcctctatctgcctccttccctcctccctgcagacaggtcagagccccttttggagtagccagagggaagcaggacccttacctgagtcgaccaggacatacaggtagacctcgtgggtgccagtgagggcctctttgctgtcaaacatgcagagaggcttttccaaggccacagtggtaagtgtggggttgttggtggcgaaagtcacactggccagttggggctgcaggttcacagctggaggaggcagtgaggatgggaactgacctccggcagaactgtccacacccactctgcttgcagttactgagcacgtgttgtgtgccaggccctgggcttcaccctccccctgggccaccgcataagctgtctcagacactgccccctgcccagtcatcctgctcagaaatggagcggtcgggccaaactgctgccttctctccctgctgcagacactcagttgccaagaactccactgcccctcctaagcatctctccatgccatcggcccagccctcctccgtcccaccttcctcacctgggccctccccccacatgcaagtctgactgcctcattctctggctatggccctcccatggtcccccagcgccccctgacgaagtccagcctctctggaaaggcagtgaggtcctgaagttctgggctttgctttgttcggtctccagcctcaccccttcccccacaggctcccctcaccccaggctccagctggtcccatggactggcagttcccaggacagcccaatattgtctcccctccatgaacttgcccatgctgcttcctcggccgaaatatctctctatctgcccccgtccaggcgtcaccatggggctggggctagtcccttctctgtcctaccgcagcccccctgcatgttggtctcttgcaacacacatcgcagggctgcagccatctgtgagccctcggattcccaacagaggaggcccgtaaacgttggctatcactattattcataacagtaatatctgggtccccagcgccaggaatcagggtccaggcggcgggcgccccagggcagagctgcccgctctttctgggctcagccccctcctgcccttcaccgcctacccgagccgaaccgcaggcagccgagggccagcagggcccagagcggaggcatcgcccgggaggagccgccagagcgcggggcgggcggtccagcgagcaggcgcgggcaccagacctgtccctgccagggcacctgccagctctgggccctcggcgcgccccgcccccgcctgggctggccaatccgcggcctcctcgcgcgctatttgcatacggccctgccccgggcttccccgacccgtgcgcggtgccccagggcgcaatcccaccgggcaggaccttctccagcccgcatcaaagcgcctactgtgtgcccaggccagggcagcccttccacagcgtctctcaccaatgggaccttgagggcaagccactcccacttggagcctcagtttccatactgtaaaatgacgctaatttctacaactatttatggaggctctattacgtgccaaacactcactgggcactcgcgaaacaaaatgggttgaccagtaaaggtgatatcctggaaaacgaagtccaggcctgggagctatccagagaccctagtatgacgcctagtatgaccccttcggttcacaggtacaagccaaggcccgggaggctggggggtggggcagggggtaagtattggagcgtggtggggggcgcggggacagggactcacccccggccgcgcttggtctcctggagacactgaggctggtggaacccaggagtccagtgctcagcccagggctgcctccaaagggatggagcagggtgttaatgcctacttcttaaaggggcgtttgaaaattatgatggactcctcaccatgactgtgcggttccctccatcacaagaatctgtgcacatctctggatgcaccttaaatcaattttacatttaagaaataaaagtaagtcaacaaggataggaaaaaaacaacagaagaggggcaaggaggctcatgcctgtaatcccaacactttgggaggtcaagataggaggatcccttgaggccaggagctagagaccatcctgggcatcatagtgagaccccatctctaccaaaaaaaaaaaaaaaaaaattagctcagcctagtggggcatgcctgtagtcccaggattgcttgagcccaggaggtcgaggctacagtgaactatgatcatgccactttgagctatgattaaagctgcaataacagagccagaccctgtctcttagaaaaaagataaagaaaatcaacagaaactaattaatctctgtatgacgttgatgacataacctcacttgcagaaaaagaataaaacgatctgagtaattatagagctgggttgtccaggggtacctccttagtggagtacactctaagaactgggaggcctgtgacagaaccccaaacctcactagtgactttgttattggcagtggggagggcggagccattccgaagcaactttgggttatcctaggattggtggtaccagaacccagattctcactgtaggatgagggagatttggaatggaggaaggaagcacatgaggtcagtgtgtcccattattggggatgttccatttcatcatttggtaaagttggtatctctggattaatgtatgtcttgttccctaaaaatcttttttttctttttttttttgggggggacggagtcttgctctgtcacccaggctggagtgcagtggcgtgatctcggctcactgcaagctccacttcccacgttcacgccattcttctgcctcagcctcccgagtagctgggactacaggcacctgccaccatgcctggctgatattttgtattgttttagtagagacggggtttcgctgtgttagccaggatggtctcaatctcctgaccttgtgatccacgcacctcagcctcccaaagtgctgggattacaggcgtgagccaccgcgcccggcccttgatccctaaaaatctttccccagctggatgcggtggctcacgcttgtaatcccagcactttgagaggccgaggtgggcagatcatgaggtcaggagtttgagaccagcctggccaacacagtgaaaccccttctctactaaat

SEQ ID NO: 1563097 - DNA, 4001 bp, Homo sapiens
atgcgctacccggctaatttttgtatttttagtagagatggggtttcgccatgttggccaagctggtctcaaactcctgacctcaagtgatctgcctgccttggcctcccaaagcgctgggatgacaggtgtgagccaccgcgccgagccttcatgcataattcttggcatttataaaatactatgatgctttcaatcaccaggtgaagtaagtggaaaggggtgatcttaatttcacaggaaattcagtttgagattgagggaagtgccccaaaacacacaattattaaggaaaacagcctggaagatgtctcagttcttcaactcccaggtattactgaagagattataagtgcgtagtcccaaaatatttcaccatgagccatttaagacatttcctgggacctaaattggctgaaattctcattcccagaagcacaagaggttgagcacagtggctcacgcctgtaatcccagtactttagaaggctaaggcaggaggactgcctgagctcaggaattcaagaccagcctgggcaacatggtgaaaccccatctctacaaaaaatacaaaaattagctgggcgtggtggcgcatgcctgtggtcccagctactcaggaggctgaggtgggaagatcacttgaacccaggaggtcaaggctgcagtgagctgtgatcatgccactgcactccaacctgggcgacagagtgagatcctgtctcaaaaaaacaaaacaaaacaaaaaaaagcacaaggaaaatgggtgagttataacaacatacttggatgtctctccagatcaatgggagtggttaacagaaccacttgcaagagatgggacagtagcaatgctttcatatggggcaggaagttgcactggtcacaggcagcatagcactagtggacagtgccttcccgggctgcagagtcagacagtctcaaattaaaaacacaagtgagtggtggaacagggctatatgtataaggcctactccagcacagtcataatttagcgatataaagcatgcactgcacctagcacagtgcatgatacataaaagtcaaaaatgtgttgcgattcctacctcatgcttccactttctcctgaggaatgtaagcaatgattatttttcagtggtaccacctaccaggcatgtggcaccctgcctgcatctcatgtaatcctcacaatcgtgctcaggttactattaatatctccatctcacagttaaaacggagttcagagaagaaacttgctcaacttaatgccacagttaagtgacaaggaccagtgttcctatccaaggctttctgatttcatagcccccactctcaaccattaataccaactgtctacgtgggaagccttggggaccagaagcgccgtctgaaacttcagccacggcgtctaaggtgtctaacgtccttttcacgaccgtcgcctgctcaaatctgcccttgaaactctgagagacaggggtcccgtttctggccctgacttgcccctggcttcctgtgcagctagtaagtcctttgctctcactagcctttagtttttgcttctgataatgggcaagtgggtatgtagggtggcacacagcaatacttacaacccctgcaaaatgaaatatattaacctcgcttaacgttttagaattcacatcaagccaaggggacagacggcggactcgagacagaagacgccgacggtttaccccttacccccttcctggtaaaagtatactgagtcccatcccacctctactccactgtcacccctcaggcgggtccaaggtcagggatggcacaggccctcaccccctcgttgatgtggtcgtagatagcgtccgcgccttgatcgaaggcgcgctcgaagaacatgacgcccacgatgatggtgagggcgaaggtggaggtcctgcggaacagcagggagtacaatttcgaagtcaacgtcgcggccgccatgtttcttcacagtccaactcgcgccaccgcgcctgcgctggggccgacctcgttccccaaaggccctagacgtgcaacactttatgggatttgtagttcctctgaatctcagccttcgtgttttgaaccacagaggtattcctatcctgggaatgaggaaaaaaactcaaaaggttcatatcaggacagcccagataatctgataagatttattacccaatttttcttctccagaattcctggctgttagaatatgtcaaactacaactcccagaagccctcgcgcgccatcaccttctccccgccctccgcccagtcccggcttagattcccaaagctctctgggaagggcgaactgatggccaaggcgagactacgaatcccagcaagcagtacgcgacgcgaggacgcaggaggaggagcccggagctgcagccaccggggagccaggtaccttccgcgagacgtcgaggggcgagtcctagtctcttttctccgcactggaagacttgaacacttccttctctgtgcgtacgccctgcggcgggacgcaccatttcttgggatagggtgtggatagaggggcgagggcagctgggttcccgagaccctggctcaactcttcgccttgtcccctgcaccagccccaagtctaggccaggagctggagcctgcggcaaaagtcttgtcctggaggttaaacccttcaccctggattaagggcagggacggatctgccctgcttcctgttcctctcacccctgggcttcgcaccgggcaaccctggtttggaaggctggagacttggaacctgcttgggattgaaaagagcaagggctttggagtacctggggcattcaacagatgttttcccagcgcctgttctggtccctgctctggggacccagcagtgaacaaagtccttgctctcacagagcgctcaatctacggagtgggcgggtggggagatgcagtacagcaaacagatagtgctttggttgactggagaggcagtggtggtgacattgcaccctgggtagctgctctggggggtgacacttgactagagacctgaatgaatagtagagttgaacaggaaaacgttggtgcaaaggccttgaggcagctacagtcctgggatgtttgagggaaagaagtagagtggactgtgaagaggttgactccggtcagctcatgtctggccttggaacccaccttacggagtcttgttttctttggtttttgtttttagagacagggtctcactgtgttgcccaggctggtctccaactcctgggctcaagcaatcttcctgcctcgccccccaaggtgcgtgagccaccgcgtctggccaaggagtcttgtctttttctagttgcactaggaggccattgaagggttttcaggagaaatgcgacaagatttaatgtgcactttaatgtcatcatcctggctggtctatggagagtggaccgcaagggggaagttattgtagtagatcatttgagggaagatgggtggttatttatttgagatggagtctcggtctgtcgtccagactggagtgtagtggtgctatctcggcttactgcaacctccgcctcccgggttcaagtgattctcctgcttcagcctcccgagtggctgggattacaggcgcctgccaccatgcctggctaatttttttttttagtagagacagggtttcaccatgttggccaggctagtctcaaactcctgacttcaggtgatcctcccatcttggcctcccaaagtgctgggattacaggcgtgagccaccatgcccggcctgatgggtggtaatttaggttagggtgtggagcagggcagtgatcagatttgggatgtaatttgggagggagggcagacagagcaagctagcagatgtgtgtagggtgcacaggaaagaggaattgaggaggatatctaagttttttttgttttttgttttttgtttttttttgagacagagtctcactctgtgcggctggagtgcagtggcacaatct

SEQ ID NO: 1563098 - DNA, 4001 bp, Homo sapiens
agctccgcctcccaggttcacgccattctcctgcctcagcctcccgagtagttgggactacaggcgcctgccgccacgcccagctaatattttttatttttagtagatgggtttgcaccgtgttagctaggatggtcttgatctcctgacctcgtgatccacctgcctcggcctcccaaattgctgggattacaggcgtgagccaccgcgcccggcctattttgcatttcttgagtaatcgtaatatgcgggttagaacacacggattacaacactttggatgaaaaaccacataatagggaaattttgggactactctctctcaaaaaaaaaaacagctcgtggaaaaactaggacttaccttctttgaaactatgtttatgttaagcattttcccctttgtaagctcatcattgtgtaaaagtgtcagaactgtgcaacacattttttaacagtccaaaagcaagttctttgataaatcaatatgaagccgtgcacctgtgttactctccctcccgttttgttcctgcgaacacatcggtaacctgcattcactctccatccaactctgttcaataccagaaagaaacttcagatgaaatgcttttcagtatttgccttgttttctggaacaactttaaagtacaaattatacctaaataagtacaaattaaagcctctgctttaattttcaaacactttgaacccagattttcaggggtctcaaaatggagttttgtgtttaaaagtctaaatttagctttcttccaaggaaaagggtgtgaagaagagaggttaagactaaaatactctgatttgcagagtttgacaacatccttccaatttctcaatatgaatgcccactgacccagccattccacttctaggaattttccaccgatatatttgtatgaatgtatacataaaattatattcattgccgtatctgtgccagtaaaaactggaaacaacctaaatctccatgcattgtttaaacaatgtacttcccataccatgtatcaggtttttttgtttgtttgtttgagacagtttcgctctgtcgcccaggctggagtgcaacggtgcgatctcggctcaccgcaacctccgctcccgggttcaagcgattctcctgcctcagcctcccgagtagctgggattacaggcatgcgccaccacgccaggctaattttgtatttttagtagagacggggtttctccatgtctgtaactcctgacctcaggtgatcctccctcctcgatctcccaaagtgctgggattacaggcgtgagccaccgtacccggccgaatcagttttttgttttatttttaatgccattaacacatctatatgtcctgccatgaaaagatgtccataatatactcagtggacaaagcaagttcgaaatgattttaaagacttgtacatagaaacatttctgataaggtacaaacaaaaatgatactgagtggaagactgcgagacacatttgtctgcattgtttgaatttttttacaagcttacaacacttctgcaatttctttttttgttttaattaaacacaaagtcatgtcaaaagtccaaataactatattagcttagaaaaaaattcactggcccaaaatatatgcacgtagtaaatacagatcactatcataatttgcagagcacaattattacttaattccttaattatctgactggcataggagcagagttggatgtctgtgctagaaagaaaacttccaaaatgagccccgaacttgcctcaagcgccatgcaagcgtccagcctccgctgctgagttccacgtcgggactgagccggggaccgagctgggaccgaagttccgctccgggcccgccttggtctggccccgcgctcgtggcaccccgcccagctttcgttttccactgaatggaaagcgaaacttacagcggcctccgcgccgggagctgggcgccagcgtgcggggaaaccctgccggcccgagcttcccgcggctgccgttgcagccgcgcacctgctccagacttccagccctcgctttttttttttttttttttttttgagacggagtctcattctgtcgtccaggctggagtgcggttgcgctgtctcggttcactgcaaactccgcctcctgggttcaagcgattctcctgcctcaggctccggagtagctgggattacaggcatgcgccaccactcctggctaatttttgtattttagtagcgatggggttccgccatgctggccaggctggtctcaggtgatccgcccgcctcctaaagtgctgggattacaggtgtgggccaccgcgcccgacctacaggcgcctttttatttgcgattttaaggtccttgcaattagcctacgtgttagagtcatttggcgtttggtagtatccatggcagcattttttctttcttaatgctattgtatttcttggatcgggtgtcttcacatcaccggcctgtggcttggatgcggcacatggtgtaattaggagctcccctgtgggcatgcagatacagatatttctccacttaagaaggggtcagggggcgcggtggctcacacctgtaatcccagcactttgggatgctgaggcaggcggatcacctgaggtcaggagttcgagaccagcctgaccaacatagtgaaaccccatctctactaaaagtacaaaaattagctcggcgtggtggcgcttaatcccagctacttaagaggctgaggcaggagaataacttgaacccaagaagcggaggttgcagtgagcagagatcgacaagagcaagactccgtctaaaaaaaaaaaaaaaaaatggggtcaagtcccagtgaacccatcatgaagtcgaaacatcgtaagtgaaaccacggtaagtgatggaccatctgtgtatatataaggttaagagatctgtaacatgcacaccggaaaggcttattacctctttagagatgtatttcttgtatgtagactcatgggggtaggggcagaagggttatctgctaggggcctcaaactccagccgctggaatttgcgcaggaaagcagggtacaattcccccaaagcgatcattctttctgaaagccgtccccgcagcaacagacaaatagcctccaaaaacccaaagctgccagaacctcactgaagcgttggtagggtctgcagtaaggtacaaaataccatggcatgaagatgtataaacgtgtccataatagggtggatgtgtgttagaagcatgagcacagatatacacatacaggctatccacacgtccatcgtcagcccagactccgcttacattgctgctggaacggaggcagtgtcgcccacagtgcagcatgttctccctggaaggctggtggactttgcgcagtatggtgtttacacaggtacacggtggtgggcgcagggtccgtcctcattatatttgctgaccaatcagttatataaccagcttcatacatctggtaagtcttgtccacaaacaggaacctcaaaaactcaagtgagggcaatgaggagaggaggttgcaaaatttgataaaatatgctaaatacagcaagtcagtagaaggctaaggagcaagctgcagttgcttgcagcaactatcagcagaaaactattaatagtcaatccaatgattctatctgaatcttggtaggtcggtggagcaaagtaattggtgttgctgccccagtgcagaatggacaagggtgaaccttgggttggaggctggactatataatgtaaggatccattacacttctatggggctcttccttccgtccttcatggtaccctcctgaacaattccgtgctaaggccatcaggtgtgtcaagcaaagtgggcgtttgtgtagtatgttccacagtggcccaagcagggtgctggactggagcaggttgaggagggtggcagcacagtggggctgcccagcacaatgtcagacacaaatgggtgctggtgcagcccggc

SEQ ID NO: 1563099 - DNA, 4001 bp, Homo sapiens
agctccccattgctacttcacccagacagtccaacacagtctcagtgagaccacgtccttcatgcctctaggtatctccatgggtccagaggcttctgcctggggtcacaggcaagataagttgaggggggactctgattatcccaccaagcatggcttgcttaaaacctggagacaggagctggagtgctcccgagcagggctcagcaaactacagcctgggcgccatacccagcccagtgtagccccatctgtttctgtaaatacagctttataagaacacagccatgcctctttgttgacatgtttgtctgtggctgctttcttgctactaggacagaattgaacagttgtgacagagatcgcatagcccacaaagccaaaaatatttaccacctggctctttatagaaaatgggctgggtgcagtggctcacgcctctaatcccagcactttaggaggcccaagcagggggatcactcgagctcaggagtttgagatcagcttgagcaacatagtgagacattcatctctccaaaaataaaactaaataaatagccaagcatggtgatgcacgcctgtagtctcagctgctcaggaggctgagacaggacaatcacttgagcctgggagtttgaagctgcggtgagctatgattgcaccactgcactccagcctggaccacagagcaagactttatccctaaaaaaaggaaaaaaagaacatgtttgccgacacctgccactctcttgtacaaataagtaaatgcatttacttgctcatctagaccagtggttcacaatcagtgtgagtttaccacctggggacatttggcaatgtctggagacatttttgtttgtcacaactgggaaggggcatctggtgggtagaggccacagataaccactcaccattcaacaatccgcaggacagccccacaaccaagaactgtccagcccaaaacgtcgataggaccaaggtggagaacccactctaggcctattacctggctcctgttctccctggaggcccagaccaggtgctttctaagcttgtttgccctgtaaccgctgggcagaatcagatgacaccagagggtcctgtcctgggcatggatgcccctccagggtgcttcggtcaaccccttgcctcccatggcccacaaaagtaaggactcaggtgagtgctcaccacagtgatctgccagtctcccggggccccgggcctttgcccaaggctggtactacgaagtcgcacaacagtcagaccaaactcagcaaaaagtgacaagcagctttaattccctaatgcagtctccaatggggatttacagcaacactgcaggaccaggagatgctgagtggctcagcctcctcggcgcttcgggcggcgactccaccctcttccatgacagtctctccaaggggatgcgtgcctctgctgtcttcagttcaagggacacgtgtcctggctgcagtgggttccatttcttcctcccactccctctccctctcctccttctccgagctgcgggcccccatagcacagtaatacatagcctcgtcctcaggctgcagctcagagatgctcaaataccccctgttcctggccacatctttggatccagagaagcgaggggggacctgggggccctggctcttgtctgattgtgagaaatatctcagcaggaacctgggagggtggcccggcctctgctggtaccagtagacgctgtacacaccgatgtcatggtcgttcctcagggtgcaggtgaggcggattgtggttccaagggccgaggacatggccggcggctgatgcagcaccggctgaggaccacaacctggtgacacagatgcatgtgggccgtgggggcagggcaggatgaaggaaggggcaggagtctttgggatctgggggttccctcacctgtgcagtagacaaacagcatgagcaggacaggagcccaggacatggtgcagacatgcagagctctgactcctgtggccacggtgcctggggtccccaagggctggcccagcatcctcctccctgctctgagaggtggggccgtggcacaccccgttcctggccactaccatcccagactttcttgggtctgcaacgtcggttaccggaacagcgtcggggcagcatttgtggctctgatcttgccatatggaagcattcagggaggaagcacctgctggagactctggggccagtgccctggaggcctttgggttaaggtacctcaggggtcgtgacctcaacttccccctgaggaaaccgcaccccagataaataaattttctgtctacatttaaatgcttggtgagccaggaagggaggacacatcctcggggggtgaaaacacctgctttgtacagcagaagacactgggggcccagagcgggttgggatgttctgccccttccatgttgcagcactgccttcggcccatgctcctctccctactagaaccaagtagagtgactcaggcatgggaaagaagcaccagggcctggtgccttccccacccctgttctggctcaccgagcaggtgcagcttggcactgtgatagactgaattgcatcccccaaatccataggttgaagccctaacccccagtgtgcctgtatttggagatagggcctttaaggagttaatgaaggttagatgaggtcatagaggtggggccccggtcagtacaactggtgtccttataaaaaggggaaatttgggagccggatgcagtgtctcacacctataatcccagcactttgggaggccaaggtgggaggatcacttgagctcaggagttcgagtctagcctgagcaacatggcaaaaccccatctctacaaaaaaaatttaaaaattagctggtcatggcggacaggcacctgcagtcccaactacttgggaggctgaggtgggaaaatcacttgagcttgggaggttgagttgaggctgcagcaagccaagatctcaccactgccctccagcctggccaacagagggagaccctgcctcaaaaaaaaaatgagaataaaaataatacattaaatgtatgtttgcatactacctgcaagatttaaaaaaaaattaaggggaaatttggacttaaagtctctgatcccacatgctcaccctccctcaaaaagctggagtgtctcctcccctggaacctgtgcaggcctgtgatcaaggctgaagtgtccctgggtgcacgaggtggcactgagcagctgggtgtgcactgggactgtttacttgcaaacactttgatagagcaaccacccctgaggctcagatgagcccctgctcggtgtcaagctgccccacatccattctctgcctggtgaggtgcaggctgcaccagtttcagcccgcagggtcgactctgggagccccacccttcttcccactgcctctctggccaacagctccactgcccaggtgagggctggggagggcctctgcagacacaggatgtcttgaccactctgtccagtaacagctgcaaccacatctatgacctgttgctcctccctcctctgcacaggctggtgggcagtggggaactaaccagtgactgctgactcctggagaggagaaaggaagcttttttcactcattcattcatttattccctcatccagtagctcattcatgtgttgtgcacgtatttgtgaaagagaaatatacctcccagacccctccgagagcaccagtccttgggaatcagggcaggagaaggttccacctgtgggcaccagcactactgcagtccctgaactagccctaccactgacactgtcagagctttttgatccttttaagctcagagaggataggtgtttctacttgctcttacaattatacttagagagcaaataagcccagccctcaaccgtagagacactctggtcccaactttctttcacaggcttcactgacccaggacctttgcatcactcacagagcaagatagtatc

SEQ ID NO: 1563100 - DNA, 4001 bp, Homo sapiens
gccataacccttggaccataaccagccatgcagagttgggggcggcaagggctggttcctttttctccctccggctcctcaggtcacaggaaggtcaggctaccagtttgagcccccagggggccatggtgggggagtctgggccatgccccaatagtctcaggtgcttcctctttgacaacagtccccagaatccccattcccccgcacactgctccccaccccaggagtgggtcttcgactcccagacccaccacagtcatttttctcagccaggatcttatgaccctcacaatagctgttgttgacatgttgaatattattaacccattttacagaggggaagcaaggctcagagaaagtttaaaagggacccaaggtcaggggcagaaatgggaggcagaggggaggcacccatctcacaccccacccctagggactaaagccgtagccaacagagcagtagtaatccgcgtcgtcttcaggctgcacgggactaatggtgaggacacaggcattgtgggcctcatccttggctgccgagaatcgatcggggatgtcagcaggccggtggtgatcctcctccgagcggtagtagaggagatatcgaggggcactgcctgcccgctgctggtaccaggacacaccgtagtccctgatggtgacgtgctgggggctgagcgtgcaggagagttgagccacttggcctgggaagaccagcagtgcatccagctgggccaggactgtctgggaaactgcgagacacaaacccactcagcctgagccccttccctcccacccctgccctgtgaaggcttggttggactccatggagactcccagtcccaaagggctcatagcccagtgctatgggattagcaatgaacggggtgcaggaggcctggttctgtgtgacttagggtgccctatctggacctccatctccctttgtgagtgaggggtttggagttagcccccaaatctccattagtgccatatcctcaaggatctgtgttcagttaaaggcccagagctcagaaggttggactagcagcctctaggtccctctgctacccacccacgtttctctgcagaactgcacccctctcccccacttccccgcccacttcacttcagctcttccaaaccctgaatacagactaaccacccccaggaacctcctgggctgtcccacacatcaactcagcctcaggcaactggctgcagggaccctctcagggaggttagattgcctcaggccctgtggggtagggaccaacccacaatagcttcccctgtgaaaaactaagaaggagacccaaagtcagagtccagggctctagtgatctggtcattcacgaatgagaaaaccaaggcccacacagggaagtgatttgccccaggtcaagggcagagctgtctgaagccaggtcacccctctacctgaatacgcctcccagccaggtgcagtggctcaagcctgtaatcctagcactttgggaagctgaggtgggcggatcacctgaggtcaggagtttgagaccagcctgaccaacatgaagaaaccttgtctctactaaaaatacaaaattagccaggcgtggtggcgcatgcctgtaatcccagctactcaggacgctgaggcagaagaatcgcttgaacctgggaggcagaggtgcagtgagccgagattgcaccgttgcactccagcctgggcaacaagagcaaaactccgtctcaaaaaaaaaaaaaatacccctcccaggacctgccctactgtccccatcgatttgcctccttgcaggggccttctggggccagtactgttccccaccccacacccaggtgactgaggcccaggaaagattcacctgacaggaaggtccccatcagaaggaagctgaggcaccggcaggccatggccagaggcagggaggcaggcaagtagaagttctgcaaggctatatgctccaggtgctttggggcacagggctgggaaggccactggaccacaacagagcatgcaaatcagcctattgactgaggaaggaggggcggtgactggggcccaatggccaagccttttcttcccaaatgtcagggtcctggcaccacaaggccttccaagaataggagcccagaagtcctcatgtgcagttatagcaggtggaaatctacttttttattgaggtacaactagcatacagtaaagtgcataaatcttaagtgcatagcttgatgattttatgtatatgtatgtatgcccacaagcatgcatgcatgcatgtgcgcgcacacgcacacgcgcgcacacacacacacacacatacacacgcacacacagacccctgcaacctccacccagatcaggatttagaaaatctcggctgagggcggtggcttacgcctataatcccagcactttgggagacggaggcaggtggatcacttgaggtcaggagtttgagaccagcttggccaacatggtgaaactccatattttttgtactaaaaatacaaaaattagctgggcgtggtggtgcacacctgtagtcccaactactggagaggctgaggcaggaaaatcgcttgaacccgggaggtggaggttgcagtaagccaagattgcttcactgcacttcagcttgggcgacagagcgagactatgtctcaaaaaaaagaaaagaaaaaagaacacctccatctcccctgaaggcccctcagttaatgacatgcaccctcaagggaatcatcattctgacttctatcaccttagattagtttgtgcctgctctagaactttaactataagtggaatgatagtgtgccctcttttgtgcctgcttcttttgttgaacatgatgggagtgatccatgtgtgtgcagcaatatttcattcatgcccatagctgtgtgtaatccattgtgtgaatgcactgtaatcaggttttccattctcctattgttagatatttggatgctctccagtctttggccattacaaatacaacttctgtgaatgtctctgtcgatgtcttttggtgtactggtgcactcatttgtgctggagagacacccaggaatggagctgccagacggcaaggaaagaatacatttagctttactaggtctgccagggttcctgatgtgtttgtaacaatctggtcttccaccagcagagtaagagagtttactgtgacttcgcatcctcgccagcccttgacattatcacaacctttaatttgccaggattccaagtagctgaggtggttttgaacttgggtttgaatcccagctcctgcttttcttaactgcatgacttcagccaagttacttccccccactgtgcctcggttttctcatctggaacataaagttaagcataatgccagcctgaggattgtgaaaatgcaaagatgggacctatttgctcagggctggccacagtgggtggattaaccatgtcatttattttctgtattccagtgctgtgtaatctgggcccttgctgaccattgagggactaaccctcccagggttacccagtccctatagatagtaaataacttttttttttttttctgagacggagtctcactctgtcgcccaggctggtgtgcagtggcgcgatcttggctcgatgcaagctccgcctcctgggttcacgccattctcctgcctcagcctcccgagtagctgggactacaggtgcccgccactgcgcctggcaaattttttatatttttagtagagatggggtttcaccatgttagccaagatggtctcgatctcctgaccttgtgatctgcccgccttggcctcccaaagtgctgggattacaggtgttagccaccgcgcccagccgatagtaaataactctttttcttttttttttttttgagacagagtctcactctgtcacccaggctggagtgcagtggtgcgatcttggctcactgcaagctctgcctccgggttgacgccattctcctgccttagcc

SEQ ID NO: 1563101 - DNA, 4001 bp, Homo sapiens
tgaactcccgatcttgtgatccacccacctgggcctcccaaagtgctgggattacaggcgtgggccaccgcgcccggctatcttgagcattcttgacagactcctcgctgtcaatttatcagtggcaactattcactggttggaaatgggaagcaataatagtcatctgaccagttttctcttaaagccatttctatgatgatgatgatgatgggactcaattatgttttttatttcagtcactcctaataaataacaaatttggagaaataaaaatatcttaagaaaagaaaaaagaaaagaaaagaaaggcttcacaccatggaatgacaagtgctcaaatggctctcagtaagtgctcacggggacaccactgtcagagtggtgagcaatcatctaccacaaaatggaacaaagcagcagaggtacgtaggaagcaggtgagaacatacaacctctaaggcccatataaatctgtcaagaaaactttctggaggaaggaaagatagaagaaagacctggatatcagcatttggtaacgtctacttcgatcttcctgacaactacattcaaactgacctgagtgtgctggccccaagcacatcatccagcttgagtttcaatgctggttgggagaaaaggaaattgagggcaagtcagagcccagaaaggagcgcaatttagaactgcacagcgggggagactgagtttgagtgtaggaaacgggaaagggggcgtgtggggtaaagaggtgagcgcagtggagtcaggccttagtgaacaagtgtgcttgaaggtggagatgggcacccctctggctgagtctgctccagtagagagctcaggggccagcagcaggcaccgcaaggagcaaagcaactggtgtaagccccacagcttcctgcgaccaacagtgctttgttgtgcccaggcatctgttcagtcccatcttttattttaagacaggatctggctctgttacccaggctggagtgcagtggtacaatctgagctcactgcagcccaaactcctgggttcaagcaatcctcttaccatcgcctcccaagcagctgggattatgggtgcacaccaccatggcccactaattttctactttttgtagagatggggtctcactatgttgcccagtcttgtctcaaactcctgggccacctcagcttcccaaactgttgggataagaggcatgagccactgcacctggcctcaattttttcaattttgtttttaaaagcagacatctccctggttggagcaaggaggaaacatggctttagaaagtttccaggtccaaggagaagccccacaacagtttgagatctttccagaatgatccacactcgacctcctcatccctcttaccaaagagcgacaccttgttcgtggaagtaggaggagatacacacccagtacctgtcctcatccaacaaagtcgcaggcacccaagggcagccacgctgccaccgaaggcccccggctgctcacaaccgccggtcagctccggcctctcttcgaaggacacacgcgtctcgcaccccctccccgccccgccctgaggagacatgcgtctgggccccgcgccttgaaaaggcgcattcccacccccacccctcaaacgcgcgaggccacgcgttccggcctccgccacctccacatgccggaacaccagtgaggggcgcgcgctcccaaaggtcgggggcggagctaagagcgccgcgcccaaaaaaggcggcaaagtccctgactcgctgagagtttgcgagccgccatgtctatctcattcgtctcctctcctccgacagcacgccgtgcttcccctcaggcacctttcaccgttagggatgagggctccgcggcggttctcggtgtggctctgattcaccgccatcttgcttcgggcctcctgccgccccgtagatggaaaggggcgggacctgcgccgagctgtggggcgcggttctgaaggggagggcggagattatgacgtaaggaggaggaggaggaggagcgagaccgggtcacgtggtggggcagtgcccggggagcggggcggagtcagggtagaggcccccgccgagaaaggggagaaagaggcgggccctgagaattggctcgagcgcgaaggggtgagtgataggtgagtggcctcccgacctcacctgcccccttagccccctgcctttaggtatggacttgggttggtcctgtcaggaatgatctcagctcactgcacctccaacctcccatgctcaagccatcttcccacctcaacctcccatccattactcactttggttatgaaacactagaaaataatgactgaggcccgacctgacgccaactgaagatgaactgacctcacaaagtgttttcatctctaatatctgtggctatttcttaccaagagagtctcaccctccacacatgggtgagatgacataatggctgatttggtcaaggagcacaaataagacaggccaggcagttactgttcaaacagcaatgtttagttgtacaacacataaagtctagcaacaattacaggaccagtttgagtgtctgtttgcttgttttcaattgggaaatttaactgtaatgtcaccgtaagattggctgggactggtaacatttaagaaacgggttgttcttgcatcccctaggcgtgggcctcttgctccatcaggacttggttgtagatgaatggcccacaagtcaccagcctttgagcaagttgtgtccaggtggagacaggaagagggtgggcaaaggggaattctataaagacacagtgtgtggggcagtggcagtcaacattcgcaaacattcatgcatctgatggggggctttgccctcccttgggtattttccattagcctacagtgaccacctgtggtcaggctaattcattactcacattaatggggaagggggttgggggtaggagtaggtagggtaggtgggaagagatccctcttattgctgagtggacagaagggtgctagtttttccttagcgtgtacatattgtgggtttctgggggtttgtgtgtgtgtttagtttttgtttgtttgtttggacagaagaaagtcaactccagcaatgtcttcttaggaaaaccactcttcctcagtggctgcgttatgaggtggggaggatgtacaaccgcactctgggacagccacaagtggtgattttttaaaaagtgatcctagcccttgctccccaacatctgtagtgacccaccctcatgaatatctttaagtaatgaaggagacacccttgtcccactttggggctcacacagctgatctcaatgaatctagtaagcagaaaaattgctttcttgaccctttaaggaagccaagagtagctcatgcagatgaatgggtagggagcaatgccattgcccttagagatggttacaagtagctgggatgggcttacaagggcagaaggagctcttgatgagttctttcaccctgcagatgggctaggaccggctgacgcagatgatgcagtagggctgtactggcagaaccccactccactgggaggagaggagtggtttggataaatggaggatgcaactggcctaaagaggcagctggcccctcccacctactgagggctgagaggggctgtggtggtgagctggacgagcacagcactaaaaagggcttggccctgcagcaataacagctgagaggaatggagtgagaagcagcgcttgaaatggccttcattcagcagtggggcagggggtggctggcacaggtggaaggacagtgcccaggaggccttctccctgcaggggggttgagaacggttgagggtgtggagaccagcagctggcagcagacatataaaataccttctccagggaggctcagatcatggttcaggggtgccaggcaccattcctactcagcctttccaacgcccacctcccatgcccatagatcttcccctgctggtccaaggt

SEQ ID NO: 1563102 - DNA, 4001 bp, Homo sapiens
cccagtttcctaatccttgaatccgggagagtaaaagcacctaactactctaggggtgccaggagggggaaggcctcagcgctgagaatcaggctgcagggacaaagcctcattaagggttgccatcactttgaggggcccagcgggagtcactgcaggactgctgaagatgcaggaaaagagcagcctgcccactccaccccccgcccagcaggctcaatgccccgcacccctcacctccataaacaaacacccagggacacagcctacccacagacctatgataaacggggctaccggcagccgcagacacgcccgcccagacctgcagggctcaggctaggacgggggcttccagtcctgcctctgaagccactggctttgtctctgcaggccttgggcctcagtttctccacctgtaaaatggcggggcagacatgggatggagggtgatggagagacgattcccagcgcctgcttccacctctccgcctgggaagccgcgtctcccaccagtggtacctgcacctgcccctcccgcgggtctgttcaccgccttgcctgtggcctggacggggctcgcctcggggcagccggcggcgcacagtaggcgcgcagggcgcggcggggcccgggtccccgcaggtgcgaggagcgcggggccagcagcgggcggtgggcgccccaggcgaggtgcaccgcaccccctctccgtcacgccgtttctccacccccacttcgagcgaagccgagacagattctgtctaaaggagatcgcggctcaacaggtaaggactcggctgggttcaggaatgtggaaatacgactcggagcagctaccgcagagagcagctagcgcggctcgccgggcgcccgcccgccgggccgcgccagggggagcgcggcgagagggggccgggcccagggcccagggccccgggcgggcggggcacgggccccggaccgagcccgaggcggcccggccggccccacggcccatcccgagccagccggacgagttgtcaaggtaatttcaacacgtctgggtgatggatagagacgaagggccgcggcgggtgccccggcctgcgcgctcgcggccgggtgcgcgccccccgccctcccgggcctccgcaggcgccggacgccccccgaccccgccccggcgcaccctccaggcggcgagcgctcggcccgggctcggcgcccagcgcagcccgggggagggaaggcgcgtcccacccccggggcctggagcccaaacaggtgaaagtacgcgccgggcacgctcgccgctacccgcgagcccggccggaccgcccgcgcgccccgctctctctcctcccgcgctgggctcggcgcctctcgggagctcagggggttgggctgcgtctctgctggcgtggggcgagggtctgacacacgggccagccccggagcccagagagctgcagtggccccctccagtccccacgtccccacggggacgccccggaggcagctccttcgtgctgtcttggcccctggctgctgccctcgcccacggggtactcacccgagcttcacgtacaggacgccaaagcagagaaacacgtagaaaatccacttgcgaaagtttctgtgcatgatccagggaggggggctgcgccatagacagcggcggccggaggggacgcgcgggcccggcagggccgggcaggggccagggggctgcgggcagactgcgctcagcccgcgctgcggctcgggcggccggcgacgcgcgggcactcggcgcgcgctgccaccatggtgagcccgggatgccgccgccgccaccgccgcgtgagcccggggaattgacccaggctgggggccgcgacctcgaagcccggttgagcgaccgtggacccctgcaagcgcgggccgggggcccgggcgcggctggcgggcgggtgcagcctgcactaggcgcagccgcctgaggccgtgagcgcctcgccgagcgccgcggcggccaatgtgtccgcacttgtcggccgccccaggtgactcgcggccccggcaagcgagccgcgagcgagcgagcgcgccccaggtaggaggatccgcctcccgcccgccctcctcgctcgccgcgcgctctctccctcgctccctggctctcccctcccttttctcctccctcccccgtgacacacaaacgcatctaccccccggccccccctccccaggccagctcccttccgattgccctccggggactgggcgggggaagagggcttgggtgacgagtggtgggggtgcggggagggtgcggctcggaagagacacctgcgctcctccgcgcacgcgggggtaggggcgggggtacaggtgggggcgggaaactactggtacaggtcgcggtgccacttggcttccagtttccggtgggggagggagagaccacccactcccattgcctctccgagtgcacttccctgacccccaaaaattatccgcatggggtactctggggccatccttttagtccaggcatcgctgccactccagcaaacctcaatgggagattcccacaaccccaggtcccagcactgctgccacctgcgctagcccagctttgggacctgaaagatgacagacgggctaacctggccacatgcagggagatggcatgcgtgacctcctgcagaacccattggccaagcgccgtgatggaggcctgtggaaggaggttgaggggcttccccggcactgggggaggctcctggcccccagagtccctgcccctgcgccatggttttcgtggcttcctctgcagcgcccagctgtgttcagtttccctgaggagagcccgaagtcagattgactcggtgccgcgcacacccaaagcccatctagcctgattcggctagcctgattcagggcgaacgagcgccagagtcccgcagaccctgctgcgccaagcctggtctgtcctcagtgggcaagacccagacccacagccagatcgctgtccaggccaggctccctgcctgctctgtgctttctcagccctggatggctcccggtgctgcaggcggatgggacagggaagagctcagtccccgaggaccagcagggactgcggccaccaaggcgagagtctgtgtatgcatccggctgccctgtcccacctggccaagcctgggtagggacctcgagctcagagcctgcctcccctgcccgccgcagtcccgccagacccccgcccctgatcccttcttaatccctccaaatccctgaacctttgccacgaccccggtgcaggtcattcctgggcccctcgatctgaggcccccggtgccgccgagccccgtgcgccgatggggagggttcccagataaaagggacattggggatcagcacacacaggggaaccgagacacaggaaaaagtgaaatggcaatagcagctccacccctgggtggcccctgctccccagagccccactctagggcagccacccccatttcacggcctggaagctggacgcggggagcaggagggtctggcctggccctcgcagccagtggcgggcgcgggcgcgggcgcagctcgggcgcgggcggatgctgccacccggcggcggcactgagggagctgggactcaggcgcgcaggggctggaggtggcgggcggcggagccacgccaggccccggggccatgaggcaggaaccccatcccctcccggagcccgggaccctgtccccactgccgccagcctcagtctcggcgccctttaattgggcggatcgccaggagctgtcgggctgtggcggagctggaaccacaaggactgcaccggcggcctccctgcggcgggtctgggcgcttgagccccgacccagccgcgccaacctccacccgatcttcttccggcccgaggtggggtcggctctgggaccggccgggcggggttcatccgggagaggagggggttacggtcggtgggcgggatgcccgggttcgttcgcag

SEQ ID NO: 1563103 - DNA, 4001 bp, Homo sapiens
tgctgggattacaggtgtgagccccggtgcccagcaaactttttttttttttcttgagacagagtctcactctgttgcccaggctggagtgcagtggtgcgatctcagctcactgcaacctccctctcccaggttcaaacaatcctcccacctcaacctcccgagtagctgggactacaggcactcacgcttggccttttttttttttttttttttggtatatttttgggtagagacgggattttaccatgttggctaggctggtctcaaactgctggcttcaagtgatctgcccaactcaggctcccaaagtgctgggattacaggcatgagccaccatgcccagcctagtttaacttttaatcatatattcaattgtattctaataggggctgaaacaacttgggatgggaagcaaatatcagaacattcaccaaggaagggtatacaatggataaaagagtttgaccttaagtagttttacctcttcttctaaatctaccacttgctgttccagctcactcattcgagccttctttcgatctctggcagtctgagctgctactctgtttttcagtttcctaggaagagaaggaacataccacactgagtcatatcaaaccttatttatgtctttatttgaaaactttaccagctggtgctttcatttttatttacagtataagacagactaatgataaaatacacttcaggctcctcccctcaataaaacaaaataaaaaatacagtcttctgtcaatctagctcgaagacctgctttattctctcctatattgcatcatccgtccacctcagactcatccccgtcacagcactggggctggacacacacactattcatcttgcatcataaggaactttcctctttccccatctattcccccgctgcttcctgtctccagttctcttaaacaggatccaacctggcctcattaatctagtgaaggctgcaatcttgctatgacatcaaccctccgtcccccagtccaatttagaaaagggagaggctgatgccactccctgatctctagtgttgagatcctaggcagtgacctgctgatgggtccgtgtctgttggaggagacacttttttttttaaaagaattaactcagaagagacacttcataaatcacagaaggcacaatgatcacaaaagagtgaacatttacggaggactaagtgctaggcacattatatccaagtctcaatctccccaaagacctcatgaagtaggttccattttaagaacgcagatactgagctagaccagtgagcctcgcagaattcccagccctttcaacagctctgttatttcagctccgcgcctctccagaaatagcagtaaaccaaaacagattattcgacctcatgtccgagttaagaggctgaaccaccagtctgcggccacacagcaagagggcctggaagacaggtgcccgcatccccagctctggtcatctctaacgagagagttaaaaagtacagaaaagagccctgggccgccctaggttcccagcgtggcggatccggtcagtccgggcttcctgccccgccccgcgccacgctggcaccgacccgccaggccaaaggcgacggagccctgcggggcggccagtgctgggtccccgctcccagcccctgcccctgcccctgtccctagtcccggcttcagatctggccccagaccccggcccctcgcccacctcctcagcgccttctcctcggggctcaggtgcgtgaggcgctgtcgcttgcgcgcctggggcagccccccgctcgctgcctccgggctggcccctctctgggctggcaccatgagcggcagggcctggccggccggggctccggcggcggaggcgggctgccccgacagaagcagaactttaggggtcccgtcggccgggttcggcgcggctgccaccaccaccatagctccagactacgcaccgcgcaccgcgcgccgcagccgcccagcgcccagcctcgccgcgcccggcctttctacggtcgtggccctccgcgattggccagcgtcgcgtgacgcacggccgagctcggcgtccattggtccggcctgcccggcggggcgtttcaggaccgtggctatggagtccggcgtggcagcggcaatccctggccaaaggtacttggggtcattttccgcggggggttacgtgcgggagcgtgtcctccacaaacggattttccccccttaagcggacttatttccatccggagtgacagaatttaattccaaaccgagagctttccagactgacgaatttttaccgggactaacagagaattacctcagcctgacaacattttatctcgtgcgccacttcgggatccgagtggagccgaaagtcgagatagagcgcagttgggccttgggttcgaaaagactggacagaggtttcagtgagccgagatcgcgccactgcaccccggcctgggcgacagagcgagactccgtctcaaaaaaagaaaaagaaaaaagcctggaaagaaattctgcggaatagaagtctttaagaaatgagatcgtgccctttaaaactaagtttaacaatagtgagggcttaataaacgataggtgttatctctgggttggaggggaataccttcaattttagtttttcgttccatttctaaagtttgtactatgagcgtgcatttttttaaatttagttttattttattttttaaatagaaacgaggtctcactgtgttgcccaggctgatctcgaacttctgagctcaagtgaacctcccgcttcggcctctattatttttattttatttttttttcttattttttgagacggagtcaggctctgtcaccaggctggagtgcagtggcgagatctcagctcactgcaaccttcgcctccgggttcaagcaattctcctgcctcagcctcccgagtagctgggactacaggcgcccgccaccacacccggctaattttttgtagtttagtagaggcggggtttcaccgtgttggccaggatggtctccatctcctgacctcgtgatcgcccgcctcggcctcccaaagtgctgggattacaggcgtaagccactgcgcccagcctcttgttattttaaatgaggggacaggaaaacgtcacatgtagagactgagaccccggggttgaccctgagccccctctccgaggggaggtcgaggttcctgcctggccattgtggcgtgagggtggccaggtgtttgtgaaagaggggcccccagagagcagcacgggagcgatttatacacacgaatattaacatggagaagtccgagaaacccccgtaaatatgcctgtccactttttttaaagcaaattacaaaatgtgaaattccccagaaatgcacagcaataccttctctaacaagtaattattgcttcctcctctgcgggcagcactattccaggttctaggggtgcaaacagtagtaagactgctacctggtatttggaggatatgcaaaaagtgaaatgttaagatagcaggttcctaagtaattctttagtgttattaagtcggattagctggtcaattttattttggtagggagggaacaggatgggaaaaagaactaaaagcaagtccatctcttgatatctaagccctctaaagggacatagttttggtttttgccaggactgggccacgagtctcctaacgtgttttctccctcttcgttgggagggaaatcaatgatttttttttttttaactgggctgtcccaactccagagcctcctgagcacgtgctgtcctgtgggttggaaaagaggtgggggtgattggagtctctgccggaccaagaaaccaacttcctgtttaactctcatcagcttgggccacctgggttctgatgtgccttcagatgtggggagacttactccgggcctctgaaatgttttgggagaagtctggaggtgtcttctagccgagacctatagcttca

SEQ ID NO: 1563104 - DNA, 4001 bp, Homo sapiens
taggcgtggcaaagagttattggatttgataccaaaaatacaagccatgaaaaaaatctgataaattagatcaaatcaaaacttaaaacttctgctctgtgaaataacttatgaagagactagaaagccaatgtgcagatggaagaaagcatatatgaaatgtgtacccaattactatacctaggtaaaaattaattagctaatgaacaaagggtacaaagacatttcattaagaaggatataagcatgggaaataaatgcacaaaaagtcactgaacattactagctacatcactgcatctattaaaacacctacaattttaacaagtaatgacaacaccaaatgctggtgaagatgtagaaataacaagccactcatgcgttgtttggtggcatgtaaaatggtagggtcagtccaaaactgtttgccatgcagctgtcagacaaccttgcaactcagtgcagttatcctacagaaaataaaacttacgcaaaaaaactgtacatgaaggtataaggcaactcaactaagaacatcccttgtgttcttcaattgtgaatgttcaaacaagctgtggtacatttataccatgggttgctactcagcaataaaaatgaaatagactattagcaggtataattggaagaatcccagggagttaaactgagtgaggagtcttggcagggaagtgttcctcctgtttctgccacactatgcaacacagggagatggaaacagatctactgacaagtaaaatgacatgaatgttcatactccttttgctggattccttcatatttaacatggacctgggtgctgcagcttctcaactggtctctggagctctcacaaaggtattgtggtccaaatattgttattaattcactgactctgtgaaggcatgaaggcctgacacttcctagtacgccatcttgttgacatacatagtctccatctccagtacacaatacagagaccattctttcattcaatcacttactatgcttacttaacaaaaaaacagttgcataatatctaagaaatgacagagtaatcaggaaataattgtgatgacaggtaaataatatattcattttttaaaaaagatttgatgttacccctgaaatgtcatgcacagttatagatgagaaagcaaacctaacagatgctagaaataggatgactgtttcacgatctcttgtaagttataactccttcatgaatacccctcttttgtgatagaataccctttttcccatttgaaaactaaaacacaaactattatcatccataaaacaattatgactaagacaaacaagatatatgactgacatagatttcaagtaaatggaaatattatacaaagatgttagagttaagtcttcaactctgatgttatctgatgctcaaatttaagactaataatattaagcaatatcttcatgtttaagagtcacaaatcagactttcaacccacaatttaaaaataaaatgtaattttctatgatagcattgaccttaactgaaaaaatgtatatatcaaagctgttaagcaactttacttgctttccttctagaaagctctattatgacagtacagccaaacttaagaaaaatatcaatagaaagaatacttaaaataattctaacagattatcttaagagtactatagaagataaacaaagcatctcaaaaatcaggagcctaattataaggagtatttttattggttactgtgtttcaagtacctggaaacagctgcaactttgtacacaaagtgaatttgctttccaggtatattggcaataaacaggtacaactgatgagaattttttttttcatttgttgaacagtaatactcagcaagatttcgaaggtaaaaaaataaacacagcagaatttttttttaccttattttttctcgcttccttgatgctaatacaagagacagtgggagggagtttcactgatacgttctgcatcagaatttagaatttcaaaagattttgttacaagaataatcagaagaattagattctaactctgtaggcagcaggtatctaggaaacctcgtgcttcaatttcatataaattgaatttacactacatctttaaattttttggacttcaatatgattattttatgtgaatttcagttcaaacaaactatgctatagctgttacatggagttacagtttagttttataacatactcgttctgggcatttatttttattattttttgccacctaataagaaattttaaaatcactattaaaaactttaataaatacatgacattcttactgtatctacaaattaatttatcaaatggctgtgataggtgccacaaagatataatagatcttataaaatgacaaaaactgaaaatggcaattttgtatgttaattttagacttttttctttaatcaaatctttgaaaaatgcaattgactgttgaaataataaaatattgtggttatataattttaaaaatgcatgtagcacagaggctgagaggggataatggtacatgttattttagtgttttaacattgtccatagagaagtgtaatacctcttcaaggtaggttgtggtaaatttgagatgtacactacaaacctcaaagcaagaactaaagtaacagtaacagctaagaaaccaacaaaggccataataggaaattaaaaaaataaataaataatagaaaagaagacagataagagaaaatggaacaagtaacacatggagaaaacagaaagctacatcaatcagcacattaactgtaaatggcttatataccacaactaaaaggtaaagcctataagagaaataaaaatagtaaaatccagttatatgttgtctcctggaaacccatacttgacataaagacacaattactacggaagagatggaataaagctgtgcactactaaccctagtgataagactgctggaatggctatattaatatcagacaaagtagagcaaaaaaaatggaaaatatcaactgatgctcaagttgttctggttagcagtacaaactctggaaccagactttctgagttacaatactgtcacttctatttttttcttttaactataaaataaatgtccacattgctaacaagcatattaactagcttattatgcttgcttcctttgcttttggttgtggtgggtatttatttgtttattttttaagacatgatctgcccttgtcacccaggttggagtgcagtggcgtgacctagactcactgaagcctcaacctccaggactcaaatgatcctcctgccttagcctcccaagtagctgggaccacaggtgcatgccaccatgtacactaatttttgtgttttttgaggagatggggtttgaccatcttcctggtctcaaactcatgagctaaagtgatccacctgcctcagccttccagtgttgggattacaagcatgagctaccacactgccagaatcctgtcatttccttgaattgcaaaattaaaacctcataagctacagtttccacatctgtacaatgataacatcattagaatcttcctggggagatagcagtgtagagaaaataatacatcggcagcaggaagaagagttcgtggtacacagtgaagtttggaaaggtgttcctattgacatcattataatcatgaccaccatcatcatttcttagaaacacagaattgacaggactcactgattaagagtatttgacagtgaaatatgagagaagagattgccttggtcaattcttgagtatccatctggtagagcttggaaaagtggtggaagcagaatttttgggaaaaacatttaaaataaacttaaacaccttacttttgatctgcgtgatgtacagaactggtgatgaacagggcaaccttgtcactttaaaatatatctgattgccaatttgcagcatcacaagactagtaaacatttactgtgaaacattcagaaaatacaaattaccaaa

SEQ ID NO: 1563105 - DNA, 4001 bp, Homo sapiens
atctctcagaaacctagactattaagggctgggtgcagtggctcacacttataatcgcaacactttgagaagctgaggtgagagttcaagtttactttgggcaacatggcaagaccccatctccaaaaaaagaattaaactattatgtacattatgaaaggcagcattccccaaaagtatttgatcacagaatcattttcgtgtaatgcctactattttgtttgagaacatctttcaaaaaatcttttcctaagccgggcgcggtggctcacgcctgtaatcccagcactttgggaggccgaggcgggtggatcacgaggtcaggggttcaaaaccagcctggccaagatggtgaaaccccatctctactaaaaacacataaattagccaggcgtggtggcgggcgcctgtaatcccagctactcgggaggctgagacaggagaatcgcttgaactcgggaggtggaggttgcagtaaggcaagagatcgcgccactgcactccagcctgggcgacaagagcaagactctgtctcaaaaaaaaaaaaaaaaaaaaaaaagcttctccagccatactaaacgattgcaacgcttagtgctggccactccgttttagagttctgtgcctttgcaagtgttccttctggtagtatggctcctttagtcaggctggggagagcctttcaaataaaagcaaattccaggcctggggcggtggctcagagaggagggtggatcgcttgaggccaggagttcgagatcagcttggccaacgtggcaaaacctggtttctactacaattacaaaaattagccaggcgtggtggcacacgcctataatcccagctacctcgggaggctgaggcacgagaattgcttgaactcaggaggcagaggttgcaaatgagcagagattgccactgcactccagtctgagcaacagaatgagagcctgtctcaaaaaaagactgaaaaattgcacatctttcttttcacctaatcccacggagagttgtctttctgcagctttactatgagaactgaagaacaagttctgtgcactggacaataactttttattttttatagtaagaagtcgatgtaattaacattccattttaaatgaattcaagtatatcaacataaacatatgccaagacatagctttgatgtcaaataccatacgttctggttcacacattgttcatatattgacccaaaaaactgaaatacgatccaatggcagatccgcctgcaaggaaggtgattcagttttcactgattaagctttatgttcatcagattaattgctcgcaatagaggacaccctacaaaaaattattctccttatccttcgtcttgtctttgcaaacaggactttcagacacagaacgccccagaagtatttcgaaacagttacctctcctaagaggagctgctgaaagaatttgttactaaacatgcttcgtgtatattctggagcaagctctcacgcctaacagaaacaagagctacttgatgtgagacactttgtcacttaagtgtgataattgccacaacttcggagtccgagtaacttggaagacagcccctctgggggatggcacacttttctctctgcagtcatttcggcttcacaaaatacctcaacggtagagaacacactgggcccacccctttccaggagcagccggtatagaagaaatccgcggagcacagagggttggggagcggaggccccaccaggagaagggtcagccgaaccagggatcgcctgagaccaacttgggtccctccaggggacaccatgggaggagaccgtgggagaagagtctaacctgagaggccgcggacgtttgctacagcgggaaccagcttgggggctgagagcagccaaggcattacggcctaactcacgcgtcgggaagagaaagagggtaacgacggggaacgcaaccgcctgcagggccgcgtcgccaggaaaccgggccagccgcacctccccttccggcggaggcggctcgcgggccttccttgcgcggcggcgcaggttgtgacgtcatgccccgagctgggaccgaccctccggctccacgcccttttttttttttttttttaggtcccgggcgttgagctctactcagtgcacgcagccacacaatatgctcttggacgtcgccccctggaggggatgttatctcccgcctccttgaagtcgcccatttctggggttgccccatccagggagctggttcctagttaagaatatgagaatgtatgcgcagggaggcaggcaacagcacgaacagccacgcttctagaagattctagggagcgcgcaggagcagcgcagagggagtaggaatgagcaggcggaggacccgaggtcacgagaccgttgggtgggaggagccagcggccggggaggttctagtctgttctgtcttgcggcagccgcccccttctgcgcggtcacgccgagccagcgcctgggcctggaaccgggccgtagcccccccagtttcgcccaccacctccctaccatggacccccgcaaagtgaacgagcttcgggcctttgtgaaaatgtgtaagcaggatccgagcgttctgcacaccgaggaaatgcgcttcctgagggagtgggtggagaggtgagacccaggcctgaggaccgttgggggcgggggaagcacggccccaggggggagccaggctggacctggctcggtccggcgggcgaggcggggtcgctgccccttctttgcccgggaaagggaggcaacttcgaggggtcatggaagatcgcgagccttgggtagtacaggagccgcggggagcaggaggcagagctgggttcctcgcaccctgaggttgcccaggggtgtatcttgggcgaaatacaaaaacaggactgcggatgcgtggacactggagacgcgaggagtgaaaactgcaagacttagattttgcgtggggttgtttttctttcagtcttgtgtgccctgctcaggtctcattggtacatagcagttcctttacgcactattcctttacgtcgtgttataataatataacactagtaagttaaaagttacaaaactagtaagaataaaaatgataactgtaaaaatgattgtttttaccttacagcgtttgtagctgcgtaggattaattatcttgagaatcacttattatacctccgttacttggcagtgttatcactccaaacacgtctgagaaaaataatttcttaaggcctggcatgtttccaggatataatcttgttgtctttaactgtagagtacttcgctacgtgcaaggagttaattgacaaggcattgtgcctggtgctaggaaacagtataagtactgtctatttagacgaataaatagaaaagttcgttttgatatttactatataatagtaattagcattttatgtgttgaaggagcaccgaagagaaaaagtgacagggaagtcttccctaagatgactttttaaaaaattattactaatggggaactgaaaagatgacatacaaattgcactaaacagggataaatagcaactatgcagaccattgcgactcctaagaggtgctgctgtgaacgttatgtgtttagtgacttttgtcttttagagacagggtttggctgtattgtccaggccgcatacagtggcgggatcactgcagcctccaattcctgggcacaagcgatcctcctgcatcagtctcccaggtggctagcagtgcgggatcgagccaccatacttggctaatttaatttttttgtagagatgggggtcccattaagttgcccaggcttgtcttgaactcctggcctcaagggactcccccgcctcccaaagtggtggtattacaggcgtgagccacttcacccagcgtgatatttttgtgtgggaagatgagctcatgattaccaaatagctcaaagaatatttcttaacaacaatctggttctaaggaaaaaactcgtt

SEQ ID NO: 1563106 - DNA, 4001 bp, Homo sapiens
ctttgggaggccaaggcttgggggtatcgcttgaggccaagagtttgagaccagcctgatcaacatagcaagatcctgtctctacaaaaaattaagaaattattgggagttggcggcacttgtagtcccagctactgaggtagctgaagcaggaggatcacttgagcccgggagtttgaggttacagtgagctacgatgatctcaccactgcactccagcctgtctctattaaaaaattaaaaaatatatatatttcattaggaaataaatattgaaagatacttgaaagaaaaatacaaaaatgtcaaaatgctggtagtggttgtgttagagtggtagattatagcaaatttttttcttttttgtatttcctatgtttctcacttttttttttttcctgagagagtctcattctgtcacccaggctggaatgcagtggcgccatctcggctcactgcaagctccacctcccaggttcgcaccattctcctgcctcagcctcccgagcagctgggactacaggcgaccgccaccacgcccggctaattttttgtattttttttttagtacagacggggtttcaccgtgttaaccaggatggtcttgatctcctgacatcgtgatccgcccgcctcggcctcccaaagtgctgggattacaggcttgagacaccgcgcctggccgtttctcatttttaataaaaatattcaaaatttttctgctcaggagttaaattaaccagtatgaagattacatgtacccctatttctcttcctttgttttatgtgttactgtgttgcctgcacatacactcccaaacgtggaggctatagtgagggaatcaatcactttcctgtaactgtgttgcttgcgtttattctttggttggtgtagttattgcagggtgggggcatttttacactgaggtcctggaatggtaacactactttcctggatgagaagggtctcacctgaaccacttaagatgacaaaaaatacctatggtcatggccatttatcagggaccaaaagatgtcaaactaccagtgtccaaaaaaaacttagggcacactagagtaagatctgcatataagagcctagggtagctctgcgaagttcaaaggaagaaaagaatttcagaattatctgggaggagaagggcaggccatcaaacagcaaagtccatccagcagagataggcagggaaggtctttcttccacacaccgaatggcactacatgctgaagtcacttaccacttgcttcaaggttctcttcttgttcttcctctgcttcttcatcgccctcggttttgtaatatgactcccaccctgacatgttggctactgctcactaggcgaaagacgttaacgtcagtaacaggcaaatttaaatcgaaaaaataccgacctctaggttcttgtgagatctgttctaaaagcttggttagtagtgaggaatgtggacggtaaatcctgctgcctcgaaagctcggcagtcggactgcatgtaaatgcgcatgggggccatcccagtagctgcctcatctcagctatccctcacgtttcagggccggcggcggcccgcggaagccagatcccggaggtcccgcccccgacgccatttagacggtgagggattcccgctccaggattctatgctgactaacggaccccctcgtcctcaataccgcccaaaaacctccccaaattcctcaatcacgcccaatgagatctcaaacgcagacaggcctcaagcgcaggcgggccgcaagcgcaggcgggcctcaaacgcaggcgggcctcaaacgcgaggtgccgcctccttcccgaggaaggagcgtggtctcgagtctgtcgctgctcctcggattcgcacacttaaggctaacgctaaccctctagcaaggctatgggggcgcgcgagaccgaccgagcgaagcgggacgaggccaggcctagctggcgaacaacacaaatggataacggcccgcttacctttggcgcagggaagcgaccaacttggacagaagacgacaatccacgcatgcgcgggccctgtactcggtcccaatcaacgccctctacgtcatcacgcatgtgcgcactatatcgcgtcaggctggcacgcacactccccaaccagcttctacctatgtccctgacgaaagccaacccatcagcgagagccccgcccccttcggcaaagccccgccccttcctacgtcaggactgtaagcacatgcgcaaaagtgcatccctgcccccgccccctcttccgtgtgggccctccctgtcccctctctgtcacctcacagtagtcgttgccggtagcgggtgtgggggcgcgagcagcgcagggcggcctctcccccacccctcagcccgggcccgggctcggtccccccctctccctccgcttcgcactcccgtcgggtacgggaaggtccaagccgctgccgggtgcccgagggccgtcgtggccgccgtcgccacgggtcccaatggagccgccgaatctctatccggtgaagctctacgtgtacgacctgtccaaaggcctggcccggcggctcagccccatcatgctgggtgagggggaaggggccaggtgggcaggagggcgggagccaggccagagggtggcggctggccgaggtggggagacttgggccacgactcacggggagacacatggccaggaggatggaagaaaagccgagtggagaagagagtggtctgaagtttgggccatctgagccccgctttagcctcgcagataccatcctcacgtttgaattcaaggggaagggatggaggagtcatgcctccaccttgcagggggcttgggcagaaaccgagccctcgagagccccttcgacgagggtgtggggtaaaccagcgctggatcccggcgggttctctgcctcgctcgggtagcccagtgcactcctgcctccttggcgcggtgtaggaaaggtgaggatgcctgccgcgcggtgcccctcgtggtgacagagacactgcggaggtcgggtggctctcggagaaccttgtctcagtgccaaaaggaagctccctttgcagtcccagggataggtgggatgggggagatagagctgcctagggacccagccatcgcccccaggtaggtcaagtcaggataagaggagccccgaactccagaattcaccaagcagtcttctccccacagtttctaagttaattgcttttgctcaaatggcaagaaagcagttttgggggaagtttggatgaggctgtgtgaataaggattagtaaagaaagtatttcggttgtgctccattaaactacttaactggcaggagaaaaaccagccctcattcagtgacgatcacaccttatttcaacttaaatacaggaatgtcttgtgtaacacaggaattgtcaggtttgtaatttcgggtaacaatgagcaggaaagaattccaattattgaaaattgaagctttgacagcatccatttgaatggctagtttttcctggcttctgtggagacactggcgaatgatttagttcatctctgtgagacgagggggcagagatcaagtaagggaggctacttttgagggcatccttcaatgtccttgagtttctaatatgtcgtagtgaattgaacttaatctcacaaccgtgggtccatgagttgtttctatatttggcttcacatcaaaatcatctagggtgcttgttaaaaatgcagataccctcatttccaacatatattgtaaatgagattagaaaaaacaaggttagaatagctctttaaatatgcaaatcaaaggatatatatgtgcttgcttaggcaaataattatccgtaaggatacacaagaaattgataacagcagtagcttatggaaaggggaacttgatgccaggggaacaggggtagaagagaaactttgctgtaaactgtttcttacctctggacctgtgtattacatacacataatatctattt

SEQ ID NO: 1563107 - DNA, 4001 bp, Homo sapiens
ggttacagtgagctacgatgatctcaccactgcactccagcctgtctctattaaaaaattaaaaaatatatatatttcattaggaaataaatattgaaagatacttgaaagaaaaatacaaaaatgtcaaaatgctggtagtggttgtgttagagtggtagattatagcaaatttttttcttttttgtatttcctatgtttctcacttttttttttttcctgagagagtctcattctgtcacccaggctggaatgcagtggcgccatctcggctcactgcaagctccacctcccaggttcgcaccattctcctgcctcagcctcccgagcagctgggactacaggcgaccgccaccacgcccggctaattttttgtattttttttttagtacagacggggtttcaccgtgttaaccaggatggtcttgatctcctgacatcgtgatccgcccgcctcggcctcccaaagtgctgggattacaggcttgagacaccgcgcctggccgtttctcatttttaataaaaatattcaaaatttttctgctcaggagttaaattaaccagtatgaagattacatgtacccctatttctcttcctttgttttatgtgttactgtgttgcctgcacatacactcccaaacgtggaggctatagtgagggaatcaatcactttcctgtaactgtgttgcttgcgtttattctttggttggtgtagttattgcagggtgggggcatttttacactgaggtcctggaatggtaacactactttcctggatgagaagggtctcacctgaaccacttaagatgacaaaaaatacctatggtcatggccatttatcagggaccaaaagatgtcaaactaccagtgtccaaaaaaaacttagggcacactagagtaagatctgcatataagagcctagggtagctctgcgaagttcaaaggaagaaaagaatttcagaattatctgggaggagaagggcaggccatcaaacagcaaagtccatccagcagagataggcagggaaggtctttcttccacacaccgaatggcactacatgctgaagtcacttaccacttgcttcaaggttctcttcttgttcttcctctgcttcttcatcgccctcggttttgtaatatgactcccaccctgacatgttggctactgctcactaggcgaaagacgttaacgtcagtaacaggcaaatttaaatcgaaaaaataccgacctctaggttcttgtgagatctgttctaaaagcttggttagtagtgaggaatgtggacggtaaatcctgctgcctcgaaagctcggcagtcggactgcatgtaaatgcgcatgggggccatcccagtagctgcctcatctcagctatccctcacgtttcagggccggcggcggcccgcggaagccagatcccggaggtcccgcccccgacgccatttagacggtgagggattcccgctccaggattctatgctgactaacggaccccctcgtcctcaataccgcccaaaaacctccccaaattcctcaatcacgcccaatgagatctcaaacgcagacaggcctcaagcgcaggcgggccgcaagcgcaggcgggcctcaaacgcaggcgggcctcaaacgcgaggtgccgcctccttcccgaggaaggagcgtggtctcgagtctgtcgctgctcctcggattcgcacacttaaggctaacgctaaccctctagcaaggctatgggggcgcgcgagaccgaccgagcgaagcgggacgaggccaggcctagctggcgaacaacacaaatggataacggcccgcttacctttggcgcagggaagcgaccaacttggacagaagacgacaatccacgcatgcgcgggccctgtactcggtcccaatcaacgccctctacgtcatcacgcatgtgcgcactatatcgcgtcaggctggcacgcacactccccaaccagcttctacctatgtccctgacgaaagccaacccatcagcgagagccccgcccccttcggcaaagccccgccccttcctacgtcaggactgtaagcacatgcgcaaaagtgcatccctgcccccgccccctcttccgtgtgggccctccctgtcccctctctgtcacctcacagtagtcgttgccggtagcgggtgtgggggcgcgagcagcgcagggcggcctctcccccacccctcagcccgggcccgggctcggtccccccctctccctccgcttcgcactcccgtcgggtacgggaaggtccaagccgctgccgggtgcccgagggccgtcgtggccgccgtcgccacgggtcccaatggagccgccgaatctctatccggtgaagctctacgtgtacgacctgtccaaaggcctggcccggcggctcagccccatcatgctgggtgagggggaaggggccaggtgggcaggagggcgggagccaggccagagggtggcggctggccgaggtggggagacttgggccacgactcacggggagacacatggccaggaggatggaagaaaagccgagtggagaagagagtggtctgaagtttgggccatctgagccccgctttagcctcgcagataccatcctcacgtttgaattcaaggggaagggatggaggagtcatgcctccaccttgcagggggcttgggcagaaaccgagccctcgagagccccttcgacgagggtgtggggtaaaccagcgctggatcccggcgggttctctgcctcgctcgggtagcccagtgcactcctgcctccttggcgcggtgtaggaaaggtgaggatgcctgccgcgcggtgcccctcgtggtgacagagacactgcggaggtcgggtggctctcggagaaccttgtctcagtgccaaaaggaagctccctttgcagtcccagggataggtgggatgggggagatagagctgcctagggacccagccatcgcccccaggtaggtcaagtcaggataagaggagccccgaactccagaattcaccaagcagtcttctccccacagtttctaagttaattgcttttgctcaaatggcaagaaagcagttttgggggaagtttggatgaggctgtgtgaataaggattagtaaagaaagtatttcggttgtgctccattaaactacttaactggcaggagaaaaaccagccctcattcagtgacgatcacaccttatttcaacttaaatacaggaatgtcttgtgtaacacaggaattgtcaggtttgtaatttcgggtaacaatgagcaggaaagaattccaattattgaaaattgaagctttgacagcatccatttgaatggctagtttttcctggcttctgtggagacactggcgaatgatttagttcatctctgtgagacgagggggcagagatcaagtaagggaggctacttttgagggcatccttcaatgtccttgagtttctaatatgtcgtagtgaattgaacttaatctcacaaccgtgggtccatgagttgtttctatatttggcttcacatcaaaatcatctagggtgcttgttaaaaatgcagataccctcatttccaacatatattgtaaatgagattagaaaaaacaaggttagaatagctctttaaatatgcaaatcaaaggatatatatgtgcttgcttaggcaaataattatccgtaaggatacacaagaaattgataacagcagtagcttatggaaaggggaacttgatgccaggggaacaggggtagaagagaaactttgctgtaaactgtttcttacctctggacctgtgtattacatacacataatatctatttaaaatgagaaaattttaattatatggattctaaggcttcacaaatactaaatcagaatctcctggagttttggtccaaaaatctgtatttttaatgagcttatcagctaattcttatgtagccaacccattatttgacagggatttgggcctagataaccagttgttaaaatgattgag

SEQ ID NO: 1563108 - DNA, 4001 bp, Homo sapiens
tgagggtctcctgggcacagctgataaaccacccaagtttgaaagacacacgttattttattaatatagccatctctccccactgccccagtggtgaaggtgtttgcattgcaacatggaggggcaccaaatgctctgcgggccctagcccgctgccacaggctaggcctgcctgcagccaagaaggctgctcaaactctagatgccatttggaggcatgaggacctgagcccagaggtggcagtgtcctacccagggaagtcaacagatcgtgctccaggtcccagctctgggctgggccaggactaaatcctggctcccctttcttggtactaaggggattagtgcttggttgtctgtagggggtcagagtagggagggttccaggaagggttccagagtgggctcacaggggacctcctcccctggcctcttggagtccaggtcgtcgagggcgcaaagctgcacgccatcctgggcaagctgggcccgcagcgtgggcgcggtgaggacgcgcagctcatgcagccgctcccaagagcaagagaaagcgtcggggccttcaccgcagccgccggtgggaggcacactggggtagccggggtgcgccatcagctcggctgtcagggtgtggcccgctagggtaccttccaggacccgcgccagggccccggacacgcggtgagcggacatgtgccggccgcaagtgctcaggcccacgaaggcgtctgtccacctgtggggggcgggacatcagaggtgggaccaggccgggccatggccaagggctaggtaggctagggaagggacggcggggtgggagggggtaactggggtggcggcagcggtcgacgccagactcgcttccgggttgagaaacggacacagctagccaggtgaacagccagtgcggagggacagaggcagctatggtaggagacggggcggggagcctcaccgcaggccgtggcgggagaaggggcccacggcggcccgggcgtcgcgctccacggcgcaggcgaaggcacgcgcgggggcctccagccaagtgcagccacccacaccgcgctccagcggcagtcgcgtaaagcgcaccccataggcctgcagcgcctcggcgaacacctggcacacgcctgcgggcggagcgggtcagggaggagcacgtcctttcacctgggggcatcgaacttcccctactcccccagccccgcctgggagtaacgccctccaaactgggatcactaaccacgcacctgggagcacgtgcacgtgctggtgcccgtccgcgtgcgtgggggccctgcccagcagctcccggaagcagcttagttgggcctcgagctcctcccgcacctagagggcgagcgagagacaccttgagcgaccgggagtagctgccgaggataccctcctcgtgcttccgtgtgatggctccagtgtttgaatgcggaagtcatccaccgccagctcctaacggcctcacagtaccctccgggcggagctctgggggtcctcgcgagcatcctcctgtagctgcggctccgcacctgaggcaaatccacgtctccggccgccaccgcctcccggaatcccatcttgccaaggaagaagccttccgggccgagcagcgatgaggcgccacggcgggccggacccacggggcggccctcggacaggttggcgtggaggcccgtggggatgctgtgcctgagggcggagcgcgagctggagcactagcggccgcggagccgcgcgccccaagccgatcgccgccctgctagaggccctcccctcacctgcgggccagctccgccgcgctctccgtggccgcaccgttgaccagcagggacacgctggtcacagccccggccagaaaggcctccacgataccctcatcgcgtcgcgggcagtaaccaaagtcgtccgcggtgaccaccaggcgcatgcgagggcgggacatggccgcctgggtccaccgctcgcgctcccaggggagtgggccggacagcccaggccccgcccccggacgctgcccgggccccgccccgacgcacacgcccaggtgcggctgcacttcgcctttgttctcgccacctagcggtccggcgtgcccctgcaaggacccggcaactgctcccgcgctaaccagaccagtgatggattcattgcaatgcggaactttccttgactgcaaaagtgatatttaatatgtaaaatatcaaaaggaagccgggcgcagtggctcacgcctgtaatcccaacactttgggaggccgaggcgggtggatcacgaggtcaggagttcaaggccagcctggccaacatggggaaaccccgtctctattaaaaatacaaaaattagccgggagtggtggcacgcgcctgtaatcccagctactcgggaggctgaggcaggagcgtggcttgaacccgggaggcggaggttgtggtgagccgagatcgcaccactgcactctagcctgggcgatagagcgagactccgtctcaaaaaaaaaaaaaaaaaaaaaaaagaatctcctacccttcccagagattgccattgtaaactttctgggttgtgtccttccagtgttttctctaagcaaataaacacacccaactccctttctccccaacccaacttttttgtgtgttgttttgagaacataaagatgattatatcaatgttatcacattctagtagtttcttagcagtgcgaatgaaaattttcatattattagctatttttattctttttcaaattgcctattgatcttttgcagatttttctaagagcaggcattttcttgatttgttgattttttttttttcttgagctctagacactaagaaaatgaaagaaagcatatacactaaggcttcatttgagaaaacattatctccagtttccatcttgagctctctgccaggctacagcttttacattcataacttcactgttttctctttggtccagaaaagctttccttacccatgactgtataaatagtcattatggttggcagccacagtttccattgcaatgtgacagtcttgatttttcccatggaaagtgtggtatttgtgtccgggctatgaaattggtaatgtcattcctgtttcacagatgaggaaactggggttcagagagcgaaagtgtggtcctgccaggagtagtggagctaagactgaacctcacacctcggggccagcacccaggcctgctatgtcctctctgtccctgacctagtgggtagccagagctgagaggacagagcagagcttgagaggaacaatatttcgtgaggcatgtgaggattgaaagcctcatagagtccttcagccatgctcttggcataaggactgatgtgtttatagtgactggtgaattgtcagacctcaaccaaccaccgttctccactggaagctgatcttggaaaggtcagaggtcccgagggtctgcaggtgggaaggaggagactgacatttattgagcacctacttggtgccagacactgaaagtattagagattaagggtgacttgcctctgttctggccccaaagaagcaccatctgatagaaaaataagtagcaacatggtatggtagagtctggaatggggtttactgtgaattgcgtagggcgtggcagaattcacagtaaaaggtttttggaagaagtgacaccatggtggggtattactgagcaaaggggaaaaggagggagggagaggaggtaagaatatacaaggctccgctgggcgcggtggctcaggtctgtaatcccagcactttgggaggccaaggcaggcggatcacaagatcagggaatcgagaccatcctagctaacacggtgaaaccccatctctactaaaactacaaaaaaattagccgggcgtggtggcgggcccctgtaatcccagctgctcgggaggctgaggcaggagaatggcgtgaacacgggaggcggagcttgcagtcagccgagattgcgcc

SEQ ID NO: 1563109 - DNA, 4001 bp, Homo sapiens
aaaaggaaaaaacctatagggtagcctctttcccttttcctgcatccctgccccttgacacaggtgctggtggaacttagtgaagacaggcaagaatcaagaacagatgttagaggaacactgctctcaacctaaagaaaatagctttatggtgaggtatagcagctcaagcctgtaatcccaacacttcaggaggctgaggcaggtggatcacttgagcctaggagttcaagaccagcctgggaaacattaagtgagaccccagtctctacaaaaaaaaatgtaaagttaaccagtcatggtggtgtgcacctgtagtcctagctacatgggaggctgaggcaagaggatcacttgggctcaggatgtggaggttgcagtgagtcgtgtttgtgccactgcactccatcctgagcaagagtgagaccctgtctcaaacaaagaaacaaacagagaaatggctttataaattacagtgattcaaaggtgaaaaggcttaatacccacagtttagtgacaagaatgcacccaggtgtttttcatattggcaagtgtaccacagcagtgtaggatggggtaaggatagggagcactgggtgtaggatatattgggattgtctgtactatctttgcaacctttatgtaaatttaaagtttttccaaaataagaagttattttaaaagaagactattgctcagattggtaattaagagcgctcagttattatataaatgctcaatatgggcccaacccgtaggggttcccacaagtagatgagactctaccctgtagggcccaagaggaaacaccatgaaggtcctggagatcctcttattcctcaaacatgccactaccattgcctcgcaagagccctgagggggaccagtgcatgattgtaagacaaaatgacatcaggattaagcacagctcctggcacctggcaggggctcagcaaacatttgtcacatctatagcttgctcaggtgaggtgcctggaaagtctccccagtggtggtaaacctagtcttgggacctgagtagggaattaggagtgtcaggggctggtgggtgggaagaataacattcttagcaaaggaaacatcaggttaaggtgggtatgttttagatagaggaagaagaaatgcaacggaacagaaaaagcgtggggcggggaaattgatgtcttccatgttcattatctgcctaaaatagaatctcagccttttttccatccttagaattcagcacataatttggacatcaaagatgtcaatcagagccaagcatgggggaggcggaccctgtttagatctctgaagctcaggcttttgcaatctctgttaacgaaacctatgccacaagtggtaaataccgaggacgctccattttagtcatgatctttatgtggctacttgaaaagcttttccgcctttctgataaacattcctaggagacctcttttgccctcatttccttgcccagttgaggctgtattttttaaggaaggaaaatccaaaaatcagggatcttgtccattttccctatcttttcacggcggggcgggagaagagggacagcgggggaggtggagagaagaaacggcgggggaatcaaagattaggcgttgttgtctgtgccaaaacggagtgagcccaatatcaacaaatcaaaatccaaaacggaacaaaaaagtcacaggcccgccctgctcgcgcccccgcccgcccggacgcccaacaggtgcttcccgggcccgcccgcagccacagtatccttgggtggccacaaagtaaccgcccgcgcagctgcagccaggcccgcccgtactcacggccgctccgcggtccgcgccccggcccgcagcgcccatccggcccgggccccggtcagcgcgggctcggctctcaggcgttcccggcgcggcccgggacgcgctgaggccgttaacgcctaggcagggcgcgaggcatcctcccgccgccgccccgcgggccgcctgccctttgttttggagccgtagcccggcccagacgccgttaacagccttggagcgcggcgccggccaatcagcgcgccatgtcgccagcgccccgcccccatcctgcctccgttccgccccgcgtcccgcctgccccgcgcgcccccgccccgcgcgctccgggccaaggagctccgccagctcgcacccggccgggacgggcaggagcccacgtgccgcggggcgcgccgcactcccattggctgacccgccgggcgcggcctcggagccagcctgtaagggccgagggacacgggggcggggccgcgcggggcggggcgagagcaggggcgggttccgcgaggagcgccgcgctcggacgcaggctggctgggcagggacactcggccggcggggctggcggtggtggtcactcgttcctccggctcgcggggatgggccgagggcgtgcagggcccgcagctccagaggctgaggcgagcttgcgcgcagcctcctcgtccagcgccgtgcacgtaccgcccgtccgcgcggtcggccgcgttgtaggggacggacgtggaggccgaggcgagcttgtgtgcgcctgaccagggcccgccttggccggacccctccgcggccgggtccccagaatgcggtcgtccgtgctgtcccgtccccaccaccctctctgaacccaaggacctaaccccctaggaccccctcgccacggaggaccccccgggtctgcgtctggcccctcgctctgctccaggactgccgcgtcagaccctacagaaagccccttcctctgggtagtgctcccgacgccccggcagcctgcgccacccccacgcctctaatgtcactgttttcttggttccgtatcccttctttaaaaaaatatatattatttgaaaatagatatgtattatttgaatatatatatttgaaggctgggtgtggtggctcacgcctgtaattccagtactttgggaggccgaggcaggaggatcatttgagcccaggagttcaagagcagcctgggcaacatagtgagacactgtaccaaaaaaaaaaaaagaaagaaattaggcatggtggtgcacacctgtagtcccagctacctgtgaggctgaggcgggaggatcacttgagcccaggaggtcgaggcctcagtgagccatgatcgcgctactgcactccagactgggtgacagagcgagacccttcctcttgaacaaaaaaaaaaaaaaagaaaagaaaaaaaccaagaaaacaacaaaacctctattgaggtcacaatgtatataacattgttatcagcgtcctctggacgtattctcttgttttctgcaacccactgtgtatgtaaagatctcttcaagtcgctaaatgtacacctgactcataacttagattgtggctggatgttgcctttttttttttttttttttttttccttgagacaggagtctcgctgtgtcgcccaggctggagtgcagtggtgtgagcttggctcactgcaacctcctcctcctgggctcaagcgattctcctgcctcagcctccccagtagctgagactacagttgcccgccactaggcccggctaatttttgtatttttagtagagacggggtttcaccatattggccaggctggtctcgaattcctgacctcaagtgatccgcctgcctcggcctcccaaagtgctgggattacaggcatgagcccacgcgcccggccccatttaactattttaaagtgtacagttcactggtattaaatacattcataatgttgtgcaaccatcatcatcatccctctccagaactcatcttgcctaagtaaagctctggactcaagaaacaatgactcccgtttccttctaccccatgccccgcaccaccccattctactttctgtccctatgagcttgactgctctaggtgcctcacataagtgaaatcatctagtatttgtctttttgtggcttactgtgacttttgtggctcat

SEQ ID NO: 1563110 - DNA, 4001 bp, Homo sapiens
aaaatgtgtggagaggcctcagcctgcataatcccagcaccactcagttactggggaggaggggcttaagtgtgacctgctgtggacagaggcagctttatcccacagaaaattaaggttcagggtcccttccaaggaaatgcattcgtcagtcccatttttgtaaaatatgcaaaactatattttagattttcttttaaaggaccccctgaattacataaagttcagcctccagacctagaccgtcccccggtctggaagaaaacctgcctcaccacaacagcatgctaatagtgctcaagtcaagatcaccaacaaatcaacatacgggcaacggtgttgctggtttccaaacacacccagttatgtgtgtaacaaggacaccagaggaaaggcaactcttcaagcacctttcttacctgaacaatcctaaatattggccccaactacatatttcatctgatattaacatcaaaagccttcaaatgagctttccaaatgacttaagattttagggagcctttgtattggcagttttttttcggaactccctccaaaaggccagcaaaggatacatttactataatcatgggcagtaattctcagacttaagccagctaaaaatcgcctgtgagagctggttacaatgcagatgtctgagtctcaccgcccgaatttctgaatgtataggtctaaggcggagttcaaggggatcctcccaggtctcaggaggttgtacactgaacataggttggtggtcgcagttgttctaccactgtgtgaccttgacgcagggagaggaaatattcatttacagaaaacgtaaaataacgtggagagagagtgagatggtaaccggaactcagaaatgcaggtggtgtgtgacccacggtattttgctagggtgtggctgggcacgactcatccaccggagaagctgcagaatcgatttatgagggtctcaggaatgcaaagacacacagattcgtctcacctagaagtcacgtttcattttaatctccaagcagacagcgcagcagcaaacctggggctgtggagtggggccccacaccctccgcccactctcccgcccccgtccacgcctagactgcaggaaaggggtcttcgcacacaaagccagacccccaggcgtgggaagatggaaccagaacaattcgaacgagcagagcaaaacagatcggaattgcagacttcaggtcgtggcagagaaaaccagctgagacagggcgccacttactaggtgattctttattccaagttggggaacggaggaagacgagagggggagcccccgggtccggtgaaacgctctaggagaaatgcggctccttcgcgtcccctagggcaccctctgcccccggccgggttccgaactaagatgtggcgaccccgaccggcccgccccccttccggggctgccttcgcgatcccgaactgcaccctcccggatcccccaccctgggcccagcctcaggaagtggcggggcgcccagcgggagcgggaagcgcgggctaagggcgggcgggcggccacgcccagccgggtcgccgggtcgcccatggccgggaggggaacgcgcccgcggccatccccgtccctccccaacgccaggccccccccggccagccgcccgggctcccggcgcgctcaccgccttcatagcggaggccatgtcgtcgtagcgctccgcctgctcggccagccgcgcccgctgcagcagctgctcccggtcccccatgtcgctcgcggctcggcctcgcctcgcgcctcacaccgctggctcgctagccctcccgccggtcagtccgctccccggtcgctgcggaggccgccgccgcgcacgcgcactggctcgccggccggccggaggctgcaggctgcaggctgcaggcagcgccgccgctcgcgccctctcgctggctcgccccgcgcgctgtggctcgcgccgcggacaacgccgagggaggagacgcggccgcgctgggggatgggaggacgggacgacgcctgcgcagtgagagtggccaggccgggcggcggggagcggcgggagtgggaggggggaagggcgggccggccctaacggtctatttcaaggtgacgtcacctactataaatagccaccgccgccgccgccgcccggcctgaaagccgcgcaggcgctctgcgagtgctgcattttaccgccgcagagatggaggtggagaagggaaagccgggcaggagactgcggagccggtggagggggcgcggtgatggcggctgcacaggcagtgcattgtcatagccccaccctgaaacgcgccactccatccacgttagagatctggcttgagaagggccccaaaagcaagcaaacatactggcggagaagccgggagaccgcgtgccccgaggggcgggtccgcccagccccgccccagccgtcccgcccgccccgagccctgcctgtccatgcgttctgctgggccacaccttgtactggtccgggcaggatcgagtccgaccctcggggacagccccgctacacagacacacacaatcgaacccaacctgagacgtagccttgggcaggctgtgccttccaccagaggaggggactgggtggccagggcgggacaagtaatattcaggacacattaggagccagcccagtgctagtcccgtacaagcatcctcctctttaatcctcactacccagcccacagtgggcacagctggtctccccatatttaaaacgtggaacctgaggaaaagcgaggttagtgacttgctcagggttacgcagcctgtaagtggtggggccaggatctgagtccaaacccaggctgaactttctcttgtggcaaagagctggggtggcccaactggctggtcactgagcccctcccaatcctggctggtattggatgctgagggtcccttgtgccaggccctggactgggctgcccgacaagctaggaaaatgatgattaaaacaaggcccccacttgatttcaacacgccaagggcagtgcaggagagggggccttgggctcgctgagaattttattgagcatctactgcatgctcagcccacagggataagctggatcttgaaggagagtcaggaaaaagattaaggcctggggtacagcattggcaaaggcttggcagtgacctgggagatggtgagaagagaggcctaagaatgggaagtgaggttgggtaaaacaagattacggagtcttttaaatgccaggccaaagatttgaggcttcatccttaggtaattgggaagccatatttcaggcctggaatcttgctctagagagtaagacatgttcgaagggagaagggagggaactggagaccaggccttttctggacctgttttccatctggagaattggacttaactgtttcaaggactttagaatagatatccacatgctgaaatgtcagagctggcaggacccttagaatcacccctgtctaaccccttatcctgaataacgggaaactgaggtctgagggaaaggaggggctggccctagtttgcacagcgagtgagcagagctggggtctccataccaggtttcctgcctcccaggccttcctcttcctgctatgatgctgaaacgatcacacttctgggggcccatgaaacaggatttgaatgtgggtctaggaggaggccactaccccaggcttcaccatgctttgaagagtcacttttgctgttggaatcgaggttaacaaaccaggctaatctttcccctagtgaatatatttaaagagcatgctagatagtaatgaatcatccactccaccccccataaggatggggtcccagtgagagatgggaggagggccagccctggatggggggacctcctcggttccttctagctcttagagggcttagagcccttccagcttttctgatgaggttggactaagattgatttcaaaacagtgaaaattaggtagagctgga

SEQ ID NO: 1563111 - DNA, 4001 bp, Homo sapiens
ggaaacaacgttggtaaggaagggccagcttggcctctaccccagggctgggcaaagccacgcccagctgtttcacctgctccctcctctcaaaagacaaccaccacaccaaagagaatgagaccagaagctaaagccaggcaaagaaaaaaacgcaaaacaaagtgaaggacggcactgaccacggtcacttcctgctcctcatgccgccaggagtccactccccagggctcctcaccaaggatctgagacacacacacacacacacctttcgctaaagaagctgcttctcagctcctctgcacacacacagaagtcagtccgctcccctagtaatttttttagtctttctgcaaggtgttatggacatactttgcacagctgagttactcactgtgtgtgtggagggggttggggaggaggtaaccttaaagagcagaggttttacatccaacaacatcaaccaccttattcaggaattacctggacaagagtgtgtgttgggggagaccctgtaaccacctgtcaagtggactaaaagtcttaggtttctttccatatagattaactgtgtcctcacctcaaagaccgggcctctgaagctttttcaagattcacagaatctctcttaacttgtgctagatcttttcttgaaaaaaagccaatcatgacaagcagatataatccgtttaaggactacgggaagtgtgcagccttgtacggacgtcccattggaaaccctcggagtatggaatcaaactcctgtaaactttcctcttgcaaagtaactttgtttagtaattgcaattaattcataatcaaaatgtggcttattcatagcacttaaaaaaaaatcccaaccaaatccttcctagcctcaattttgtcactatgaatgacatacacagaaaaaataaaaaacatttctgtgtaaaaagtcgcaggatgcccttgctttaccaaactggcctcactatgaggtctgaatggatttctaaaaacgtaatctgatcagagttaacttcaaaataaataacttccctttcgaccaacacgagaacaccaacagaagcttctgacggctcagcttggccgggacgtgtttccacagaggtgcccgggtctaccagggccacccggaatagaaaggcgcagaagggagcccgaggggctgcgattctcttagcaacgaaggcggtgtgggccacacaacgggacaaaagaagaaacaaaactgactgcgagctcatttgggtgtaggaaaaccactgcagtcgaaaaacatttgaaattatggttcgcaaggcaagttacatttttattcattaaatgtgaacggtcatccccagaaccacgtacaataacctgcctcggggcgcgtcgcaaggacccgtctgggctgagacatgaagcagggcccaggtggcccttcctggaggtgggacgggaatgacacgtccagagaagtcccagggacggggctcgcggggttaactcgacgtggccgggacagcgcgctcccggcggacccgggcggcgccccgagcccgagccccgtcccgtccgcccggaagcaacggcgcgggcacgtgggccaggccgggcgccgacccccggcactcggccgctcagtcggcgccgcccccgcgccagctgtcagggccggggtccgcgcgggggcgggtccggggcggcgccgggcggggaccccgaggccacggaaccgcgcccccgcccgcctggccccggccctggccccggcgcggcgcagacaatggcgcggcccggcccggccccggcgcggtccgcgggggacggggctcgcggcaggcggcggggcggcggcgcccgcgcactcacctcggcccggcctctggggcggctcccggccggctgcggacgacggcggcgcgggcggacgctccattcattaccgcggctttgtctgcccccgcgcccctcccgcggccccgccgcccgccgcccgcgacgccgccggacgctgcgcccctcccagggccccgcgcggcgcggggcggggctggccgggggcggggccgatcgggggcggggcctactctcgcaggcgcagtgtccgcgtacccgccccgcctcgtccctggccgggcgggaggacggagcgccggaggcccggccgctggggcggggtcgggcggaagacgcaggcgcaatgcgcgcttcggctccgcccccgggtccaggagggcaaactacgcaggcgcagtgggcgctccggcgctggcgggcgacgggaagggcttaggcgctctggctgggcggggcgcgggcgccttggtttcgtcccgtggcttggcagttggcagcggctcggcgcgcacccaacggcccaccgcgggtttccgggacggctagcagcgcggttcccggtcccgccccgaacccccttacctggcgcagaggccgctcagtgcggtgcggtcaggcctcgtgggctgggacctaagccgttgaccctaaggcgatcggggctccccgcgcggcccccccgggggacgggattaacgcctaagccccaagccgggtcggcgggaggagggcggccctctgggcgagcgcggggccggggctggcggtgcggagcgcacgggactcgcccgcttctcagggtctgaaggaaatgtgcacttttaatgtgttatttcctaacacaaatgtttgagcagaccaaataaactctgcatgctgaatgtggccccgaggtcccccgttggtgacacggctttcggcattttctcggcctgagtgtgagagtgagaggagcccgcgtggcggtcaccggctggagcgggagcgtggagttatcacggccgcctctgcccggagcccgcccctgccccgcggctgtgccccttcacccgcacgccgactgttccaaagtccacgtccagcctgcagccgggttttctatggtgcctgagctaagaatgcttttctcgtttttaagaggttgggggagaattaaaacagtattttagcatatatgaaaagtatatgacattcaaatatcggccgggcacggtggctcacgcctgtaatccctgcactttgggaggccgaggcgggtggatcacctgagatcaggagttcgagaccagcctggccaacatggagaaaccccgtctctactgaaaaaaaataaaaaattagccagacgtggtggtgggctcctgtaatcccagatactcgggagactgaggcagaagaatcgcttgaacccgggaggcagaggttgcagtgagccgagatcgcgccactgcactccagtctgggtgacagagcaagactccgtctccaaaaaaaaattaaattaaaatgtcggtttcctaaggagttcaactggaacaccaccatgcttgttcatgtagttaaaaggtaaactgctttaccttccaccatagctatggagttgagaccaggcactgacacccaaaaagggctccctgtttctttctttttcttttttttttctttctgagacagagtctcgctctgtccccaggctggagtgcggtagcgtgatctcggctcactgcaacctccgcctcccgggttcaagcgattctcctgcctcagcctccagagtagctgagactacaggcgctcgccaccacgcccagctaatttatgtatttttagtagagatggggtttcaccatgttgaccaggatggtctcgatctcctgatcttgtgatccgcccgccttggcctcccaaagtgctgggattacaggcatgagccaccgtgcccggcctggggatccctgtttcattcagagtggaggccagtgttctcaggcctgctctgcccctgccatcccctcatcagatctgcagcagcccccagcctccttgatgcttgctttggggtcttcgcactgacttcttgtctgcctggactgctcttcccctctgccagtgtcaagctcccagacggctgcccatatgtcagcatagtggga

SEQ ID NO: 1563112 - DNA, 4001 bp, Homo sapiens
tcagattgagggattattttcagattctctatccatgtctcaaccgacatctcagctttcctactaagactcgagagatcagcacatcccaccaagcttctaagccccacaataatctaccaaaacccccattcctgtctaacctatacaaaagccagcagctaagaacacacagcatctacagaacagaaactttatcccagctcagggacaacaaagtctctctcccatcctcagatctcatccctcctggacaggttctttcttcccaccttaagtctccccacttctcaaacatgctccatccaactgttgaccaggtgtcatttccaccttgcagtccaacttctgtgggaggtggacacggggaaagaagaccaccacggaggggatggctgtatgtgtgtagaggaagtattggtagtagaactaaagattctgccagcattttgtgtccaacacagttgctacatgtactataattatctcatttgtgtgaaaattcaaggatctgcattctgctattttcatcaggctgaactgcagatgctgaggaatatggcaagaagttggggttcaaagtctgatgccaaagctagcaacccgagaaataaaaccgctgatcaccagctccccactcaggcccagcccccttttagagcccccagactccccacgcagggccctagccccctagtcttccccgtcaatgccctgttggcaatacagccatcaggttctatcagagtgagctgtttttatatgattattttcccccctgggaagacggctttgtctgtgaaagtccccccaaccaggcgccttataaacgcctaaaacagacagagttgaggagaaaggaggggaaaggaggagggagcaaacccggaggggggccctgaggttcgcagcgggcaggatgggggtatgaggccggagtcggcggctcccaggcccccagccccgtcagggcgcccccgtccccaggcgccagagccggggtccgcagccccctagcactccctggacggccgcgggcctcccacaggcctcgaagtccagagactgatcctgcgaccggaaacgcccccctgcccagcaggcccagaccgcgcccccctttcctgccgcccccttcccgcgggcccggctgcaggccccggatccccgggctcgcgtggccgccgcagccgaaaggggcggcccgtcgggcggccccgctccccggccctcgccgcggcccctccaactccgggtgctgcggggccaaggacaacacaaaaggaaggggggccctgccagcgacgcccctgccagcccccgagaccccctgcgcggggtcggcaaagcatctggacaccccagaagctccggacgccgaagagagaggccccacgaaaatttcaagacacctcctgggggctgcaggggcggccaagtctccccagcgccaggtgcccccggccacacggtaacttttaaactttggggcagggcacggggaccgggatccccaaaaaggagcaaatggggttttagagacgatttattttttgcaaaatcccactttccaggtggcccggcgcgcggccccggcctggaaagggctctcttcgcctcttccccagccctgcccggcccgggcgtccccgaaccctcgcgcgcgggcggctccggacgcagtgtccccggcctctgccccgcggggctcgggccgcgccaagcactcacctccgccgggctgcgctccccgcgggcctgcgccgagcccgataaatggtatgctatgactagaggtatgattacgttattattattagtaataataagagtaaatgctatttaattacgggcggccgcatcctgctcccggcgccgccgccccggcagctccgtccatgtggctctggagcgctttactttcatttccagcccctcggctggccgctcgcggcagcacccgctggaggcactgtctccctgcagctcttcctcctcgggtcctagagagctcggctcccgtcgcctcgccgcgcccggggtgggcggcgcgggctgcgcacctggggagaagggcggggggcgtgggggcgagtcggggaagccccattccccgtcgaaagctcatgcctggaattcacctttattttctttaaaagtgtcctgccttttaggggggtttcttttggcagttctgcatttctgggctgatgctgctcaaacccagcgcctccgcccttccccatctgtgtcaaaagtccccccgccccccttctccggcttccaggtgctttcatggaaggctgcccaaaaccctggttgcgttgtgcccttctcatagatgggaaccggagacacatagaagaatcaggacctcacttggctggagttttatgtataggatgttaaaaaaaatattgaatgacacttgttaaagactacaaggccgactttattggcatcatgatgggtgtagggaccactgcagtgggttttgcggtcagggagagtatttgggctcaattcagaaatcagcatgggcaactgggaatttatgaggaaggagaaaggatccactgattgagcgccagtgcataggaaactgcatcagagatgagaggattctcgcttaaacccatctaacaagattcttgctgaaggcagggcaaggtgatcagacatcacctggggaatggtggaaaatgaggaacctgattagatattgacaatcagggctgggtgcagtggctcacgcctgtaatctcagcactttgggaggccaagacgggtggatcacctgaggtcaggagttcaagaccagactagccaacgtggtgaaaccccatctctacaaaaatacaaaaattagccaggcgtggtggtgggtgcctgtaatcccagctactcaggaggctgaggcaggagaatcacttgaaccccagaggtggaggttgcagtgagccaagatcatgccattgcactccagcctgggcaacaagagcaaaactgtctccagaaatatatgtgtgtgtgtgtgtgtgtgtgtgtgtgtgtgtgtgtgtgtgtgtgtgtgtgagttcccaataccccctaggcaatttacaatgaaacacccttgacaacttatcacatttaccaccatggttattatcactctcatttcatcgatgaggatgctgaggccagttggattgctgcattttgcctcaagtgaactagatggcaaatggtctggtgattccaccaccccaggttgctggtgaaataatgaacacatattcttgaagaggactgtccatcattcaagggggattcagcaggacaccagcctcttatctcttcaagttggtaccaacttgttcaattgtttgggctgcctaagatggtaaaggggtctttattacaagaccccaaccagaggtgaggatgctttggagaaaagggccaggaggaggccgggcgcggtagctcacgcctataatcccagcactttgggaggttgaggcgggcggatcatgaggtcaggagatcgagaccatcctggctaacacggtgaaaccccatctctactaaaaatacaaaaaataagctgggcgtggtgtcgggagcctgtagtcccagctacacaggaggctgagacaggagaatggcgtgaatccgggaggcgtagcttgcagtgagccgggatcatgccactgcactccagcctgggcgacagagtgagactctgtctcaaaaaaagaaagaaaaagaaaagggccaggaggctggcatcggtaggctttctgggaagccccatgttgtcagtcccatgttgtcacagtgtgctctatgtccccatgttaaagctgaaatagcagtaacagccaccgcttctttactatgagccaaacactttgcatatgttgattcttttaccctctcaaaaaccctgtagctcggcacggtggctcacatctgaaatcctagcactttgggacgccaaggtaggtggatcacct

SEQ ID NO: 1563113 - DNA, 4001 bp, Homo sapiens
gccctccaaggaggacaggagatggggggtgtgtggggttgattttaatttcttagcattttttttttctgtatttcacaagttccccataaagaacatactttttttttttttttttttgagacagagtcttgctctgtcacccaggctggagtgcagtggtgcgatttcggctcactccgccttacgggttcaagtgattttcctgcttcagtctcctgtgtagctgggattacaggtgcccaccaccacgcctggctagtttttgtacttttagtagagacggggtttcgccatgttggccaggctggtctcaaactcctgacctcaggtgatctgcccaccttggcctcccaaagtgctgggattacaggcatgagccaccgcgcccggcccacacattacttttaaagtcatgagaaaggacactgaattgcatggacagagtaaggaaccaagccagaccccccgcccaaggacagaggccctggggaccagcactgggctgggcccacccctccagaagccttggtgggatgtgtccccccaggccaggctccccaggctgccccccacccacctctctctgccccacaccagcagcaactaagtgacaagaacacactggcttgcccgagccagaaataagcccgtccacacaggccttttttaaacatgctcttggcagcctgcggtgcccacccagccccagcctgcaggtaactctctcgcctccacgggcacccgattcagccttgcgatgcacgtgggggccccccaaactcttgcaaaggtgacgagcgccaggcagcccctacctgcccctctccaggctcacatgctcaggggtggccccaccttggaacaggtggccatcgttcgtgccacctgggctatgtctcaaccccagattggtggaaggggggtgggtggttgaagatctgtgcaaccgaagcctggagcccccaaccctccttgtgcctgaaggagccctggggtgaccccacagccacagagggaggctgtgctgtccgcatgcctctctggtcctaagccagcctgtatcttgggtgaagaagttgaggctggaggggcccagtgtcctgcaggcgcgggctctcactcccagaaacaggacctcaagggtcctggtgtgcaccatggccagcccacggaggtgatgtgctaacatcgggccctgggtgtggcctggcctgggccctccagctgtgatgaccactgggtcttcctgagaaggaggccaagggccaggcccgggtcaccagtggctgtggggcaggcacgtggcaacgaggccaggccacacctacgtgggaacaacttgactctggcccggggcgggcagccaggaggagacccgagaggcacccacggccacctgcagagaagactcatggttgtgggtggcccacgtcccctcgggggtcccatggggagggaagggctgcagccacacccagggcagcccggcctcctcccctgccagggcccagcgctccccgccagggcctgcctggacactcccgaggtgcccagcccgcactggtgtccccacacaagggactcaccccggtgcccgggacgccggcacaccgcttcaactcccccagccccagcgggtggagagggactgccatcgcctgcagccggcgccccgcccgcccactgcccggggccccgccagcccccgcgaccgctgcccccgtgcccgggctgtgcgggccctgcccatcgctgcccgcgtgcccccagacgcggcgccgactcacgtgaacacgaagaagagggtgctggagccgaccagcagcgcggcggccgtggccaccgggatgtacttggcgggtttgaggcgcgtcccggggctgcggggcatcctgggcgccgcgccgccgcatccctccccggggccgggcgggcagggccggccggggtcgggccggggtcgggcgggcgggctggacgcggcgcaggacccgcggcggcggcggcggcggcggcggaggaaatcccaccccacgggcggcggcggctgctgcgctcttatgtcagcgcgccccttaaggtggaccgggcgctgggggccgcggcggggcgggaccgggcggggcgagttgatggggcccggggaccgccaccggttcgcgggaccttcggagggggcaggaccccgcggcctcggggaccccagcccggcgggcgcccgcggctctcgggggccgggcacccacgcacccctgcggcccgggtggtgggcaccacggcgaaggccaggcccccctggtcccgggccgcggagccgtgcaggtggcctcgggggcgtctgtgggcgcagccctttccctaacgacccctctggtctgaagccccttggaattcacgagggggcgcgggtgtgacaccgcagcggcgtcgtggctgtttgccttctgaccgcctcgcagccctccctcgggccactgggctggaggagcccggccagcgggcgccgggccctccacgtcctggcccgagctgcaggcttgagagacggtcggctggagcccccatcctccccgaggcggggccctttgggaagcccggcgccccggccctgcccgataggcccggcgcgtctcctcccgcaggaaatcccacccgccccgccgccgcttaaggtggaccgggccggggccgacggcgctgtgggcggggtggggcggggcctcgtgtgggtcccccccccagacacacacacgccggcagaggaggcggtgccagcgggagaccctcagtcaagctccggagcgtccccagtgagggtcattgtcctcggccacgccaacatgccccgagcgtcccctgttctgaagcccagacccattagacccctccctaggtggagatctgtggggggacctcacccatcgcccccagccctgagtgtctgctcctctgcaaccagaaccccgagcggccctaccctgcggcacaggcatgaggctccttggcctgcaggcccctgctcccctggggaagcacccggccgcagctcctcagggtgggcaggccagggttgtggctattggaaggaggaacccaggactggggccgggacccagcccttaatgcaactaactactgcacagcagaaatggtgatgggctttctcccaggcagccgtagtggtaagctctgttctcagggtgccctgctccaggaggtgcagcctggagcgctcccaagcactgatggtagctctgaggcagtggaggggtctcagggcacaatggtgagcctagagcagacaccactggagcagatggctcgttacctgggctctgcagtggccacaagtgagcctctcagttggcaacacacctgccacctggtgcccatctccagccttgcccttgctcctaccttcccccatgaagtgcctcctctagtggcacatgccacagagcccctcaggatccaggtctgactccatgcccatgctctgtgcagggtgccaggactgtcaccttcctccaccagctgaaccctggagtaaactgccaaatgctgacagtgggaagaagcggaatcaggcctacttggtgagatcccttttcccttgagtttttaacacagggtttcactctgccacccaggctggagtgcagtggtgcaatcatggctcactgaagcctcaacctccagggttcaagtgatcctcctgcctcagcttcccaagtagctgggaccacagacgtgcaccaccatgccaggctattttttttatatttttttgtagagatagggtctctcactatgttgcccaagctggccttgaactcctggcctgaagtgatcctcccacgtttgcctcccaaagtgctggggtgacaggtgtcaaccattgcatctggccttgggatcccttttccttaacacagaggcctgggcagaggggtcccaagtagtgcagacccactactggagacagagaaccaagcgag

SEQ ID NO: 1563114 - DNA, 4001 bp, Homo sapiens
ggctcatacctctcctctaaactacagatccatgtcctcatttgcctctagacacctccacttgatgtctgttggctagctcaaactgatgtggccaaaacagaacttaagatcattctgttgattttaaattgttgaggtcaaaacttagatgtcagctggacgcggtggctcacacctgtaatcccggcactttgggagaccgtggcaggcggatcacttgaggccaggagttcaagaccagcctggccaacatggtgaaaccttgtctctactaaaaatacaaaaatgagctgggcgtgttggcatccgcttgtaatcccagctattcagtaggctgaggcatgagaattgcttgaacatgggtggcagaggttgcagtgagccaagattgtgccactgcactccagccgcacagagtgagactctgtctcaaaaaaaaacaaaaaacaaaaaacaaaaaaaacttagatatcctcctcaattcctctttcctgtgcaccctacacacatctgctagcttgctctgtctgccctccctcccaaattacatcccaaatctgatcactgccctgctccacaccctaacctaaattaccacccatcaggccgggcatggtggctcacgcctgtaatcccagcactttgggaggccaagatgggaggatcacctgaagtcaggagtttgagactagcctggccaacatggtgaaaccctgtctctactaaaaaaaaaaattagccaggcatggtggcaggcgcctgtaatcccagccactcgggaggctgaagcaggagaatcacttgaacccgggaggcggaggttgcagtaagccgagatagcaccactacactccagtctggacgacagaccgagactccatctcaaataaataaccacccatcttccctcaaatgatctactacaataacttcccccttgcggtccactctccatagaccagccaggatgatgacattaaagtgcacattaaatcttgtcgcatttctcctgaaaacccttcaatggcctcctagtgcaactagaaaaagacaagactccttggccagacgcggtggctcacgcaccttggggggcgaggcaggaagattgcttgagcccaggagttggagaccagcctgggcaacacagtgagaccctgtctctaaaaacaaaaaccaaagaaaacaagactccgtaaggtgggttccaaggccagacatgagctgaccggagtcaacctcttcacagtccactctacttctttccctcaaacatcccaggactgtagctgcctcaaggcctttgcaccaacgttttcctgttcaactctactattcattcaggtctctagtcaagtgtcaccccccagagcagctacccagggtgcaatgtcaccaccactgcctctccagtcaaccaaagcactatctgtttgctgtactgcatctccccacccgcccactccgtagattgagcgctctgtgagagcaaggactttgttcactgctgggtccccagagcagggaccagaacaggcgctgggaaaacatctgttgaatgccccaggtactccaaagcccttgctcttttcaatcccaagcaggttccaagtctccagccttccaaaccagggttgcccggtgcgaagcccaggggtgagaggaacaggaagcagggcagatccgtccctgcccttaatccagggtgaagggtttaacctccaggacaagacttttgccgcaggctccagctcctggcctagacttggggctggtgcaggggacaaggcgaagagttgagccagggtctcgggaacccagctgccctcgcccctctatccacaccctatcccaagaaatggtgcgtcccgccgcagggcgtacgcacagagaaggaagtgttcaagtcttccagtgcggagaaaagagactaggactcgcccctcgacgtctcgcggaaggtacctggctccccggtggctgcagctccgggctcctcctcctgcgtcctcgcgtcgcgtactgcttgctgggattcgtagtctcgccttggccatcagttcgcccttcccagagagctttgggaatctaagccgggactgggcggagggcggggagaaggtgatggcgcgcgagggcttctgggagttgtagtttgacatattctaacagccaggaattctggagaagaaaaattgggtaataaatcttatcagattatctgggctgtcctgatatgaaccttttgagtttttttcctcattcccaggataggaatacctctgtggttcaaaacacgaaggctgagattcagaggaactacaaatcccataaagtgttgcacgtctagggcctttggggaacgaggtcggccccagcgcaggcgcggtggcgcgagttggactgtgaagaaacatggcggccgcgacgttgacttcgaaattgtactccctgctgttccgcaggacctccaccttcgccctcaccatcatcgtgggcgtcatgttcttcgagcgcgccttcgatcaaggcgcggacgctatctacgaccacatcaacgagggggtgagggcctgtgccatccctgaccttggacccgcctgaggggtgacagtggagtagaggtgggatgggactcagtatacttttaccaggaagggggtaaggggtaaaccgtcggcgtcttctgtctcgagtccgccgtctgtccccttggcttgatgtgaattctaaaacgttaagcgaggttaatatatttcattttgcaggggttgtaagtattgctgtgtgccaccctacatacccacttgcccattatcagaagcaaaaactaaaggctagtgagagcaaaggacttactagctgcacaggaagccaggggcaagtcagggccagaaacgggacccctgtctctcagagtttcaagggcagatttgagcaggcgacggtcgtgaaaaggacgttagacaccttagacgccgtggctgaagtttcagacggcgcttctggtccccaaggcttcccacgtagacagttggtattaatggttgagagtgggggctatgaaatcagaaagccttggataggaacactggtccttgtcacttaactgtggcattaagttgagcaagtttcttctctgaactccgttttaactgtgagatggagatattaatagtaacctgagcacgattgtgaggattacatgagatgcaggcagggtgccacatgcctggtaggtggtaccactgaaaaataatcattgcttacattcctcaggagaaagtggaagcatgaggtaggaatcgcaacacatttttgacttttatgtatcatgcactgtgctaggtgcagtgcatgctttatatcgctaaattatgactgtgctggagtaggccttatacatatagccctgttccaccactcacttgtgtttttaatttgagactgtctgactctgcagcccgggaaggcactgtccactagtgctatgctgcctgtgaccagtgcaacttcctgccccatatgaaagcattgctactgtcccatctcttgcaagtggttctgttaaccactcccattgatctggagagacatccaagtatgttgttataactcacccattttccttgtgcttttttttgttttgttttgtttttttgagacaggatctcactctgtcgcccaggttggagtgcagtggcatgatcacagctcactgcagccttgacctcctgggttcaagtgatcttcccacctcagcctcctgagtagctgggaccacaggcatgcgccaccacgcccagctaatttttgtattttttgtagagatggggtttcaccatgttgcccaggctggtcttgaattcctgagctcaggcagtcctcctgccttagccttctaaagtactgggattacaggcgtgagccactgtgctcaacctcttgtgcttctgggaatgagaatttcagccaatttaggtcccaggaaatgtctt

SEQ ID NO: 1563115 - DNA, 4001 bp, Homo sapiens
acactaaacttgttttgtagttctctaatggatatcagctacattttggcaaacaatggtttaagacagaaattggaaaattggcccttcccctgtttttgtacagtcaggaagccaagaatgtttcttacatttttaaggtattgttttcttactttttttttattaagatttttttaaacttgtacatttttaaatttgggggaataaacatgcaaaaggaagcggggcgcggtggctcacgcctgtaatcccagcacttttgggaggccgaggtgggcagatcacttgagctcaggagttcgagaccagcctggccaacatggtgaaaccccttctctactaaaaatacaaaaattagccaggcatggtagcagatgcctgtagtcccagctactcgggaggctgaggcaggagaatctcttgaacctgggaggtggaggttgcagtgagcgaagatcgcaccactgtgctccagcctgggtgacagagtgagactgtctcaaaaaaaaaaaaaagaaaaaaggaatattttgtgatgtgaaaattatataacattcaaaatgtcagtgttcaccataaagtgttgtggaacacagccataatcatttttttagtgctgttgtccatggctgctttcacacttctatgacacagttgagtacagtagtacccccttatctttggggcatatgttccaagacccccgaagtggatgcttgaaactgcagatggaaccaaattcaatatatactatattttttcatatatgtacatacctatgatcaagcttaatttataaataggcacagtaagaggttaagcataacaaaataattataacaatatactgtaataaaagatatgtgagatagggcgtggtggctcatgcctgtaacctcagcactttgggaggctgaggtgggtggatcacctgaggtcaggagtttgagaccagcctggccaacatggtgaaacccatctctactaaaaatacaaaaattatctgggcagagtggcgagcacctgtaatctcagctacttgggaggctgaggcaggagaatcacttgaacccgggaggcgtgggttgcagtgagccgagatcgcaccgtggcactccagcctgggcggccagagtgaaactccgtttcaaaaaaataaattaataaattaaattaaaggtatgtgaatgcaatctctcgctgacaaaatatctttatgtactgtagatcttggcaaccttagcatacgattttgttttctttccttattatgttaaaaactttcccattttcacttaaaggaagcaagcactttacagcttctttttggcatatttgaatcgccagcattgctacccttgtactttggggccattattaagtaccataagggttaattgaacacaagcactgagataccaccaggacagtcactctgataactgcgaccgctcctaagtgactaaggtacagagagcgcagccagccaacagcatggggactcaggacaaagggaggattaccatcccagggcagggctgactcaagagcttatcacactactcagaagggctggcgacttaaaatttatgtattgcctatttctggaattttccaattaatattttggaacctcaggtaactgaaagcacagaaaggaataccctggataagggaagactactgtagttgaagcagagaattgcaatgcctaaaatatttgccatctagtctttcacagaacaagtttgccagctctagttttagaggagcaaaatgaaagatagcaaatttctcagctcaccagttcctaaagttgcgagtgcatccagatgattcagtgcagctcagtatgttccactctgggccgcaagggaaagcgaagctggagcttccttgtctccacctcccggagaaatttgtccagagaccggcagcactgcttccgcaggcgaacaacgccgcttgctcttcaaagtcctttctgaggccagatcagaaggtcccactccttttaagccccttatagcccaatcatttttccagtcacgtgtctgaagcagtttatcctgattggattttcagttgttgtccagcttgattgccaaaagttttcctccaattgctactcaaaggaaagaatgagggtggggcttcagggctgccttccaggttgattgagctggtgatgggcatcctccctcctctctctcttgttcagagtctaccactttctctgcagtgtgcctgggccctcagctattggggatgagaagggatgcggagtgggaggcagtccacatgtctgttccaacaaagctcagaggtgagcgagttgaaaagcagatgtctttccagtaggagccccaggggacagggtgggtctcaatctcacagcccttgaagaccgagctcccgtaggagtttccaggtgtccaaacagggtcctcactgtgagtcttcaacagctttctccaagcagcagcccactcccttcttaatccatttccaggggtcaaaggtctatcctggttccctcccatgccctctcacttccttccctctgtctctccctcctccctcctccttcactaccccctccctggaaccttctcagctgaatttcaggcccaccctttcactctctttacaggctttgcaacacagattagaaagcgggggagggggagcctcaagagtcccttgacaggtaagaaatatttatatttccacccccattccaacgcaatgcaatcaagtctcaaaattaaaacgaaaatcatttgcaaattaaaatgttctaaagtaccatctcctgataaaactttaaaaatacctttctgggccggatgtggtgactcacatctgtaatcccagcacttttgaaggccgaggcagcagatcacatgagcccagtagtttgagaccagcctggccaacatggtgaaaacctgtctcttattctttataaagtaaaatacaaaaatttcctgggcgtggccgtgcgtgcctgtaatcccaggtactcgggaggctgaggcagaataatcacttgaacccagtaggcagagcccaaggtggtataaaagtgtgtgacccatggtctttattcttgtctagggactggggaaaggctgcttgagggcattgcaagtagccaagagcatgaccctggaaaggaaggtgaaatgaggcccgctactgaggtacacctgtagtcccagctatcaaaggctgaggtgaaagatctttgagcccaggaaatccagacaaacctcagcaaaatatcaagacctctgtttctacaaaagaaaaaaaattttttttaattagccaggcattgtagcacgtgcctgtagtcccagctacccgggaggctgaggtgggaggattgcttgaaccagggagatcgaggttgcagtgaactatgattgcatcacatactttagcctggatggaagagagagaccttgtctcattcattcattcataaataaataagcaagcaaagtgaaatgaagtgcaagacttagacagtaaagttctaacaggggccgggcgtggtggctcacgcctgtaatcccagcgcttaggcagaggcaggcaggtggcttgagcccaggagtttgagactagcctgggcaacctggcaaaaccgtgtctccacaagaaaatacaaaaaattagcctgggtgacagagtgaaaccctgtctcaaaaaaataaaaaaagaaaaaagaaaggaagacagagaaagaaagaaggaaagaaagagaaaaaaaggaaggaaagaaaggaaaggaaatgtgtattctgcagaactgatattcactccttcctcttttccagaagcagaatcctgctaggaagattccaggaagcctaggcagtggtcaggggctggctcaggtataaagcaggcccttcccctgagacagaaggttgtggcaacaatgcttgtgggaggtgagaaaattgagaggagtgtctagaaatagc

SEQ ID NO: 1563116 - DNA, 4001 bp, Homo sapiens
gagactgacaatccagccaagggtttcactgaaacctcatgagtgaccttgagccagaaacagccagctaagccactcttggattccagaccttcaaaaactatgaggtaataaatttttttttaaactactaagttttgagacaatttgttacacggcaatagataactaatacaatgggtctcactgagctgtaatcacaaattgctgggcacacaattcactataatctcacctactggcatgcaatgacttcagatgacctcccctgtcctgctgcatgcagttacctcatgaaatacagtcgctgagaaagagggtaggataaaaggagtcagctttatataacttaacatccctgatgctctttttttttttttcaagagatgtggtaaaagaatgccactaccaccctctcctttctcaacaaagcaatttagagggttcccgaatgacctacatcaacaattggcctgaactaatcaaacacatcattcagattccctcagtaaaatattgaataccaaacagctatgtttcagcaaaggaaagggcaggggagcgaaactgaaggacgaaaatacaactttggtcctcatcagggagacttctcttttcttacctcaggtttattacaacgcaacttttaagaacttgagctattccaggcagaaggtcacatccttgaggtaaccagagagaagcattagttacttacatgtcacaagaatattttcgatcccactgcctgacattgccatttaggtgtttatcaatcatctcacacttaaccagataagtgaactgaactcctttcccccagatctgttcctccaatctaccctaccttagcaaaggaaaacgtcccacccgccaactgcccaaatcaaaagcctgcaaatcacccgaggtcctggctctcacgggagggactccattagggtcccaggggctgcattaagagtcccgacagcgacgcagtaaatgagacaagacgctgcggtaggggagagagacccatacattcaaatgccttaaggggtctgggcctacaggtctccagaactggggagggcctggggttacaaagcagttttcagatttttaaatacattgagcgccaaaagagaccccgcgggggcgatgggggaggggagcgcactgggagccaggaaaggccccttctccaggaggcccgggcccagcccgggggtgggggcgtctgcgtgagggagtggaggctgatgtaaaagtggcgcccgctgagattagggaagggggtgtgcgtgaggggatcgtgggacctgcttctgccctgcactcccccacagaaagcggctgtattgcaaaggccgctccggcagcgcacggccaagcgcggtgtcgcgacccgcagggctgcggctcgccatgaaatccctcaagtctcccctcagggaacgctgaagccgcgccacgcccccgtccttaccagtccggatcagctgctgttcgcgagctgccggccacgcaccagccccggaggcgctcccggggcacagccggcggcgactacgcctcctcaggcccccggcgccgccgacgcgcacgcctccacacgcgcgcgtccagtggagacctgcgattggctgccaggtgccggcgcgagatcggcgcggctccgagctaggagcatgcgcgcgctctgacgcccctggtggcgacggctggacgcggggttaaattgagaaggaggagggcagcagcaatacccctgaggccttgaaaggatcttgggttccggatcacggttccaggcagtcagggttccagagctgagggggtatccaagcagtcagggttccagagctgaggagcatccaggcagtcagggttccagagctgaggggcacccaggcagtcagggttccagagctgtcgcagccagggcttggggtggggggtaggcttccagtccatcaggggatggtttgcccaccagaaggccagctgttataattctcaggtgtggtccctttgttgactatccatgcttaagggattgtgaggaaacaactgaacctaacatctgtcctcttctagttacatctggggccagttgaatccagcctgccacctgtttttgtacagctggcagcaagctaagaaccgatttcacgtttttttaatggctaaaaagagaatattttgtggcatgtgaaaattatatgaaattcaaaattcagtgtccataaataaagttttattggaacaacaaacatgcccattcctttcggtattatttatgcctgttttcctgcttcaacagcaaagttgattaattgccagagaccatgtatgaaaagcttaaaatatttactgtctggccctttacagaaagtttgcccactcagtttacttgcagctttgattttttttttgaattgaccaattctgccaaaagtctattttagcaatctttttggggggcgggtaaatcgcttttggtttaattaatctataatgttattttcttatctattttatctatttcttccattctgttattttcttccttcgtgacttcataggcttgttctgttacttctcattacaacttttggagaaaaatgcctacctcgtttgcttgtaaacttttttgtttctcttgtatttaatgctataaatttacctttaagtaccagtttaactgtgtctcaccagtccgcttggtaatatgttcattatccttcaattagatatgtcctaattttgctagttgttagaaatgcttgttccctggtgccgcaaagaaatagcacttgaacataaatttaattttctcagcaaggccattttcactttctgcagaaagggtacactcgccagcagttttgccacgagagtaccccaaacaaaggatacagggttatttataacctgacgcatccaccctactgctgtgtccggtttccattggctggaacaggacctcacattctgtgtttgtcccgattggctaacaacttagaactttctaaaagaggcaaaggcagaggagaacaaaggaaggaggatgtaacttgtagaatgctgagaaaggtaaaaacacctccaaataggaagaggaacaggctatgacctaatgcttgcttggaccagtataagcatgcaagggcaaatatttaggctaaattgtgggagctaagaacacaaagtatattaatttctttattacggctagcagatatctaagaatgttagcacaggtctttgaataaattttacttctaagagaagttactatttattcgtaattagacagggaggaaagtctttgaagaggaacctctattttttacatagtgattctttctaacacaagggttatatagtatatgttatttatttttgaaatctatgagatttttaaaagattttttaattgtattataatcaaatcacatggcctaaatattactcacccttgcatttgaagatttctgttcagtgaagtgtaccatagtcaaaatgaagagatcatagatgtaaagaagatatttgcagtatctaaaatgtatatatgaggctgatatgtaaagatatttgcattatctaaaatgtatatatgaggctgatatgtaaagaagatatttgcaatatctaaaatgtacgtaagaggcctggcacggtggctcacacctgtaatcccagcatttttggagaccaaggcaggcagatcacttgaggtcaggagttcaagaccagcctggccaacatggtgaaaccccatttttgtacaaaaaatacaaaaattagctgggtgtggtggcacgcgcctgtagtcctagctactcgggaggctgaggcatgagaactgtttgaacctgggaggcagaggttgcagtgagctgagattgcaccactgtactccagccttgggcaacagagcgagactccgtctcaaaaaataataacatgaaaaataaatctatgagaaatgatcttcttttggcttcata

SEQ ID NO: 1563117 - DNA, 4001 bp, Homo sapiens
tggctcacgcctctaatcccagcactttgggaggccgaggtgggtggatcatgaggtcaggagttcaagaccagcctggccaagatggtgaaaccccgtctctactaaaattacaaaaattacagcgcgtctgtaatcccagctactccgggaggctgaggcaggagaatcgcttgaacctggggggcggaggttgcagtgagccgagatcgcgccactgcactctagcctgggtaacagagcgagactccatctcaaaaaaaaaaaaaaaaaaaaaaaaaaaaaaaaagccggccgtggtggcaggtgcctgtagtcccagctacttgggaggctgaggcaggagaatggcgtgaacccaggaggcggagcttgcagtgagccgagatcgcgccactgcactccaggctgggcgacaggacgagactccgtctcaaaaaaaaaaaaaaaaaaaaaaaaaaagtagctgggaatacaggctctacaggcacgtgccacacctggctaatttttgtattttttgtagagatgggttttcgccatgttgtgcagactggtctcgaatttctgagctcatgcgatccacccattttggcctccgaaagtgctggtattataggcgtgagccccctcgcccagccctaaagtattttcaaaaattctttgatcacttcaactcctctcaccctccccctcctcttcagcaacccataatctccaactcttccagctctctcactcaatttgtgcttttcgacctcatgaaatccaagccatttttactgtagttctccttttctagctccaccccttctccatccagcttagactctccatactatgcgcatcacttcaactctcacgctctagcaccatgctcctcacctcctcgtccggctgcaactagccgctaagtcccagtcttctcggccagttcctcctaagttgttaaatgttgccaagaaaaatcatacaactatgtatggcaccacgacaaatttcgagtttccgatttcagctgggacctcagctctggcattctatgacctccttattgccaatccctctcttctcggtcttcaccttcccaccccatctggcactgctctccaatacctccttctcaaaacccttcatttcagaggttgcaaattggcagcctgaagatcctgctatgttatgtttggctctcgaagagtttggcttttcctgttcattttccttagttaccaatatttaaaactcagtaggtttctggctttctcttgaaaaacgaagatgtgacaatatcccttcacccgcccacattgcctacctaggtgcatgaaagctttgagctaccccccaaccccatccccaccctcgctttcttcccaattttcatggcttccaagttctctttcttgatatctttagattgcaactcttcctccgcccacccattaagtcctggtgttctcaaacttccctccgtagaggttttccattcccactatatagcccctacaccctgaagtctccactcagaaaaaagttggcaaccctttatctgtctcccacaacatgataagtgtttttggaccgaaaatgcaaagatctggaactccatgcttcccacctctgtcggggccttctccgggtcctcctgcatctgtcatcccatcctccagagagtccctagggcctgggcaccctgcaaactcttagtgcagtcaaggtttcctggctgggggcccaagagttgccacggacccgcacacgctgcccaggcggcgacgtggcgcccctacaggcttccccgcgattggggacacgcacacccagggccaccggagggacaggtggtcaggcggactcaggtcacaccggcggacgcggggccactcacctgggccggggcggggcagctcacctgggccggggcggggccgcaggcgggcggggcggggccgcacctgagctgctccaacccgcggccgacgcggccgacgctgcctggctccacagcagctgctgacgcggagcccgcggccgcccgagcacccagagccccgcccccggcccgcgggcacttccgggaccactctaggccgcgcggaggtcccggcgtctcggtggtcccaccgcgccggttgtcgccgcgcgaagccgcccgggccccgggacacaaggacccgaatcaggagagtctctccagtcggcatggtggctctggccgtccccgaagcgcgtgctggacgtgggggaaacagagatgggcaggcgttggcaggagagcagaggaggaaacaggtccggacgggcgggccgacctcgagccgccggcactcggggcatctgcgctggtgctgggtgcaagccagaagccactgaggcagctggggtcttcagggaaaggagagtggagccccagagctgtcgaccctgtcactgtccacaggcaccggggtcctgttaggatccccctcccccaacctgcttcaagggtagccctgttcctgtctgccctccccgcccccacagaaatagagatgagaaggggcaggcgaagaactaggagtgtctgcgagaccatcccaggaccctgagccccccaactctctgcatcccagggctgacttcgacatgaagcgcctcctctcaggcgcaccgggagggaagaggaatgtgttcttgaaatggccgcccccttggccgggcgcggtggctcacgcctttaatcccagcattttgggaggcggaggcgggtggatcacgaggtcaggagttcgagactcagccagaccaacatggtgaaaccctgtttctactaaaaattatccgggagtggtgacaagcgcctgtaatcccagctactgagacaggagaatcgtttgaccctgagaggcggaggttgcagtgagccaagatagtgccattgcactccagcctgggcgacagagcgagactccatctcaaaaaacaaaaaaaaaaaaaagaaaaggaatctccgccccctccttgctgctgatggcaagactggcccctccacccagtgttctgcccatgacacccccccctcaggtgcagctgcccagcttgtgggagagcttccctccgcagaccttggcccaatcacaggacatcaggagaacacactgtccctgggaaaaaggattctgccccagccgcccacctgccttcagcaccctcagccttggcgctcgagtgcctccaatgctacccacacacacctgccttcctgccccattaatgctctgtcgggccttgggcacagactccaaggggtaggcagtggctgcccctccccaagccaacagcctgagctccatggggaccagccaccctagagccataacccttggaccataaccagccatgcagagttgggggcggcaagggctggttcctttttctccctccggctcctcaggtcacaggaaggtcaggctaccagtttgagcccccagggggccatggtgggggagtctgggccatgccccaatagtctcaggtgcttcctctttgacaacagtccccagaatccccattcccccgcacactgctccccaccccaggagtgggtcttcgactcccagacccaccacagtcatttttctcagccaggatcttatgaccctcacaatagctgttgttgacatgttgaatattattaacccattttacagaggggaagcaaggctcagagaaagtttaaaagggacccaaggtcaggggcagaaatgggaggcagaggggaggcacccatctcacaccccacccctagggactaaagccgtagccaacagagcagtagtaatccgcgtcgtcttcaggctgcacgggactaatggtgaggacacaggcattgtgggcctcatccttggctgccgagaatcgatcggggatgtcagcaggccggtggtgatcctcctccgagcggtagtagaggagatatcgaggggcactgcctgcccgctgctggtaccaggacacaccgt

SEQ ID NO: 1563118 - DNA, 4001 bp, Homo sapiens
tttgtcaactgcacccttctaaatacaaccatggggtgaggtggttgcggtagaaaaacaaaatgaggaacagagttcacagtctgtaaaaggagggatctgggtcccatttggctgcagaagttcccagggccaattccttgctgagcccccagattctctaaatctccaggactctccatgaaggccccatgccaggggctgggtacagaggaaagcacacagggatgtgtcccctaccgccactcttaaccaagtgctgcaatccagcccttcctgagctgctccacgtgcccctgtctgattccagtcccagtaaaccaaccgtgcaaacatcctgcaccaacccctggccagcacgtggataggcaaagcgaccccatgtgagccgtcaactactttctcagattccactaaaaccactcctcagagctcccagcacagcgctgggcagagagatccccagcaactgacccactgaattggactgggcgagacattcaatagagcacatctcgagggcacacctcgggcaacatctggactcttcacttggagctgttcccactgcccagagcttcctgaggactggccagcaggtacccgggtgaaggtctgtggaaggctgacgatccagggctggggagggaatgtgccaaccctcttcataaagaaggaagaacacacagccactcaccttggacctggcttcgggaagaccccaacccgatatatcctcgagattctctttcagggaaagagcaggatcctgagaggaaagagctggcgaaggagaaatgagtcaaggtcacggctaccaggctcacggctgagcttaaagcccacctgtcgtggcacaagtgagaatcagagaggaggcagaacctgccagcaaggccaggtggggaacgagccccagtagctagcaccaacagaaacagcatcgaggaataatctgcctgtgtctcagacactccaattcatgacgaaaagagctgctacccccaatcaagcacgtctgagtgggaacaaatgattgggcgcggggaagaaagaagcaggaggccaggagcgatggctcacgcctgtaatcccagcactttgggaggccgaggcgggcggatcgcttgagcttaagaccagcctgggaaacatggcaaaaccccgtctctactaaaaatacaaacattagccgggcgtggtggcgcgcgcctgcaatcccaactacttgggaggttgaggcgggagaatagtttgaacccgggaagcagaggttgcagtgagcggagatcaagccattgcaccactcccgcctgggtgacagagtgagattccatttaaaaaaaaaaaaaaagatgctggatgcttctgggaaactggcctgatctctctgagtgtcaatatcctcaagtgcaaatccacagacatactgactacaagagtgaagctgtacctgtcttctcgggctccggggcagggatctccatggcctccacggcagcctccccaggaggagtgggcagctgtgtagcctccaggatccagggcaggccctgaagagcgagtactgctcctggggctgaggggcctgcagcggagccccgcggggcggccacgcgctcacagctgcacgatcacacgcacggagccccctccccgcgcccggctgaggtggggttcaggccggctccgcagatacccactccccacaccaggctcagccccatgctcggcgcactcacgccccggcacacccccgccacacgctcctcccggcgaacccgcgctcggagaccagggccaggcctaaggttccgcggccaggagccatcggacgcggagcgaccagcggacaggtcccgaagcggacagagaccgccgacggtctgagggaccggcaagtggacagaccggactcccacaaaaggactgcgactgccacaaagagcagcaggcggccgctgcgggaaagcgcgcctgcgcgaaataggcgcaaactacacctcccgggagcgtttgcgccgcgcaggcgtcagactccatttcctagagcgagttcgggccggtgcttgcgtcccgacgcgaacgagtatctagcacatccttctaggaaatgtagttcctgggcccacagccgggagctccggcacccaccatgctcttgcgggcggatgtcgctgtgtatctccgtgtgcggatcagtgtagtgccgctgcatgggtgtctaattgcgaggatactgggagggcggtgtccaggaactagaatttgtcctgttagttcgtccacgtccccacgtagctgggagtcgggtgggttcctgcccacatctgtctgcaggaaagactcaagcccctggtcttacggatattgggagtggtgggtctggcctcgaggggttttccaggggccctgcccccactcccccttctcgagccacatatctgaggcccatgggcgcgggtccccagaggtgggagagccttggcctagtccccccagagggtcctgtccacagttcacccctggggcgggaaaggaaggtctgggtggcggcccagtcctggcggcacagagctctgccatgaacacagtgatgacgccagcgacagaaacattgaatatgtactgagcaccaaccaaacgccaggcctacttcaagagcttggagtacatttttctggcagaatgctcacagcagtccagggaggtttgctaactactgtcatcccatttgggagatgaggaagttgtggtacaggtgcgtggggtaacgtgtcgcaaatcacacagccagaagtaggaatccagcaccgaagtgcattgccacattcctactgagaggtggtccggggtggtgcacactccaaacccttcagcctcccaccttaaccgcagcttaggcttggccacaggctctcacgtgacacctgtccactgcccacatcagcacagctgtgcccagacctcccctgcccagggcagcgcccgtgtttgattttgttttgagactgggtctcactctgtcgcccaggctggagtgcagttgcacaatcacggctcaccgtagcctcagtctctcgggctcaaactattctcccacctcagcctccggagtagctgggacttacagacatgcaccaccacgcccggttaatttttatattcagcgcccatttttaatagcaacccagtgagaggggacagcgtgctggcagtcctcacagcccttgctcgctctcggcgcctagtcggccttggcgcccactctggccgcgcttgaggagcccttcagcccaccgctgcactgtgggagccccttcctgggctggctgcggccggagccggctccctcagcttgccgagaggtgtggagggagaggcgcgggcgggaaccgggactgcgcgcagcgcttgcgggccagcacgagttccgggtgggcgtgggctcagcgggccccgcactcggagctgccagccggacccgggcagtgaggggcttagcacctgggccagcagctgctgtgctcgacttctcgccgggccttcgttgcctccccgcggggcagggctcgggacctgcagcccgccatgcctgagcctacccaccgccgtgggctcctgcgcggcccaagcctccccgacaagcgccgccccctgctccacggcgcccagtcccatcgaccacccaagggctgaggagtgcgggcgcacggcgcgggactggaaggcagctccacctgcggccccggtgcgggatccactgggtgaagccagctgggcttctgagtctggtggggacttggagaacctttatgtctagctaagggattgtaaatacaccagtgggcactctgtgtctagcttaaggtttgtaaacacaccaatcagcaccctgtgtctagctcagggtttgtgaatgcatcaatcgacactgtatctagctactctgctggggacttggagaacctttatgtctagctaaggggttgaaaatacac

SEQ ID NO: 1563119 - DNA, 4001 bp, Homo sapiens
agattatctccaaagcataacactcctcataatggatagctcgctcaccagacaaactactgttgagaaagagtgacacgttaaaacattgcagataaaaactgcaaacttcaaaagtctccttcaaaaagtcaagtgccacgctagagcgtcttttttttttttttttttttttttagaaggctgtaaatcaaacatttctaaaaccatcaggacacaatgaaagcctcaaagaaagacaagaagttgccaaggagcaagacttaaatgtttaggaatcttcagcaaagcatcatctctaaaacttataaagatcataattacaactttttttaagtccaaaagcattaacatagatagtcaaagggctcaatgaaggagtttcctcttctatttaccctacagaagttttcggatggggataagagcccggtaaggcaatgctgctgattaatcgcatgggcctgggtacctcctccagctttgtaagggcacacctctacggagtcaagctgcacagctctccctgtcctatgaaggcagggctttgagtctgcacccaaggaaggaaaaggacaccacggaacaggctgtctacgctgcgggctgctatgcaatcattccatggagtccccttcttttcattcataactcacccaagagtaaagcacagaaggcccacaaagcttaggccctgcagacatccgatcaccccaaagattcaaagacaagccaacctttacgaatcgcccccatccgaggcgcgcatattaactgccattattagtgcgctggctgtctagtaacaagttgataaaatcacggccaaggaagcgggaagacatccacccagctaaccatccgcagaagcttcagttgagagtccctcctccaaagagtaggcacggcttaaaggtctccctagccagtttcctttggaatgtagatctctttcatttggtccaaggtggaggtcctgtcagtgagatacgccatctccccatttgcaggtccttcgcatcagtctttggccgagggacgggcaggcggtatccctcccaccctctgtaatgtgaagcatgcagcgagggctgccttccatcgccactccagggaacccccgatccccactcctcgaccagctccgcctcctcccctgcctgctgctgcttgtccagagccccgcagaagggtcaccggcgcccaggtgaggcggacggcaggttccggggaagaacccgacgttgtgcagcccttcagacaaacctggccgcacccaaaaagaacatgcatggatggaaaagcaaagcctgcaacctgaaacgagccaccccatccctcatcacttgtcttttcaaagttggcattcaacaggtagttcccgggacttccacctgaggcagacctaaatacccaaccggccaagggggctgccccagcatgggtgccgggcccaggatgcccctcccgccccggggttcacaggagctctagcccccacgtgcgctcgccccccgcggatgcgccccggaggccgcgtcccgcccgcctgcccgcccgcaggggagggatgccgccggcctctcggccacccctcccgcccgcccgccagtcaggcagcccgcggcggggtcggcgggcgcagcccccggagccatcttgtggcggaggcggcgcggggcccgggcggcgggcagctacctgcacgatctcgccctcggcgctgagcgtggccccggcccgcgagaagcggcccgtgaggccggtggtgtaggtggtgtaatcgccgcttgggctcgactcgaacagcaccacctccacgaacgccgtctccttggcccgcgccgcgccgggccccgcggccgccagcagcagcccgagcagcagcggcagcggcggcggcggcggcaggcggctgcaccggaggccgcgggggcggcggcgcaggcggcggcggcggcggcccgtggcccctgggcgcccgcccgagcgcggcctcatggtcctgcggcgggagggcgcggagggcgggcgcggccgggcatagtcgcgggccggctgaggaccgaacgcgggcggacgcctcacagccccatcacggcggcggcggcggcggctttgtgggtcgcaggctcagctcggctcccccggccgtcgcgccgcggccctttcatctgctccacgtgaggggttatccccgccccggcagcgtcgtgacccgctctcccctccctccccgccctcggcctccgcagccgccgccgtggggagtgagaaggcggggcaggcgcgcctgcggcgagaggcgggtcccaaaggccgagaacgcccctcccctccccgcccctgtttctatctgtgctccgcccctttatcctcgctcctccccatcatcccagctccgccccccgcccgcggtctgcgctccgccccgtcgtcctcgctccgcccccgcccgccgtcttgctccaccccattattctcgctccgccccccgcccgtcgtttctactccgccccttcgtcctcgctccgccccttcgtccgcgctccgcccccgctgcgctccgccccctacggcagacatttctcctcgcggttgctagagttcggcgggaaccgggaccgcaacctgctccgggcgatgggcgtcctctctggaggcgccacgcgtcctggtccggtgcaggagttagggccatttggtctggaaaggcctcgtccttcctgcttcccccgccccaattcacagttcccaggaagcttgatcgcccgctctgggcgctccattcccacccccacctccaggatcgaacggggaaggccgggatggtcaggggcagtttgcagcttgggtcgtgtccagttcttgcacaggtgtcgcctagacagtttctctgtatgaagtctgcactgaaggagtggggaagaccttgaggatcttctgatggagttcatctttctgcagccccggagactgtaattcagacaccgcccccaaaagaagtctggaaactttgagtctcgccacgtgcaggccagaggagtccaacaccattatcaccctctatgcacagactgctggctgccaaactaacatatctaaggcacgtgctcaagggctcagaggttcccagtcacccagaaaataaacttttaattccctgcccctttttggaacatgccttttccttcctcatctagtcctctgagaattgaacccctccttcaaaagccagatccaattcccacttcctccgtggagtcttccttccctggccagaatagctttgttcagatatttgcaaatatttggttaggatgaatctgcttctacttgctaccacacccaaaatgttaaaaagacaaaaagaaagaaagaaaactcattaagaattttcttgagtaaacaacttaccaaggttacattttaaagctgaaaaaaaaaatttaacgtgcaacagaaaacacacttgaaaaaaatccacagatctctattaccacatttggaccacccagagcttccgctcaggagggaggcacctgggaaagcaggactctggagggagtggctttttagtttctccaaaaccgggcctaaccagtgctgcctgcaactgggcaccattggtcctgacaatgacccctacaaggtcttatttttttcatttagatatagcgtctccctctgtcgcacaggctggcgtgcggtggtgtgatcacagctcactgtgcccaagtatcgaacttctgtgcccaagtatcctcccagcttagcctcctgagtagctgggactacaggtgccacacccagcctccatccagttcttaattaagggggagggcaaatctctatagctcatggatgacactttgcgatatttaaaattcaaaggcacacaccaccaactgataaatggataaccaaatgtggtctatccctgcaatgagatattatccatcaagaaatgaaatactggctgggcgcagtggctcacgcct

SEQ ID NO: 1563120 - DNA, 4001 bp, Homo sapiens
ggaataaatgagatcattaatgttgggtgcttaacccaatacctggcaaaagccaacaataaatgttagctctatggtattattttagatctgtctaagggacactccttgtctaagggagataggaagtagtgtaataagatgtaagaaatccatatgaaggcattttccaggaaagaagggactgcaaactccagttcagaaataacttgtgtggtcccctctgtggggagaaacaggttggcattcttctctagaaaataacagctgcctctcctcccatcttgccccaacccctccttggctgcaaatactcaaggattaagaagacattcaagctttgttccgtctcatttctgctctggcattcttctctttggcctctttatcctaaatgccatttctgctcaactgcaggctttacagtagagaagtgtcttgcactttctcaaggtgcccccaatccggtatttccaccagcccaactttattgatgggaaacccaaggttaagagaagtcagcaccactgacttcatgcccagcgttcttttaggctgctgtgctttgacctgaatcagagatgggatcagtggcagctttcctaccccagtagggagcaagaacagggctggccactttaggacgaagtggaaacattgtagcttcgcacataccccaggataccaccctgactcagacccgccctagggaaaagtgccttcaaagggattccagccaccaggcaagcttggtggctgtattctaactatctctcttgaaaagaaatactccttttgaggagactttacacacacacacacacacacacacacacacacacacacacacacgcacacatgcagatacacatacacacacgtgtgcatacacacacacgcacgcacccacacatgcacatgccagctgcaactaggctccaagctgtaactatgtgaggagaaccactcagctctataggttacgaggaaggctgtggggctcagtcacccagcaaactccctggaagagaaatgcattcaagccccactccaggttttattcttcaccaggttttacccttcaccgcttctcctaacacttcaaaggaagtatttttgtacagcccagggaggagtgtaaactggccagctgcttccaaagcagagaagttaaccctaaaagggccgctgggctggcagggcagggggaaggcaaacaaggtcgtggggagttgggcatttgagtccccacacttcgccaggcctgcctttcagcccacaccaagggcacagctcttaaaccactacagaaaggcaggacttcagttcctctaagcacgcaaacagctagttataaataccctcccaggctagaggttcaaaggatccagcagttagcacttcaatggaaactccagctaacagaacaggcctcttgagcactgctcactgttcagtccaggcaaagaaatgaagaacccaaaagctaccaccacaaaacctgtccccaaaagcccaacttggcttggtggccaggggacagcacgccctctgcagtgttctaacgactgagcctgttctaaatggtaccctgtggagggggcctcccctcactgtgtactctgaatggcaagccaggagatcctttccaaggggcagctgagggaagataaagaccctatgtccttttggcctttttaaaagctttttttctttttaaagagagggagtctcactattgcccaggctggattcaaactcctgggctcaaaggatcctcccgcatcagccttacaagtagctgggactataggcacccagctataagagcttttatatactcttcaaattcttcagcctacagagagtatatcttacccaaatttagatttaacattcttcagttaccttgttgaaatgaggggatccttcctagtaagattaagtggacaccacacaggacactccccagctcaccagtgatgcagcaaacttctgtgcacagatggctgacaacacagcctcctgaggagttggcagttagatcagaatgggcttctctcaagagcacacatacctagtgtcgtgtgtgtgtgtgtgtgtgtgtgtgtgtgtgtgtgttttatccccaaccactccatcgcaaaggacatggactctactggaaccccaagacatcctggcagtccttagtttcctgtgggagtgccaggtgaggacctgggagcattcaggtggggctgagctcctgccacctggccgacgcttctaggcaatcacacagtggcaggcagatgagcgttcaccccatccactggcaagggcatcctataatttactgacactgaaaagtatgctataaatagttggtatttttaatgttgtcgggcctccagaatagagggggcctaacagctgtgtggggccagggttccaggcatctaaaggctacaatttggaaatcctgggcggtatagtcaaagcatcttcaaagaaaggaactccaagagcgtcacactccatctaaagagactacggtaaggagaaaaagcctgtcaaaactatcagtcaggacttacaaaccacaatttagcagaagagtgaacagcactgagggtctctttgtggggagctccacaattcaaaagcaaaagggacagcggccagaataatccctaaaccccaagctgccaattctaccaaagacacaacaggatgctcctgattaaataagcacaagatgattaagaggatgcctttagtcactcaacaatttttttttaaccttcactctgctaagtgctgaaaatgcaaagaacaaaacatatgagcttttttgacacaatttttggtgcacaagggcaataaaaagtaaacaatttccaaaagtgaagagaataactaataattttaaatctaactacactacaggttggcatgacattatgaacctaaaatgagttatactccagtaactgagttatttctaccctctccagacagcaattacatttaaaaaataaaaatctcagccaggcatggtggctcatgcctataatcccagcactttgggaggctgagtctgatcccttgagtctaagagttcaagaccaacctgggcaacctagtgagacctcgcctctacaaaaaaataaacaaaattagccgggcacagtggcacctgcctgtagtcccagctactcgggaggctaaggtggaagaattgcttgagcccaggagggggaggctgcagtgagctgtgatggcaccattgtactctggcctgggcaacagagcaagaccccatctcaaaaaaattaaatgtaatttaaatttaaaaaataaaaatctctacattcatttattcttttgaaataaccctcccaactaggtttcctaaaactaaaaaagtatgaaggaagggaggaagggtggtgaacaaacttagaccttgagcacttactaactctaacgtaaatgcttaagtcaaaagaagacataaagttagcactggatgcatggggtgggatatgggggcggtgcccgtgtgtgtgtcagtggtcagacctactcaggcaaaattaaagacaaatatcttaaagctgttactgaaactgtacagtctgatttttagccttttaatctttttcggaaatcatcaaaattgtttgcttgggcagacattagaatgaattctatctataatatcacgggtagtccaaagtattccactttgtccttccaaaactaaggcaagtccagaagattccaagatggtgagggacttcaaaaccatctcatataaagaacggaaagaactgggggttctcagcaaggaaaagacaagtgacaagaaaatcaccttcagaaatctggagggtcatcatgtcttaatggctctgtgttatgggcagagttctgtctctcaaaaattgatatgttaaggtcctaacccccagtacctcaaaatgtgactacctagagagagggtctataaagag

SEQ ID NO: 1563121 - DNA, 4001 bp, Homo sapiens
ttccagcttaagaaattttatcttaagatatctaattttatctaagataacatttacaaattttatcttaacttcatctgccttattggagaactacagaacaaaaaccattcccaagagatcatgtgttagaaactttcaaccataaaatactttaaaaaccttaatgaaatcatctagattcgcttcgttagcctaatctgctatttcctatcttgaatgactcactacagtctaaactacgtgcagttctagaaaaggtccatgttctctctgacttgtgggcctttgcacatgcgattccttctttaactggctaacttctaatttttcagctcttgccttagatatcagttacttaaggcaatcttcactaccttacaattagacttaatacccctcacatatactgtcccataccttgtacctttcccattattacacagctccactatattttaattgccgattaatttacatatttcccactagattttaagctctttaaagacaggacttatattttgtttgctcctgtagaggtgttcaataattactgaatgaattataaatgtcattccatcagccttccacatgcttagtgtcattccctattctccctgttcagaacattctccccagttctatcaccagcatgaaatactctttataacctggtccttaattatcactatttcctctggatgcctatagcctttattgtacatactattcatttgctaattaacccaccactgtgtttttcagttatttttgtaatgcatagatccaatctccttaactaaactgtacaatccttgaaggcataactgtatgtctctcttagtaccctatcatctagcacagggctatgtacaaggtagacgttaaatatttgtagatgaagaatcaaaatttaagaggttgtttctcatacaaaactgacaatattttaaagtgatagtgataaatacgtggtggcaattaaacctcttgtcaatacacagaaaataaaaagatatactttagtacagttaagtacaaataattttttaaaaaaccgttcctgagtgagaggtaataatggactcaaattttaggaggcactacaaccatagctacattcataagttaaggataagtagcctatggcttccaaaatgacctgtgcacagagaacatcactgtatttttcagatctaggacagtcatatttatacaagaatttagggcggtctatgttttggaaagatagttacggttttggcctatcaagaagcacgcctgtcagcaagggagttaactggcgccacctgtttatagatagcttgctgtcattacagtgctctccgaattgctaattccaactgagtaaaatctgaaccacagataaactgtcccaaattccattactaattggggaaaataatccagtcttcctcgtctttagaaaggcaagcaggctgggaatggtgtctaccccaactcttaatatgagagaaaaactatgactccgagagcctccagcgctccaggtgtcctctgcccagaacctcctgccccgtttccctttgctgaactcaaaggttttcttcttcgccctttcctcaaattactgacgttaatttccttcacttactgctgctcccagttagccatgactttcttcttggtgctctctctgccccgaggtcaggagggcaaccttttccctacaggtccccttgcccttcaccctattcttccatgtcagtggcatctcacctggtaggctcgagcggttcccaaggcgccgagttgatgtggcctccactgcggacctgagccgctaacagagactaaaggccggatcagaatcgcggagtgccggcgcttttcgaaagcagccgccgcggccgcccagcgccaagaatgcatcgcgagcagcgccatcttgagcgaggaaagaggaaccgagagaagaggattatgggacactggcggactgaattcggctaccttaattgtctctcctcttcttgttttcccagggccccagaccggaaatggattctgtttgaagattcggatgcattcgcacagcctcttttatttgtttttccttagggccgagctttgattgttttccttacacaaccgggaatattggagtaacactgtatttttctcttttcctggagttgccagatgaaatacaggatgcctacctagttaagtttcaattttacataaacaacgaatcatctcttcgtgcgtgtgtcccaaatattgtatctgctaaatctgtcaaccccatcttgtctctcataatactctcttacctcctccaactcaatgtcacgctcccctctctccattttccctatgcatattcttatcttcactcccttctgaattaaggaaagattaaactacagacgttaatttcccctgggaggaggcttcagctgtaagatttactgcttttctgtcctgtaaggactttaactttgctgattgttctctgttgcgcaaaccttggggcagttttcctttggtctgttgctcgtgggacagtctcacacacacacacacacacacacacacagagagactacagacatctttactaattttgtcactctttctagctcttcgctttggtttttgcagcgtccctaattcttgaaaaatcgcttaggttggctgaagggtggtaaagtgaaatgtatggagagaagaccatgtttaaagacaggcttatattcttttgtcaccactattatcaaacaaaatgtcaaaatatgtttacagttatctaggaaactgcatttccagttgtaaatgttacctgaaaccccggagacaataatgcagttgcaattttatattcactgctgcattctccaacttttcacacaaaagagacaaataattatggacttcttatgaagaggtactttggactagtaagtctgataaagaaaaacagaaatctgtagcccatgcagttagcttttttgttctgggattcattcaaggggatgcttgagctagttatttaaagaaaaatagaattcaagttgaagaggttgactggaattacacgtaaagaagatgacatgttaaaagcaagaaggcataagaaaatattttcaggttcaggagtctatggagtttgggaaagtagtaggaggttaacctgagtgaacagagacctgatggtaaagggccttctatttcattctaagaagttaatactttatcctataaccagtgaagagttttaatcaggagagtaacatgatcagatttatatgtccattaagctactctggcttaagtgagaaggttggattggacggagttcatattgaagtcatgaagttaatgcaatagttcagtcataaaataaaggcctcaacctagcagtagcagtggcagtagatcgattgcagggcaattaggagatggaattggcaagacttagtgactaattggatgtttctagcttattattgtattgttgacagtagatcagtaatggcttcatattaatgactatattgtcatcaacaaatatttattcagcatctattctgtgttagacagctacagtatacattagagaaactctagactctactaatgatttctcttagggctgaatattgccactgaatcttaccacccagttgtaaagtctttgaatggagccaaattatttttttccaaaagtagtgctcattgtaagccaactgttttgatcaaaaagtgtgaataacattgaaatacccaagttgttactctatgatgagctaaagtgaggcaaatatttatttgccaaataagccgaagaaaatttccagggcacccagaaatagaacgtgaggcataataagagttgcacactgctggggaagagcagcaacaaaaaggccaactcagcctgtaataacttgacacataactgtctgacataaattaaagagacagaggtatacacaataaaagctgctata

SEQ ID NO: 1563122 - DNA, 4001 bp, Homo sapiens
agacagggttggaaggacagccacgccaggagcaggaagtgtgtcccgccgcagtggcggcctgggcccggcatctctggtctgggggcccgggaaggcagctgagccagttggtagccaggcaggcctgtgggctcaggcgggggtggccttgaccccaagtcccactgctgtgctgggcgctgctcattaacctccgcttgggctgagtcatgcccataatgccggcctgcctggccagccagctctgctggacgccggccttcaaagggcccaagggcccaggaggggctaggcagcaggctgcgtccctcggtccccgctcatgaatggcaggcgtctcctcctggctggctgcaggagtggggcgggcaggagctctcgaggctcaaaccgctaggatcgcagctctaaggccaggacaacctccttgaggaggagaggaagcagaagtggcctcgagcgtgcaggcaaccagcacaggacagtccccacccagccttcctgcctctccactgccgcgcctgagtccacggctgcccaaaggccctgcccaccccagcccggctctcccatggcctgcccacacctttggcatcagccccggcccgccccagactgtccccaccgctcacggctgcctgcccccgggcctccctgccacacgcttccctccgtgcccggcaccccaacctgccccacctcatggcccccatagaaggcgatctcctccgagttggccaccacacgcgagtgcatgtagcgcagctcccccttccgccgcgcctcctctgccaccagctccccgaacttgggcgagaaggcccgcagcacgttggccgtgaggaacaccacgaggccggcgatggccgagggccaggctgtgccggctccacgggagcgggccgcccgaagcagggtgtaggaagtcacagccacgtccaggagtggcttggtcaggttggagtagaggtgggccacagaggccgcaaaggccaccacgtcctccgtcagagactggtcagggttgcgaagccgcccgtccatgttgctgacccggtagtaggtctgctgggagaagtagaggcggtaggcgtgggccaccagacggctgcggaacgacagggccagttggccctccaggtaacggatggcactgttgacgaaggtagcagggagggcgatgaggagccactgcagcagctgccagccaaaagcccgcgggtccttgcggacgatgcagcgggccagccttccgtccaggcgggccacatacaccgacaggaaggtgcggctcaccaaggcggccgagtgcagggccagcagccccgtctcccggcacaggacccgggggaacagcagccgcaggagccacaggagccgctgcaggaatacccggttcatgccagctttggccgccgcgaccccggaggcctcctgcgtgggctccccggcgggcgcctgaagacccctggccggggccaggcactggcgcaccaaggggtagactttgtgggctccataggccgcgagggccaggagcacggccgtgcgcttcagcgtgttcccccgccagggccggggcctggagagcaccggcatgtcacctgggctggctgccgcgtagggactggggctggtgcctggggcagcagttgaggcaggtggctggaaggattgttgctctgaccctgggcctgttgtctaggcaactggaaaccttgcgatggcccctgagactgtcgctttaggcccccggggtggtgctggggcccctggtgcggtgggctcagggccctccagggtcgcggcctcttcgggcagcccaagtggaggaacttggctctcctgtcctgtcagtgccctggcccctgaggtcagggccttgagaggtctcgggcagagggggcgtctcttcctctccaccttctcctcctcctcctcccccggtggcgcccctccccggggcaccaggcgcgtccgtccgctccgcagcctggctgaagcgacagtgactcctccaccggcccagaatccccacccactcttccccaggggcgagtcgggggaaggggaggaggcggaggaggggcgaggggcggagtccgggcgcgggagccccaccctgttctcgcccctcggcggggcccgcccacacccccacctcccgttctcgcccctcggcggggcccctcccgcaccacagagacgtgggacggccgcgcggactagagaagcggccctcgccggcccgacaaagccccgccccgccccgcccgcgtgctcgctccaccccgccctgctcgcccggagcccgaggcgcctcttcctctcccgctcggagcgccggccctccgctccggggcggggtgggaagcggaggtgggcggagcctccggggcctcgcgagggctggtgggcggtgcccggcgggcgcttccggtttccggccgcggtatgaggggcggggccggggctgctgtgggagagttctgttgctgcggcggggcctgcacgttgactgtgggaaactcggtgagcgggctccgcgcgccgggctgggctccgggaccgcggaggctccccggcccatcgacgagggagagaggcgagcggcgcggggaggcccgggggccggggaatctcggggcccgcagcctacctgcgtgtgagaggcaggggcgaggggaaaccgggcggcgcctctagaagctggtctcgggggcggggcggggggcggtgaagccccacctggaggagcggccgggatgggcctccgggacggtgtgccaggccggggccaagtcggaggcccctcgctctgggtgggcgctggggcccgcgagggctactgtaaggacccctggcttctgaggatactgcgtctagaactttctccgtatggggccttgaggtgcttggtcgagacctgcctttgcgcttggtcccgaatcctgccctctaggagtcgctcttgcgggcctccagcccaccggaggcgaagcggccccgggcggaaggccgctggatcctcgagggaggtgccggtttctctccgcgggcgccgtggggacggtgggaggcgggggcgtcggcagcgcttggactaggtgcggccttgggcctgcctggtagcggggatttgggcccgcagagcgcccgcctctgcggctgagttctgcctggcggggaagggagcgcccgatgggtgccgaggcgtcctcctcttggtgccctggcactgctcttcccgaagaacgcctttcagttaaacgggcgtcggaaatctcgggcttcctggggcagggatcgtcgggagaggccgctctggacgtgttgacacacgtgctggagggggcaggtaattgaccagcgaacggaagtttgtggggcctgtgaacgctgctggccaagaggccctgccgagtggagccctgcttccgccagcgcatcagagactttgaagcaaagtgcagggggtcagggtggagagtggcggccccagcctcgcagggtaactgaactggatgttcttggctgcccagcgcttacaagtcccgtaccttttgtgccctgccaggaaacaagctcacatcttcctgtgggaaaccttctagcaacaggatgagtctgcagtggactgcagttgccaccttcctctatgcggaggtctttgttgtgttgcttctctgcattcccttcatttctcctaaaaggtatggcctatggagcaagcaggcgagttaggcaggagggtgcctgtgccctagccctgggactggtgtgtgcagctggtggaccctggaattgggacccgatggaacaggtagaacctgtctggggtgggggtggcaggggttgtgtttgttattgccaacccttcccagggttctgcttcgtcatgacttgctcagttccttttcctgtgtcccctgccttctggtcttcagaatgcccccgagaggcaggaagatctatgttacagttctggaaatgatgcc

SEQ ID NO: 1563123 - DNA, 4001 bp, Homo sapiens
gtgagagaagaaattcctaaatccttgcacttgttaaagcatctggctttcccagagcattctgatatttgtcagaactggtttaatcatagtttttttgttgtttgtttttgtttttgttttggagggctctgcctggattctgtgaccttttggagtcccttggaggtctgtgacaaagaggaaaggaattcccaagtccagcctcacccaagccctgattagcttaattactagttctttcactaagcctccagttgcatttttcagttaatatatcatttgtagagaatctttagatattcctattgatattgtaggctaaaggaaattattaactcaataacttatggcatttccatgaaatgctttgaaatcctgactgtgatgagaattatggtggtaactttataaagaatattctcttgtttccaagcatctggattgagaccagtgaattattttgtaacaattttctgaatgaaccccagggtcaattaagtttagttatctgggactccaaaatcagggatatggaggcaaacatccaatctcacaactcagagcattttttttgatttcccttttcagtttcacgggcagtaatctaatctttaagaggcaacaaatagcccaatagagccatgagaactcaccatgttttggacattctcttcagtaatattggtgttataattccaagaagcaagtgaactttgatagaacaggtcttcggcttcgtggttaaacttgtccaaaaatgtcttggcctgttcctcaatggtggactgagcagcagttacagcaacaaggctgagaaggagccaggaagagcttgacatcgtcccctgtgagccaagatcacatccactgaatgactttccctagactaaaacctcctcatgagattttctctcttatcagcctttgaacttgggttgggcgctgagcaggaaagaccaaaaaaagaaaaagaagaagaacacagtaaacaatctgctgagccaatataaagttcatcctggagaggacagatatgtaacagattttagaataattttttaaagtgaatcaaataagaatacgttattctttaatcctagagaaccttacctctcctgtcactttatggccaaatcaaaaccggtacttttggttaatattttcctagaaagctgttaaagatacacggaaaatgttataattttacagtgaccaaagaggtctagaactagggatcatgaagataatgttggtgtttgtatggttttcagacaatttcattaataggttatctcacatttatttttatttcaagatcatattcccagaaactctctacttgggcaacattttcccttccaaatacatgactttgcccttgtctttatggaattcatatttctgatcagttttttttttttttttttttttgagactgagtctcggtctgtcgcccaggctggagcacagtggcgcgatctcggctcactgcaagctctgcctcccaggttcacgccattctcctgcctcagcctcccgagtagctgggactacaggtgcccaccaccacgcccagctaagtttttgtatttttaatagagacggggtttcaccgtgttagtcaggacggtctctatctcctgaccttgtgatctgcccaactcggcctcccaaagtgctaggattacaggcgtgagccactgtgcccagccatttctgatcagttttaatttccatggccattttttaaaattatgactactctccactccacaggtcaactctcctgatctgcctttgcaaaacttaaaaaagctcatttcctatttctcacactggttctgtggctgacttctttgagtgcctccttctccttcacttacctattcaaaactcagtcaaggtcacgtggaagtaagaaagcctccacatggtatgaaatccaaagagtatctatgtcaactcctgatcctctgtagccatgggatcacaacaacatagaattcaaagagattttagtggttatcttgtcaaatttcagaagcgagctcagtgtcctcattgccagagtgtatgtatgagtgccacagatcaaagagaggagcactttaaatggcagggttcaagggcctacctgacgatgattgtgaaactctgacacagagaaaatatttcttcacccagaaaaacaagtcttccaggttcaggtgacattgcaataatcaagcctttaaaaaaatgtccactgcttttccttattccaaagttgtgtatattattgtagaataggaaaaaaacaattataagtaactattcaaagtgctttgtgttataatatctcatttgagcatcacaagaaacctataggcaaatattttatcaccattttatgaattatgaaactaagtttaagtaaattgctatatctcactcagctaacaaatgatggaatcagaacatggatctatgtattctgattctagagtataggctcttaactaacttgtagtcaacagtctaaaagcaatagtggaggcatagataaaatgtgacagagggccttgtgcctcagtgaagatgacagatttagttacactgcatcaaaaagaggtggactcttacttcccttgatgtgaatcaaaatatactctccttttaaaaaaataaagcagctcacaaatataagtaataataataaagaattttaaatgaaagtgagatgagggtaaaaaaaaaaaatcagtgcagaaatttcagaaaagctcctcccacattccaggaaacctagatccactcactccttgcacacaataggagaaaaaacaggcaagaaagaggacagcacacgagtatctgaagaaaaggttgaaatgttactgtaataaaagcggaaataaatttctacacaggtaagttcctaaatgaaacacgtgggtttagtggaaaaaatgggagtagtccaaattcaattcgctgaggcagaaaatacgattaacttgatcaaactgaaatggagaaagcaagatataaaatctgaaagctaagaataaatgaacaaggagcctgggacagcagtgaggcaggcaggaaaatgctagaagccaagaaactttgagaagcaagggaaaagggagaatagtctacagtgattctgtagaaaaactagcccagaatggccaactgcaagcactgactgaattattggaatttttgttcacacttttttgagaagatatcaatgttctgatagttccccagaagcgttctctctgagcgcattccgagaatggaaagaattcactgaagactcaggagatgagacccagaaaaacaattggtctaaaggaatgtattgtctttgagaaaaattggagaatcagaaaaaattagaagaccaaagatgcaggaaagatgttctatgtttcaaaaagattggaggagggggtggatttcataatggtaaagggaagtttgaccttaacacctagtaaagctataaagtaaatttttttttttttgagacggagtctcgctttgtcacccaggctggagtgcagcggcgcgatctccgctcactgcaagctccgcctcccaggttcacgccattctcctgcctcggcctcccgagtagctgggactacaggcgcccgccaccatgcgcagctaatatttttgtatttttaatagagacggggtttcactgtgttagccaggatggtctcgatcttctgacctcgtgatctgcccgcctcggcctcccaaagtgctgggattacaggcatgagccaccgcacccggcctaaagtaaaatttttagaatgtgatttgcacttggaaaaatatatctctggtccattaggaattcactaggaataagtcagatgctgcctgccctatctcctctctgatagaatacaatagtaaaaaaatatatccaaagacgtagtgtatcttccttttcaataagggatttaacagaatgtaaaatgctatgacta

SEQ ID NO: 1563124 - DNA, 4001 bp, Homo sapiens
tatgatccagcaatttctcttctggacatatatcccaaagaaataaaaaaagtatttcaaagagaaaaaaaaaaaagaaaactcaaggcctccatggcctacctggggagtcacataactcaccctggctcagccctgggtcccaagcttacagcagttggcaaggaagagtgttcagtgcaataacaggcaataccactcatatgccctccactctgaggaaataacctctatttagagactaaacaaaggtgcctcttgcaagtctaaaaaagaaaagaagctacaaaggttgcccaccagtcaaagaacctaatcatctcagtctatattcatttgtgaactcctcctctcactagacactaagagattatccgcttaaggttcaatagttttttgtttgagacagaatctcactgtgttgcccaggctggagtgcaggggcgcgatctcagctcactgcaacctctgccttccggttcaggcgattctcctgcctcagcctccaaaagtagctgtgactacagacatgcaccaccactcccggctaatttttgtatttttaatagagacggggtttcaccatgttggccaggctggtctcgaactcctggcctcaagtgatccatccacctcagcatcccaaaacgctgggactgcagtcgtgcaccaccacacccggcctcaatagaattttcaagaaaggaacacagggttataagagaaagcacctgaacaagaccatggagcttttgtagaagacctttcacattgcaagctaaagtcaactgtggcccctctcataatgactttcagtctgccttcaaatagtttaacaaaggttttttgtttgtttttaagtactataaacaagacagaacccttacaactgataacaaagtccccaggaacagtgagtgagtgagagagagagagagagagagagggagagagagagagagagagatatccaggacccccaagagaattgatggggttaatgtgagtcaaaagcactatgagtcacatcagggggacaggcccactggcagcgagataacttcagaaactggagcaggtgtgagccccctgggatgcagccaggcagaaaacttggaaagggtggcatgctcgggtgaaagggattagggagagctagacacgctctggagtctaaggccctcaggccttaactgtgccagctgggaagattacatatacaaaaaggcatcctcccttacccacgtggcccaatcaaagcacccagcctcttataagggctttgcggctcattaaagttaagttcaaattggcaccagggtcctagacgcacagtcctagggtcctgggagccaaaaggtaccctgtaatctctgccaatgttacaacaaacttaagtaagagccgaagtaggtcaagcatttaatcctaaaaatgttctccaaaggaagatgaagggctagaggtaacatagaactccaaatattatctttctgacaaggggctaccccgacgcggctaccaaccacaccccggatgagcaaggccaaaggaattttagggaacacccaacttcctcccttaaaagtgctgctttgcttttaatatcaaactcagtgctagaagtcgccaaagtgggggcgaggttctcccaaccaaaggccggcgggcttatgtccggtcggaggtacagtgggcgagcgccccttatcatagagcccaaatgcccatgcgtggcccacttcttccgccggggccagcccgaagctctaggggaagacgatggcaccccaggctaccgccctgccagccccttccacgccccgccacctaccgcagtgctgcccgcctcattgcgctaggctgccgtgcgcgcgatggagaaccgggccccgcgcgctagtcggcggagggaaactgaggcgataaaagacgcacgagtaccagaccgcgcccttgctgaggacagcccgggagccggacagcggtgtccgggggcgggaccgcggcgtccagggggcgtggccgcgctgtgccgggcggaccctacccgttcattggcgggaggctggagtccgcctctgcggagcttcccactcaatcagttgtgcgggtcgtgttgctacagcgaggaccggcctattctcggttgagtaaacgaaccacgcagcaacgccagggcgtgacgtcgagaagaggcccggctctgcctagtggagcttgtctcctttatccttgatccccgcgccttggctccgtctgttcttccccttggctgcacattggaatctcctgggcaactttccaaaatactgatacttggccgggcgcggtggctcacgcctgtaattccagcactttggaaggcctaggcgggcagatcacctgaggtcaggagttcaagaccagcctggccaacatggcgaaaccctgtctctactaaaaattcaaaaattagccaggcgtggtggcagacgcctgtaatcccagctactcgggggacaggcacgagtatcgcttgaacctgggaggcggaggttgcggtgagccgagatcgcaccactacacttcagcttgggcgacagaaggagacaatgtctcaaaaaaaaaacaacaaaaaactgatgcttgagacccactggctggagattctagtttagtcctgggtgcggtctgggcttcgggatgatgtctaaagatgcccccaggtgatgctaatgtaaccaaaggctaaaaaccactgacctaacaggaaaaaattgttcctctcctcttctcggcctgacccccaatgtttgatatcttgggcgagctagagagattcaaggccagagagtttaagattatttcaccctacgatctaattctccatttctttcaacgaattattattgagctgtttgcattgtgccaggcactattgcagaggttggggttgcaaaaagaaaaaaggacaaaaatccccgcccttaaggggcttgcctcttgataaggaaggaaaacaaatcaacaaacaagttagcaaataacatgatctcaaatatggtaaagcggtttaaaggggaaataaggtaacgagtggggatcttttgagaatataagcaagtcttgctttgcctctaaatacggcaatttcctaaaaggcaagggccatatgctttttcgcaataccccatacttagtaaaaatgtattgatttgaattaagctagctttctgttttgaatcacttcatgagttacacatggagcatggtcttcggctttctctttctactgaattttccctgcttttatcaatctcacatctggaagactccccttttagcctacaaggatctctccttcatttttgttcacattgtcttttcatttttgtcacattgttcacattgttcacaagtcacttttcagtgattgtcttgttggttttgggtcagccatatttctttatactctaccacacctaacacagagggcaataaatattgtattgaattatgctatttttgttcttctttttacttgaacttttctttgaagcaataggaggctcagggagaaaaaataagtacaagagagaattttttgtaaatggtataataggtaggtacagtttatagtttttcccgcaatcaagtcgccttccgtcaatttccaaattataaagacacattctcatcaatataataaacaccatcgattttggctggaacagctgaaaccagggacttaatgccatgcagatgccttctctctattgcttatctttgctttcctttgcatactggcttcattcttttttctctctatgtaatgacattctccatatggcaatagaagctcctgaactttacatcttacaaccacagccacacacatacagactgactgaaatttctacggcccaaatacaaaaaagttctgagaagagattcattggtccaatttggatcaggtacacactcctggactagccaactgtggcatcagggtaaggaac

SEQ ID NO: 1563125 - DNA, 4001 bp, Homo sapiens
ccttctgtccaacctccactgcccccttacctcccgccactctggcttctcactggtcttatatgaatccggccaccccctccacgcttcctattcctgcctccagcctctagccaatcttcgaccaaacaggccttgacccctccccaactccttcctcctatcaggtctggaccctacccccaccattctcacctcagtcttccaccaatcaggcctcaaccccaccacccttcccccacactcgcacctccaaccacctccagccaccttcaactgctcccaaccggttttccaagcaggcttccactcccccacacttctatccaacttctgccctaccccactcctgtctcccaccaccactcagtcctcagccaaagagacctcaacccccacacacacacccctacccacaaccactagctcccacctccccccaatgctgcaacgggcacccccacttctccccacagccactggcacccccacctccaatgccaccaccagcatcctcacttctccccacgcccaccagcaccaccacgtgctcctaggccacttccaccaccaccaagtgttcctacgccgccaccagaaccccccacttccctcaacgcccccattggcacccccaccttcaatgcggccaccggcgcctccacttctccccacaccgccagcgctactatgtgctcctatgccaccaacgccaccaagtactcctaggccgcaactggcacccccacctccccccacgctgccactggcatccctacttctccccacccgccactagggacaccacctgttcctacaccaccactggggcccccacctccccccagtgccgcaaccagcgccctcacttctccccgcgccgccaccggcgccacgtattcctacatagccactggcgccaccacacgctcctacgccaccaccagcgctcccacttcccccaaggccgccaatggtgcccctacttctccccacaccgtcactggtgctaccacatgctcctacaccaccaccagcacccccacttccccgacactgccacaggcacccccacttcccccaacgccgccactggtgcccctacttctctccacccgccactggcaccaacacctccttctacgccaccaccaggccccccactatctgcaatgacgccaccagcgccccttctccccacgccgccactggcactaccagctgctcctacgccgccaccggcgcccccacccctcccaatgccgccactggcgccaccatatgtttcctacaccaccatgggcgcccccacctcccccaatgctaccactggcgcctccacttctcccctcgctgccacttcctctactcccacctcaggcctacacgggcaaccagagtccaaggtatacagtggtcctgattttaattaagtcactcaattaggattaacctctggaccacttcagcacccatctcagtccgaccagccggtcacctacctggtgttgcagcctctggcgtggccggcagcagctcacctccaactgcccgtggagtgtgtgcaaagatccggagcaactgcgatgaacaacgccaggcgcaggcccctttatagtgcccggacctagggggcggtagcagtaattcacgtgtgctcgcccgcgctcccctgtacccacctatcacagtggtcacaagacaaatttgaacttcgcgcctgtgaacttggcgcctagctgtaacgcttccgggatcaggtctgtcgctttccactcccacggatgttgcttatttgtcccaaaaccgccatttcaatactagagcgtgggcacccgaggccaattctgcgattaaaagtccctaacaactttctgataaagagaaaccatgtgaaatcgttcataacaaacttttatcctgcgagaacttggataagcgagccttgttccttacttgaattgtccagacctctaagtccgttattgcaaccactgggaaagggcgcggggggaggggcgggggcacgagaactggagcgaaggcgcgggagcaggggcgtggacgggaacaccgaggggagggcggggcgcggggggacgcgggagcgcaggggggcgggggttgcagggaaggccatctagacccctagataagagcaaggcagcaactcaacagcgcctggcaacggcgaactatgatgtttacttccagaaccctccaaaccctggagataaaaaaaggttacttgaggctttttggcactcactccatacacaccaagaaaaacaaacggggaaaacagcgctttctagattgtgccagtttctccagcgagcatctatatatttcgtaatgtatgcctttgggtaacagaacacacataaaatgtccctgcgtttgatactattttgtgctaagcattattccaagtgtcttacgacttaattcatacaacactttaaaaagtaggcaactgttagcactctcattttagagatcacacagctagaaagtggcagagctggccgggcacagtggctcacgcctgtaaccccagcactttgggaggctgaggcgggtggatcacgaagtcaggagcttgagaccagcctggtcaacatggtgaaaccccgtctctactaaagataaaaaaaaaaaaatagccgcgtgtggtggcccgcgcctgtaatcccagctactcgggaggctgaggcaggagaatcgctggaacctgggaggcggaggttgcagtgagccgagatcgtgccattgcactccagcatggggacagggcgagactccatctcaaaaaaaaaaaaaaaagtggcagagctgagattcaaactccaactctagttccaaaacctgctcttaagcaccagattgcctacctaaatacagatactttctcagttgataaaaaaattggataaagggggctgattactctctctctctacaatgaagttgcaaattaacctctacaagcctctttataagaatggggattacataactgtgcctcagaggcttgggcaaagaaccaggatgttagctataattgagaggcatatgcttcaagtaaaagaatgggataggtttggaatcaaatcttaaaatgggcagttcagaaattacacacatttactcaaggtgtgcaagcaactcctttagattgaaggcaggaggagctgaagtagactggaaataatgtagatttttcaagagaagcgaatgggagtaaaaacttttgagtaggctttcttcccataataatcttttaggaaacaaacaccaatccacatgagggctttaagaagttgggaattaaatcatgcaaaattttactgaaaaaaatcttccctctcatatctgagaaaactggcaaacagcatttgccatgatatcaattcatgatatcaatcatgaattgatatcttcctccctgatgcttgtggcagagttcgaccactatacagagcaggaaggaaaataattttgcccccaagagccaagaaaagaatggtccacatgaaaaccgagactacaagggtaaatgaaagcagagaggtcacaagcaaaagaggagcaagcatgaatgggtgtgttggggatcacaggctttgtctttttttttttttgagatgacatctcactctgttgtccaggctggaatgcaatggcacgatctcagctcactgcaacctctgcctcccgggttcaagcgattctcctgtctcagcctcgcatgtagttgggattacaagcgtgtgccaccactcccggctagtttttttgtatttttagtagagacagggtttcaccatgttagccaggctggtcttgaactcctgacctcaagtgatccacctgcctccgcctcccaaagtgctggggttacaggcgtgagccaccacacaaggccactttgccttcttaatggatcataaactaaccccaccctctaccagacctggctgagaaaacaattcctaata

SEQ ID NO: 1563126 - DNA, 4001 bp, Homo sapiens
cttgttcaaggttaaatatatatctagagttgggtctagaacctgagcctctccagagttccaattcatttctcttgtctgaattgaacaagactcttctttcttcacccatctcacccctaccaaaaatactgaaagaaatatcttaatctaaatcacttgtgtttttaaatagggggttttccaaaaaaaaaaaaaaacccacaaaattgaatttactcaagctttcaattgctgtattacaccttccatggatttttagttgtcaaattatttcttatagcaggacaataaggtactttattctaaggtacaagtatactaacagtttaatgtttcatcccccacctaaatggcagagagtgttaattctaacaggagtcttacatgtcttacactttagcagtttcaatcaaaagatgagctattttacaatttaaggaagaggccttacactgttaaaatcttgaccgatatgctcaatggcagtaccatcattgaatctccacctgctgccttacgtatcaagaacatttaaaagtctttcttgttagagacaaaataaaagaaaaactaaggtgacaagcgactatgagaaataaggctttaatcaggttaaatttgcattatgcagcctgcatgaatttagaggtcctagaatcaaaacactagaaggaacctttgatatgctctagttcaacagactgatttttgcagaagaggaaactgaagcgctgatgagaccattaactgataaagcaaaccgcttactttttcaaagggattcatttcaatgccattttacccttattttgcatctcactgttgtttctcagagcgacgattgacctttttttaggtgaaaagagcgaatagagcgtattaatttcaagagggtgaaaaatgcctttgaaggaggagatgctggagtgaagaggagaaatgacgtcttatttaaaatatgtaaccccttgatggggttagacaatgaatcatattctcctagatttttctatgtctatagacatcagccacagttctttcaggcactcaaacgagaggaagaggaagtgaataaagctcatactaaatatatagcacccactgaaggcagggatgtagacagaaagaacgggggtgggggaaggaaggaaagcacgcttcgccaggatccagctgttttctaacaaacctaagcctacggaagctaggaagatatcggaagcaaggaagatatcggaagcgacggcatccctcaaattcgagagggcggatgcctctagggctagagaggctccctagccctcagttacagagcgactgggaggggacaaaatggagttgaggtttaggggcaccctaaaggtcgtttggaggtctagcaagcacttcatggtctcctccggaaagggccgtggcaaagcctagtaccccgatcaggaagatgacttctggccctcgggatgcggtgagcggcaggaagaggcaggctggggttccgaggaccccagagtccatcacaggagcagatacagtgacctcgggaatcttcccggccccagcggaggcgagcggatagatagccctggctcaaggaaaaaagcgagccgactccaggagctggaatgcccacccaacctcctcccggctcaggtgaggtacgccagtccccctctggaaatggggccctggtaccgacagggcaggggtgccggggccgcaacctccccatccagggatactcaccggaggggcggcccaccgcgtcttcgcagccggccggcgcctggcactcggaaagctcgcaaaaaggaaccgcgtgcccgctagcgctgggacgaggaggagcgcgcggcggaggccagagaaaaagccgcagcggcgcgcgcgcacccggacagccggcggaggcgggactcagcgcgagcccggaaaagacgcgcccggaggggcgggcggagcgggggcgcgcggtggtgtggcagagccagccgaatcgctggctgcagacggctcggcccacccacgcgcccgcccccgctcgcccgggacgtcagtcgaaaaggcggagccgaacgggcttcccggggcgcgggaggggcgctgcgaggaaggcgaggcggctaacggctcgcctcaagttgttgctcccgctggcgatccgcttctgtcagtctcgctgctggtgtcgttgagtgtgtttcgggatgtccttgcgcctaacagcagtgaggcgcagaattggcccacgccctcacctgcggcttgcttcgcaggactccaccccaggataaaagttcccctcgggtcatcttccagctgccctcaaaagacactcatttttgggtttcactgctcctctttaagagagctatcttgaacactttgactaaaagcatcttgctcctgtaagcctgaactaatgcctctcatccgtttatcttgcctcttactgcgttaagatccccgctcactcccactgatgaaatatcacaaggacgcaggattttcacgttgtctttcatttccacgatggtatcatggcaaaaaaacccccaactgataaggaaaagtcaccgcagctttgtgacatcttactagccctgatcattgcttataagccggtcatacgaatgctgttccaacagatgcaagaaattgctattaaaattaaaatgccagcgaactatctgagggcttcaaaagggacagaccataattgcaaatgaggcctgataaactgccaagaatatatcacccaaaaaaataaatctcaagaattcttccagttccctgatgcgtaatggtgaactagcttcctgttcctgatggtaattgacatttcacttcacttgctgatttccattttcccatagaattaccatttgtgcttgtgtgtgtgtatatatatatgtatatataaaatgccttaccacctgagattacaagctagagtagttcttcagtgtgcatcacaattatctggggtgcttgttgaaatgtaggtacctggagctacaacccccaggtattttgattctgatctgggtagggataagaaatttgaatttttaataagcagcccaggtgacactaaaagtggttagctgagagcacagagctatagtttttgtgttactactctaaagccatattaccaattcaatttccaagaaacccacccacttacatataatatacctataaatattgctaagacagtcatgtagcttcctttttcaagattgacctacaaagttcagtacttcaaacaacgagtttaattgtcatgtttattttatgaaatcttgttttaataccagaaataagcaatcatatgtcaggtacgtaattcactgggtaactatgatgtacagagcactatcacctacagttgggttaacacaaatgaaattgaagaaatgaatatcgctgttctcaataaagttagtgtctagttgtggaattaaaatatagatataatacaaacccagtgtagcacataaatcagtgtgctggatgaagatgaaaaagaacttgtaattaaagagtacttttgccagtttcctttattgtcggtctcttagcccagacattttcaattaggtaatttcctctgaacagagtcttcagcttactgaagttcctccagctctacaagatataaaggaaagaaatcactatagcctgaaactatccgttttttggtatacaaatgtgtgtatgatatacatatagatatgtttatcagaccaagaaactacttggattttcaagatctcttattacttaagctattcattagtgtgtacagttctggctgtcttcatcacctaccacatctcaccttcttccacatttaactgcacccaagttgaagaggaaagaagaactatacctccaaaaaggaaaccaagtataaccacgctatttccagctttcctttttcggagtcaaaacaaaccttgcttaatttcttgtcatcagaaaccttccagaaa

SEQ ID NO: 1563127 - DNA, 4001 bp, Homo sapiens
gagccttgaaattaaaaatgataaaaaaataatttagaaatactgattcttaatgctgcaactgggaacaaggaccctgagcttagagagccttagaaaatggtgatttctatgcccaattttttctccattctaattagcatttttgatctcataacagcacagcaagaaccctattgcactaactaaatgacaaaccaggaaaaaggacttgaactctaagactagtggaggatttccagttctgcttcatttccttcctttgcccacacttttcttcgtgatttagtctcctgggaactgggtctattagaaccacctaagataataatttaatttaaagattcttgagattctaccaaatcaagttcctagatatgagccccaggcaccgtttgctacaaatcctctatatgaacataacctcaacatataacccaagatcttcttaggagaaaaaaacttaacaggcccataggaaagaagagagtaatagagcaacctaaagattcatgacatgactcatatattatggtgctactaagaataaactgaaacttgaaatggcaaaacttttattgaacatcatgctgaagcccagaagaaaatgccatctcccactggtactcctgtaatctgacacttcaagatgtctcctctgctcaaggatctttaaaagcaccttctttgaaccacagatgtcccatactccttgaagtctgccgaggtgacccacatctgcttgaaactgctcatagaggtcatgatggatgcaccaatccatgcagagaagcatctatcaggagaagctgtgatcttgatgggagtacctttggaagccagctgttccacttccttcatgagcctttcctccagcccagggaggagagtggtgcccccggagagtacaatgtctgcataaagtttattctggatgtcagtgtcacacttcatgatgctgctggagaccatttttgagagtcctgggctgtggatgcccagctggtcaggtgcaaaaagaacctcgggcacttggtacagctcatccccaaagtggatgacatgtccatctggcagtctgtatgctcccaggacctctccccggctcttgcgtagctctttctctggctccaaggcgatgtagcacaacttctctttgatgttatttaccacggccttgttgagtatgcaagggaagttaaacccgctagcaaagaggagccgggtgaggtgctctgtgatgtccctccctgccatacagagtttggtgactgcgtgaggcagggagtaaccctcaaagatggggacagtgcaagtgaccccatctccactgtccaccaccaggcctgtgacacaggcagaggcatagagcgctgccaccgcatgattagacaggtagaaaccaggcacactgaaggtctcaaacatcatttctgctagcttttctcgaatttccctaggattcaaagagggctcggtcataagtacaggctgttggctgggttttactccaagctcccgctcaaagagatgtttccagagtttctccatgtcatcccatcctgttaccagtccacgctcaatggggtagtgcaaatgtagggcctcatacttgtacagggcttcttgccccacgaagtacttctgattaagtcttgctaaaggcacattgaatttacaatgtcccaagacggagctgatgacatggcggggtccaatctctccagacaggcctgctttgcagagtcctgaaccattgtcaaaaattacagcaggaacatctaatgcatgtggattaaacatgtctgtaatatgttctcctggacttcccccaaataaagaaagaacacttacgtcactctctgagatgacaggcacctttagaattttttaaacttcagggttctgaagtttcaagttgtcacccatgtacagctagtaggctaccttcagtccaccaggacaccccatcctcaacctctgaatcttatctccattctgtaggctcagggcctgctgaggcaacatgaggggtgattgccctctatgtcacaatccagccaaggcaacaattgtcctcagtgagcatcagaggggccgggtggggcctctgagccaatagtactccctacttggtcagatacaaagccaaggaaagcaaatcatacctacagagctatgagaaacactattctacatgcttttgcttggaattatgttttcatttttttagatatatatttgagaatagaattgctgagttatatgacaactgtatgttaaatcatttgattttaatttctgtaagttctttgttccaaagtggctgtgacattttgcattcccacagtcgctgtaggaatgctcctacttctccacatgcttctaaattctattttctgactttatgattctaggcattctagtgtgtgtgaaatgttatcttattgtggttttgatttgcagctttaagtatcaatgttgagaatctttattatgtgcttattggccattctaataccttcttgggagaaatgtctatgcagaccctttgttccttttttataaggttgttttttgattattccattgtaactgttctttacacattcaagagtctggtgtttatcagatacattatgtgcatacatgttcttttattcttgtattgtcttttcacttttttgttagtgttcttgaaattacaaaacttttaaattttaaaggagtccagtttctctgttatcatttgttgttcatattttgtgtcatatgtaagcattcattataaaatttaagattcttaaatttatctttttgttttcttgtaagaattttaaacttttaactattacatttagtttttgttaattttgagttcattttttatttatggtgtgcattaagttttcaacttcattcttttgaatatggttctatctggctgttccagcaccatttgctgaagaggataattttgccccatagaatgactagtatctttttcaagcaacaattgaccatagacagacacctgggtttatttctggactcactgccctattccattgatctatatgtctatcatcatgctggtagcacactgcattgatttctgtcactctgtaataaattctgtagttaagaagtttgagtacttctttgttcttccttttcaagattgttttggccattttgggtcccttgcaattcagtatgcaatttaggatcaactttccaattcctacgcaaatgtcatatggaattttgatagagattgccttgaatcattagatcaatttaaggaatattaccatcttaataacgtcaactcttccaacccatgaacatgtgattttattttgccattcacttgcatattattttagtttcttcatggaatattgtcatttttggagtaaaacttttataccagttttgtcaaatttttatttccaagtattttatttttcttttataactggagttttttttgttttgttttgtttttgtttgttttttgtttgttttgttttgttttttgtgatggagtttcactcttgttgcccaggctggagtgcaatggctctatcttggctcaccacaacctccgcctactgggttcaagcaattctcctgcctcagcctcctgagtagctgggataacaggcatgtgccaccacacccagctaattttgtatttttagtagagacggggtttcccatgttggtcaggctggtgttgaactcccgacctcaggtgatccacctgcctaattttatctttgattcagaggggtacatgtgcttatttgttacataggtattacatgtataatggtgggagttgggattctagagtacccattaaccaaatattggacactgtattcaataggttatattttatctttcactcttctcccactgtcatccctttggagtccccagaatatattttgcccatcattatgtccatgtgtatcatttgtttagcttct

SEQ ID NO: 1563128 - DNA, 4001 bp, Homo sapiens
ataattttatagtaatttttactttcaaataacagcattttttaatgtaacaatgtatttctacagagctgataaaaccgtggtatccaaaacgccttatagattaatactgatacagcataatttgcgcttcaaggatttatccggaattgctgtaaaataaaatgtatttaagttctgactatcttggatttgcaactaaaggaggcatgattggcataatgaagctgttggctaagcatatgacccttttttaaagaaggaaattgcctaaaatatcacatcaacaggggaaatccttgtaaaaatacacagcattcataaccaacggccgctagtagtttaacattgcaaaagatttcgcactattggtaggtactacagatcattctaaatacattttaaaaggcaataaccaagaatgcaattttaagcggttaccactgcgccccctccccatctaattccttagactgcggggggaatctgatacgtttaagtattatgacaaataaactgtgataatgtttgtagtaggtgaagtttttgaaaagttaatagatatgtatatcagtatttatgcacacgcgcacgcacatctctaagagagttaacaactttccaggtccccagtcacctttctaccatctttcaaaatgtctcagcgacaagtttagggtattttgtgaagagctgactcaacctttgaatctgagctggaggtcccttacaaaaaactacggctgcctcccagtgggaggccgaagggggtccatccggtaattaaatgtgcattgacatcagagctgcggatttggggggccaactccgaaaaccctcagtcttgaaagccaagcgccgaagtcggcctcgaaccaaggtcccctgagtggtggcccccaaagccgctgctccacccgggagtgcagggaacttgggctgagtcggcagaaggaaaggtgtgcgcgccgcgcagcgcagggatggaggtggcggcagcgggggcggtggccaccaaggaagcagagggctgctggccgcacctggccgttgcctttcccccatggcccgccgcgggcgttgggcacctggaaagttgagacatttcgggcgggcggcatccggggctcaaggaggccagaccggcaagccgctccgagagaaaagctcctgggaggtcgtgcggttcagccctcgggcggcaccgaattcgatgtgagccaaatgcaactctttagacttggagcgcaaagcgacgctttcgggtccgcatccctccctcttcccgcacctccccccaccccggcatccgacctaggagtcagcgcggccggggccagaggtggctgagagcaagtgggagggagtccggggcgccccccacgacagcttcagctcctcttaacaaaggcgaaaacctcagacttcgccaggagactcgctcatcaaaggagaaggcaaaaatcaacacctaccactgctgctccaagtcccagtctctgaaaaagtcgaatagatccatagcggccaggcggcggcggcgggcgggcgcctgtccctgatcgcagcgggtcggcgcggctctcggcacagctcgctggcggttctcggcggcccccggctctccagccctcccgcccagctaaaagtgtccgggccgcatcggcagcagcagcgggcgctggaggtgtctggtcctgtgctccggcgaggaagcggcggcagtggcactgggcgggcaagcgcctggtcgcccactcgggtccgctcggtccgcggtagcccgcgcacccagcgacccgacgctgcggcggcagccgctgcgggctcaggcgggctgggccgcccgcctggctggctgcgggccggcggcggcagcggcggcgggggcggccggggcagaggcagcggcgcggcgcggcagccggggcggcagcggcggcggcggcggcggcggcggcggcggcggcggcggcggcggcagcggctgcacaggcggcggcggcggccgcggcagcatcacacacttacacactcacagggggcggagcctggacagctagaagccgcgacatggagcaggcacgttatcatccccggatctggcaggggctcgccgcgcccgcccctgcctttcgggaaccctctcccaccccccactgtcaaaatcagctagtgggagcggccacagagctgaggacccggacccggacccgggacgcaggggccgtggcagggatacaggaggtgggctggcgggaccaggacgcgggcttcgggaatgggacccctctctgaagcccagcccacccccaccactgggaattagttttgaactagaaaagacagcacaaacagccgtggggttgaaggtcgccccctgccacctcaagcacagctccttgagcccccgagtagtggagcaaactttgcgggcctgagcatccctcaggtctgtagtgcgtagcacgcgggtccaggaaggagaaggcggtcaccttcaccagccccgtggctccacgtgcccgcacccaggccctccaggcatgcctttaggcgcgcacctagtaggtcagcgagctataggccctggattcagtgggcagcaaggataggaacaaatgactgcccttgcgtggtccttgagttcggggttaggatactgttaaactgggttccactgtcactttcctcgcacggtcaccaggtgccttgagcaaaagacttctgctagctcctcctctgagaaatgggaaaaccactgggtgtgtgcccagtatcccacgcaccggctgcccgtctcccttctggcctgaaattctctttctgcacgtggagggtttaaccgagcctcctactcccttcaacctccacctctgatccaggaaggagtggatccctttagccaattccctggagggaaaggttccctggcctccgtgcagagaaaggtctgtgggaaggggcgggaccgctttctggcatttcaggacatgagcattctggagtcctaggcatgtaatttgccttcttcgtgtcgttatacagagggaatagtattggcacatttttcaaatcctaaggctagaactctcttgggaaggacagcagactgagccctgacagagcagggtgccggtagctctgtgtgtgactccaagcaagtcacttatctgggcctcagtttctccataaaacacccagcagccctctggctcatacttctctgacattctcccttctatttgaatatgcttctacagtattatctcatattaccaaaatcatccaaataccttttaacttcatttttttcctgaagaaacagagaccctaagacattaaaatgctcaagatctgatatttcccctagagggggatcccagattagaacctagaacctgggaagctcttccagggctggagccagtagaaggtgcctcagctccaagcatgaatgacttcagcatttgagctacaaggggcccagggtctggtctctttcacattgttttacggggggaaagaaagcacatcattaacatagagaaacaaggctctaagattctgcaactcaagcatccactgggactttgcttagatgtctatttactttgcatgggaccaagtcctcaacagatgctggttgactgatggaaaatcaaccagtgggcagccaaggggagacgacatctcaaagtggcttgtagatttggctacctgtaaactcctctggtcaaaaagactctatggagaaacagttattggcaaaaatggtgctggggattttcaaattatctctgtgacttatttattcatggaattctagtattcagccctggactgagagcccttaaagcaacaaggacggcctcgctcagatctgtggcccccgacctttatgccttcagtaaaaaatcctcaaattggatttgattgctgatgatggttgccagcattagtacttgatctgcttgaaaatccttagaggaaagccagaa

SEQ ID NO: 1563129 - DNA, 4001 bp, Homo sapiens
agcctataatgtcaagaggcagttagacagacatgttataaaccctggaggctttcaatcaactaaactacctgagacaaggaaaatattccagggtgcaagttcaggtaatatctatatctcatatctctatggaggacaaatatctctatgaaccctccatagaaatatgagatatggatatagagatctgttttatccttctgagtatatttgaaaacacttagaaaagaatgattctagacccatttcaaaaatgcaactcctaggacttgccttggaaagcaaagcaagtgataaattgcaagtgtcacttaaattgccaccctcttacttgacaatgtaaataaaatgttcttctgtgaatgaagatgtaggagtcagaatagcatgacaaatatctgtttatatagttattatcaaaatattactaacaaatatgcttccaccatctttttgggagtaactgatggcaacattagtgtttaattttgtacatgagataaaaagcactgaggaatagcacatgtgttgctctttctatcactattatcattgttactcataataaacatttatggagcaccaactataaatactcataagcccaaaggggaaaaatgaagatagaattgacaagagttataggtaaaagattaaatatatatatctatatatgaatatggatatatgattgattgaaggaaggaaggaagaaagggggaggatgggaatgaggaaagaagaaaggaagaaaggaagggaaggaaggagagagggaggaagacaatgtacatttgcgcatggtttctttaaacattcccagaaaactagacctacatttctataagtggtccagccacaacttccccccaccaaaattaaataagtaaatttccttcaaagcagaactcagcagccacttcagcaaggtgaattactgtagttggagtatattatgctcatagatctcactgaggaaccaagcaaaaagtaggggaggaaaaaaagtgagagttgaaaaaaattagagaaagacacaagagaacacagagggaaatagagtagagttgggggaatggaagaggctgggagtgcaaatggtggcaatggtctaactgatgtaaatgggcaaagtgagtggttatctttagcattctacatacccattgccaagcatccctcattataggtctgtatttcttaacattcagtgagcacctactacatgccaggagctctgctgggcccctccatatgctaagttttgttgtcattgttgctggttagaaagcaacaaatctagctgataataaagaagctaattctgacttcaaactcagccccatgttgttggcctgcaccatccattctggaacatgtgagcacttaaatagcagacaaataggctgttttgttatcgttgtttgttttgatccccacgaccacttagtaagttagagataattatccctatttggtggatgagaaaatggacattatcctttactgaagtctcagaatgacattcagttttcttctgttcactttctgatgtgagaatctcagatccaatccattatgctctggttgtccttagttccaaaagggacagtcagtgaagcattctgactaccctgaggcctttaactggtgtttgtctcagtttccttacttagtgagaaggaaatccatacaattttacctctaaggaactgtatttaaatcagtgctttggatagctttaagccaaaggaaatacctcactgtgatcaggactcatttgtaaagagagagaaaagctacttgttaagcctttggctgattgtagaccttctacagccaactcatattgcctaccttcatcttgaagaaggacggaaatgcttggtgcctccttttgaacttcatggatcaagaaagaggggtgaagcatatcttacatctgggatagatagatgggccactgcaaccttcctctgggttgccacaaccaaaactcaccttaatatcccagactgccccaaaactgttgtggaatcaccatgttctttattctaggtcacaataaataagctaattatgacatcatctcaatttaaactctgttttgttagcttcctccatccattcttagacacctgaatactcaaactatcaaacagtgtgcatggtaaatcgtgggacactgtaaaccattacctcatgagaataattcaaaatacagttggtttatttatccattcactcaacctagcctaactaactatgctcctactgtgtgtatagaacactgctcagtgccagggatacagagatgaataaaacaggtttcccttttctcaaggggctcagagactccacatgtgtactatcataaaataaaaaaaaattataaatatgcaaacacacatagaaggagagaggttttaggttttcttgataaccgcttttatgtttgaagactaatagtagtactttctatttatgaaattgtacttttcaaagcagttatatacctttgattcatatgaacttcacggcgacccagttagataggtagggatgatatcatttcgaacttgaagataaagaacctgcagctctgaggttaggtgtcttgcccaaggttgtacaaattataaatacaagtgttgggccccaaatccacgcttctagtcctaggtccattgcccttcccagttcacatcattgcctcgctcaattatttataagtgtttctgaaaaggaaatgatgaccctatgctcattttgtggggtcagaggagacctgagaatgcaacagtggatgattatccatgattatgttttcttcaaaagcatctgagaacagagggacatgatctctctctaaatgaattcactttttcttttgcatgtctgttttatttaatttattctcacatagagattcactgaaataatatccctttaaattgttgggaaccttaacctttcttcactgatgttacaaaaggtaagtccacactcctttatatgagataaagtgttactgaaagatgcattctatgttaaaaaaaaaaaaaactaaggggaaatatcatgtaaaggaaactcatagtcaaaagaaataatgtatgatcaaattctgggccttgggaagtatctggagtgatttttctgccttttcccttcttttcctcaccactgccagtaccatcatcactgcaactttgggcaggtaactaactgtgggcaattgcagccagtggtgtctaaaacagcaggtgaatgaggaagaccaaggctgcctctgttcctattgcccttcctttactcacatccaggcacattgcctccttcctgttctctgaacacaccaggcaatgccccttcttatgaccctttgaatggctgcccccgctacctggtatgtttgcagctcagatggcacctgttcagtgatacccttcaaaattgcactccaattctgcaatccaggtcctccttgacctgctccatttttttaaatgtaggtaaaactacaagacataaaattaaacaccaaccatttttaagtgtgtaattcagtggcattaagtacactcacaatgttaagtgaacatcaccactgtctgattcttaaacattttcatcacccgaaaaggagagactctacatattaagcagttactctgtgttccccatcctctggtaactgataagctgctttctgtctctagggacttgcctatttctgaatgtttcatattaatgaaataatatatgtgacgttttgtttcaaacctctttcagttagcctaatgttgttatggttcatctatgttgtggtatgtattcgtacttcattcatttacatggctgaataatattccactgtatggatagaccatattttgtgtattcgtttgtccattgatggagatttgagatgtttccactttggggctattatgaataatgctattatgaacatctgcgtgccatttttctgtgtg

SEQ ID NO: 1563130 - DNA, 4001 bp, Homo sapiens
ctatcaacactcatgcaggtgataaaaaaaatgcttgcaaacatgttcagggtaagaaaagaaccaaaaactttgcacatcacaggtccaaagagccagtcatatctataagaataataggttgcccatagaggaagagtagccaaaaggagtaaatcagccacagcgaggttgaagatgtatatgctagaaacctttttaggacccttttgacaacaaaacagtgtaaccacgacaatattgaccagaaatccaattacaaatataatgtagtaaagaataggaattgcatctaaatgcttatctgatggtttctgtgaacagttcaaggtagactcattgttgccagagatgttcacaagcccgaagtgaagaccgctggtaatgtttttgctagtagtggcaagggtggagttgcccttcatattgaaatgtcagcagctcctagttcttatgccttctgtggagaaaaaacatagaactcttagaacacatacagagctgaggacatccttgaatcattagcattttgaatgtttgtcaaaagcaaaaaaaaagtgagtgattatagaaaacattaagaaacagagccatggcttgtaaaacaagaattcattttacctcttgaaaaaggagaaataattttcctgatagtagaaaaaagacatttcagagattcaaagttctgaataaaactaccttttgcccatcttttctatgatgtttttgaaagatttaaagaaaattaatatttcaaaagattagtcagggcaggaaatgtgtgaaacaaataagaaacccagaggtaagaaaagttaatctttcaaaaaacacttgagcatatatctctgtttgtatactttctagaaaccacactgctgcttgctattgcatagagaaatgctctatttaagtaactaattacatacaaatcactacagctgtggaaaatataagtaacataagcaatggaaaaaataagtatataaaaaactaaaagagaatatgccaaaggaacatattgtgatggggaatcatggtttgtctttaataattaaaaataattcctttagttttacttttctattgttttcacaataataatatagttaagaagaagttatgaaatatatttatatttctaagtcttctccttttaatagagaatattagttttagatatagatatctaattttggtctatttaatatctaaacaatccattttcaattaaatcagataaagaaaaaaacagccaaacctatgttaggttcaagtagaagtagtttagattgctcagtgaaatgagaaatgaacatcaatgattaatcatgatatagtcttatcatttttctttttctctcttttcggtttaaccgaactgaatagccgttgctctcaaacgttacagtgttgaggtttttgtgatttttttcactagaagcattattttaaaaccaaaaaaaaaaacacattagctaaagataagcatacaaaggaaacactatttactttagatagtttcaaaatacatgcaaataagctacccaattaaaagtgtaatatctaaagaacctcctaataaagagcaaaacttttattttgctctaaagatttttcttttgacctaacaaattaacataaaagaatcaataataaattccacttgaagacttactggttgttgaagtttaaagcagttatcataaatcagcttgcttagtgcctaaacacactcctgtaagagaaacagcagctaaataattcaggagttttgcaaaatacagtgttaaaacacaggaaaaacagaagttcatccataaaaaatattttcatttaatgtatgttctactttccaagtaaattatatataaattgttcatacttaccttcaaaattcaggctgcagaatgctttgaattctgtgcttactcgttctctcagacgctgggacgtaatagcaccagatctctggtttccttcttatatgtttggtctgtccactgggagccttcaacctacataattctagggctgacttatgaacccttgccagctttccagagaggtttttttttgtctgcaaaacattaatctgaaattctcactgtctccaatcataacagctcattcaaataaatctcaaacaaaaaaaatgaagtttccacaaatgtgctagagaattttgaagtcagtggcttacttggtaggagaaaaatatagtaattatttacagaattttctcttccttttttcctgatattggcattctaatagaaattagtgagtagagactaggaaatttattatagtagcaaagtctttgttcatcagctttcacaaccttcattactttctgaaatttttacccctgtttattaaagaatggtaggaattttacttgaagtctaccacttctaaaatttctcccttgctttgcgcagtttttgttggcttgttgctggagggttggagattgcaggaatataatttttacacgaccaaaaagaggtttagtctcctttcataggtctctgtcatatttgtggtttaaatacaaagcacataaagtgaagagggattcgctagctatttcaacctagatcactgttgctgctgtctcttgtggcagtgggggcaataaactacacaaccaatccagcagaagcaagagtgacaaaatgaagaaagataagaacaggtgatggtagtgataatactagctgacaataaatgttatgtgccgaacactgtgatgagttatttatcatcaataatttaatagagaggcaatatagcacactggttagtaaatagcctctgggatccaactacctggctttacaaacccagctctaccacttactaattctgaccttggccaagttactttacttcttcatgtctcagtttctcatctgagaaaggagaatgatataaattacctacatcgtagagtaggaattttaaataagctaatggaaaattaaatgagctaatatgtttaaagtgcctaaaatcatgcctagcatatggtaggtgctattacaagctattcatattagcccccactttacaaatcaggaaactaggactcatagagtttaataacttttctgagatcatacagctattaaatgaagacacttgcatttaaatcaaaggaaactaatatcagaactcacgctgtttagcctctataccacaagaggaagcactagatggtcccttagtctcactctttgtcttggcaaaaaggaaacgtggcatttacagaaaatcactgatgaccattcataatctatcataaaagcatcaaagaaggggaaaagaattggaagaattgttatgtggggaaacgtatttttcttaattgtattgcccaaatggagaccacaggaaggagaaacttgtgactagatggctttctatagttagtacagagaaccagagaacctagagcacattttaaatgggcaaaaagattcaagttatttctgtggatcatatttttcagataagcagcaagaatgcacctgtccatgctgcaggccacaggtaaagaatgagggcaggctctgaggaagtagctgggcacctaagtatggagttcagcagaacaaggaaggagaagtcagtgttgatgacagaagacaaaattgcaaatggcatgagacaaatcacatggcttttgatatctgtctgtttctccattaatattaaagtcaatactgtagcacacaggcagatgagatcagtgagaagtcatcgttatgtgaaaaatacagtaggattcaaaggtttgcataggccatcataaagtttgtttggtaaacagtttgaacattgtcaaaatgcccctaatatatgtatgcaccattttactaaatctcaaaatatttgtttcctatgctctggacagattcagttgaggctgaggctctgttaaaatgatggaaaacttatgtttcagaaacaaatgagggggcacatatgtttat

SEQ ID NO: 1563131 - DNA, 4001 bp, Homo sapiens
ttaccacccagatgttagagcgtgcttgtagctctgcatttacccggaagccaccaaaatctgagtctatttccaggccaccagtcttggccaactcaacattgggctccaggcccacagctgccactatgtggtcagtttctacctgaggcaaaaaagaaataattcagtcaattaccacagtttccatttatgcctacaggcgtaacaatggcccttcatgccattaagaattgggactttaaaaaatcatgggttaacttacctctgataaatggattttaagttctatttcataagcctccaccaccccatcccatgcacatcccccatgtcattcgaacagaaatctgccaccctagccaggactcaaaactctgtgagacagatagaatggggctaagggaaagtggttcacaggagcctactctggctctcatcattctgttttaatggagggatggttaattcggaaaattatatcaggttaatggcaactgccaggaaaactaatctactggtgtcaaatgaaggagtaaaaatgaggcaaggggagtggagaactggaaggcctcttggcagactatcttttccttccttaccttcctgccgtctttcagcttgataagtaacttgccactgctgactccaacggattgcacaatagcattgggcatcaccttaaccccctctgtaaaggcaaacaagacctgagagtgagcctacaaggctatcactttcatgggaagtaggaaagctgaccagcggtctcctccacggtaaaaccaattatcagtacacaggcagttttggagagctgcaagaacctacacccatggttcattttcagcacttccaggaatttggggcatctgattcagaacacctagatgaacttagctgactggagaatggtggaaacattttacaggccaggtgatagggcttatgtcaagggggttcctatagaagcgaagtttgccttaggtcacactcaaaggaaatagagtggcagcatatagaaacagtctctctacctcgtctgactttttccatggtccagttgctgaggtattcggggaggatctttcccatatttcctttctcggggaagagttgaatcacttctgtgcccaaggctcgagctgggaagaagaaacagagtagttacagcaggaagcaaaagtcaatcctaggaatacaggaagagaagtaaaggagcagcaggcagccctcactacagacagggcagagctgcaatccaggccgagcgcccacttacaggacagtgggcatgagggcctcggtgctcaagttcatttgtaacgcaaatacaacaggtatcagaactgctggccccagattaagcttcagatggtgaactctgtgcacttccacccatgcagtcacctaaggcttacataagtgctttgcaacctctgaataggaagcatcctcctgaaaagatgccctgatttcatatatctgaaaaagaacattaagaaaactagttgccatgaaacattccaactggagctcacagatctctcaagctgggaaccatcatgtgcccaaagaagtttttggcattttacaggaagcagcagttcaaagacacccataattctgtagtctgcattgcccttatcatcttcataactcactttccttaatattttatttctaaggagtcctggcatagagggtagaggaaaagaaaggaaagaaagtattgctgttggccaggtgcagtgactcacacctataatcccagcactttgggtggccgaggtgggtggatcacctgaggttgggagttcaagaccagcctgaccaacatggagaaaccctgtctctaccaaaaatacaaaattagccaggtgtggtggtgcatgcctgtaatcccagctactccagaggctgagacaggagaatcgcttgaacctgggaggcggaggttgtggtgagcagagatcacaccattgcactccagcctgggcaacaagagtgaaactccatctcaaaaaaaaaaaaaaaaaagcatcgctgttaagttgctcaggtgacagctttttggtcaccaagggatccctcaccagaactaatctcagtgtttagcttttcactatataaaccttaattaggctgggtgtggtggctcacgcctgtaatcccagcactttgggaggccaaggtgggcggatcaccaggtcaggagatcgagacagtcctggctaacacggtgaaaccccatctctactaaaaatacaaaaaattagccaggcgtggttacaggcgcctgtagtcccagctactcgggaggctgaggcaggagaatggcctgaacccgggaagcggagcttgcagtgagccgagatcgcgccactgcactccagcctgggtgacagagcgagactccatctcaaaaaaaaataaataaataaaccttaattaaactcttcctactgatcctgccaaacacatctctgggattcacagaaaagctatataagactagagaaagaaaatcaaggtcactcctcaatactcaccctttctgccaagagcacaggccagttcgctaccaaggaagcccccaccgataatcgtaattgatttgacttcccgtgaaatcttctccaagcttctaaagtctccaatctgcaggatcacatcagtttagtccattaatttccaaaaggggcataggataataatactagaaagtagtttcttctaaatctttggcaaaagtaaattttctccttgtataaagtgactcaattataacttctatgttattaatgcaaatttatttcttcatggtaaaattccttctataaacagtggttctcaattggtggcagttttgtccctatcttccccaggaggacatctggcaatatctgaagacatttttggttgtcagggcaagtaggtgctcccagcatttagtgtgcagaggccaggatgctgctaacatactacaatggcataagacagcccccactacaattatccagctcaaaatgccaatactgcagaggctgacaagccttgttctaggaagaacttaaaagacagtacacagcctggccaacagggtaaaacgtccctactaaaaatacaaaaaaaaaaaaaattagccggtcgtggtggcacatgcctgtaattctagctacttggaaggctgaggcacaagaatcgcttgaacccgggaggcggaggttgcagtgagccaagatcgcaccaccgcactccagcctgggtgatagagcgagattcagtctcgaaaaaaaaaaaaagacaggacaaatcttatccctgaaaaatgacagcagtttttataagcacagtgttaagaagcagaacacctccttgctttttatttaggtactcttaacttttttctcagaagtctctacacagcacttgcaatgaaaaatgccaagaggctgtaaggggttccaatgaatcaaacacatcaggaaaaaacaactatggaagagcaatcagaaggatctattgcaagcaatacaaacactccattttttccctaggagcttaaaacccttgagtgaggtatctgaggtgcagagagaggaagtgacttgttcaaggccagataacaagtctggagaagagccataaatagaacttggatctcccaagtcccgggtgggcacttggggactgcaagattatactacttcttcaaaaacaacacaaggaaaacactaaagcagacaattacctttctgaaaagcgttgttctactcttcacctctgctccagccctatcaatggcagacagacttcttggagtacctcctggaaataagagaaggaaaaccctttagcccaacaagcaggagccagcccaaacaatactccctccaccacacaaaggtggagccctcttcacttagcaccatggcggcaacaacaggataggataccaaggctttgtttgccttcagcttgcctcacagcaggctttc

SEQ ID NO: 1563132 - DNA, 4001 bp, Homo sapiens
gctcacgcctgtaatcccagcgctttgggaggccgaggtgggcggatcacgaggtcaggagatcgagaccatcctggttaacatggtgaaaccttgtctctactaaaaatacaaaaaaaaaaaaaaaaaaattagccgggcgtggtggcgggtgcctgtagtcccagctactctggaggctgaggcagaagaatggcgtgaatccgggaggcggagattgcagtgagccgagatcgcgccactgcactccagcctgggcgacaaagcgagactccgtctcaaaaaaaaaaaaaaaaaaaattcaggttatctcaatttctgtgcaacaagcacagagcaccatcatttcaatacacaaaaccctcaaagatgacatccattgataaggcattagtttaaaagctaagcagaggttttaagttccaagagcagtatgtcccaggacataactcaaatacacctatcaggaaacattttcattgtgcatagcaactggaaaaactgttcaaatgcacatttgcaaagaccctaacaacccaaggaaaatattttccactttttatttttaaagcacccaggtgtttctgtattgtaaaagcctcaaggataacttctgacattgcaaatgccctaggggtggacattgaaggattactgatttttttttcaaagcaactcctacaggtggatcattcattgcccccatgaagtaacgcagtacgaaaagaagcaggctcaagccatgctcagataaattcacggatatctgatgtacaatgggctaattactgggaagagacccgaattcattcttaactttttgaggtcaactttaggaagcagtatggagttgcagcgaagggattaaggacctggaggctagcaaactatccttagctctacctattaattaactatgtgacctttggcaagtaatttcacctctctgtgcctcagtttattatctataaaatgagtgggttgacctttaccacaaaatcccttccagctctaaaatttgatgaaacaacttaatggagaacaaaatacaatgcgttctgcaaactgtttctttgaagccttaaagaccaccaagaagtacacggctcaggcatctccaattaagtctgggccaattctctgggtgtctggtacacaaccaaccgactccttacttgccctgcaccgtttctgtttcactgggcattcaaatccatggatctcatctgtggtttggaaggctgagcagataacaccctcatttacacaagaaacttaggcgtagggcttaaacgtcctgtttaaagtctcaatcggtaaatgacaaagtctacttgacctcattgctctaaaaaggggggtggggggtggggatgccggggaggcgccgacagccagttgttctgggatccctgaacagcaaacgctcccgggaaaaggcctcaagccgactactgggttcaaatctcttgaaggtcaggtcggcatggctgagccaattcctccgcttgcaagactcagggttcggagtctgccaatttggaattcacgtgactatgtgttaagtttctcgcggggacgcgggggtagagggctgcaaggcacagggagcctaaggcgccaggccctcggacttggaggttgcctggaatgggtcagtcacctgggagccggttcctctgcctcgggcttcggacgcacacggtccgcaccaagggcaccagcttctgcttcaaagcacccgccgccaggcctccacaccggaacatttcggcgaccgctattcgggacctcctccttccctttcctctcacgcacgaccgacgggtcaaacaccgtgagccccggccagctcccccagtctcttcacacgcacattacgcagactcctcctcccagctccgggtgggcattggacagagaagccggcctgctagagccggggaaggggaacggcgaccggaggcctactgcgcaggcgtagcactcgctgccgcattgcgattggtccgcacggcgagaggatttgcgcatgcactagctggccgcaagctcgcaaagacgctggctctaggtagccggttttcgcgagtttgtggcacagtgttggactgaacgagttaaggaacctgttcaaggagggactcgtggggccgctttgattggcggttgtgcctggtgctgccgctgtgttggtgacgagaactgataacagcatctcacaacagcgtagccccggcatcgcactttgttttttggttttaggacaccagttacttgataccgaagccttcctgattcttttgcagtgatccagatccagtttttccatgagtccgaggcgcggaacctggcttcccagatccggcgtgtacttccatcttttaccagttgccggctctttcccacccaacccgtttcctggacaagtaattctgcgctcttcttcccgcctgtcacctttatttattagttcagttgtgtgtcctagatgctgtataccaggtgctacagatacacacagtctcctgctgtggtttctgtgcttgggagcaggatgttagcaaaaagcgttcgtgcttctcggactttctgggaagagaagtctgctaagcagaactttcagttatgggagtagggtgaggggctgagtgtaaataagtgttttgactctgccagatataagctaaattggaaataatgttttggctgcatgcagaacatacaatgtgcctgtttcaaagattcagcttacatattcatttaacaagtatttattgagcacttacctcttggattgtactataaaaggggctctgttgggtatgaaaagtacggatggtccccgacttacccctcacaatggttcgacttacaatttttcgactttatgatgggtttaatgagacctaaccccatgtcagtcgaggagcatctggacttaagcatggttcaacttacggttttttgactttatgatgggtttatcagggtattaaatgcagtttcgacttaacgatattttcagtttacaatgggtttatttggacatagcatctatataggaagtggccactgtctagttggggagatgacatataccggtcattgaaataatatctggtgtagtgccggacagagcaagagagaagactatgggatggaatcactatggtagaacttcgtgtaagaagttatttgagttgtgtcttgaaggatgagtagtaaaattcaaacagtagaggaaaaggattgatatttcagatggtgaatactttcggaccaaagataacatttttcattgttaaacatgttgaccttggatccagaccaacccacattgaatcctggctctgccacctgggcaagtcacttaattgtgcctcattttcctcatctacaaatctcaggagggtgttcggaagactaaatgagctaatatttgtaaagtgtcttagaggaagcaccatgctgtttgttaaatgaaaaggcttggaactgttttaaaaaaccaaaacccagcacattttcgggggacaatgatagagagtacatactaagaagtattgatgtggtcaggctccgtggctcatgcctgtaatcccagcactttgggaggcctaggcgggtgaatcactttaggtcaggagtttaagaccagtctggccaacatggtgaaaccccgtctctacaaaaaatccaaaaattagccgggcgccatggcatgcgcctgtaatcccagctactagggagactgaggcaggagactcgcttgaacctgccaggtggaggctgcagtgagccaagattgtgccactgcactccagcctggatgatggagcaagactctgtctccaaaaagaaaaaaataaagaagtagtgataaagacaggcaagtatggtggggggccagatttgaactggcaagagttgggccctaactttggaggtaatgaagttactttttttttttttttggtggaatggggatagagaatgaa

SEQ ID NO: 1563133 - DNA, 4001 bp, Homo sapiens
tttaatagagacagggttttaccatgttggccaggctggtcttcaacccctgacctcgggtgatctgcccacctcggcctcccaaaatgctgggattacaggcatgagccaccgtgtcctgcctacaccaggctatttattttataggtctcagtatgttgcccagactgatgttggcatttttaagctcagtttgcctctgccccagttccttgttgctgcagctggaggtagacaggatcatctgccagagcacacagagcatttccaggttgcccactccagagcagccagaggctaaagggtggtcagtgaggagcctaaaggtccttaacactagagaactggctctccctagcccttacttaggccatgccaatttggccagagcaacctgctataaactctgtagttaaagacaactgtacaaaggtttttgggtaaattggtaatttcagtagactttggtgaggtagccatatatcaacttgatcctttagaaaattgtccatttgggccgggcgcagtggctcacacctataatcccagcactttgggaggccaaggcgggcggatcacgaggtcaggagatcgagaccatcctggctaacacagtgaaaccccgtctctactaaaaatacaaaaaattagccagccgtggtggcgggtgcctgtagtcccagctacttgggggtctgaggcaggagaatggcatgaatccgggaggcagagtttgcagtgagccaagatctcaccacttcactccagcctgggcaacagagtgcaactccacctcaaaaaagaaaagaaagaaagagagaaagaaggaaagaagaaaagaaagaaagaaaattgtccatttggggccgggcgcggtggctcacacctgtaatcccagcactttggaaggccaatgtgggaggattacctgaggtcaggagttcgaaaccagcctggccaacatggcaaaatcccgtctctactaaaaatacaaaaattagccaggcatggtggtgcatgcctgtcgtcccagctactcgggaggctgaggcaggagaatcacttgaaaccagaggcggaggttgcagtgagccttgatcgcgctgctgcactccagcctaggcgacagagcgagactctgtctcaaaaaaaaaaaaaaagaaaaaaagaaaagaaaagaaaattgcccatttggtaacttggacattcagtaactttgctttcagcaaatttcctattgataaatcgatgagaagtcaaatctgtgacctccaacacgaagcacatggggtgtgtgctttatgcatggaaggacctccttaagactttccctggggagcctgtgctccaacaggagagggaagatggggagcagtgcccaggaagaagctcaatttttaccctcacacgtctgtgggcccacaccattcttaagcctccctcccactggcatctcctagttatttttcttcccttccctcccctcctctcccctcccctccgctcccctcccctccccctccctctcccttgtcctcccctcccctcccctcccctctcctcccctccccttctcagaggccagataggcagggtgggtaggaagagatggggggaatggtaacgtttggggtctgggtgatgaatagggagaaccactgcaagtcctttctgtggactcccccaccccggagaatccccagtaccggagtgagcagatcttctttgcttggaacaggagcagtggtaggtggctggggatgtctcaggattctctcagtagcttctctcagattgccagatggaatgtttgcaagtgctgccaaggaaacaacaatttcaaccaatgggaagcatagcctacatgtttctgactgcttatgttaataacagagggtaagatgggagggggtgagggaaggaggggagagccaatcacagcaactgtctgaccgcaataataggaccaaactgtagtagctatacctagcttctcttcagccgaagatgagcttacagggccatgccaggaagaacagtggtgataagcctcacagctggtatgtattgggcatccctatgatatgccagtcactgtgttaagccttcagtgtctgaagtcatttactcctcacaatagcattatgaggtattagtatttgcatattgcagttgaacagactgaggtacagaaagtactgtcccaaactcacacccaaagctgacttctttggctgagcttttactttttcatttccaaattctgaggttaggacttcccatgtgtacttcattgctttgcaaaccaaaaagtatctgaaacaggtctcaatttaccagtttattttgccaaggttaaggatgtgtctgggagacaggtctgtgcctttctccaaagatgactttgagggcttcagtatttatttatttatttaaagacagggtctcactgtcacccaggctgaaatgcagtggcacagtcatggctcaccccagcctccactgcctgggctcaagtgattctcccacctcagcctcccaggtagctgggactataggtgtgccaccaccacacctggccaatttttaaattatttgtagagacaaggtctcgctctgttgcccaggctggtctcgaactcctgagctcaagctatcctcctgccccagcctcccaaagtgctgggattacagccatgagccaccccacctggccaggcttcaggttttagtttgtttgtttgagatggagtttcactcttgttgcccaggctggagtgcaatggcacgatcttggctcactgccacctctgcctcccgggttcaagcgattctgctgcctcagcctcccaagtagctgggattacaggctcctgccaccacacccagctagtgtttgtatttttaatagagacgggatttcaccatgttggtcaggctggtctcgaactcttgaccttaggcgatccatgcacctcggcctctgatggtgctgggattacaggcctgagccatcacgcccggcctaggcttcagtatttaaaggagaaatgcaagggcaggtgcagtggctcacgcttgtaatcccagcactttgggagaccaaggcaggcagatcacctgagatcaggagttggagaccagcctggccaatatggtgaaaccctgtctctaccaaaaatacaaaaattagctgggcatggtggggggcacctgtaatcccagctacttgggaggctgaggcaggagaatcgcttgaacccgggaagtagaggttgcagtgagccaagattgcaccactgcactccaacctgggcaacaagagctagactccgtctcaaataataacaataataataataataaataataataataaaggggaaatgcgagcttgagggaagagagggaaggtatggtcacatgattgaatccacatgttgcaagagaaaaagagcaggtagaggaagaatcaattatgtatccgtctcctgctcagtaaatcagcactttacataagataaggtaaacatagagtagctacaggtggagatatttaacctgttatttgtagctgtctgcttaggaacaaaaggaaaggcagcttcttgcatgactcagctttcagtttaattttttttccttttggcagagtgaattggggtcccaagtttttattttccttttacagctttcaaagatgtcttttatgaatcaaagatgaaagagatatagtgcttatcagcttacactcaggaacaatttaacatttttctttctcagttcccttgtctataaaatggggttaataacaatgcctacagaatagggattttatggggatcaaaccaggcaattcatgtgaagaccaagaacaatgcctggtacatcataatctctctctataatgattagatagcctttctttctctctctctctctctctcttttttttttttttttttttttttttttttttttttgagacagagttttgctct

SEQ ID NO: 1563134 - DNA, 4001 bp, Homo sapiens
ttccccggctgcttcagctgcgggagtgccacgctgatggtcatcttggtgatgggcttcaggtacaagccgtaagcagggcagagctccacggcctcagacgtgtcgtgcacgatggtagccgctgccatagcctccgggaccttgggcctgaaacataagacgcagacagtcagcaccagcaccccccacctcccccgccaatgaggaggggccaagccagcaggcactttctggacccggagaagagaaacagcagtgtctctctgccgtgtcagagaccggtttccactttgttaacagccatctcaacggagttctttactttttgaaatcattaagagtacaccaaaggggaaagagccgagctgataaagaacaggttagtgtcaaagcctcggtcagcactgcccgacaccctacatccagcagccagcagctcccaaggcctgcagaataggaagctgagcacgaccaggcccctcacacaggtcaagtaggaacggggacgctacaaacgcctagctccacgggaaggggcagagagacactggggaagggaaggggccagggagagcacagctgcaggcatctggaaaggttttgtggagggggcggcggccctgtacttgccctgataaaacaggaagtctcgggctgcaacaacaatccagaaccatgaaccctagtaatctccacgaaggccaaacgtatcccagctttaacccactcaaagccaaaaagtacaacgaactttccacaagttaggggccggagtcccccgtctgcgccttctttctccgcccaccttcattaacccacctcttccctgctgagctgacgggcagccacttcctgacggccaagtccaagtagaggaagcttcactcgcagaaacccaaccatctcaggtgaccgcctccggcccggccgcccaccccatcaacctggaggcttcctgccaggcccaggagacggcctcctcgcccaagcccgaggtgggaggtgcgaaagaagggagggagggtggagaagcgaccagaaaaggtcagtggggcaccagggaggggctccagtctggacagagaccagtgaaccctcccccagaacccaagcggccccagcaacttcaccaccgaggaaccctccccactctggcctccagcgccctccgaccaccccggtacacctggctgcccaatccccagtacgcggcattgcccctggtattcccacctaccgcagccccccagcatggcctcaggctgccgctggcacccctggcagggccccacacattctcaggcccttggccactcggtaccctcagctcctcagttccccgctccccaccaccctcctggatgagccccaataccccaacctacacagcaccgccccagcctccgaaaaccccggacagccccttgcttcccactgtagacctaggagcgaccgcagcgccacgtcccctagtcccaggcctcctagtctcccgcccatccgatcccccgagctcccagccctccgacaccgctccaggcctcagctccttcggtgcagtcccaggaaccgctccagcccctacccctacttccagggacccccggaccccgaccgcagacctccccagcccccgattcccccgtacagtttcaggcgctcccagccccccggtggcaccccacgccccccaaccccagccccgtcacctccgaggcccctaggcgccgcctcccaagccccggccccccgggcccggccctaggagcgaagcgttcgccggctgcagccaggcccgggaggcacgggggcggcactcacctgcgcggggctccgcctgcgtcccaggccgccgccgccgctggcccaagctcccgccgtccctcgacgatccccggacaggcgcggcctcaccgccgggagccgccaccgtcccccggaggcgcctccgacgccgccaccgccgtcgccgcccgccctctatgacgcatttccacttccggcgcgcgggctcgcggaagaggccgcgcggcagcaccgggtttctccttcttgccctggctccgcccccgggaggagggacttccgggagcccgaccttttgcactgcgcgtgcgcgagtccgccccgcccccatggtgccacctgcctgcgggtaaccaggggaggtacttgggccagggtctgtggtcatagcccttaagccaaacaggaggggggccggtgtggggtctaaattccaattgtagagtcaaatatatataacaaaattctaaaatgtaataggatcctataacgggattctatactatacttgcaaattatgggtaatatacttgaataatataatttatgtataaattagatatcatattctatgacgtaattatagaattacatataaattgctagttaattaactattaattgaatggttaataattattaattgtatattaataattattaacgcataccattacataatgtaattatgaaataataaatgataacttacaatggtattatgaaattaataataatttatattgcaattatgaaataaatgatcatttctaattataagataatttataatgtaattatgaaataaatataatgtaatttaaaaataaatgataatctaatgtaattatgaagcaaatgctattgtataatataatcataatttataatgtaattttggaataataaatgataatctatagtgtaattatgaaataaatgaaaatatataatgtaattctgaaatgatcatttataatgtaattatgaaataataaatgacaatttataatgtgattacaaaataataaatgaggccaggtgcggtggctcacgtctgtaatgccagcactttggagggccaaggcgggcagatcacaaggtcaggagttcaagaccagcctggggccgggcccggtggctcatgcctgtaatcccagcactttgggaggccgagatgtgcggatgatgaggtcaggagatcgagaccatcctggctaacacgatgaaaccccgtctttactaaaatacaaaaaataatcagccgggcgtggtggtgggcacctgtagtcccagctaccagctactcgggaggctgtggcaggagaatggcgtgaacctgggaggtggggcttgcagtgagaccgtgccactgcactccagcctggttgacagagcgagactccatgtcaaaacaaaacaaaaaaaagaccagcctggccagcatggtgaaaccccgtctctactaaaaagacaaaaaactagccgggtgtggaggtggttgcctatagtcccagctactcaggaggctgaggcaggcccgagaatcacttgaacccaggaggcagaggttgcagtgagcgaagatggcgccactgcactccatcctgggcaacagagcgagactctgtctccaataaataaataaataagtaatgataatttataatgcattattcattttttattataatttattgtttattaagtatgccatgctctatgtgagaggtacgtgcttctgacgtcccaaatatgtcacaagtccccaaactggatatccagggtcagataatcagaacagaaatcttgcattgctcaacatcagctatcaacaaaggagaaagccaacacaccaggggcctgaggaagacggaacattctgtgaacccaggcaggcttcagaggggccgggctgtgtaagagggttgctatgccttccatgtttctgtccttccaaaactcaagttcaaactcagttcccactgcaagagtattagaggtggtgcttttaggaggtggttaggtcatgagtgggatttgtgctcttagaagacaggccccagagagctctctcaccccttccaccatgtgaggacacagccagaaggaaccacctgtgaaccagcaagcgggtcctcactagacactgaacctcccactcattgatcttggactctcagcctccagaa

SEQ ID NO: 1563135 - DNA, 4001 bp, Homo sapiens
atgatgacctgggaatcaaatttaaaaggaaatctagtgactttggggattacatttagtgatttacttctacccaactctactaactaaatgtctctgatctccacatttctttaccccctcgagtaccttcaaaaaactccagctcacgttaccccctctaacttaattctagctaactccagttcaaccagtctttcccattacactaaagaaagtgaaattagataaatagctataacacatcactcagagccattggaaaatactaaagtcaatagcagtaaataaatagcccttttattaaaacaacatatacaatttcaatatatagaacaagattttgaatgctgagaaaacccagtctaataaccataaatataacaccgagagacagaaatctgagggaagaccagaccctgatccaataggatcaagtttaatttattttagaaagaaaaaataatctctgccaacttccttccaccatcaccccctgccaccacctcccaacccagtctggaactaaaagtaaaaaggaaatgacaaaagccagtgactgatttttgctacgtaagacctgagatttatgcttagaacacacagttaagagctcagtagacttgtttttggtatctggggcttgaatttgatttctttttaaattttaacaagagaaatcctttttgccaagtattagagggctattgaattccccctcccaccctccccactcccgctctcccttctgcccttcccctcccctctctccccactcccctccctccctcccctttccattccctccccctttctccccctcccctttctccctcttccctccccctccctccccttctctttctccctccttctttccttccaccccttctctattcccctacagcatattaataatagctattctctaatggctatcctttcacatgataatactacattcctgctctttaccatccctgcctccaaccaagatctttttgaactcttccttcaggaatctctgtgaaaccttgaaaaagttataggaaaagactcactctgaagagggagtttctttttttccaagagctacatagggaacactagcctagtaaaaaaagaggtggaggcatagagtccctcatgtgattcagaaacagcctaagtccaagtccaaaagaactgtgaaaaataaaatttatgaactcattaccttgatgatgaagttcttttagatgtttggctgaaaacgtgacacccagaagggagatgtgcccctttagatggaactgagaagtgccaagttcttgggcacctgcagttggctgccacccctgtcagctgttggaccagactgaggggccaggctttcccctgctgcctctgaccctggggtgtggcaacagagtttgttgggtcacaatgcctgaactgtcacaacctaagcaaaggtgggcatgttggcaaactcagaaacctattcccatcaaaagcacatcaggctgcctgtggtgcgacaaactttttctgttatctctatgagggtacacaccatttttctcacattttctctggctcacagtccatcaagatatcccttctcttttcatttcctgcgagacctccagaacaatctaatcatacccctactagagaatcagagttatattgcaagagatctttagatttacgtagaaacagagaaatgttgatcaaaatcttttctgggtatcccaaataaaagtatgaaaatagaaacttggaggctgcctcagcagcttctgtagtttcacctcaccattaagatgcccccttagctagtcaaaaagaagtcagatgtccctaccattgtagtatcagagtacgccatcatgtaggaccctggaatgatgttttcttgttgatttggatgctgtgatgactcttccagtctgcctcaagatactgcttttttcttcaactctccatgccctcctacagccttgactgccagctggtaccagagttacctcttcttgacatcaccgtttctatagagaacagtgacagcacaaagatggagggctctaaggattctgtgtgctctaagtggtctagcaggctctgaccttccctatgagaaataagttgtccagagaaaggctgatctagttgagacagggtctgtcttttacagactccctaggccatgaaaagacttaagctccacttaatcttttcaatctggccagtgctggtttgttggctgcagtatgtgttagagatttatccattacactttgagatgccttcatctcatcttactgagtttagccccagtttggaaatattatcccacaaccaaatgtctctcactctgcccaagtctcatctttccttgtcttttctccatgtctccactttaatactgcatgcatgtaaataaatgcatctgaattaacaatcagttgagatgatcccctaaaagagttccatattcttggttctacctccatttattctttttcctgttgcccctgagattgcatctctaactccgctatattattttgatcctgttagctcatggtgtcaaacagaaacagagcctggaatttgttagaggcggcaagacagattttattcaggccactgcagtagaggagagagacttctgatgaacagatctcaactccactgaaacaaaaggcagggtgtgctaaggaaaagtaccgaaggacattgagtgggggtgagcttggtcaatgtattggggcatctgtgtttgctaatgggtgcttattaaagttaggttccctatgttcacaatgtcaggtttataaagaaaaacataattaagaactataaagaaagaaatgaaagaaagtaaaatcaaaaaaagaaaagaaaagaaagctaagctcctaccttcccatagagacagggagacatggaccctatttttcttgatcattacattacaaagggatggcttccaggttgttgagaaagacagtcctgggttgtagaagatacatcttaaaagaagagagaaagaatttacaattgcaagttttctaaagtacatgctgtaaggaagggagtcagggcctgtagtcaggttttggcctgaacaaacagtaaattcttttggcagcaatgaactgtctcaggaaggcattttaaggggggctaggattgtcatactagggaaatggccttttggcagctttgaactgtctcaggaaggcattttaaaagggctgagattgtcatcctagggaaatggccttgagctgatagaaactacgctggtgtttgttcaagtctcttagtgtgtgtatgtattggggggcaggtggatgaaattgtgccgaaagttgcagttcttataggccaaagttgaggcctagctgagaagtgggcttagagaagcctgactaaagtttgatcatgaagagggtctttgttgcttttcctataccatccttttgtcaaggggcaacttttgatgattaaagacaaagttggagctcctgtgtctggctcatctctgtggaatatgaagcaaaggaagaaaatgtttacctattctccaagcacaagaaatcatatctctaagagattaaaaataaaacaaaacaaaaacaaaaacaaaaactctgtgtctcccagcccggaaaggaacaaccatgattcatgcctggaaaatgtcttagtaatccccagatgacaaagagagaactactatggatgattagagcactctcccagggcacctgaatcctgtcatcctggaggctaaccaggagcaggtaagggcagcatttggatgtgaaaccaatgagcaaaatgtaagggaagaatcaaggcagacctggctcagtcataggtcacggtacatttactgcctcttccttctcttctcgaggctctcaaattggtctgtactgagtagagggggtggagggcaggtgagggataagggatattcaaatagtcaaagtaaggaatatatt

SEQ ID NO: 1563136 - DNA, 4001 bp, Homo sapiens
attattatgacttaagaggtcttaactaatagaggctggttgccaggcaaccaccactcctccctcaggctcctccccagcctcccctccccaggtcctttacatcacaccacaccctgcccctcccttgatttttatctctgtgtgatgtatgagcatgctggcccctgacagaccttgttgagcttggttgcttggagaagtcagggtatcatcgtccattagtttatcttgggccccaggatatctatacccatatgccaatttttcctactcctcggcatgagtcattttttatcttaccactttccggtcctgatcttgctgtccttctgggttgtagagatctaccttgcacacacccctgtggctgcgtaaccagtcaatatcatcagacatctggaaagagaaagaaaagaaagctgaaatgcttatatatggtttttggaaaccgggtcaatttggataagaatctctggaggggttctgaaatccatttctgtgtttcatatataggtttaggctaggaactggtggggtgagcagtgggggacacattgagatgtttgaacttgatgcttaggatcattatcttttagcaaaatccatagtctcctttaatttagactccccacaccaagtatttggaatcatgagagtatgatgacctgggaatcaaatttaaaaggaaatctagtgactttggggattacatttagtgatttacttctacccaactctactaactaaatgtctctgatctccacatttctttaccccctcgagtaccttcaaaaaactccagctcacgttaccccctctaacttaattctagctaactccagttcaaccagtctttcccattacactaaagaaagtgaaattagataaatagctataacacatcactcagagccattggaaaatactaaagtcaatagcagtaaataaatagcccttttattaaaacaacatatacaatttcaatatatagaacaagattttgaatgctgagaaaacccagtctaataaccataaatataacaccgagagacagaaatctgagggaagaccagaccctgatccaataggatcaagtttaatttattttagaaagaaaaaataatctctgccaacttccttccaccatcaccccctgccaccacctcccaacccagtctggaactaaaagtaaaaaggaaatgacaaaagccagtgactgatttttgctacgtaagacctgagatttatgcttagaacacacagttaagagctcagtagacttgtttttggtatctggggcttgaatttgatttctttttaaattttaacaagagaaatcctttttgccaagtattagagggctattgaattccccctcccaccctccccactcccgctctcccttctgcccttcccctcccctctctccccactcccctccctccctcccctttccattccctccccctttctccccctcccctttctccctcttccctccccctccctccccttctctttctccctccttctttccttccaccccttctctattcccctacagcatattaataatagctattctctaatggctatcctttcacatgataatactacattcctgctctttaccatccctgcctccaaccaagatctttttgaactcttccttcaggaatctctgtgaaaccttgaaaaagttataggaaaagactcactctgaagagggagtttctttttttccaagagctacatagggaacactagcctagtaaaaaaagaggtggaggcatagagtccctcatgtgattcagaaacagcctaagtccaagtccaaaagaactgtgaaaaataaaatttatgaactcattaccttgatgatgaagttcttttagatgtttggctgaaaacgtgacacccagaagggagatgtgcccctttagatggaactgagaagtgccaagttcttgggcacctgcagttggctgccacccctgtcagctgttggaccagactgaggggccaggctttcccctgctgcctctgaccctggggtgtggcaacagagtttgttgggtcacaatgcctgaactgtcacaacctaagcaaaggtgggcatgttggcaaactcagaaacctattcccatcaaaagcacatcaggctgcctgtggtgcgacaaactttttctgttatctctatgagggtacacaccatttttctcacattttctctggctcacagtccatcaagatatcccttctcttttcatttcctgcgagacctccagaacaatctaatcatacccctactagagaatcagagttatattgcaagagatctttagatttacgtagaaacagagaaatgttgatcaaaatcttttctgggtatcccaaataaaagtatgaaaatagaaacttggaggctgcctcagcagcttctgtagtttcacctcaccattaagatgcccccttagctagtcaaaaagaagtcagatgtccctaccattgtagtatcagagtacgccatcatgtaggaccctggaatgatgttttcttgttgatttggatgctgtgatgactcttccagtctgcctcaagatactgcttttttcttcaactctccatgccctcctacagccttgactgccagctggtaccagagttacctcttcttgacatcaccgtttctatagagaacagtgacagcacaaagatggagggctctaaggattctgtgtgctctaagtggtctagcaggctctgaccttccctatgagaaataagttgtccagagaaaggctgatctagttgagacagggtctgtcttttacagactccctaggccatgaaaagacttaagctccacttaatcttttcaatctggccagtgctggtttgttggctgcagtatgtgttagagatttatccattacactttgagatgccttcatctcatcttactgagtttagccccagtttggaaatattatcccacaaccaaatgtctctcactctgcccaagtctcatctttccttgtcttttctccatgtctccactttaatactgcatgcatgtaaataaatgcatctgaattaacaatcagttgagatgatcccctaaaagagttccatattcttggttctacctccatttattctttttcctgttgcccctgagattgcatctctaactccgctatattattttgatcctgttagctcatggtgtcaaacagaaacagagcctggaatttgttagaggcggcaagacagattttattcaggccactgcagtagaggagagagacttctgatgaacagatctcaactccactgaaacaaaaggcagggtgtgctaaggaaaagtaccgaaggacattgagtgggggtgagcttggtcaatgtattggggcatctgtgtttgctaatgggtgcttattaaagttaggttccctatgttcacaatgtcaggtttataaagaaaaacataattaagaactataaagaaagaaatgaaagaaagtaaaatcaaaaaaagaaaagaaaagaaagctaagctcctaccttcccatagagacagggagacatggaccctatttttcttgatcattacattacaaagggatggcttccaggttgttgagaaagacagtcctgggttgtagaagatacatcttaaaagaagagagaaagaatttacaattgcaagttttctaaagtacatgctgtaaggaagggagtcagggcctgtagtcaggttttggcctgaacaaacagtaaattcttttggcagcaatgaactgtctcaggaaggcattttaaggggggctaggattgtcatactagggaaatggccttttggcagctttgaactgtctcaggaaggcattttaaaagggctgagattgtcatcctagggaaatggccttgagctgatagaaactacgctggtgtttgttcaagtctcttagtgtgtgtatgtattggggggcagg

SEQ ID NO: 1563137 - DNA, 4001 bp, Homo sapiens
taaaaaagtgttaaatattatatttaattgatagactttattatttttattttctccatttcccatgtagaaaaaatgaacgtacagccaagggaagtcacatgaatataccaggctgggtttgggaagctagagaattgattcttgtcccaatcctgttacaatttattgtgtgaacttgggctctgtaattcccctctctgggcttccgtttctccactgacattggactagataatttcatagattccgcctagttctgatagtcaaacacttacagagccctctgtgccaggccgtgttctcatgtcaaccctgtgatgatagggaaactgaatcccaaaaagattaagtaacctgtctagatcagaaagctagtacataggagaagcaggatttgaacctaggcaatctgtttccagagattcctaacttaaccattatggatctgtgattcaaatattactacctttttttcttgactgagggcctgactctagacatttatctcctctgctgcactaacataggcctctttccaggtcatatgccatttgtcaccaatgccttaccaaaggaacagatctgtaactacagtggaatttcaggtactgttgaatattcatttactctaccattcaataacttatgtacctaatgtgtgataatgcttgccaggcatcttcttaaaacaatacttttaaccaaagagatgatggtgaaatttgagaccaagtaacagatcattactgaaagtttttccctacgactttaaaatcctctcttgtgtcagcacccaatctgtactcccagaggtgaaaagggccaactgcaactctaccccagcagacagccagaaaacactcattgcagcattccttgtcccccacccccccaccccttttgtggcctgctttgcaaaagtcaattaggtctggaagggaagtggtaatttctcttcaggagttggaaacatcaggccttacttctcttcctagtacccctttcccaccatgaaagaatcatacagaactttagataactgtaatcagagaatcagaaattcttagaaacaggaaaatttagaagatcacaaaatcaaaactagaaagggtggtggaaattacaggccaagcctttttttcagagagtgaatgacttgcctagggtctcacagtgaattaggatgagaatagaaatctgtttactttctgtatagtgacactacattcctcttccactttcttcacttatttctgctaattattcatctctcaattccccaaatctctccttacccaattcatcattcccatcacccccacatcctcttagtttccctccctagctcttcccccacccctaggctccccatgggctctgacccactgagctctgctgtcagcccagcaggtagagggagtcaaagggagagaggaatggggaattgcaggaagaaatattaagccatcgttcttgatagagaggaagagagagacagaaacacagagacggagagatacaaagccgaggaaagagacaaaaagggggagagaaagaaatttagagaaaaagatagttagaattcagagggaaaaataagagaaagcaagagtgtcagagaatgatgaaatgaaatgaatgatcttgaaaactaacaaaagaaagtaacgaagggaaaaagagagaaaaaagctgaaaatgaggaaagacagaaagagacatgggagataaaaagaaaatgaaaaagagacagattctaagaaacaaacaaaggaaaaagtcagatctactcagaccagagagtcagtgtgtacagccctgagagaccagctggcagaccagagatagggtgccaggctgaaagcagctcttacctgttgccctgcactgaggacgaacgaatgacaggtgggtacttgggttaggacctggcatttatcccttctcctctgactcagccccacccaccctgccttctgccggcctggccctgcattggccccaaaggtatctcagtcccttccttgctagagataaaacccaaagtagcccctccctctagtgtaccccctcccccagctctggctcttccctattttcttctctctataggacagtaaaattagctcatttgggctttggaatcagaccatccacatagagctgggataccttgagcaaaaccacctctctgactatagatctcctcaactataaaaggagggcaataaaacccagaagtgactgtggcacaagttgggagggctctggagtcagacctagaatacagtgttgtgcttatgagctcaaacagtcagcttccacagactagatccccggttgttgtaacaatttggtaatatcatgtatggaaaacgcataccacagtgcctggcccaaataaataacacctactgttgactgagtgcttacaatgcaccagacccttcactaagtgctttacatgaattaatttagccacataaggaccttaaaagataggtactattatccctatgttacagatgaagaaactgaggctcagagaggtgaggtaacttgttgataattacccaactagaaagtacagagcccgcctatgaacctaggcaatgtagttacagaacccacactcttctcttcctctcataatatacaattaaaaatgtgaagttctctgtcttatcttttctattaccttctcctccctttttcattttcttccccttttgtcactctctttttccccttcccttatcaatcctaaggcagcaggaccatgttataaccagacaatttcatctttagagcagattgtcatcattaatattatatttacataaataagaccatagtctacatattgatttgcaatttcttttttttgtttgtttttcattcaaccatatgccaatataccatggaggttacaaaatctgaatgcactgtaatttatttaaacactcccttattgatataaatttaggttattcccaaggattttcccccctccattatgattaatgttgcaatgaacatcttttggcatttgtgagagcatttttttagagggtggcatcctaaaatataagcattcctggatctaaaggtaatagacatttaaagtttttgatactgccaatttgtcctatacatgtgttatacacccctccccacccagtggtgtataagagtaaatgtgtatctattttctcacaaactcaccaataccatttgttattttcaatttttaaaatatttgttaatcttataggcactaaaaatggtatatcagtgttgctttgatttgcttttctttcattattaatgagattgggtgtcttttcatgtttctttatcagttgtctatttctcttctgagtggtctactttttgcccattttgggggtgggttggcagtaaaatatagtggactaaaagcatgcactctggagtcagactcacccaagtcaccaagtcaccaacaccttagctatttggttcacttatctccagatctctcatatataaaatgggacagtcatagaacctaccctattggattattgtgaggatgagatgagaagaactttgaataatattaatattaactccttttctgtgatatttgctgcttcatctggattaatttattaattcaacaaatgtttattgagtgcctatagcatgtcaggtgtggtgctaggtagtggagatgcagtggcatgtaaattggagagtatgggtatagcatggtgtatttaaccatttttaaaactaaagattaattccagttcttctagaaggtatttcaaatgcagctgcaataaccttgacctccaactctttagctggctaaccatttgtcactttgaaaagtgagctcaaaggtcatcacttctgggaggcccttttaaacccccacactggatcttgttccctcttctgggcccccacatcttctctctcagaatttatcacactgtactactggcacc

SEQ ID NO: 1563138 - DNA, 4001 bp, Homo sapiens
tgccaaaggctctgttacctcctaggagatacatttttaatcacgaatctgttggtaatgtctatttctaaagacttttctctcctcaaactagactttaaaaaaaaaaaagaaaggaaaaaacgaaacacctttcttcacaacagtcaaaactgcattgctccccaaaagcagttcttctgaatgcactagaagtctaattaactagaccatcagggcggtcctctgaagaggaaacaatttacacagtatgtagctgttattatttttgactggattcatttcactcacattcaacagaaatgtaaacaatcttacaattccaatttctccatgaccaatccaaccaatcagcaggcagaacactcctttagatctaagcccaagtactaatgtcaagttgacaatttattacacttccccgggtaaattattttgctcctctgtgtttagggttttttattgtaaaggtggactacagtggttaatttcccattcttctctcaccccaaaatactaagttctctccagtaaagttctcaattgtcatattcaaataagttgtgtattcaaaaagggctacagtgagttcagctagcgattttattttacctcgaaaaggttcaagtgtcagttccttattggagggagagcatcaggataaaaagctaatggatgctgggcttaatacctaggtgatgcatggcacacgtttacctttgtaacaagcccgcacatcctgcacatgtacccccagaataccccagaacttaaaaaaaattaaaattaaaagacccaaccctgagattcttaggcacctttacctgcgtgactaataacaagatctgctttctgaatgtcttctttcaaggaatccttgtacctgtaaacatccagagtaaacgactcagtactgaagggttcaggtaccaccgttcctctaccaatttgcaggataagtcggttgtaaccaaggctctcgattttctgaaagaggaaatcagaatgtgagggccttttaaactggctatgtaaaacagagcaggaaccaccaccactactaaagtttgacgttaacatcggagcacggccgccaaaaagcctatctgtggccgatttcacttagttttcaaaactattttctggtccggggcccgacgaggaacctcccaagcactcatgaatctaagcgacccagctcgcagagtcccgcgaaagccacagcaggaaaagactttggaaaaggagtcgcaaactcggggggaacccaggcactacccgttctgcctcacttgatcaactgcgagaaccgggagccctgaggggacgacgcgcgctgaggagaggaaccgcgcgggctccggccaagtgctgaggggaaggagccgggctctgaggcgagctcggctggctcagacgccggcgccgacgtgcggtccacaggggggcctgaggaaaaactgccgagcccggtggaaaacccgagctcggaggggcggagccgttggaaggaggggcggaggacgcggaggcggagaatagagcgcgggggcagaccggaaaaggagctgaagaaatgagggagaggagcggccggaataatgggaagaggaaacaggcaaccccgagtggccgggtagccggagaagggccccgccgggcgtgggcagaagccagctaaggggcagcggcacctgtggtagagttgcgggggtttctttccgagcgcgacggtcaggcaaggctaacgcggctggcagtatggccggagatggcgggtggcgagccaagccgccgcctgctcgcctccctcactcacttgcagactgtcgggcgccgacacacacgcaatgaggtcgtcaaagctggtggtccctacggtaacaaacacgcacttcatggcgcgggttcctcaagccctgatcgcaagggccggatatgacgcaactgaggccacgcacgttgcagtgactgccttctgtgagggaggcggaaatccgtaatggccgccagggggcggcggggccccgggctgtgtcaccggttgggtggggcaaaagactattggtggcctaggtaccagccactgttctaagccctttatgtgtaggagccagctcttgagacccctcactataagggaatggggaattgccaaatgtaattaactttttcaaaactgatgggtaaaaaaaaaaaacatcataccctaagcattgagttggtgtcgttgcgtgggtaccacaatcttttaatgacagacaagtttgagatttttttgtttgctgccaggttttgtcaagatacatttgagagatggttttacttcgagttggctaaggggatatgaaaaataaaagtgccttaccaggcacagtggctgtaatcccaagctactgggaagaatcacttgagcccaggagttaagactagcctgggcaacatagcaaaacccttgtctctaaaaatattattttttaggccaggtgccatcgctcaagtatgtaatcccagcactttgggaggccaaggcaggtatattattgaggtcagaagttccagaccagcctgggcaacatggtgaaatcctgtctctcctaaaaatacaaaaattagccgggcgtggtggcaggctcctgtaatcccagctactcaggagggtgaggcacgacaattgcttgagcccaggagacagaggtttcagtgagcccaagatcctgccattgcactccagcctgggtgacacagaatgagaccctgtctcaaacaaacaaaaaaaatttaattagccgggggtgggagcacccacctgtgttcctagctagtcagaaggctgaggctgcagtgagccatgatcacaccactgcactgcagcctggacgacagtgagaccccgtctcgaaaaaataaaaaaactaaaaataaaaggcatcttataaggtatggggtcttgctctgttgcccaggcttgattctaactcctgggctcaagcagtcctcctgtggcaggccacgtctcactaacggaggcctccataacaactgtttcagtactgagtggtgaagttaatattaaaagctaaaaaaagccagtgcccttatacaaaggctggaatgtaactaaagcccaccaagagttttgcctaggcctttcctgggccctaaagcatgacaaaataacaaaggaagtcttaacattacccatttaggattaaacaagttttattgtgggtctgaagaaactccccaggcctccacaaacaagtttgttgggagtccgaaggaactccccaaacctctgtgatttagcaggagacaagataagggtaatcacgccagcacctggactcatttagattttttttttttttttttgagacggagtctcgctctgtcacccaggctggagtgcagtgacacaatctcggctcactgcaagctctgccttccgggttcacgccattctcctgcctcagcctctcaagtagctgggaatacaggcacccaccaccacgcccggctaatttgttgtatttttagtagcgacggggtttcaccatgttagccaggatggtctcgaactcctgacctcatgatccacccaccttggcctcccaaagtgctgggattacaggcgtgagccaccgcaccttgccggacccatttagattaagtaaatttactgaggctccagaggaagatcttcaagattcagaccttatttatagattaaaagaagttaatcacttatgtctttagatgaatgcacacttacatgtagacatatagcttagaaggtatataagctctggaaaacatcgtgattttgagttggtttcgtgataatatccaggccttttccctgtaaacagttacagaaataaaaactctcttcctccacagtttatctgcatcttgttattaggtcacgagaaatagcagccccaccctcagtttggtccgagagcactcccgcctccgcctccacctcccaagtagct

SEQ ID NO: 1563139 - DNA, 4001 bp, Homo sapiens
cacaggattgtttaaaaaagtaaagttaatatacacaaagcattcagagcagtgccaaaggctctgttacctcctaggagatacatttttaatcacgaatctgttggtaatgtctatttctaaagacttttctctcctcaaactagactttaaaaaaaaaaaagaaaggaaaaaacgaaacacctttcttcacaacagtcaaaactgcattgctccccaaaagcagttcttctgaatgcactagaagtctaattaactagaccatcagggcggtcctctgaagaggaaacaatttacacagtatgtagctgttattatttttgactggattcatttcactcacattcaacagaaatgtaaacaatcttacaattccaatttctccatgaccaatccaaccaatcagcaggcagaacactcctttagatctaagcccaagtactaatgtcaagttgacaatttattacacttccccgggtaaattattttgctcctctgtgtttagggttttttattgtaaaggtggactacagtggttaatttcccattcttctctcaccccaaaatactaagttctctccagtaaagttctcaattgtcatattcaaataagttgtgtattcaaaaagggctacagtgagttcagctagcgattttattttacctcgaaaaggttcaagtgtcagttccttattggagggagagcatcaggataaaaagctaatggatgctgggcttaatacctaggtgatgcatggcacacgtttacctttgtaacaagcccgcacatcctgcacatgtacccccagaataccccagaacttaaaaaaaattaaaattaaaagacccaaccctgagattcttaggcacctttacctgcgtgactaataacaagatctgctttctgaatgtcttctttcaaggaatccttgtacctgtaaacatccagagtaaacgactcagtactgaagggttcaggtaccaccgttcctctaccaatttgcaggataagtcggttgtaaccaaggctctcgattttctgaaagaggaaatcagaatgtgagggccttttaaactggctatgtaaaacagagcaggaaccaccaccactactaaagtttgacgttaacatcggagcacggccgccaaaaagcctatctgtggccgatttcacttagttttcaaaactattttctggtccggggcccgacgaggaacctcccaagcactcatgaatctaagcgacccagctcgcagagtcccgcgaaagccacagcaggaaaagactttggaaaaggagtcgcaaactcggggggaacccaggcactacccgttctgcctcacttgatcaactgcgagaaccgggagccctgaggggacgacgcgcgctgaggagaggaaccgcgcgggctccggccaagtgctgaggggaaggagccgggctctgaggcgagctcggctggctcagacgccggcgccgacgtgcggtccacaggggggcctgaggaaaaactgccgagcccggtggaaaacccgagctcggaggggcggagccgttggaaggaggggcggaggacgcggaggcggagaatagagcgcgggggcagaccggaaaaggagctgaagaaatgagggagaggagcggccggaataatgggaagaggaaacaggcaaccccgagtggccgggtagccggagaagggccccgccgggcgtgggcagaagccagctaaggggcagcggcacctgtggtagagttgcgggggtttctttccgagcgcgacggtcaggcaaggctaacgcggctggcagtatggccggagatggcgggtggcgagccaagccgccgcctgctcgcctccctcactcacttgcagactgtcgggcgccgacacacacgcaatgaggtcgtcaaagctggtggtccctacggtaacaaacacgcacttcatggcgcgggttcctcaagccctgatcgcaagggccggatatgacgcaactgaggccacgcacgttgcagtgactgccttctgtgagggaggcggaaatccgtaatggccgccagggggcggcggggccccgggctgtgtcaccggttgggtggggcaaaagactattggtggcctaggtaccagccactgttctaagccctttatgtgtaggagccagctcttgagacccctcactataagggaatggggaattgccaaatgtaattaactttttcaaaactgatgggtaaaaaaaaaaaacatcataccctaagcattgagttggtgtcgttgcgtgggtaccacaatcttttaatgacagacaagtttgagatttttttgtttgctgccaggttttgtcaagatacatttgagagatggttttacttcgagttggctaaggggatatgaaaaataaaagtgccttaccaggcacagtggctgtaatcccaagctactgggaagaatcacttgagcccaggagttaagactagcctgggcaacatagcaaaacccttgtctctaaaaatattattttttaggccaggtgccatcgctcaagtatgtaatcccagcactttgggaggccaaggcaggtatattattgaggtcagaagttccagaccagcctgggcaacatggtgaaatcctgtctctcctaaaaatacaaaaattagccgggcgtggtggcaggctcctgtaatcccagctactcaggagggtgaggcacgacaattgcttgagcccaggagacagaggtttcagtgagcccaagatcctgccattgcactccagcctgggtgacacagaatgagaccctgtctcaaacaaacaaaaaaaatttaattagccgggggtgggagcacccacctgtgttcctagctagtcagaaggctgaggctgcagtgagccatgatcacaccactgcactgcagcctggacgacagtgagaccccgtctcgaaaaaataaaaaaactaaaaataaaaggcatcttataaggtatggggtcttgctctgttgcccaggcttgattctaactcctgggctcaagcagtcctcctgtggcaggccacgtctcactaacggaggcctccataacaactgtttcagtactgagtggtgaagttaatattaaaagctaaaaaaagccagtgcccttatacaaaggctggaatgtaactaaagcccaccaagagttttgcctaggcctttcctgggccctaaagcatgacaaaataacaaaggaagtcttaacattacccatttaggattaaacaagttttattgtgggtctgaagaaactccccaggcctccacaaacaagtttgttgggagtccgaaggaactccccaaacctctgtgatttagcaggagacaagataagggtaatcacgccagcacctggactcatttagattttttttttttttttttgagacggagtctcgctctgtcacccaggctggagtgcagtgacacaatctcggctcactgcaagctctgccttccgggttcacgccattctcctgcctcagcctctcaagtagctgggaatacaggcacccaccaccacgcccggctaatttgttgtatttttagtagcgacggggtttcaccatgttagccaggatggtctcgaactcctgacctcatgatccacccaccttggcctcccaaagtgctgggattacaggcgtgagccaccgcaccttgccggacccatttagattaagtaaatttactgaggctccagaggaagatcttcaagattcagaccttatttatagattaaaagaagttaatcacttatgtctttagatgaatgcacacttacatgtagacatatagcttagaaggtatataagctctggaaaacatcgtgattttgagttggtttcgtgataatatccaggccttttccctgtaaacagttacagaaataaaaactctcttcctccacagtttatctgcatcttgttattaggtcacgagaaatagcagccccacc

SEQ ID NO: 1563140 - DNA, 4001 bp, Homo sapiens
agttaacaacattaactccggaggggtgcagtggatcatgcctgtaatcctagcactttgagaggccgaggcaggtggattgcctgagctcaggagtttgagaccagcctgggcaacacggtgaaaccccgtctctactaaaatacaaagaaaaaaaaaattagccggggcgtggtagtgtgcacctgtaatctcagctactggggaggctgagacaggagaatcgcttgaacccgggaggtggaggttgcagtgagccgagatagcatcactgcattccagcctgggtgacagagtgaaactccgtcccagaaaaaaaaaaaaaaaaaaatagaaagaaaggaaaggaaaagaaaagaaaaaaagaacataaactccagcaccagattgttatctgtccaccacttcccggctggacaaattacttaaccactcttgtgtctcagtttcctcatgtgtaaaatggagatactaacagtacttagttcacaggattgtttaaaaaagtaaagttaatatacacaaagcattcagagcagtgccaaaggctctgttacctcctaggagatacatttttaatcacgaatctgttggtaatgtctatttctaaagacttttctctcctcaaactagactttaaaaaaaaaaaagaaaggaaaaaacgaaacacctttcttcacaacagtcaaaactgcattgctccccaaaagcagttcttctgaatgcactagaagtctaattaactagaccatcagggcggtcctctgaagaggaaacaatttacacagtatgtagctgttattatttttgactggattcatttcactcacattcaacagaaatgtaaacaatcttacaattccaatttctccatgaccaatccaaccaatcagcaggcagaacactcctttagatctaagcccaagtactaatgtcaagttgacaatttattacacttccccgggtaaattattttgctcctctgtgtttagggttttttattgtaaaggtggactacagtggttaatttcccattcttctctcaccccaaaatactaagttctctccagtaaagttctcaattgtcatattcaaataagttgtgtattcaaaaagggctacagtgagttcagctagcgattttattttacctcgaaaaggttcaagtgtcagttccttattggagggagagcatcaggataaaaagctaatggatgctgggcttaatacctaggtgatgcatggcacacgtttacctttgtaacaagcccgcacatcctgcacatgtacccccagaataccccagaacttaaaaaaaattaaaattaaaagacccaaccctgagattcttaggcacctttacctgcgtgactaataacaagatctgctttctgaatgtcttctttcaaggaatccttgtacctgtaaacatccagagtaaacgactcagtactgaagggttcaggtaccaccgttcctctaccaatttgcaggataagtcggttgtaaccaaggctctcgattttctgaaagaggaaatcagaatgtgagggccttttaaactggctatgtaaaacagagcaggaaccaccaccactactaaagtttgacgttaacatcggagcacggccgccaaaaagcctatctgtggccgatttcacttagttttcaaaactattttctggtccggggcccgacgaggaacctcccaagcactcatgaatctaagcgacccagctcgcagagtcccgcgaaagccacagcaggaaaagactttggaaaaggagtcgcaaactcggggggaacccaggcactacccgttctgcctcacttgatcaactgcgagaaccgggagccctgaggggacgacgcgcgctgaggagaggaaccgcgcgggctccggccaagtgctgaggggaaggagccgggctctgaggcgagctcggctggctcagacgccggcgccgacgtgcggtccacaggggggcctgaggaaaaactgccgagcccggtggaaaacccgagctcggaggggcggagccgttggaaggaggggcggaggacgcggaggcggagaatagagcgcgggggcagaccggaaaaggagctgaagaaatgagggagaggagcggccggaataatgggaagaggaaacaggcaaccccgagtggccgggtagccggagaagggccccgccgggcgtgggcagaagccagctaaggggcagcggcacctgtggtagagttgcgggggtttctttccgagcgcgacggtcaggcaaggctaacgcggctggcagtatggccggagatggcgggtggcgagccaagccgccgcctgctcgcctccctcactcacttgcagactgtcgggcgccgacacacacgcaatgaggtcgtcaaagctggtggtccctacggtaacaaacacgcacttcatggcgcgggttcctcaagccctgatcgcaagggccggatatgacgcaactgaggccacgcacgttgcagtgactgccttctgtgagggaggcggaaatccgtaatggccgccagggggcggcggggccccgggctgtgtcaccggttgggtggggcaaaagactattggtggcctaggtaccagccactgttctaagccctttatgtgtaggagccagctcttgagacccctcactataagggaatggggaattgccaaatgtaattaactttttcaaaactgatgggtaaaaaaaaaaaacatcataccctaagcattgagttggtgtcgttgcgtgggtaccacaatcttttaatgacagacaagtttgagatttttttgtttgctgccaggttttgtcaagatacatttgagagatggttttacttcgagttggctaaggggatatgaaaaataaaagtgccttaccaggcacagtggctgtaatcccaagctactgggaagaatcacttgagcccaggagttaagactagcctgggcaacatagcaaaacccttgtctctaaaaatattattttttaggccaggtgccatcgctcaagtatgtaatcccagcactttgggaggccaaggcaggtatattattgaggtcagaagttccagaccagcctgggcaacatggtgaaatcctgtctctcctaaaaatacaaaaattagccgggcgtggtggcaggctcctgtaatcccagctactcaggagggtgaggcacgacaattgcttgagcccaggagacagaggtttcagtgagcccaagatcctgccattgcactccagcctgggtgacacagaatgagaccctgtctcaaacaaacaaaaaaaatttaattagccgggggtgggagcacccacctgtgttcctagctagtcagaaggctgaggctgcagtgagccatgatcacaccactgcactgcagcctggacgacagtgagaccccgtctcgaaaaaataaaaaaactaaaaataaaaggcatcttataaggtatggggtcttgctctgttgcccaggcttgattctaactcctgggctcaagcagtcctcctgtggcaggccacgtctcactaacggaggcctccataacaactgtttcagtactgagtggtgaagttaatattaaaagctaaaaaaagccagtgcccttatacaaaggctggaatgtaactaaagcccaccaagagttttgcctaggcctttcctgggccctaaagcatgacaaaataacaaaggaagtcttaacattacccatttaggattaaacaagttttattgtgggtctgaagaaactccccaggcctccacaaacaagtttgttgggagtccgaaggaactccccaaacctctgtgatttagcaggagacaagataagggtaatcacgccagcacctggactcatttagattttttttttttttttttgagacggagtctcgctctgtcacccaggctggagtgcagtgacacaatctcggctcactgcaagctctgccttccgggttcacgcca

SEQ ID NO: 1563141 - DNA, 4001 bp, Homo sapiens
cgggcaaccacaaaaaagtcacgtactcatcagatgtacccaaaggggtggggcctctgagaacaggaatgtggctcaaaaagtggattcctaacacaaaaatcttaccccctgaggggtaagagcagcaatatgtggagggcaggaagagatttggaatcttgagaggaattgggttttagacaaaactggcatctctgtaatatttgtccaaagctggttaagcactttctctggagacctttcaagggtcccttccaaaagcttcctccatctagagatgggtggtgatatttacaagctaacagttccaacagaatctcctggggtgcttataaaaatgcagagtcctgggccccgccccagctgtaccaaatcagaatttttggtagcggcatttgagaatatacctttttaaaacaagctcctgaagtgtttcttcaacccagagacatatgaagacatctgatctcatactgttttaaaccctaatttcaccaactatgagcagatttttatgtccaagtttgtgaaattggacactgacttatgcaaggggtgttttactcacaggcatggcaaaagctgctcccaggaggcaggcaaataaaatccaggtccccatttcttgatggttctgaaatgtaagtcaacatccacttttcttatctcttctgaaacatggatgtaatgaatgctccataaaacacacataatctacattagtctattgctagtaagaaggatggagccattgtttgtgaatttacttcagtcatatgtgatttccagctctcagcctatttcattgtttctggagtcacagtagtgataaagatgcatttaatttaggttgagggctaaacaagttacagggacatgaatgatctatcttcatatgactttgcatgccattttcctatgcctatacagcccttagtcatagaagctaaattgtatttataattaatgattaaaggaataaagttggctctaaaggttgggaagatcatcaaagtgcacagtattttataattttagaacaaggaggcacagaaatgtctcgtgcacagtctacctggacattgctactgttaaaaacaaggactaatcatttgagaaaatatattaatttgccaagatagattttagttccagaaattcctatctacagaacttcaggcaagaccctccagtaacatctctgagctccagattgtggagcaaaagatgtggctgaaccaacaggagaggatggtacgaattttatgtgattcttcaatgaattttgaatactttctccctaagaggtttcattttctttcaatggaatcttcattttgtttgatgttgcactgtaattattctataaataagacccttgggacattaagcaaaacaggtcctcctaaaatgtgcacattgatttgtggcacaaattactgggaaaactgtcagaagaaagaccttaaattttgtataagaagtgaatattacatgtgataatgctgtctatgaaaagtacactaaagttttctaactcctaaatttgttttttgtttgtttgtttgtttgggttaatgagaaaaaacacttcatggatggttctattttatgtaattaaataaaaagcttttcaaagtagtagatcacagcctgtgaatgtattatttttactttaatcgataattaattaaaataaatattttactgtgaaatgtggccaagaaagacctttggaattagacaagcactttgttgcattataaagttaaaaatcatttcagtaatcagagtctaatttaattatgggccaactaaaaagtaactattgatggcatatagtattagaaatgtagaatacatttatatcttttaaaagaaatgcagagaaagaaataagcacaataaaaaggatatcaaattataaataaaatccacatacctttgaatgtattcagtgcaagtttctgtttgaaactcagggatgcttgatcctttagatttcttccaactataagctcaatttatatcattcatggcatctgtaacaaccaatccagtttctaaaggaaaaatgtgttgagtataactaaaaatccctgtatcatgattttttagaagctatgatcagacataaggctgtatgttgtgattagtgcatatggaatctttcattatgggcaataataggtttaacaggcaaagagtttcatcacgctattttgaagtcagcaaattagttgactgtacatgttgatatattcagatttatttttaaaaagcttctctgccatcgccttttcctcagttctagcaaacaacgttgttctttacaaaaatcaaggtaggtggttgagattctctagtgtaatctggatatcctccaggatttttccagccctttcagatcaggagaaattgattcaaattcccatttgggtaaaaccccaaagctctctctagtttctctctgaggaattataattttgggatcaccactgctctattatctgcttccattgaaggtattttttctctgttccccttggctactcctttatcacccctctggtgtccaccaaaacaggggacaaagccccttctcggccccatgctgaaacccatctaccgtaaaaacaatcaggaacttaaggttcttgcagtagcaaagcttttactgatgatctatactacaaggcaaggagtgcacaccagacagcacattttaaagtaaattttgttttttacaagcaaactcatgtcacaggggatgttgtcctttgcctcccatctcacagagcagcttggcctctcagtatggcggcccttctttgcccatatccttctggcccaatcccactttctcatacaggcaaacccaaattcctctctatttttcagagtctcttaactgtctggctagctactttgtttccatgttctcagcagcctcccctttccctaagcaatgaccaaagctattcactttctaaaagaacctctgatcatctacctattaaattcatgtgtgttttacccctctaccttggtataacacatgggctttttctttcattctggaatttgattagattgatctaattgagcaaagttgtaattagtggcaggagctaactgacgagtcgtccatcaatattagatcaataaaggagatactgaatatctacccagatacagttgatgttatacttggatctctttgaatacacaagtaatacttataaagtttgtatatatacatatgtttatacgtatatatacaaattacttagcctgtctgagcctcaatttcctgatatgtagaatggaaataataacagaacctagctcagggaattcatgtgaaaagtagatgagtgacatctctggggaaatggaagtctatttattactctccccaaccctgtcagctggcatacagtaaatgtttaaagaatgctaataaacaagattccaagatgatctttggggataaatcagtagggatgaatattgcaaagaaaggtaagaccttccaatcagggagagagagattgcaaagaaggaagtagaagattataacaggtaaaatgtatgcatgaaaagaaacatagaatatgattctaaaagccaaatgtccccaggatttggctttatttatgaatatatttattggtgaattttatagcagagacaagaaggattccctttgaaggaagttggaaaatggaccttaggaggattggcaggggtgtacagcaaggtggtaagggagaggaaggaaaatgtggatcacattttattcactttcaatctttttcccccattttatataattacatatattggagtgtctgaaaggattcaggatattttttttttctacaaagttgtgggtaatctctactaatgaagtcaatgatgaattactagtagccttgtagttttagaaagattgatcttatactttttctcaccttctaagaatgagaggatga

SEQ ID NO: 1563142 - DNA, 4001 bp, Homo sapiens
gggaagggagttacatagagcagatacattaggtgcctgctggcctgagacaaggcagagggcaggtccagccctgggctagagatgcccagctgcaagtagaggtttgtgttggggcctaatcaaggtgggaggaggtgactgtagtgtgatatctgtggtcctggctcctgtcataaaggtccagagctagccttcccccaagtgaggaatttactgggtctcgttgcccctcctcaaagtgcccaagctttgcctgggccctgcagcccacagggctctccacaccagaggttaatcaaaggtccaagagcttaccaagcccccagtggcttcctctgtcctattcctcaaaaaggcctagagagcccactgccagaggtgcaccatggtgcagtgactgtgcagtgggtggtgccgaatgaggggagccacactgggggagggggctctgctggaatcccggtggggcaggcagtccaacagtgcagtgccctctgccttgcccatgcccacgccgctgcagcaggcaggcagagccgcagaggaagatgtttgtgtgtggaacaaggctcgccttgaccccgcggcccttgccgaaagcagcctggccaaacggagaccagctctgcggggccagtccagctgccgcctaggcgcttgggctgtgacgcatgtagcgggcacagcccctcaccaccgggggagccaagcaaagtccagcgttcgggcggtcaccagtgtcagaagtgtctccagcagacaatgacaggggcctggcgggctgggtatgttaagtaactgcgaagttggagggtttggccacctcgctagctctcctgtacacagagatggtatgatacgttccgtactacaatgagggctccttcggcctctggcaaggaaatgccccccaaacaccgtgcctattgctatttttaaacgggaggctggagaggaaaacgcggccagtatcctccaagggaaaaggaggtgaggcgaggcgaggcgggagacaaagcggccttgcagctctaactcaaggactagcttgcgccgctgctctaacccaaggaccagcaagagcccggctgccagccagcctgcccgaccgcgggggcgggcgccagatgcgcccggaggcccaggaggaggggcgcggctagttggggccacaaggccaaggttctgaagggaagtgtgcgactgagctcagcccacaggcccaactgagctcctctggggagggggcagtctgtggatgtcccaatccacgccaaagccggtctccgtcgggcccaagccagcacgccagcttgagtccgcagaaaggagggagaggctggagatgcacaggggaggggaggggcggcagccaggcagccggagagaggggtgagcggtacccgcgttacacagctgttccagcaaatgtgctacaacaaagctgcagagctcctggcctacaaatgcatggcttggggtgctggctggcggcgcccttcccgggactgtgcggcagcacgtgcgggcccatccccgcccccccgaaagccgggaggcttggcccaggctagcctgccttcctacccgccctccccaacccccctccccccagccgtggtcgcttgtgcccaggggactcaaggccgctctgcctctccacccgacagtccgcaaagcgggttccaaaggagaggggcgagcgaccgggactccgacccgcctagtccttagtgccctcctccagtccgtaggagcagagcacgcgggaatgcacccgaccgcgggcaggcggaggctcctggctgtacgcaacgcttacccagcccggtcaggttcctagcccggttattgtccgctgagccgccctgggccgggctgcagcctcggctgccacggctgagagcgccgccaccgcagctgctgccgccgtcgccgcggctccagtcacctccagcactgactccccttccccaggctttgggtagctcccccataccccctcccccagtactccaaggccaccgggtggggcatctgcgtcctgattggcaggcatatggcccaatcgctatggtgggaaggcgtgccccggcccgcccactgttttccttggtgcgtttctctttaaatgcaaataagtgcaggcgtggtgttggcagggggcggagagggtgcggaaccactggctggggctccccactcccgcccccacgccgggctggtagtggcgtggctacaccgtggcctcaaggagccagtcctgcccggatggggctcgccggatcggtttcggttttcacgcactcccatttctgtggccgctgtgcattcgcggtactgtgccctggccgccaccaggacgtttattcctgagctagaggccggcggggagtaacgaggcagagaggttgaggaatctgggaagactgcagaaacctaagggccggcctatccttagtcgtagagacaaggccctgcggatcgcgccgccaggccacccagaggagggactcacctgccaggaaagctagctgcagcgcctgcgccctaacttcgtccgcctctctggcacaccagtgcccttagagaccatagaggccaacttccacccgttaccgacgggccctctgctgcccagagtggggaaagtccctccccacagttacccagcctgccggcgacaagggccaatttggaatccagagccccgggctccctttccaggattgctttcacttttcttctctgagatgatacctgtttccatagtttgaccctcacccaaatttcgcaccttctatggaatgtggagggaatccccaaggtctccagagtcccccttcccccatcctttgtgagcctggctttcggcaggcctttttccttgaaaagtctaaatattgagaggaaaatcttgtctgggcccaaaccggaggtcaggctgaggacaaagtgaggaggcctgtaccagccttgtctgctactgtgtgtgggatgtggcagggagcccggcgaacttgggtctctagcctaaggacattaagtggcatcagtggctgccagggccaggtgagctgaggcagcaaagaatctagttccaccactagttcaagaatatccagaaggcccagccctaaaactctgtgtgtgtctaaaaagggaggtgggtggattaaagctgaggatagagagaaggattagagaacaatgcgtgctatttttgcattgcaggagtgttctctgctgcttctgggtcctgacagtcttgaaaagatccagctgctgaactggtaagaggtggactgctgcctctgcatgtgtagagcacaggaactgacatggctgctagggatctgactctagctctacctcagacttgctggacaccttggccaattcatttttttctctgggccagggcatcaccccacctccacaaggagagggtaagcatcatcaggctcccttgatatctttgagatctgacagttcaactcatttttttctataatattccatgatcttccacggaatattatagaaaatatagatgttccatgaccttccatggcattctatacattgccaacaaaaatcaatattgaacatcagactcccatcctagtactgagtctaaataaacgatgaggagtagggagctgctgctggctcattatgcaacttttttcccatctggatggctggactataaaagtttccctggggctatgctttcctgctttgcaaagtcctgattctcatttgtgggcctgatttggaagtttattttcttttccagaatctccattatagacttcctccctacctcgtgcctctggtcactgccacttgctcacatttcactcagaaccttgattctttgaattagactaagattatgagaaggcagtttgcaaacctggggtccagggaaacaaagggccagagcagtctcagttgtggaagcagggagagaggaggtgtgcaaagtagtc

SEQ ID NO: 1563143 - DNA, 4001 bp, Homo sapiens
aaattaaagacatttaaagaatgaaagccaaagaaaacaaacagtacaaatgcacaatttccaggacactttattgtaatttccactttacatattaatttaatattttagtctaggcagaaatgtttatacttatacaacagtagtccaatcctctaatctcacaaaatgaaaaggagcagttttaaaagaacatcaattcaggtatttatgatatgggggacaaggggcacttgtcttagctggaaaaggggctgatgcctttcagtacgagtttcactgaaattttttctgtattatttttcttgttgatgctaagtactcaaataaaagcaattgcactttttctcattctgccctctcttggtctttacattctgtctagcatttaacgcaaaaagtcagtttacattcagtttacacattaaaaaaaaaaaaccatatgccccacctcccacacatccaaatggacagggattagaattaacctggcttttagctgtaacagtgctattttaaaatttttcaaccacacacttgaagggtaaaataatttaagatacaaaaccaaaggaaaccataacaattcctacacatttactatttaactgttctcaaatcatcaagtataacatggatttcttaaaaagtgaaatcgacacaaaagcgaatgcacgcttaatgtacaaactgaccgtggctctgtggggacagttctctttgaatgagctattatccagacggtggaatggaaaaaaaaaaaaaaaaggtcgcactcttcaaatgtgaggaagccggcagtgcgctcgctacacgagaaacacattttaatgggtgtatttggataaaaataagtagtaagggaaaaatgtgttttaagaaacctccccccttcccagggcacaagaaaacccagaggagaagatgggtaacctcacaagctccagagctaagttccatcactaacagaagttggatagttgctatttttcatcctgcaatgggatagtagttctccatgtgcaagatacgcggggcgggaatactggcggggctttcacttggggtaatggaaaccaaagtgaggagaggtcaacaccttgagtaacccagatctccaaaaccggggcagggtgaggggtggtgggggtggtgaaggagacaagtaaaggagtcaaaactcctcgaagtcatcgcaaagagaaagctaacacctctaggagccacggggccattccttgcagcagcaccctgctccaagtgtggggtgcctgcctcggagggcaaaaagcgcagggtgcccttagttcagttgagtagctccggggacccgggcagcgagagggcaggggcatccgccggccgggaggcggactcgcactttgcctcaactctgagccccatcccgagcgcaagggagagggcggcggagggcacggtactcactagggctcgttggtgaatcggggggtccggggctgctggtatccatacaggtgacagtagagcacatcgaagcaaaagcagcacatctctgctgacaccaccatcttccgggagcccggcgatgaggacgaggcggcggacgatgaggagggtgaggaagaggtggcggcggccggggtagaaagtagggtccccactccgcagctcggaggtggcgacagggcgatccccccgccgccgccgccgcagccctgggggggagagagggtacagccgctgccgctacctcctccggttagacctcccagcccgttgagccgcgtaccggcgcctcctagtcccagctccccagctcggcactggctctctccgctgcagtgggaggaggaggaggcgccaccaccgccacccgagccagaggggggcgaactggacagtttctgcttcttcaccccgcagcaacccgccgccatcttggaacagtctcccccacgcagcgtttccgacccataagtgaggcgagctggcggcgggggcgagcacgctgcggctcaggccgccgggggcgcgccagaggctggcggggcgcgcgcgcgccgctcccggccccgtctgcctagccacgcggctgccccgcgcgcgcccccgcctcggtgcgcgctcctcgctttcgcggctgggcgcctcgcgcctgtcccgcccgactcgtgcctcttctgagccgcagccccagccccagccccaatctcaatctctccggccggcagaggttggaagacaggaagccgattagaaaggaaggtgaaggaaacaagagtcagacagcggaaagtgggagcaaagggagaaggtgggcacgcccgggaaggaaggagggaaagggaaactagtgggggtaggggggaagaaaggagaaagtccgaagtaagcatccaggtcccaaagcacagctcagtaaccccccgccgcaagcagtattaatgacacttaagcccagttacgtggaacctgagccacccggcctcaaatacacgggtttctgaactgttggagtgtgagcgagcaggtgcccagagctccatacctgagaccgcccctgtaaagtgtgtacaaagcaatccaggaaatggccacgctgctgtctttttaattccagcctaagcacacaccagggtactctttcctttccttatggagaaatattcaagtccgactgaatctatgtatcttgtacttgttcccccaacttaccctccttgccccgtttaaacatttaaaagccaaaaataaagtcctaactaatacttcactggttcaaagatactaattgtgctttgggacttgcagtggtggacttttctggttttggtttttatttcttggcttgggtacaaagcaattaggaatattatctgtagtgctcagatcttagagataaatagggaaggtaatgtacttagtcacaaattgaaagattttgttcaagtatataattagctcttaatattcatttttaaaatttctcaattaaatgcttggatggatgaggagacatatgagtcagtccctttctgggtgcctaagtgcagcttaataataaaaataatgacaataatcaaatgttaaaattcgtagaaatgaacgtgatagaaatagaaagcgtaagttatttgcattgtatctacaccatgctaaaacatctagataaagtcaggtatctgcatatttaaaaactgcagattgatttttgtcaccttttttctacatgcgtgggatcttgcagatagctgggggctgttcattccactcagggaataaaaacaaaacaatttattcattcagtaatattgagcctctgcaccatactatgtgcacaacactatacttctgttgaaatccagggcgtactcaggaagtatgcctcccgctctaaaagagtttatgaattaagtcagatacatgcacataatcagataaatagctattatagtatgtattgaacactttttaggtctccaataccatacctcgtcctaccccataatccttcagaataagatactatctcgttttatcttcacaacaatgctctgaggttactcattaacagatgaggctattaaacctcagaagtaatttgcccaacatcacacacctagaaagtaacagagctaggattggaatgctggcatgtctgattccaaaaaccatgccattatactacattgcctctcactaacaatatatgataacaaggctaaggatggacaaaagatagtgacattacactccagcaggtggaaccgaggttaaacagaaataagaacttagtttttatggaaagattgagagacactgaaatatgttaccaaggaaagatgaaaaatctccttccaaaaagattttatgagatagatagatgaaaatctggaatggttagatgcagcctaaagacaaaagggatagtttaattggtcggtgatatgtaatttcatcctctcaaacttcatcactgttagaattaaccttaagtatgaaacaaataacaattcttt

SEQ ID NO: 1563144 - DNA, 4001 bp, Homo sapiens
gttggcattttaactgatgccaaagccctgagtcaaaagaattatatacttaaaaattttcaagcccttgggagcggatggagagattggaaaggccaatggaacattcttaatgctcctggaatgccacaaggtggacataaaattcaggcttctgccaagacaggacttggattatttttgttataatcagaatccgtaatctgcccccaccccagcactcagggctttgatcaaaagtcttccagacaatgaacctctatgatccaagtatcattttctcagagctccttagaaggaggagagctaagaaacttcatgaattaccaaggaccaagcaaacaggcggtagtgaagtcagaaacaaattcctcccgagactagttttgtcctatagcctgaaaacaaatccggtctccaccagacataaggtggaattcctgtcttgattttttttttagcactgatattaacatttttcttctcaaatcctcttcagaaccagcccttttagaacacaaattagaagctgtttattttgtcaatcagagaaactgaaggcagccagccttggccaaaggaacatcttatcctttgcctttgctaaggacaatgttccttctattgtgctctgtggaaataaaagggcaaaatatgcttgccttcttttattcttattcatggctgagggtcatatgaaagttcagagaagagcacagtttttagtatgggtcgtggcaggttttccagatggcttcctagccaagatatttctcccgctcacctccaaacaagttatgtacccctaagaatgatttggtctcagtgttaggggaagagggtaggtagcagggcctggctttgtcatcctgggctattttgaggggacttcagcagtccccgacagaaggacaagaggggctgattctccctttgtgagcagccattggagctgcttcagggactgacaagccggccagagacaatgtcctctctcaggaaagcagtaaaaacatcagaaatgctcctttcctggggagcccttagttattttggcctctctttccattaaaataggaaagcattgaaagggaccattcgtgggatagcgtggagcctccccattgtggcagcatttctaactgcgttgagaattaaccatattgctcttcctttttaccatggaggagtttctagatttttatttataccctaccgcttaaaacatctttcactgtttcagcaaattgcagcataaaagatggagaagccagcaggggctgtgctcacaataatagctgtggttgcatttaagacattcaaatgccaagggtgcacttctcccattaagtccaacataagaaatcaggtgtgcacaacattgatgaacagaagaccccaaaggacaggtggagtttctggtatgctgtggtgggggcggtggggtggtgagcttgggaaagaacgaacaggcattttcattttccaaactaagaagcagtttcgggcgaaggggagccgtggggatgtcagaaattcttctaacgccatggacctgcccacacctgagtcagataaagatgaccttccctaggccctgctttcctctccccctccccaaaagacagcatgagcatgagtaagccgggtacttacaggtgcagaagaatttggaacaggaaaatggagcttacaggctcccgaatgcctgccgagtcagttgcatcagattaggaagtgatgatcctaagaataagatgtttggaaaatcttgtcccccgaaagccccctgctttgtcttctcagcccacatccaaactcagaccacccccaggatgtctctcatcctgccagactgcctggtgcctccgtgccccttaccgtgagggtgctggcagccacactgcttctttgagcctgtggcccggcaaggtagtcaggctcatgggattaggttggcaggagcgactgtcctctaaacgattagcccagagaaagagagagagagagagcaagcaaacccgaaaacgggtccagggtagagagctccaggtccttagcatgttcctggcgtattccaaaagtggcatccacagcagagaaagtgtcccaaaatagctcaggctgccaatgccttgctgaaacctgagaaagaattgctgaatttaaagatctgggtcgctgtgggtgtgtgatcaaagtgcagatttgttggtaggaggaactcaagccatgagcttaggagtgacatgaggtcacttgggtcacggcctgccttcttgtttccaacttgctgaagttggtggcagtgtcagagagctcctctgtggtgaggcaggggtttggaaagaggtcctaaggatgctgttttcatgcccaggtctctgatgcgctaacaatatgaaatagcagtgccctgttttctgcatttcaaacaaaggaactgatactatgcaaaggtttctttaggttattgctccatgtctgatgaaattcccttttcagtagatttttcatttcttttggcctttggcataagtaaatgtcagcttcttaaaaatcaacagagaagagcaaacagtagggtctctgtgattttcttgggatttgagaaatcttccctccctagcttctaactggatcatgtctgtacattgctgcctgtggtcctggaaaggacgaggtccacccagacatgctgtctcatttttatatttgctgagatcttgggacactctcctttcatcaggtatgtcaaaaaccttaggattgtctgcagagagtgtggttcagtatgtggaaaggtcagcatatgtcattcttggactggccctggggtttaagaagaaaaagcccagaatttggtttccaattccagctctgcctgtcttttgctgtatgaatttgggcaagtcacttctcttctctggacctcagtttcctcttctgtaaactgaagacaataatcttcattctaattctaacccaaatgttgtaaagagtaactcagagagttgaaagaatgctataaagggcagggtttggcactctcagtaagtggtgacatttttcagttcttcaaaggtccctgattggtagccactacctgcatccacatgcctatggcgagcccaagacatcccacagtactaggcactatgagcttcatgtctaggagtctaaatagtttccactttcagttgtgggaattttggcaagtagctcaatgcttagtagctcagttttcccatctgtcaagtgggtatacaaactaataataatacaggtccacaatcccttatctgaaactgttggagctagacatgttttacagttcaaaatatttggattttagaaaagcaatgtggtagatataacatatatatcacaccttaatgagatccaagataatacccagtgatcaaactcactaatatttctaaatgggataaatgaatagcctcatgtcaattcaggcccagttttgccaccaaatgagcttgccacagaatttcagttttcagaagctttgggatatcagagaggcacataggaaattgtggacaatgaaggaagttaatacttatttcgtgcatgtaatgtaccaggcattgttctaagtatacattaactcatttaagtggcccaataagcctgtgaggtaagcagtattattattatcatccccatttcatagatgagaaaactgagattcagaagttaaatcacttgcccagggtcccaaagccagttaggagcaatgctgggattccaacccacacagttcagctcttatccaccttctctgcctaacccatggggttaaattgaggctttaaatgcctacagggactgagcaggtcgctgaaaaagtaaaggtggccttatgggtactgaggcaaactggtgagcacgtgcctcacctacagggagcaggttgttgagctctggctgattgttgctatattggaatttggatcgaagtctttctctctctctct

SEQ ID NO: 1563145 - DNA, 4001 bp, Homo sapiens
cactcaatgaacttcaagccagaaggttttttccaaaatgagcaagtagggtacaggagacaaagaggtagacatcaaaggacatcacagacctagtctgtgagccgcatataaatgaaggccagcctaggaccaagcacttcaaacctgatggtcacccatcattactcatggccatgaggcaggataccacacttaaatgccaccatcggtccccatggtttaaaccttttctcctgccctatatgtggaaatactactgatcagagacatggcccaaatactaacaacaggaacaatgaacagaatcatagaatcataaggtctagtgaatatagcagtgggacaatggacctctgaataattaagaagtatatataggaacaactaaatatataagacagaaatggtaatatttttccttctgtattttagcatctgaccaaaatttctatatgatgtgatgggaatttaactcagaggtttaaaaatgtgacaggcaactaataaattctctacaaaaaaaagatacaacagtccagatttcataaactgcaagcataaggcaagtaacattctgaacctacatacatacatagctcccccaccataacatctgggtgtttgtttagtccaaaagaataatggtaattctatggaaaaatggtaactgacaagaaatacacagatttgtttgcaaaaataaatgatgaaagcttcatggaggggaatatgtgcaagtgataggatgttccagactaattaaagtgcaaggtaatttgcttctacctctcaaggagggcttatgagaaacacagaccccttcaacatcctaggagagaggacagcaaatagctgctgaaaacaagacttttgctcctgttcgtccactaggcagttgaggccatgctcaacctacaaagctaagggattgttaatacagtgctaattatggctaaagaggatacaaattcgggttggcaggcaattcacgaagccagaggcctgtcatgcattgcagagtttgttatatcaaacacctgcccgttccttccctaagattcccaacacacagcagaagctggttggggatgaggtcaggaaatgacagaaacagaactctcttacctggctgctccatactcagggggatgctgatacctcatcagttgcccctctgttctccctggctggttcaggcgatgctcactatagaagtgccctggctcttggggcttgcacactacagattggggtggcatgcccttgaagggatattctggtggggggcctcggtgttccatgcccttcaggctatgctggttaggaagtggcccttgggccttgtagaattcactggaacttgtgggattcttgtagaggtcattgggttgtggtggggagaggggagcactggtaacaggtggatgggccttaactccactggtggccagtgacatctgcattagtcgttcactcaaggaacggacatgcccttgcttaaggtctctgagtccctcatcttggtgcatctttccaggattgagccgctgaactgatgggcgtccctcagtcctcatcttctggttggtgactccagtgacatagaaggcagctccaacactggcatgctgttggccccgaaagtactgggactggaccttggcttcttcataggtcgggagttcttcattattttgcattcgaggagacagctgcttctccatgatgaggttttctgactggatttcctgcccctggggttcttgtcgagcagcatgagccacaagctgttggtggtggtcttggggactcaacacatcactctgagggcccgggttcccactgccactggggaaaggagggccattccctgtggcttgctggtgtatggcaagcaggctgcgattctcactaggattgccatagcgaagctgctcttgtagcaaacgctgcaataccgtggtccctccacttggctgttcttcagaatttctcatctctattgctggtggtgccttgtgaagagagagagaaattgggcacctgggctgcccttgacctgggaaggggaaacaggaagcttaacacccagttgatggataaatcagtcctctaaagggaaagaaaatggatattggagggtgaggattcgattgcagaaacaaagtagagaattgactctaaaattaatagattgttggggattccaggccctagcactgatatgatgaagaacatggaggcataagagctctaggttttctctttcacttttagcatgagttaaatattcaatctggacttaactcctaagaatgcttgagaaacctggaacagtcaactagggtaatcaaagggggtaacttttcaaggtccatattcacaggcttcatctctctgtattctatttaaagcaaaaacccaaatcttatggctgtggaggtgggggcaggacagtggggaaagttaccccataacaggatttgtaaagcagctcagcatatgaaggcagctacaaaatgcaaaataaagactcaaataaataaaaggtgaagagagcttggcttgcaccagacagtaatgatccctgcctcgatgcaaatctttttctctgatctcataaggctctgaaacatctttttaaaaaatcattttcatagtctccattttggatgctccttggcttaataagagaaggacttggaatacttattactgacaaagttgcctttcagctctccagaaacagtcatttagatttgctgttattgttattgggtagaagcttaaaggggaagcctcttttatttgaagtgtgcctctgacaaaatttagaaattgaaaaatataaagatcatccttctggaaagggtatacgattagcatatcccctccctcaccatcaattcttctgaacaggtactatgggttgactgaaactgattttagtaacacaatttaatattcaaattctaatcatactattggtttacagggtatacaactgattcctcttttcttgatgtctattttctcaacaaaaaatggctggtaggtgatttctctctctcagcactgtatagtacacactaattcattagagattcaaaaattctttgggcagaatctgtcaatgttaagtattggaattaagtaataatgttcaataatgaaactttcactctaaggatcttcagtaattggtggagaatgaacataatgtcacacgaaaagtcacaataaaggtcagtttaaccagcatcaggtttctagatggcaactctggatccctggctcccaggctcttatttctatgatattaagtggcctgcaatctctctggaaacacgaacccctttcttttggtcatgcagagagagagtgacccagaatgtacatatagtatatgaagaaagttcatcttctctctttcttcacgtcttgttggttactgctacctggcttccaactgttgcgctgggcagtctgacaacacgaagggaccctccaaagtccctctcatcatattctcttgggaagtgcacaccagtgggttaagcaacccagtcccttttccattcctcccaatgtgcctccaggactcctgtacttgaactgtcaaattgggatattctgataggctgacaagcataatatataaatcctttttggtgcccaaaactagagagatgactaccaaattacttttccctgctcacaaactggaaacaggaacaagtatggtgttaaagcaaaagtgatttacaaaccctccctgtaaggcagggaaatgcagacactgagctgccctggaccctgaaaagtataccaccccctcccacgtcacacccaccccacccagcatgcacacaggcacacatgcatacacacatgcacgagcgtgtgcacacacacacacacacacacagaaatattccatacctatttctgctttcttttaggcttaaagccttgatcaggatagggaattcttgctt

SEQ ID NO: 1563146 - DNA, 4001 bp, Homo sapiens
cacgaacttttccaaggaaagaagtaatttaaaatgaagtatgatgtagtgccagaaagtgtctgtcaatgacgccggataaacccatacagaatagttggaaccttagttatcatctgtaaatagaggcaactactctacaaccacctggctgttaaaatgtcccaggccagttataaaatgtagtttggtcaggccagcttttccctcccagctgatctgaaacaggatagcctttaaaattgtcgcccttctctaccttcctactttcctttcactcattaaaatcaaccaaagttattttaaaatgtatgttaataatgtgttcccaaataagcaatgggttaaggacatctcagtaataagtctttgaacaccatcacttacaggcttgacgcacttgtccaattgaagataggtgggagatggatgaaaatgtataccacatccaaaatggcatttcaaactattcttagctactaaatgagggtgctgaaaggtctaactgagaaggcttcacaaaggctggcctgagaaagaacttttcacaaagcctagctcaaggagacttaaatatccttagcccttcatcattgaagattatggtgactaattatcttcttctctgaatgggagaagagggttatattcataaaagttttaaactgcctcccaacgtccactcttcatggcggggagggaggagaacttcatgcactaaacatcccaggttgttgaaaagttcgttctaaaacatacactagagattgaaaatgctgtttctcaccaactttctctttccttgctcatttaattctacttagtccctttatgcaaattattatattattattagtggcaatctaccaggaactgctcacagtctattaaagactgttattttccctcccccttttctttctcttcattttcacaaacccatgaagcccatcttactgttgaagcaccaatgtgcagtggcccaggcttggaccctcaagacaccctcaagatcccccaaaactatttactaacatctttggatcttctaaagcagataggggcaactccctcctcaccaccactatcactaccaccacaagcactaccaccaccaccacacatctcaaagagtagccttgttttagattacacagactttaaaacttcaagaattcacggtcctacccctcctgctcccgcctcagggagtgtgagtccccaccccaagcctaagcacttagcagaaacctatctagttatctgagataagcactgacatgcatgctgggctaaatgtagatttcagcttccctcgggtctttagctcctcaatgtgattaattacctagagacccacaagaaccccaggaggtaaagaagtaaaagtaccatctagtagtggtacccactagcatctcctcaccgaagtaggacgggaaagcagcgcacactctaaccgatttaacttgctgcacatccaaaaaaactcatggcgagctgcaaagaaagtagaacacacgggcattcccacacgcgcctagatcgattcactcacgccgagggcacgaccaagttcatgccaccatggattcctgccccagttccccgcgaaaagtaaccacgcgtctcctacccctgaaggcaaagaagacaaggtgacgactctctgctcgctcaagtggcttcggtcccgggccagcggccagggatgggcaggggggaagccccaactcccggctgctcccctcctcgctgctccgtccgggctctccttggtggcagcggacaggcaggataccgggccagagggtggagcagcggatagccggaggcgagactgactggaggtggtggtagttgagggggaggcggagagaactaagagaagaggaggcgaaagagagcggagatggaggagtaattcagggggtctaccagtttaggcagccagaaagctcctcggaaggaaggggcgtgactgccaaggcagctcctgggcaaaggatgggaggtaggggagggggacgaacgggtggcttttcttcttgcggtgagcggctaggaccgccccggagcagggcggcgggaggggtggacgagggaggaaggcggagtagagggcggggaaagaagggcgggagcctgcctggaccctggaagtgaggagtgaggggagcgcggaagagaggcggggccggggggcgtggaagtttcaaacaattgaaccgcggggtccgggagctcgggcgaaagcaagggaccctcgctctcgccttcccactagaggggcacgactcggttgccgtagccgtgagagtctgcgcggggactggctgggaagaaggaaagggttttgcaaaagactacaataataatctgcggcaacagcgcggcatagacgcgtgggagagccagtgcagctccccgccccactgcgggaggaagaaaaacaaataatagaaatgctgaaaagcagcttccaccaaagcctgcttaaaataatgcaggaaggagaagcgctccttcgttttccttcccctcttgcttcctattaccagcaggcccccacccaggtcacagctctgcgagacaccctcctttcttcctccgctcccccgccccgggcgcttgcccccctcccgttggcgggccgcagaagctgaggggcgagggaggaggggtcgcgggcggcgctccgcggaggctccgcccctgggcgggctgggagcgccggcctgggcggagcgcgtccctgaagcgtaagtcccgcccaccattcttttgcagctaccggttggcccagcctggcctagtatacgcttgcgattgggccctggagtcgccagtctgatccctttgtcccacccgccctcaaaattaataaaactaaacaagaggctattgtgtagttctatgttctaccccagctactgctggcaagagaaagatgagacgctttatttctcagtctcataaaagagtgcaacagtgtgtcggccgactctggtacgcctttatgtttatggcactgtccagctttctgcgaataggtaacttttcttcccccttagtttattaaatcaggaggggggaaagtacatgaagtgtcattgtggtgttctgctgactgtgaaaaaagctgacattggttaaaaacgagagggttgagaacagcatcctgggacacggaaaatctaccattttacatctagaaaaacgaaggcacaaagaaacagtgtcagggtagcaaaataacatggaatttggaaccaaaggaagaattcatttggggccctggcacttactagctaattgtatgacttctgttaagtggcttaacttctcagccttaatttttctacctgtaagtaaatgctgtaagacatgccctattaacttaaaggcactggtatgaaaataaaatgtgtgtgaaaactataaagcactccacacatgtatgtgttcctacttgtgtgtgaaacataatggagagtcttagatgtgttagaggatcaatattttgctcatctgttttaagcatttacatccaaggtcgtgtaggttttgtggctttattttaaaaagtcaactcttttcctacaattttgggggtggatatgaagttgactccctgcagttagaataataaattaccccttttctaagcagggtgggtgagatttcttttttaaagttctacaatttcatgacaacttaaagctattgtggttctggtactgaaagaggaaatcatgctgtgtatctccgaagtgaacttaagaaaacaaatatgaaggaacatttaccatggaaaccaccattctctacagatccatatttcctagaaaacatttcaagtaggaagcaagcctaaatgtaaacgccttgacagcgcaaggccattataatggctcatgccaatgaaagagtgacatccaattcaagcctgcctaatgggagccatctggggggccatggatcaaggcatgcaagaggaa

SEQ ID NO: 1563147 - DNA, 4001 bp, Homo sapiens
tctcctcagtttatgatggcatattttaagcaaaacagaatgatccaaaatattaactgaaaaatcccataaatacaaattttcattaataaaaaagtatgttttcatctgacttttaaagcattccaacttaaatatgtacaaaatctagaactgagttaatgtattatgaaaaagaaaacaaacgtttaaaaggccacaataagatttacacttattaaataagattcagcattgaaacattacatgaaatacttcatttaaaataaaaaatagtatctacagatggaatggatgctgaattctagtgtgttttatacttaaactaatttgtatgtatttatttgtgatctgcaaatgtgttgattagtctgcatgtttcatttttaacgccaagctttttgtaatccaattggtcatctcaactgcaaacagaagtattgtttctacaaaggtaatttaaaggcagaattcacataggtatccttttttcttttaatcactgttaagttcctttaacagcgttactgcaaataagattcaagcatgattctcaagattcaccacaccatcttgaatttgaacacggggaggggaaatttacagaaccaatgtagaataaaaatgggccctaaatttcggtaagaaattatcgtcgctttttgtaaccacccaaaaaggtatcaacaagatatctagaaatgtatgacgtggcaattcaactttagtaaagttaaaatggtcttattacctcacttaaaatgcgtcaggggaacaaaatataaggacattattaggtgataccaaagtgcctcccgtgcaagtcctgaagatagcggcattcgaagggggcaggaagtgaagcatcaactgggcatttactgcaaacccgttaccagaacttggaaaagaatggacctcgtattcctagatcttggtgaccagaaagggtgagggtttgcctgcgaagagtatgggctcaaggctgtctggagcagggtcctgtatccgccctaccactttgcaggacgaaaaaacaatgtattctccttaaaataaattatgtcctaacatgggacgaaacccggttgcaaagcacgagtattccttccctcgtgttaaaaaccaacgctttgattttgccgcaaatcacagggcaccacaattcctcgagactggcattaaaaacaatgggctcagccgcggcgcgggctcggggccagcgttcctcgggtccggccgtcgccggtgcctcccccccactcccgtggccacactccatcactgaccaagcccgggagaggtgacaggcaaggagcggagcagacaatggcatccgccgccgcgcagggggcgccaagagtcctcggccgccaccgcccccggcccctcccgaaagcgccccgcaaaacttgaggcgattcccgaaccacaggtgccgcgaggctgtcgcggagcccgggactggcccccacatccccgggcgcggcgcggagtggtgcggagggcgcggacacggagagaagtgagttgcgggcgcggcgacccagtggcgggccgggcaggctcggggtggggtcgtcggggcgcgcgcggggtggcggggggcgcgcccagtcctccctccccctctcccccatccccggcgccccctttcgcccccagggacttacggcggccgcgggccgcgggcgcggcggagcttggccggcggcggcggcggcggcgaaggggaagcccctgtcgccgtgctgaggaagagaagccgtggtgctgtggggaggacacccggctggcatagggcaggcttaggcggagaggggagggcaagctgacagaccccgccccgggggccggacgagggaggagccggggctgcggcgagctgaggggcgggctaggcgacgcgcgggaagcggctcagcggtcgccagcggcaccggaggcagcgcgggtaaccgctgagtccaaggcagccgattggaggtttcttcgctgaggggaggtgcgaaccggaagccgggccacgtgacccggaagcggcgtttgccgggcccgagcgcccgcgcgcccgcgcgctcttgcaggtgcctccgggacgcgcgcgggcggctgtcctgcttgtttaatgataggaggacgggattctgcagcgtccttagcctagcgggtggtgcggggcagggaagttccggacagcgaagagccacgttcgagctctaatgattctctgtgtccccagagaggaagtgtgaagtgtgacggctgacgaggagggtgggaggagacgagggagtgctgcaactctggaaaaacaagtcagctcttctgtggagctcgtcacgcattcacgggccttttgctatcattctgcctcaaaattgtccggaatccgccctctccttcccattgcactgctccagccctagcccagacaccttccgccccgagcttcgcgggagtctgttccctgggctcgcctcgcccatcctcggtgctgcggactggatgagttaccgtccgttcggctgaaaagcccggacagcacctcaccttcgagatcccgcttccttcacactgggtcgccccaccagccgcctgggttccagtttagcactgccgacgacttgctgtgcctggcatgtccttgctcccaaatgtcacatctatgaagcctcaccctaaaaccctgtaagagcgattccctctttcacccacatgcccgttagcctttatttagcacaccttaaattgtattcattttgcatctcaatctagttcacagcctggtatataacaactaataaatgtgagttgactgataaagactataaaatgataaatttgttaagagctgtaatgctgagcgtaatgcctgggcataatggatgttcataattttctgaatgatagaatggatgaatcatctagtcatttacagataaggaaaggggagtcccacgggattaggtgaccttccttgaagagccacgggtttcccatatcgaaatgctattcattacccgagtcacctaggttcttacaaaggaagcgagaaaattgcttttgttgggccatgccccttttgcagaggttcctaagtatagtcgccagaatttttttaatggcctaaagtaaaaaaagaaatgctaaaattttcacgaagctaaatgtaatcaatgtaaaggaatcctttattagggattatattctttttgtgtacattatagtatctatgaaactaagacagtagttttgggggcttttaaaaaatgcttttgtatgacaaaacaaaaagaaatgtgtaatacttccccttttcaagcactactgtgctgcttggaaagtttcctactaacatgtatgattaatgtatactggaatattaaagaaaggggacgacacacggcacagagctggctttctgtagttctttaggtccccctcgcccccaccagatttctccctacctagtcatgccccaaaggtgctttcgaatgtcccatttctctcttactacaagaaacagatgccattaaccagttaaaagatagctctaatgctacacaatgaaaactcgccctctgaatccaaatgctgcttttctctttttctgtacaaaacacttatatcctgaaggttcctgagatagccacttccaagtttaaactctgattatgctcctaatgttgctctgaaaatgaggacgggagacttgctgatgacatactggcagtctcctttcctgctcctagccaaaaaaaggtgggggtaggggtagggaggggaaggaattgtgggaaaaataattagcagctgaaagcagctattacataatcttggctgcttattaatttagcagaaggaatggcttattaaattctaatagcaacagcacaactgcaaacaacctagcaattaacagtgcagggcccattattttgttaatatgttctcttcttttggcaagtgtatgagaacaaaatttatagaagcagatg

SEQ ID NO: 1563148 - DNA, 4001 bp, Homo sapiens
gtggcaaacaggccactcaggccttcttcagcagccactggggtagcattgtccttacagaaggtggctacacctgggaacagacagggcactctgagcagacctggcagtcaatagcctgttgcacagcctgtcccactccaattgtccccacacaagtcatctaagtcatcttcataaagtgtggttcttgggcaaccttattcaaaccctggagtctcagttcctacatctaaaaaagccacagaatgttctaagtgttttacattgatacatggtgagtgctcaagacgtattagcaattattattatcacatggattaattcatttaatccttgtaacagccccggaaggtaaacattatcctcattttctagctgaggaacctgaggcaccaagaggtaatgtaacttgccagagggtgcacagctaggaaatgagccatgattcaaacccaggctgtctggctccacagttcacacaattaagcaccacactactactgtacttctgaggtccagtaggataattctatccataaaaattatatttcatgtaatttactattatgcagctttagctctgtaaactaaatgtctaagatttcttattaccctctcatcaaatattggaaacccttttcccctatctgcctccctcactaatttaaagtccacagaaagccccatttaccagaatagccgctacggttgcggctgaagctgaaataggagttataaccctcaacgatagccaggggctctgtcagtgcatcccctggaaaaaaaaaatgtaagattaagtcagaggtaaaactagcatccgagaaacacaaaggcctggaattacagttgtaggctaattccttgcacacatcagagccagagttgggggtgacgggaatgaaatatccatgattagaggaggacctagaaagatgggaaatgtcagagaggaaattgatatcagaattagaaggcttggtggggggcggttagagactatgaagtggaggtggagaattaggtgggaaggggaaagaatcagagctaagcctgggggtctgaacgataggaggaagctggggatggggatggacatacgagaggatggtgggaatctgagctaagggtgagaggtaagagagagggaattaggggatctgaactgggggtggagggaaaaggaattaggggattctgaggggagataagagggtgaagaaataagaggacatctaagcttggggtgggaaatgaggtgggaattagggactttccgctgggaggagagatgggaatagataaggggtactggggttctgaggtggaaatgtgaaaaagaggaaattagactgagctggggtcaaagatggggtgggaattagaggatctgagcttggggcagggatgaagaattcgggggtttgacttggcggcggggagatggacagcgtatggaaggaggaaattcaggggactgagtttggggccggagaatgagtgggaatctgactagatatggggtttcgagaaggagctaaagtttgctgaagacaggagatggagtgcaattaggggatctagctagggtgggaaatggaagtttaagagggaagggacctgggtctaaggacaggactctaagaataggaaactgggaaagtaaaattacatgggacaggggacaaaagttagcgggaaagaaaaagtatgtagggatcctggaatccagagcgctcactggtcactttggtttcctggagacagacgatatccgcatccagctcgtccaaaatgcgccccacggccacggcggcacagttgctgggttcctgatttgccaccccttgcaggggtctccgaatcccattgatgttccagctcaccacgcgcaacatcttaaagggctggaacacctcccagcccgcgccaacctaggcgcgagcgaactgcttcctgttcagaagttggccaggcccgcctcccgcgcgcgtttgcgcaggcgttctcgtgcgtaccactaaagcgcctgacgcacgtcgggcgggggcttcaacttcctcagctctcattggcgggaggaggaactgggtggacgctgaaggaagcaaagcggaagcctaggggcaatgaatggcgagaggagtttccagttgggctcccgctccttccgctcggacagctgagtctcaatgcgtttttcctctactcagaagtccaagtggtgcgtccggttacttacaaacggcattttgccactttttaagcgacggaaccctgagcggaactgctcagctgccaaagccccgccctcagtgcggcggaccgcccacctaagttcacagatggctgcagcgcttgcgccccaggaatagctggcgctaagtgctcgcgttggactgggcaaagggaagttcatggttggaggagggagcagtaagagtcgctccactgagataagacttaggaggagggcctttggctttattggggcagaggggaggaggaggaggctgtctcaagcctgccctgtagcttttgtcttggctcttaacattctgaaggatgtagccggacacatccttactcttggttctgtttctcagataagtgaaatcgaagcccaggaaatgtaagctcgtgagcagcattgtctccggatgcatccatggctcttctgtatatgttatctcatttcattctcaagacaacccagttcgggacatggaggctaagttagagacgtcgaatgaattcatttcattctcacagttcactctctcttacactgaagtagtagagccaggattcacaccctgtcttaattagctcaataattacttttctgagtgtttttactgaccacacacctccccagttaagtcttttcctctggggccccacggcaccctatggtccattctgtcacagtacttataatacacagctatcattgacttctatttctgctgccattagaatgccagcaacttgagagcaatgaccatgtctggttcatcttgttagccccatcccctaatactggacacagcatatgttgggaagcaatagatatttgtcaggtgaatgaatgaacaaaggataatagcaagagcatcgacaggttcatggcttgtttttgagagcacaaaaattagaagtaatggatatgcccaatgtccagggaaaagcataacgatgcatctttaggttcctcacccagaattgcagcataattatttgttccccagaatttaagtcttagagccatcatcctcaatggttacagcaaagacgcagtaaactgcttttcctcctggaggacttaaaaggttaccagttgttgctatcagaaaatagctctgtgattaaaataaaaatttgcatgtcctgagcttcttcatgctttgggagttattgactcaggattgactcccatgagtgcgataactaggacaaaggaaatgaacatttttattgctcttgcttcatattgccagattgctttccagtaagggattatgcccatttacactgaagatcgatctgaaactcagcaccagcgaaatccagaacttgcctgtctccatggctggttttaatttccccattctgcagtggcttgttaatattagttctgacctttggggcaaggtgaacacatggttggactgaagagaaaaggcttctggtggctcaggaacgtctttggcaactacaacagctgatatttcaacagagcacatacatcccccacttaacaagggtacgtcctcagccttctcagggaaccaacgaacacctccaggcttcctctttgatgccacccactggacctgccttgggggtctgtaaatgcaagagaaccgagtgttggataattagcgatggaagaaaaaacctctagaataaaaggtaggtgagaaagaagggaaagtaggcaggagttgcacaaatccacatccattcttcaggccctctggaaagttttctttgca

SEQ ID NO: 1563149 - DNA, 4001 bp, Homo sapiens
atttgcctgtggtggtattgtgcaagtgtcatgccttgccaatgacaccagatggtaggctccctgaggataggctggtatggtgtatcattcgtatcttacattcgtatcttttgctccctctgttacctgcctgacaggagtttctgtggaaaaagcctacccacttcttactgtggtggtggctcacttcgtgttcaggtcttgaatagagaaatcaccggccagctacctggaggcaggaggtgccagccccaaccactgcacctttctgagaagccaggcagtgttcccagagccacagcagggccaaaaagcaagagcagagaaaggaggtggcctgcgatgagaggcaggcagagctggctgggcccctcggaggctcctgggctgcatgccatcctcctgttctggagggtttggaaccacttagggccctgtgcccttgccccaggaaactcactgccctgccttctccttctttctgctcccacctccctgtgactccagccatggtcctggcgttagtccacctggtcttggccttccccttgtgtggtgccaggcaggcagcaatgacagccagatcataggactgtggcagctggaggtgggagctggcagccccaggagacattgacacagaggacaggcagcctgggatggggctgctggggcgtggttggggaccaggctaggggcggacatgggcactagtgccaagtattggcaggtgagggcaaaaggactcccctttcctgagctgcagggaggggtcgggtcaggtgctgtgcttcctcctttggtgcctagcggcagggagactaaagtgaagcatgtccgtgcctgggacagaaaggaaggctggagccaggatgtaagagaaccaagtctctgggggtgggatggaggctatggggagggcatcctgtgcaggggaggagaccagccaggaccttggggttagggaggagaagaccagcccagcccggctgggcccggccctgcctgggggaggctgcctctgctcacacatgcaggccgaaaggagcaacagctgggctccatgccgccaccccctccgcgcactcctgcctatgcaacaagtgtcacgtctgcatgttggcacatcatccccggtttcccgcgcccctggactggcgggaggctcccagccttcagggaccagaagacgttcaacatgggagcccagcccactcgactctggtcagttccttccatcgatccacgagggagcgggcatgtcccccgcctccacctctaccacgcggggtgcagggcgtgggacacgcggcgcacacctgtggtcctgagctcctgggactgcgagcgacggttaggagggacaaggtgacgggcaggtgatgccaaaggccgagttgagccccgcaaaagaagcagtccttgtggccagccgccccatggctcggggcgctctgtcaatctgctgcctggcgctggccggcgcgtggctgctactgcacggctcgcgccgggctccccgggaggcggggagagtgcgaatagggcggagggaaaggagcacgccggctgcagcccgggcgagcgggagggcgcgcactcacctccacacaccgcggtcaaggagagccagagcagcaggagcgcctgcacgcagagccgcagattcatgctgctccttgggccgccgcggccccggcgagccggcgcgggggaggagaggtcgggcgcccggaggccaagaaaggcgcgagccgcggctggcgcgtgcgggcgcagagctcgggaggctccccggccgctgagtgtgcgcgctgagccccgccgctcccgctggccgcctccgctcttctgcagcctcctctcccgccgcggggcagcgccgcgaagctggcctcggcggctccgggagcggcagcggcgagctctttcttagcggctggctgctcggccgcggctgcaactgcccgtgaccccggctgccagagagaatgctccccgctcactccaggggctgcattttgtagcttgtggcttggccgcgagcccacttggtcatgtggtcatcgggagggctagagggggggcaggaagagggagagggagcgagcctcccgcaccgcccccctccaggcacgcactctgcagccccagcccgagcgtgagcgcgagagggaaccccgaggtggccccacaacaaaggctgcgcggcctctctgacaacctacaaccgctccccggacaatgcccgcctggccgggggccagagggtttgcagagacctgaaggatttcaaacacaggaagcatttggggcggtggaggggcacacttaaccctttctcaccttgcttccttaacagctgtcaggaaacctgggcgcttagggaaggactcagtctgggttgccttcactcacgccctctacctctgaccctggtccttgcccttgccgctggccagcttcaagggtttggtcaagacaaccaaacactggccctcctctctcctctgcattttcaactggctttgaattgggggtgactgcctaggcttgtgcccaaggcttgattaattgcccaggcccctcatgttccctgcatcccccaggaggcaccctctacctggaatgcccccaccccacccttccgtgagcaattcattctttgcagcagcacctcaaatcccatcgcatccagaagccttctcaggataacactaatccagcaggggccgcccatcagctcctccccactgttgggacatgggacagctcctatggtctaccctttcttgttccctggagctgtcctcattctagttccccatcaacgtaagaggcaggtggtttacccaactccacacagtcaaggctggattcattttgcgtgtacttgcgattccgctttagaagcgggtcctgaagttgtttgcctttccagactcgattgttagctgcttctatagcttgggagctcccaaggcatggggctgcttccctcattggactgggaaccccctaaggtaggatactgtcttctcactcttctggatctctccaaagtccccaatatcttgctctgcacataggtggcactcaacacatattaaaagactgaatcgaaaggtgtctccacctttcagcaagccaggcagtttgcttgaagtgttaagtccagatttacacaaaagatacattggacagggtgcgtgtgtgccataaaagacatgagagaccatggcatatttaaaatatctttgaaatgttgcaaaaatcctatatatacacaatgtatttattatcagtctctctccaccagaagggttacctccacaagggagggatctttgctttgttcacagctgtgtccccagacctagaacagtacctgcgacatgactggtactcaatacataattttgaatatataaatgaaattttcaaaaacatctttactgcctaaattcaggtagcaggaagggaataagataaggttctcattaatagcctatggcccattaaccacactcaagtaaaaaaaaaaagcatgtgaagcatggcacccctcttcatccttgagacccaggatatgagtagcagacatgggtagcaggagaccattctcccttcactgttcccctggaaagagtttgctttctttctcttttctttttctttttttcttttttctttctttcttcttttttttttttttttttttgagaccgagttttgctctgtcgctcaagctggagtgcaataccctatctcagctcactgcaacctccgcctcccaggttcaagcgattctcctgcctcagcctcctgagtagctgggattacaggcatgcgccaccatgcccgactaattttgtatttttagtagagacggggtttcaccaggttggtcaggctggtctcgaactcctgacctcagatgatccacccgcctcggcctcccaaagtgttgggattacaggcgttagccaccacgcctg

SEQ ID NO: 1563150 - DNA, 4001 bp, Homo sapiens
tgatttgttacagtaggaacttgtaaaatgaatggcccccagcgaagtgcaccaactcatatctatgaccttgtgtggttccccaccatatcaactctggacttggctacgtgacttgttttgacatcagcaaacatgatgctgtgtttgtgccttgggacttgccctcttggaagtcagtaaccaagtgaggaagtccaacctaggcacatggaggggcaccaagcccccagacatgggagtgaagccaactttcagtcaagtcaccagcagaactgcccagccaacccagattttgagaaacaattcttgttttaaggcactggtttgcagtgatttgttacccaacaatagataactgagacattacccatatgcgtaactaaaggaagtgctcaattccaattggagattgctaaaaatagttatgttttttccccatcaaagttcagggatcctctgaaatctatgtgcagatcctttgaggagctgagggccccaggttaggaacccctggttaagccaagtggatcctgctctcctttttactactttactacactgttggtacacatatagttaaactggccacagcatatctttccttgttgtaaccctgaaatggagctgagctcctagcacataacaggtgtttaacacacaaatttatcaaatgaatgttgattataggatctgtcttcctgactaaactgtgagctgcctgaaaacagagtaagagcaaatactaggccttttccaagtgctttacacataccaacttactccttataacaaccctatgaggtagatgttattaccccaacttcaccaaaggaagataggcacagtgacttgcccaaggtcacacagctagaaagtggcaatgccaggactagaaggcagaatgcatgttctgattttacagcctttattaacgtacccaaagcacattgcagagctcaataaaacttttaaatgaatagtacaattctgagatttcattagcactattttatgggtactatgcttcttgaagactcaattttgtagattaatttctggtagcctgtgattttttatgacaaaatacatataatttactttttaaaaagtagaataatggctttatgctaaagtgcagattttcgaaattaagtcttcatcgtaaaagtcgatttttttccaaaggacacgagttcacaaaacgcagggaagggggtccactggcccgtattaaataatgttccctgaggagtggagcaaagctccagcttccctcgtcacccagccatcccaccccagcctcccccataccctgcacagcttctcctaaaatgaccctcccccatccacacatcaggttctgaaacctgaccctgccaggcaactaaagccgcgaaccccacagtgccctgagctggcctcaccctacccacgatcccaagagggtactagccgaggggatgggtactttgggggaaggcactttaaattttcaaagtgtttaattcacgaaagcacaacccaaagggccgcccccacccacccgggggtctcccgcctccgcccggcagccgctcatccccagtagaccagtgaatgaaccgcggggccgggacgcagccggcccagtggcgggaaaagcctcggggtgagccaggcctggctgcagagaggccccaagagagcgcggggagggctcgggcggccgggagggggcggtgacagctgtgactcgactccacgctctcaccttgaacatgtcgctggcagcggaggctccggcagggtcaccccggcctcggccacgcccactatagagaggtgactacggaggcccggtagggccttgatttctccaaccgcaagcaggcagcggtgcgggtgacggccgtactgcaaactcggtgcggcgaaggtttagttcaatcacccggttctagaagccgcgtcgctgagccgcagcgcgtcgcgcccgggcagcgggtgaacgcaaaccccgccctccaggaggctccgcccctgcgccggcggttgctaggcggcaagaaagcgccggctctgtgtggacggtacgcggaggcgcgaggagggaggcgcctggcgttgccgcggcgctgggaaactgtctttgcagcggcgactgggcgcccagcggcgtgtactgggatttctgtgagcagaggctgccgagagggggcgcttggagggccaccggcggcttcgaaagcttcgcagccggaagccgccggttggcggcctggatttaccttacgaaaggttttaaccaaggacttgaggtttctcaggttttaaatttaaactaatatgctgtgtcctttaatcggaaaaggctctgaccttattttttcccgttaagaaacaagcggtaagcctcctctctggaaatcaaatgtttgtcccttaatacttgtagaagtaactgataatggcaataattatcttattaacaagagtaaacaagcactgatacagcactttgatatgcgcagccctgatctaagttctttattcacattcatctaatctttccaacaacggaagtaggtgggcatgattattattcccaatacatagatgaagaaactgaggcacgtagaagtaatttgtacaagaccacataggaagtgggaagctaggatccaaacccattagtctgcctttgaaacctgtgttctagccaaaacaattgttgcactgtctcataatgaggatgtatttcctatttcattctgtatttctgccctaatcctataaaaagtgtaagccccatccaggcgagcatctggaaaaatttagaatttgtacagtgacgtgccactgccctccagccaaagaccactaggggcacacctgtagttgaagaaattgggtttctcattgctgcaaggagaacgcacacgtaggaacacagtgacatatttcagtaaaagagttagatttattataggatttgggctttggttcggtgattttggggcgagttcaaggaagcaggagctttgctctggatcgggtgttgttaggaagcagtggtaacaccaaggcccagctgtgactgccagccttggtgttagttaagcccagcttagctcccagatgttaagggctgcttttctctttcttaagaggattgtatattccaaggcatccccaaggagaaatactgaatagactcagaaggctctctgcatcagcagtgtaacgtcacacatacataaaaatgtgaaacatattgataaattagggcagaagttcttaattcagggggtatgtgaacttgtatgggggaaaaaatgacaacttcattttcactaacctctaactgaactttgtttctttcaattatagtgtagataacaagccacagtagtattaacattgatgactttgtcatcaatggaaagcacagatattttcatgttacattgcagtcatgtcagggatcttgaaatatttatgctcgttactacaaaaatacagtagttattagagctcatttaatgcattaagaagacacatttactataattttgttttaaaaaatattttgatgatttcaatataattggagcaccttgtaatcctatgtattttatgttatgcgttttaaaaccaattcttagaagagatctgtccataggggtccatggcaccaaaagaaatgataaagagcccctggtttagtaacagagaccaagcagtgagtaagaatttgggagctgcatccaaattggagcattactgcatccaaactcgttgctttaaagaatagaaagttggaggtggaatcagaaatttagtgtataccctctcactttaccaaggagggaactgaaccactgagaggttaagtgacttgcccaaagtctcactgctatttggtgataaaactgggacaaaacgtttttagacaaacatgtaaaaactctccactgtgctaggcactgaggactctgtagttaacaagatgcctcctg

SEQ ID NO: 1563151 - DNA, 4001 bp, Homo sapiens
gccactgaccattccttctgtctctgcaccttctccatgaagcctctttttactctcttcaaaccaagtgtgagctctctccttttgagcgtcagagcactttgtacttctcttcaggtaagaaactccccttactctgaatcacagtcatttgtgttatatgtgttatatctccaccacttaatctcttctgtcctcattgcctggcactttattcatgtagaacatgttgactacctaatatacatcagacctgtgctaggtactacggatacaaaggttaatataattactgtcttcaaggagcttatagtttaggtagctagaacagacaagtaagtagtctatatgtgcagtggaataaatgcttggttaagagtgtgcccagagtcctctgggagcacaaacaagagttattaaaatagactggcgaggaccgggcgtggtggctcacgcctgtaatcccagtactttgggaggcccgggggggggggggggtgaatcacgaggtcaggagttcgagaccagcgtgaccaacatggtgaaaccccgtctctactaaaaaataaaaataaaaaaatttagccgggcatggttggcatgcgcctgtagtcccagctactcaggagactgaggcaggagaatcgcctgaacccgggaggtggaggttgcagtgagctgagatcgcgccactgcactcaagcctgggagacagagagagactccgtctcaaaaataaaaaataaaataaaataaaatagactggggagatcaaggacactattaaacaaggcatttttgtgttttgcatatggggaggctgtacacaaatagctgctgaatgaatgaatgaactataaatacaactagataagcatgggaaaaggcactttaggcccagagaaagagcacgtaaaaaagcatggcggggtcaagcaagcagctcagtatcgacaggaggagggttcctgagtgacaagagatgaggctggaaagtctaggtaaaatcagatgttctagacataagagtatggcctgaccccagaggggagatgatgacatgcccataaaattttttaaatgcggggggaggcaaaaatcaaatttgcattttggtagatgtactctggcaacacagaggaaaacagattacatgagagccaggcttgaggtggcaagttcaggtaggaggttgttcaaataactcagatgaagtatgagaaccagaactgtagacgctgccgacttaaaacttcagcggaactgaattattcatactgtatctcctgcaagcctaacagaatattttacaattaaaacccgctacgtaaatatctgtagactaccattattaaacactacttagggaactgcagcaagctgccagctgagtcactcactgtacacggactcccaagtaaaggcacctttcccaagcgtaaaactcgaaaggaacaggttattcgagcacagaaagcaacaacactatgtgtaaaccagcgcactgctgaaagactatgggacctctctatcctggtcagtttcaccccaaatgtttcaacaaagtccttccatagggtcatgtggccttgccctgtgcgccgagacaaatgccaagtttatatatatatttttctctttattgcagctgaagaccgaaacgtctactgcggctcgtcgcctggccagccattttcacccagccgtttcccagttttgtactgtgccactgtgtaaatcgacaaccacaggggattgagggagcagcgtcccaggctgataaaaccctaatggggaaaggcaggtgtcttgaggcttcaaacgataaagattgcaattatctcaaaacccacctccaccctgccccttgtttcagggctccttcagaagttagtaggatcccttttacagttaccgggatgctatcggcacccacagaaattaagcaagttggttttcgcttaccctgatggccgccatgtctacaaccctttcggccaaggttttcagacggagagcagagagggacaaatcagttcgactaggcttcccttaggacagccccaccccgttacgccccttgcctgccagttaccgccttttctccgccctcctccagccgccttggcaactgctgcggtttcggtcagctgtcttctggagaaactgttcacccctgtggttgaccctcccggtcccagataaagccttccagaacattatcaatagtccagttgggagttattttcctgggtgcagaacttttaattattttgtttcgggcatatgtgatatgtccagataaggacttaatacccaaatgtagctgctttaataattaattatatagtaagaaaaacaacttattacctctgcgaaacatgggtaagttcattcattctaaaactaagtcacggagagcatactctgtgccgggcagttgttcggggcatagacaaaacatagtggcttcctcacagagcttatgattacaggagtaaaagagacaaatgaggccggcgcggtggctcacgcctgtaatcctggcactttgggaggccgagacgggcggatcacgaggtcaggagatcgagaccatcctggctaacacggtgaaactccgtctctactaaaagtacaaaaaaaattagccgggcgtagtagcgggcgcctgcagtcccagctactcgggaggctgaggcaggagactggcgtgaacccgggaggcggagcttgcagtaagcggagatcgcgccactgcacttcagcctgggcgacagagcgagactccgtctcaaaaaaataaataaataaataaaaataaataataaattttaaaaaagagacaaatgctatgaaggaaaataaaacagtatgggaatgaggtgggagtttactggtttatatcaatgagagaaagactctgataagctcatttgataaaagtcctggaggaatttagagaagagggttgcatacggaaggaacagcaatgaaaaagtccagtgaggctggagcaataatttcagaggtagcgaagtaacacagtgtaggggctttcgtgccgccaaaataaatttggattttatgctgaataagatgggaaatcattggaggattttgagcaaaggtgtgatgtgatctaatttacatttttaaaggatgattttggtgctatcaggagaatatactaagggtatattgcaatattcacaacaggagcaaggtctgctgtaggcctccctgaaggattctgaggaaagaagatgctcataatatgcccattaacagtcccaatattaattcatgtattcattcattcaatcaacaaatatttattatgtgcaaactatatactaggcattagttgatacctatcacatttcatacccaaaacagatcctttttaacagaactgtcctgtaaatgacaaaattattttaagaaataatgatgaaatgaaactaataatactggctacaaaagaaacattgagtgactattttcttttattgaacttaatataaacatatacatacatatatatgccaatataaaaataaaatgcaaaataaatagtacagaaccaaaaaaggaaaaaaatggatcaaggtgttttaattgcattaatgtatttttcaaaggaaaaatacttatatctacatagtggtctgccacaggaatgaataataatattacagtttctgtttttgagccttaacctctgtgtatttgtcaataatttcatccaaatttaacatttctgcatattaaataaatggtatacctagatttgtcaagctaactttgttcataactgattgatgcacactttttattgattttaatatcagtcaggtttatttcacaataatcaacaggcaaataagaaaagtcttaaaattgtgaataagcttagaataaatttataacaatcttatttcccaaaaatttcaggaatttcaataacacccatgttttgttgttgtagttgttgttgt

SEQ ID NO: 1563152 - DNA, 4001 bp, Homo sapiens
ctagcagagaacctttgcattcggccaatggggcacaaggagtgggacgcacagcgggtggaactcccaaaagtggggcgtacatgcaatccccccgaagctgttcccctggactcagatgctccaacgcctccacacccaggcccatggacaccgacactgccttacacaactccttggcgttgtcagaaatggtcgaagtgccccctaagtaattgtccttggaggaagtgggagcccccgaggcctccctcgctctcccgctgctgctgccttcggatactgcttcctgctgctgttgctgaaggagttgcatggtgctggcctcgctcaggatgtctttaaggtcagcggagcagctgcttaagccggggaaagtggggcccagcagggacaacgtggatggggcagctgagtcatcctcgtccggaggtgctggcagctgctgcggcagccccttgctggcggccacggcggctccaggctctgggacgcaacctctctcggggtggcactccagggccgactgcggctgtgaaggttgctgttcctcatccaggaccaggtagcctgtggggcctctacgatgggcttggggagaaccatcctcaccctgctgctgctgctgctgcctggggctagtctcttgctgctgctgctgctgctgctgctgctgctgctgctgctgctgctgctgctgctgctgctgctgctgcagcagcagcaaactggcgccgggaggtgctgcgctcgcggcctctgggtgcctggggcccgggttctggatcacttcgcgcacgctctggaacagattctggaaagctcctcggtaggtcttggacggcggccgagggtagacccttcccagccctaactgcacttccatccttgagcttggctgaatcttccacctacttcccttaccccgcctccccttctcttgctcagaagagttcaacaggctgtgatgatgcggtagtcgctgcagctagctgcccacctgcgggaagctccagagaaggaaacttgcgggagcaaccacgcaaaaagcgctctgacagcctcaaagtctcgtgcagaagaagacacacggtggacaagatctgccctgctaggctcacagtctgtctcttaatacttgaagggtagattcaaaagatgcccagatcttaaaagaaaaaaacaaaatcctccaccttccaaattcagtgtccactgaagtaggtgcaaataagaactgagttattatctttttcttttatttcggcttttttgtttttgtttgttttgttttttggctactgaagacctgactgccttttcatcttttgatctctggctccgcactcggggtggggaaggcaggaggaggtggagagagagtgggggaaaacagagggttctctccgcgtgcagcctaaccaggcgggtcgtggctgcagtgctgaagccgctccccagtcgcctggctcctaagagccttctttgcaatgtgcagctagctcgcccgctcgcagccaaagggagttacctctctgcaaactcgggctggcagcgctgggccgacgggggcgggggggcgggtggggagaagggtggtgaggggggttggctgagagtagccgactgaggcagctgcgggagagaagacgggggagggggggaaggcagggtggggggaggcggggtggagaggaggaggacaaaggcagccgtcagtcctaccaggcactttccttgcttcctccgagtctttagcagcttttaaaaacttcaccgaagaggaaagggcagctccgggcggcggcttcgaagccgccgcgctgcaagaggcgttggctgtcgctggagccgggctggggctggcgtggtgcgtcccttcggctcctgtacagcactggagcggctagctcggccctttttccctctgtcgcctcctctgcctctgggcttgctccggaccgtcccgctctcccagcaagctggctccccgggatctcggagggggcgctgggaggtggagagcaaatgcaacagtttgcgagtcgggtcccgcccccaccgggccggcctccttgccttcccacctccttttccctcccctcccctttccttttctcccctcccctcaccgcgcgctaacgcctgcctagtggctttggagaaacaagtgctggcgcagcgtgggcgagggcaggagaggctagctctagccctggaggacccctgcttcctgaatagctcctgctttcctaaaccaaggtttaggcgccagggctccagatttcctggaggccagcactcaccaaatttggttccaaagcccaatctaaaaaaccaacagggtggaggcgagggagggaggaaaaggacgataggaatacctgctcctggctgccaggggttcttttcaggactgataagagcgcgcagatgggagagtgggagagtctcctacaaactgaggagcaagccatgaccaagccagcagatacttgctgaaaccttagattccgtcatagggatagatcgggcctcgtggcattgtgccatttgctctaggaaccctcagccccaagaatcagaggtcatttctaccctcttctctgcctttcttcctgtctggaattgcctttaaccatgcatttctcatccagactctcaaaggcaaaatcacccagacaagcaggtaaacacacaaacactaaaaacacttgccatgtacacataggcgctcaattttgtccagagctctgtaaacgtttgctttgtatgcagccgcttgcttttccaagttgccttcgcatattttaaactttacaactggaactatccaaggatagaacctatatagggctgcttttcgcctcttgatggacagccaggcgtagaggatgatgtgggttactgcaactgctcttttgtggaggaggtcccataagccctgtgtaaaggtggagatgcaagtgggaatggaaagagagagaaaatgtaaacgtaaacctataaggaaaacatctttcctttatgtcagtagagaccctgggcctccctatgttttaaattcctttgacttctgattctggggaggctctctgttccaaaagtcattccgagatttttgcctgggtctcttttgctttttgcagtcttctacagagaaaagatgggttgtagctttgttgtagctttatcttgtgcacagccaaacatcataggcatttacttaccttgaccaaagaaggtaactcaaacctaaaggcaaggaagactggatatgataggctctatttcacagatgaacaggctgaaacaaggacataatttgttctatgttccacattagtaaaacctaaactagtcttccagtccattgctatttgagctagactctagactcatcaatcgcattgtcatttgggaaatggctataaatgaaccttccagaacacaaaggcctgaagaccctttcacctgaggaggtgaaaaattatttcctgagattttaatggctacagccttccttgaatatacctcaccatatgtaagtagaatgcgtagatacttcaacctcatttgaatactcattgcaacatttaatcccaccacaactttcaactagcattgctcaataggaattgagtgggctggcaggatggtagaatggaattaacataggtctcagagccaggagaactatgtgtctacacactaacagtgaaggaaggtgcaaaaatcactgaatgaacaatggacaggagtgaagaggacacatagacacaaagaggcctgaaaaaaaattaaggtgagaaataatgctctgaagttactctgaataaaaagcagtctgacattcaaacctgggtctgaaagactccaaagtttatgttgcttccacatcaccaacattgtcttcacagtttccacatctgaaaactgttgccaatataagttaccctcagaaggctagtgtgtcatttaaaagacataatgtgtataga

SEQ ID NO: 1563153 - DNA, 4001 bp, Homo sapiens
gtccctaagacaccatctgtagtaacacttcaaaacaaaaacccaaacaaaaccagaaaagtaacaccttctaacccagtaattcttatcacaaataagaattatcacaataattcttatttgtgataagtctcatcacaataattcttatttgtgatgtcttatcagaaataagactttgcagtacaaataaatgctttctccaccatcaatatgctgagttttaaaaagaacatagttcttatgcagcccatatcttgcaaatttacttcactgacatcatgaaattaatatgaaaagatttatcatctaaccactcatttctcaaggattctctacacacaagtgtcctgttaataaagacacactgtgcataatttttaactgactcttttgacatcctacatgaataaattatgcacacctacgtaccaacacacttttaagtaccatagcagctggcaagtaaaaaaacgaaacgtgagttatttcacaaaataatctggtagattccttggagagcaggtgagctttttatgaacccggtgggtgcatatgcacagacgtagagccaacaacacagacacagacagaagccaatatacatagacagctacacagaaatatctggtcacagagaagcagaaagatacatggatgcgtacacatacaatgaaatgcacacacagggacaaacacagggacagccaacacaactgactgcaaacacagacagttctgcttctcaaagacagagttggatatgctcactcatacaaactaaaacatgcacaaaaaagataagaagccaattctagtggatatatacaaaaacataagccaaaaactgcaaaggcccagaactgcaagagagggatatacacccagagaaatacaaactaagataagtaggcagatacattagaacatatacacacagagacacatggagatggggacaataggggcatagaaaaagacatacctagaagcagtcacacaaagaatggctatgacataaactgaaatagtcaccccaaaacagtcttgcttagacacacaaattaagatgaaaacagacatagaaatccacacaccgacagaaataaacagctgtaatacagacacagtgatacagtggcctggagtgagagatatccacatagacagagacgtgcaaactcaggggaaaaaatacatgaaggcacagagacacaaagacagaactggtaaaaagagacagaggcacattgacttagcaagacactcgattacacagagatacgagcacaaaagaaaagacacgttcccactagcaaagcacacagggtaagacactgtttctggatctctgtgtgtcacaactgctcagaaatgaactcacaataacagacacacataccctggtacacaatcacatacaaacatcaaaccacaacacatgtgcagaaacccacagttgttccttgcacaaaggctgaaaactggaagacaccatgtatgctgcttactgtctctaggggtcttgcaggtaggccagtatgcatgaaaaaggcaatcttatcatagcgaattaagtgctttttgcattttaataataatgaattgctcaacccccaacccccccccacacacaaaatcccccacccacactatattctgccccaaattagtcaacatgctaagatattcaagcaagctagtctagatgcctaatagataatgtcatggctgcgtaatattaggtcacagtccaaaccttacaacactcactaccctagaaactgagttctaagttttcaattgaagaacctcccacctgtgaagccagagtatcatgggaaaaagtgacaggcaatgtcaggagcactctgcattcgtttccctggttccctgtacaaagtccggtacaaagccagcctccagcagcttcaggcaggcatttgcataggcaagaagatggaacagatgacctccgaggaatccctctctgctcgcagcacctactggagaagagagcaacttggcaaatcagagctgataaaacattctgcaatacacagtgggttgggaagaggagggacggcgcagataagcaaactaacataccctcctgatgccaattactgccttgttaattgccaagattcaaatgtgatttcaataagtacagtagtgtgaaaatattgcatatagagatcagaatccctctgactgccaggcctctgaaaaataaaaaccaaggggaggggctggtacatattcccactttaattggagttggtaccgcagaacccactgtccccagagtgcagtagaaagagtcaaaatcactgagatcaaagaacaccctagctagaaagggcatttagttctgacctgggagcagaagccctcgatttccaatctgaatgtgccagtaaagtgtttgtgcttgtgaacttggtctaattcccttccctgtctgggtttcagttgcccagtccatacgaaagggaactgacctctagaattctctctaaattatgactatttctgattctttggcataaacttgccctctttcaacccactgttttgaactcgtgtctagcgaagaagcacaattagtcctcagaaatggaaagaagagtaatgcttttcaccaagttgacaaatgcctgctatatacaaagaaggaaaatagacgcccagacacagacgtgcctacttgaaatgagcttctaatgttaagtttgaataaataagagggctttgtggtatgggagggagatttggaggggctactctgcctgccatctgctgacccctgaatgcataaccctcttttcacacttgctcaatgaagaagcatgccactgccctcagccccgttactacaattgctaagttgctggtacaagggaaaacccaccccttacaccacacatgcacaggcttttagaaaaaacaggagaagattttatccctgaagtataggatttagtttgtggtaatcaaaacggctacactttaaatctataagccctttctgaatttacaaattacttctagacttaatgtttcatctatataattagaatttatcttccaatctgctgataagggaactctgactcagaactgttgacttgcccaaaattatacagatagtaacccacaaagtctggacacaaaccctagtattttaagcgtaggtctgctgctctttcaagtactttagtcttcttcactcatggtcttattggtggacttcaacctctcctcctacctcagtccagctagagggaaagaaaaccctggcatgaactcagggctgaaaggaacccatgtctatctcccacttccatctctgcacggagactagggaaacaggaggaggtgtggcatttggctaaaggactctcggaaaggaagggaggaaagcctttcctcatcaccctccattactcttagtcctcagggaacattgtgggtaagtttatgaagctaaggaagtaaaaaagagatgacaagttgcctaggaaattcacatcccaaactcatttttcctgaattagctgtgactttgattttccatattacagttaaataaggcacttaagagcctggattaagactctgggtcccagtacccagaaaggctgtaaaaccttttcagaagattattaagaggacgctagagaagagttacgttgaagggaggcaagaggctttggctgatggagggtacatttaatggcctctatgaaaaataaagctgaagtggtgtggaatagtgaaaacagcagggaggccaggaaacaaacaaacaaaaaactgaacaatcaaaattcaagtcccaaactaccaagttactatactatgtgatcttgaacaagtcattcaagtctctgaaattcagtttcttacctataaagtggaactaataagagctacctaggatcaaagtaaagattaaacaagaaaacagagagacaacatctaacattgtacctgtc

SEQ ID NO: 1563154 - DNA, 4001 bp, Homo sapiens
catccacagcccctgccatttcgcttccatgactcaccaccgtgcgttgcttgttgggcaggtatactttgacggtgcccactgcccgggatggctcggccccattggcaggggggccccgtggtggctccatggagccttagattttgtcaagatgggctgaggtggggctgggcaggtgccatggggctcctacaagaaggcagacaagaattcagaggtccaataatgatagtctagaagcaaagtggcaggggacaaaataaaattcaaagtccaggctcctgtcgccccctgcagcctaattttcacacgacagtccaagagatcctgctcacatctgaagtccttccagttccttctctgctcaggccctcctgttgcttgtctcactcttgagtgccaaggtctcagcttcactgcacagggttgcgggggagagaacagggaagggggacagagcatactgtcttggagggtagaggagcacacaagactctgtgctggggaccaatggggaagtcagtacacactgcactgagccgtcaggtacataagaagcacgaacagaatgtcctgggttttttttttttttttttctgtttttttttttttctgacagagtttcgctcttgttgcccaggctggagtgcaatggcatggtctcagctcactgcaacctccacctcccaagttgaagccattctcccgcctcagcctcctgagtagctggaactacaggcgtgtgccaccacgcccggctaattttttgtatttttagtagagacggggtttcaccatgttggccaggctggtctcgaactcctgacctcagatgatccacccgcctcagcctcccaaagtgtcctggttttttaacagagaacgggggaaatgccagttactgtggtgagggaggagtcgcaggcacggtgatgggaaagagaggattatcagatactgcccttagtttggggaagatggaggttgcaccaaacatgtccttaaagggcactgtggacatccctaagccctggggtgtaatgttgatgttaggaccacagacaccgttgttaggtggctaatggaagtcccaagcctctatgatgaggaattcatggggggggggggtcactacatactatgcggaagggagatgtaacaggcgtcactagggactgtaatggggagaagggtggaaatggaaatgaccagacattgagccgaactggggaggtaatggtggaccaccagacattgtcatagcaaaaggagaaggaaggtatggtgttgcggggagaaaaatggaggtaaagagggagctccaaaattctccttgacaacctgtgaggggtcacaggcatattactggtctaaactgaatgagggatcatggaaggcggttacagaggcgagaatcctgacattctcccggcgggggcggtcagacactgatccagaataaggaaaccggggagtgaaccgcgtttccacacactccccgcagttggtaaggaaaggtcattggacaccttagcgggggttaagacggaatcccggcaccactcggtcgggtcccgcctaccaaagggcttccggctctgcgcaggcgcaccaccactagcagcgggcgaaaccatcacccgcagccttgcccgcctattcctgttacccaccccacccccgctgtcgacgatggtctcgccccgggtcaaaccactcctccggttccgggcagggaacgccggggcccaggcgcagccatcctggagctgagctttcggtccgggctccctgcccgtgcccggcagccgctccagaaaccgagccctcccgggcccgccctcacctgtcacgccgctacagccgccgccgtctccatcttgggcctctcttcttgtttcctcacagagtccgcctccgtcgcctctcggactctcgttattggctctgcgggactcagccttccacccttattgggtcagggtcacgtctgtcaaggcaagaccaacggaatgtgagtcgtgttccggattaggaggggccgcctgaaacgtcaagatctggggcaagcgctcgtcctgactcgcgcaggcgcagttgaggcaagacctgcgtgcctagggctttaaccccaacagtggcatagacgtataaagcagaacacaggtcatttggggctgaccttagggctttggcatctgggcggagaaatccttaagtaccctttttgggccagtgccctaagcacccttttatgattttcccgtgtctcagtttttaccatctttgaaatgggttggaatcagaaccaatgatcggcgatgttcaccagctctaggagactgtagttcatagcctttgaggacagcgggtctctggtgtggcgggggctgggggactgggcctaggaggggcggcctgctgtctgggaggcttcctttaggaatggggttgattaggactatgaaaaactagtcacaggtggccaggtgaagagggaagtgcggacctggaagggagcacgatgccagtcaatgtgtggaggtattgtggggtaaacacaaatttttaaagatcgaattttccctggtgtcaaaagagaaagacgtctctcttagagcatttcctttagaaaacttgtaactgtaaaattttctctgtccctttgagatgtatgtaagtccttttaaaagctaaatctcttgccagttttacatccccggaatgtttttcttaagagccttgtagccatctctttgaaatgtaaacatcaatgaaaatagcacccctgtctttccctgtcttcgtgggaatttgatctgcgtgcctggcttcaagttattacctgcttgtcatagagatatgagttttcgttttcctttggataaaggcaattaactaacacagatagccaccctaattaccaggtgaatttgggatgaagtatgtgtaccaaatggtgccgtcaagtttcttgagcacaagttattgtttgagaatatgtttgtaatgggctgtatctgcctgctacataaacggatgagatttctttctgtctttgaaacctctttagcagattgtttgtgatgtgcatcacagtctggtgtaatgcttattcagttataaaactttccattcctgccgggtgcggtgactgatgcctgtaatcccagcactttgggaggccaaggcgggcggatcacttgaggccaggagttcgagaccagcctggccaacatggcaaaaccccgtctttactaaaaatgcaaaaaaaaaaagtcagctgggcgcggtggcgcgcgcctgtaatcccagctacctagaatgctgaggcaggagaatcacttgaacccaggagacagagattgcagtgagctgagatcacgccacttgccacttgcactccagcctgggtgacagagtgaccctgtctcaataaaacaaaaaacaaaaaaaaacttttcattcttgtctactttgtggagaggattcattgggttggcacgagattctctttttaattatttccccaacaccatgaatggcctgttgtgtttcaagtgactgcattctcctgtttggagatttagcatcctttggcaatgtaatgggaaagatcagaggaaggtcataggtgagggggggcctcaacatatttcaatctgtatttatcacatggctttctctgtctataagaaggaagacagaagttctgcctactggcctcccatataatttccatttcccaactccccttttcttttcttttcttttctttcttttttttttttttttttttttttgagacagagccttgctctgtcacccaggctggagtacagtggcaagatcttggctcactgcaacctccgcctcctgggttcaagtgattctcctgcctcagcctcctgagtagctgggactacaggcgcccacgaccatgcctggctaatttttatatttttagtagagacgggatttcactatgttggccaggc

SEQ ID NO: 1563155 - DNA, 4001 bp, Homo sapiens
tcactggacatttataacttggagcatgttcaaagaaaagcagctagacatgggtaggggccttgaagctatgtcacatgttaaatagatgaagaaactggggaagtttggcctaggtaagaacagggtgagtaggggatgggacaatggggagagctgacactgtttcctaggaaggaggaccatggaagtcaatgccagggccagaaggtggaagttcccaggacatagatttgggttcagtttaaagaaaagccttctaattctaatagacattgctgtttttagatgggaatgggcttcctggtgtaatatggactccctcctatgtggttactcataaaggagccttcatgtccttgatctcattggagtcacatgacaaccttctagtccaagcaactgtgaaatgtttcccccaccccctttttcagggtatactgttagagcagtaaggccttaaaagacatcttataaaactcccttatatttttgattcaccaggatcatataaaccttaaaaatatgcaaaagaaaaaattaaactctgtgtgtatgcagatctttttccttctcagagatcttgttgctggcctgaggctgtacttgaactgcctaagcaagctgtagtctttcagcaggaggtcaaactcctgggatggttctcagcagggtgttggggctggcaagaactaaaaacaggtctctgctgaattaagttgctgaggcccctcctttccctgcttcccctcccccgcctgtgaagggacagaggaaagaggagacaaccccaggtttggtctatggctggtgcccaatgacgcactctcaccaatatagattttggaggtggagactatgaaaaaacaggtggctgtgggggcaggtggcagcctgaagggggtggggcttattatcaagggggagtgaaggacagtgtgggtgggggtcctggggtatgtcaaaaagaaaatatcagtctcctgaaactttaaggatgaaaatataatcagttgtcaaaatgtactttgtagaagcagttcccgaaaaggggtgaaatgtgacccacatatgccggtgctgtgatctttgcacacttgtgtcctcaattccacagaaatagggaaaccaagcattgatctcaagtacccaaggaaagaacccgactaaagaccgcaggggtccactactgggcagtctggggcagtgggcagctggcagagcctaagctgacccaggtatgctgccaacctgttgggtaaccttgggcaggcttttcccatcttcagtgtcatcatctcttaaatgaaggggttaaattcgacgactctagggggtccattgctgatattctgtgtttgagattgagacaaggggacgaacttcaaggcaaaatgaatacccgcctccttcagggtccctggggcctggcttgccctgtcagggacattcatccttgggccttgagggtccttgagttgcgggacgccgctcctgcgcgtctggccccaaggctctggctgtccctgccggcggctgagccagcgactccgcccacgcgctcgtcccgcgtaccgccgagccattagcgcgattgctcgcggttcccggcaaagctggtgatttatgcggggcctcgacggggcagtcccttgagccaggaacaattagctaaaagccagcaggaagggaggcaagggggcgaccagccaagccccagggcgcccagagggggctgcagccgccggccgcccccggccgagcaccccagccccccgactcggtgggccccactcaccacggcgggggcggggctcaaaggccgaggcgaaaaggcagtccagtatccacgccatgacccgcgctgagtgcccggcagctcgcagttaacctttgcgtcgtcccccgcaccggcggccctaagtagcccccggtgaccacgccctgagccgcaccctgcacccagctaagagtgtttcggtcaccggacacctcgagcatgtcacgaagggggcagggcctccggggaaccccccctcctgccagaagagaggccgctggtcccgcagccccttgccccacgcgaagggaggcagagacacacagctcctgtcctgggaagctgattctgagggcgggaccctgcccctaccccagggagcccagagtctgaggggagacgccatctcagccctggtgagccccaaatctgagagggagggaaggtccttgtcccccagccccaccccaggagcccttgatcgggcacataaaagcaggcctgcccccaaaggctggaatttgaaggcgaggtagcgcacctgtcccagggagcctcagatctgagagcgagacagtatcccaggctctagaaaactccacgatttagcggagcgttatctcagccctcaagaggcctagtctaagcgggaagcagtgtgttccccaggatccctgaatctaaaggggagatgctgtctcagcccttggggaccctcccacccccacccttaacccctctcttagggcaggcatcacctcagccccgagtagctccaagtctgatttaaatcactggtccgttctagaggaccaagaatgtgagcaggaaaaacgattttgccgcctcccccaagaagtcccatatctgagagtaatcttacttcccttctcctgcgaattccgcagcgaagagggagatgctctcctgcctgggaacctttgtactgagggggttgatcatcaactgagataaaagaacccagtgtcaagtatgtataaacgtggggtgccccccagttgctgccgacttacagattccactgccaatgcttttgctcagggcactgatatgggagggggacccacatttatttttagaaagaatttgatatttgatatttcaatggagggtggtactgtgttggattttcttacacttcttttatggctttgtatttttacgttttaaatacatatggaagcacgtgccataatgggttcagtgtttggggcctctggtggtggtaaaaagagccctgccccccaaatcctggggtagaagcagccaccagagatggaccacattaggcaggaagggcttctaaacgaaatttcctttttacttcaagcccaggggcccaaattaatttctctcccaattcgccagtggtagctccacagacgtgactctgtgccttgtttttctccactgggagaatggggctctgttgatcaaaatgctagtgaggaggtagaaagaaatatggaaaatctccttccaacagttcgattgcaggccagaggagtggaagcctcaatcactgggtccactggggagagcagttattatatttgctttgctaaccactgatattagtattaatgcggcaaaaggggtgcataaaatggaaaaattgcctgtactttgctgtacaattcttagcaaagcagagctatcttcagagtttaaaggccctccacttgttttccttcctttctgggaaaaatggtacctctctgcctttgtaccaacttctaaatcattttgattttctctgttttctaaaagcaatcacagacaacaaacactcaccagacctgctcttttaccgatttcttctttacgaatacttagtcatccaagccaaacaagcctaacatctagaaatgtccagtttcaggccctggatattgaaatctcagccttacctcttcccatgagcttatccagcaccagcttttgaaatggcctcaatgggttccttttttttccaactgaatgagctttttttgggctccctcatggcacaaaatctgcctgcttggtccaatcccagagtcctcggaaactgaaattgctctgcttccaaggcagctctacatgaggtacaaacccatgacagccgtccttctttgttgcctttttctcaagaggtataatgtaataaaggaacaaagctacagaaactcacaaacctagattggaagctcaattctgc

SEQ ID NO: 1563156 - DNA, 4001 bp, Homo sapiens
tcttcatcactgccggcagcaaaagctgactggaagccatgtcctagtccagatccgggcatgcacaccggctggtgttgagcaggcaacttgtgaattgcaagtcgattgcattggtggctttcctggcagagctttcggatctcagttcagacaaactcgtcagcacaccctgtcctgacctccccctaaactagggctggccctcttccgaccccttcttggcaccgtgcactttccttccctttgtagtgcttattatcataatgcaaagtctatgtctcccccactagacccgtgagccatgtgagggcggggtggccactgacgccatttgaaatcaggggagtcctcattgaatcattgcttttactctgggtaaaaagccagggctggaggggctggagtcggggttctctctggtacagcagtatactcccagggcctgggacagcacagatgtataggaaacatctggcaaaaggagagctggaatccatgtctgcctgaattacagagctgggccccgggccccaccagcacttcctgtgagcaaggcatttggtctcacttctgctgacaagcaaaacagaagaaaagatggtctccaaaaccaccgctatgctgacctttgagaatttagggtgtcaagacagtgaccccactttgtagaatggtaggaagcttttccagggtgtgggatgcagacccagagcaagtgaggaacccttagacagtcgtgctcgaaaccccaacttttcagtgtgaaatcactgacccatatttgctgactgaagttttccaagtctttcagcttcatggcattttggggaagcaggatggagatcattacctccatctgagcaagatgatggcgaggcttggaaagctggctcaccctgtgtagtcacctcaagctggctctggacacaggctgccttttccaaaggaggactggagcatactttggtataaattgcttgcactgaataatgatgttagaacctacatctctgggttcaaaggcacttcaagggtcattgcattctacgtcctagaagttgcagtgctgtatgaccacgggcaagtcactgcacctctctgagcttgtttccgtaattggtaaaatggagtgattgagagtgatatggacgagctgctggcactgagctgctgcctctttcctttgcaagagttaccatgccctgaataagatgggcacaagctattggctaagaatttgcaaagctgatttgcatgtgatttgcacatgggtgtttatcagaacccagaggttcaatttcagaaggctgagaagccagccctgttaaatctctcaaccaagactcactgcgccagcttgacccagagacagtggccctcgcctctgctccccctcagtgctaaagggaggcaaaaggtgctgaagctccagggactgcagtggggttacggccaggtgatctccaccaatccactcacccggactcccttactcaccccccagcccaatcaagctggttgacttcactgtagctaaaatactgccttctgaggggcacgttggtgcatctggctctcttttaccagcggccaccagtgtctccactgaaccttgggtgagaagcggtagacccaaggaggacagagaccaaaggaaggaagacaggaaagaaggaagggaaaatggcaggcggttgaggccaaatgggcgtcgggaggcaggcaaggggctcaggctccctcctccacccccgctccagaggtcgctggggagagcatcgggccctgggccagcgcggggacgcttggagctccctcacgaccttgggttctccgcaggaaacgggccgggagcgcccggcgccctctcacctttgacttgcgtctcatactcagcctgcagcccccgctcccgccgcagcttcccgtgagcggccatggcggcctcgcggccgcgccgtcgaaccccactgctcccacgcggccgtgagcgggcccggcgccgggacttgggggcgctgcggccagcaccctgcgcgggctccgcccagccccgcccccagcgcggctcccggtggggcggggcggcccagggctggcactgcccgcgaggggctcctgggggggcagggcgccccttccagccccactgtgccccggccttgccgtcccctcccattgggcctgcacctaggctgccttgtgcccaaagccccgctgccaagcagccggagcaggtgtgagagccccaacgtaagctggcatcccaggctgccatcccaccacctccagaaggctgtccctggtcaccactgccagactgtaccattcacagcggggccgctggcccactgtaccagtggccatgaacaccattgctgccccaggctctggactccccctgggttgcctccttcccccagacatccgatggggtcctcccttcccaagtcagcccccagagaggcccagggagccccagggagccttgagagctggggtgggaagttcagaggggagggggaaggaaggtcagcaccagagagcagaacctcagcagctggctgccgttccctccaggcccccttggtaggggaggagagttcagctccggttccccttctgctcagccccacaatttccccataggcggttaccacttcctgctgccggaagagactgctctgcctcccttcccctgcagctgcacctgcccgtcataggcctgaggggggcagccccctcggagtgaggtcttagctaccctgggggcaagtcttggggcccccctcatccaggggtggtggggctttcctccaccctctaccacagggcagcagcttttctccgggaaatcgggaaggcgggaggcgggaggcggttgacaagccaagcagacaactggcttcaatttggtgggagggaaatccctggggtatagatgtggggagagaggcaaggcacttgggcaccaggcgtgtgttccgaaggcgggcgtgggggcactagtgcaggggtactaggcgtgtgtgtgcacggatgtcagagtcaggctctgtgcaaatgcgggcacacatgaccttgacctgcagatctggggaggggaggctgtgcgggtacttcctgcctttcaactgtgagcaattaattctcttgcccagaaggaaaaaaacactccctcagctccccgcccccttctcccagtaccaaggcccttctcgaacacgtcgtcgtgtgtgtctgcaggacctggggcttcaaggcctgggagctagccagacccaggacctggacttccagcagctggtctcggaagtaccgatgttcgagtcctccagcgagactagagagcctgcgcccctgcccacagcgcgtacagccgcacccacactccaacctgctcctggtcgggagactcacacgtcccaccgctgcctcaggccaaggggaaccagggagccccgcctctcactagctggccccaacacatcttgcccctccatccgagccctgactggtccccaaaggtccctccacccagcagagccagccacagggctcaggcaggcaggaaaggcctcagccggtgccttcaaacgctctcttcactccttttttcactccagagctattcctaggatgccccattcagcccgtactttagggcctgagtgttgggccctggcttttagggcacttgtttggcatttaaggccctgaacgcaactgccccctgctgctccgtctatccttcgctccattgttccccttcaaagcatccaaaagccaggcagcccgcagaaggcgcggacctgcccgcatggggacggaggctcagcggccgacaggcatcgggcccgccggggacggacggcagagggcgggccgggtcccatgggcctggccggggcggaaggagggcgccgcgggcgccgtgggagcctgggacacctcccttccaccggtgccggggcgcggccgacgcagtgcgcaagccc

SEQ ID NO: 1563157 - DNA, 4001 bp, Homo sapiens
tgaatgaatagatttttttaaaattaaggagcccgttctcacctttcctcccccacccgcactcttgcaaatggcaaagacctcagatcatgaatcaaagggtaccagcacacagttcaaaaaggtggtggggtggagatgttgaatgggcacaatgagcacagactctacttccttcagtgtaaagcaacctctgttgaaaagtggttaccctttaaactactttaaaaggcaaatcactgagccaccggtgtctccaagacagatgaacgagcattagtaacttacaagtatctcatttggtgtttcaagacaagtaactatagaaaaaccagagaaagagctgttacaggttcctggaacgtttgcctgggaaggtatcttaacaatttcctaattcaggtcttcatttttccagtggaggaaagcgaagtgtacgaggtgtgcaatttgcccaatggccctgcaattaatccaggagccccgaggtgacaccaggaaccaactggagcagctccgggatgcctgagtccaccacccctgtccacctctactcctttcttcaaaaaaacaattttttttttttttatgttggggactggattttggaagacacgaattccagacagttaactgtctttgcctgattataaatattaatgattcttgtcaactctctgcctgcttctctccaatttttaaagttggcagtcagaacgtccagtctcaacagtgcaaatcaattcaaggaaaactcagtaaattagcagatgacagaacaactgcagtgtctcatctcaaaacgacacatctcacacgtggaaaatcaatgtctgaagactggaataaggtaaaccttctccctgcccccttcctggagggggcatttgaaatcttcagaagtagtagtcattcctcagaaacaactttccttttttccttctttcctttcttttctctctctcaaagaatatactcatctagtatctggatttggtcggtcgttaaccttaaaatcttgactccttcttcaaagaaggcaaatcccatgagctttctctctgttgtgtttcctgcagtacctgcagcacctagcgcagtccctggcacacagtaggtccccagtaaatctttgtatcaacagggagaacagaagccaccataagggagggggaaggtacgacagaagagcccctggtattctcttgtattagcgtgcaacattaatgataatgtgcaacattctgtcccgccacaaagtaggagggaaatgcactccctttctaaggagtgaaacggctgcaccccaacgctcccggcagcatttcttcagcaaatccactcgccgcacactgagatcatgaagcggccctgcctcctgtccagtcttattctcgtcctttcaacatatctgactgaaggctgaatgagcgacctaggcctaaccccaggaaccccatttgtcagcctttgtcagcgaggtggtggcggagtccagccccgtcccagatgcagtgaccacagcgttggggcaaagaaacactgaattcagggttggggctcccctgtaccttctaaaagatttcgggaagcgccactgagttagtgagcaggtggcacttcggggtgacgtacccggccacccgccaccccctcagccgtggacctgtggggagccccgactaccatcgcccctcgcagtccccacccggagcggcccagtggcgccccctgtgtcctctgcacgcgtcaggacactcaccgcgtagtgcagctggggcttctcgccgcggtacaccgggtgccccatgtcgcctccgggaggagtggcgcgccttgggctcagcctggggtcacggtgtctctctgagttccccgcacttcactgccatcctggggcagcccctgggcgcgagccctgctccgtgcgtgccgagtgctgtgcaaagcgcccctggcacagcgtcccgctgccgctgcggagccggtggggacctggagaaggcagcggcgcgaagggggagggggaagaggaggaggaggaggaggaggaggaggaggaggaggaggaggaggagggagcggccgagtctgatgcgatgggcgggcgtttaattccttccgctcctggcgggtccctccggcggccgccgccgctgacagctgttgggggctgcggaggccgaacgcgcccacgacaggtgtcaggctggccggcacgcctgcctcctgccaccccaccctccccggacccgtgggaccccggctgctgaggcggggactgccaaagcctttaatgccagcgagaaggcgaacttgggtttccaagaaagagagactttcactaactttgaaggaggtgtgggcctgacagtggaaggagattcagagccttctcctgggagggcagagtttccctttctagaaagccttcttctgtgagagtctcaaattgtggggacccttggggagggcaggactgagaggaaccaagtcatgctacccaggagaactgctgcggggacaaggctgcccaggatgctggtcacttagggtgacccgagttccaggggggcttgcagggcacattctgtaggttcacaataacccttaaaactggcctctgctctgaaatcccctcatggaaacctgcactttaaaacaccttggagaagatcagcgagttccctccacagccttgtccttctgtaatttacgtccagcctcccacaagttgagcccagaggaaggccaggcctggggccagagtagagactccagactcatgaatcaatcaatgcaagccccagaggggtggctacaaagtggaagatgtgcttgggggtagcttgtgccagtttgtcagggtcccactgtactgaaccggctgaatgactctccacttgctctgtgtaagaggagaggggaggagaggggaggaaagttggatgtggccccggaatttcagcccttacaatttagttgaatgaaccatccactggcatgtaatattttaaaacaatcacagcataattataattagcagtgggaatgtgaagccaggggtgcaagtggcctgaggaatctaccattagatagtcccatgacagtttatccacctggaaaactggatggttatatctgctaaagtcaatcataggcctaccttccaatccagcaaattccacccctagatatacagagtacaataatctcatcatataccagaatgctcatactgtgttgaggcataattgccccaaataaaagcgatccaaatgtacaccaactgatgcatgacaaaccaactgtagtctgtgcacatgatggaatactattcagcaataaaaaggaaaatgctactgatgcacagaacaaatggattaatctcacaaacattatgttgggagaaagaaatcagacacaagtgtacatactgtaagatttcacttatttattctgcaactgaaattcaaatgtttaagtgcaataggcaaatggaatccatggtaataggtgtcataacagtggttaccaaagtgggaaggtggtattgactaggaaggtggtacaagggaaccttctagggtgctggaaatgatctatatcttgatctgtatggcagctactagagtacacccatatgtaaacattcactgtgcagtacagttcagactagtgtaatttacacccttcactacatgtattttatactgcaaaaataaaaaataaaaataaaaataaatttaaaatcaatcccttgccaaacccaggaacttccaaacagtgttgcctgtcttatgagaaagtcaattgaactatttgcccaagtctttcattctcccacagcctgatctacccaagtctcctttcttctgctttgtaggagaaatgagcatgcccattgaccttggaggccttccttgctctgtgacatgtccaggcagagctcgaaaaatgacacactaaagttccctctttactctcactctgttctgctg

SEQ ID NO: 1563158 - DNA, 4001 bp, Homo sapiens
ctgaaattgccccttcagggaaagaaaaggtgaaaactagagaattcttgtcccccctgccacccaaacacacacacacactcactcatacagtcaatgacaccctccaaaataatgtttctgaattctctacagaacaagatggcagacatatttcaaaatatatttcatccaatcgttacaaacagcttagcaatagatatttgagttggaaaaaatatcaacattgggtgaagggataaggtgaccctttgaaattgcctgcagcactaacagaaaaccagaacaccatctctttctccagctcccacgactgctccaaagtagagccaacaagtcctacaagacgcacaagcgggtggccactagggacatcccatttccaggcaccatttagcaagtagaagaggaaaacccacaccacggaaaccccttagtgggtgccttgctctgtaaatgtaatggaattaaaggcggtctcctgaaactgcctgggggcctcctccttgggccgtgggacgcgcagcgctggtccctacctcggatttccacacgacgtaggggtgcccgcgactgtcgggtggggactggaacttcctctgctggagccacctcctaggagaagcgaagatgccattggggcctcccccggatgaacagaggatgctggaagcgcttcggctactggctggcccggccaggacagaaggcaggtcccaggccatgctcttcttgaggccgccgcgacccaggggaacctcatagtcaaagtgaaagctgccggatggtgacttctcctgcggggtgctgggtgtggagaaggacgagcaaagaggtccaggaggcggtagcctggtggccctggggggcggaccccgggaagaggacgccaagcgagggccgagactctcggctgggagtgatggggagtagaggcggcccgccgtggctccccgcgcactgccctccgcgcccgcctcgtcgctcccgcagccgccgatcagggccgggtccaggctgcgggtctggcgcagcttcctcttggagaagcccttggccgaggccgcgctacttgaagcgggcgaggaacaggagaagacgctgtggagcaggctctgcgcggacatctcggcggggctgcacctgaggaccacctcctcctccctccctggacgctggtggctttgggtcgggaaccgaaagggactcaggcaaaggtgccaggcggggctggcccggggtttgcccagggcagtggagagcaaagcccagctcacgcgccgccggtgcgctccaagtgccccggcggcggcaggagcagcagatccatcaccagccttctaggaaaatgggtctggggacctcctgcagccgctagaaccttcctccggagcccaagacgcgaagagggtcaggaagaggaggaggaaggtcaggcgctcgctgggttcccagctccagcctgccagcgccactcccccttcctagctgaggcgggagacgcagcgctcctgctcgctggctctggatggcctctaagactccagcaagctcctccttgcggcccgaggacagtcccgagggccagggagaaggctgcctgggcgtgcgcccagggcgcgtccaccgcgctcccggcgccgcgagaacttcctcccgctcctgagccgggcgcctgagctgcgcctccctgcactctctccttgccccggcgcccgaggttgcgcgcctggcctccgctgggctgctgcgcccactcttccgactgcagaggctcaagggttgttccaagctcaaggttcccgcggggtctctgtcttgctgcagtgtggggacaccgagcgtgctgcgcccgggacctccaaagactgcgtgcccacggtgggatggaattcccggcggcgctcagcgctctccgtggaggagggagctcaggagacagccccaaggccgggtgtgtgtgttccgccggagaggaacacgctattcgcagcccagccttgggcccagggcagacgcggagatgaccccgtacgctcgctctagaggcagcgggaagggggcggccaggacgtgtagagctggaggaatgccggggctggagctggggcggagccaggagcaggagaaagcagaacgtgaagagttttccaggcgccaaacctgcaagcggcgaggagagaaggcagctcgccactgataccgggtctcctggggagaaagtcgtgaggacggaagtgcggaccttctcccccgtctccccacccccagatcaagggtcgcgccagctccactcacgtttctggaaaggaagggaagtgtcagattgcaccccacccactggtgtcagatgggcagccggggacgattgctctgaagttggagttaaatctcctgccttttctccccgcgcccccccaccccgccctgtcccggctgtttttgtttttaaaaaggaaggatagataggaaactgtctaaaagcagtggctgccgatgaatgagctggagatggagacctactaagaaagtggagggggaggagcctttgccgtggaaggggtcctgagcacgtgcggaaacgtgctctaggaggaggggtgagtgaggccgggtagggggcaggcgccgggcgcagcttcagcccagaggctgcagagattggcgctcacaaagcgatctgtctccgcgtcccgctctgggacgcctcgggtctcagcgcggtggccacagtcctgggaagctggagaacgctggggaaatcaatcttcccggcaaggagatgagtctgaaagcagcttctcccgctgtcggacccctggaatctataaagcgcaaagcctcgccctcttggagggctttttgatgtaacagttaagctttgcaatgcaacttacaaccatctcagcagggagcagacagaatgttggaaatgtctactttgtgtttgtgtcctcttttatcacttagggatgaagataattttatataaatgtaaaggtgactctaccatttcttttattttggagaaaaaatacaatgaaattataaatacagatgttggacacgaacattcctcttgcatatctaccagaattgtccaagtttgattctggaagacttcctttattccctatgacatattcaggggaaaagttaatttacttagactctttgaaaagcgtgtttggtgttcctaggtgttcagctattttggaggaggtacgtcatgaaatctaattaggagaattcgttgtctccacaaagggcgtcgggctcccaggtcttggctgtactcgttttttgtaaacgcagccgaacagactgcacccttagagattttttttccggtagctttaatgagctatctgctgtctgaagacagagttcgattctagtttcccatcccccatcgctgtccatctcttctcaccctgagcttcttaagtattttcagcggctgtcaatcaggtgtgctgctgacaggcacagtgtttaaaaagagctcttgctcccctgcctaactacacccaggccaagttacatttgggggcttgttggcattggctttcttccctcctcatacaagtcacattagaagtaaaagtgtgtgggtcttgtctgccctttctttagtaacaaaactgtaatttatcactggtaatggaaacacttaatgtctctaccactgggatacgaatgcatggttatgcctcattgcatggttatgcctcagtggagtttggcattcggggtagatggttaacagagtcacttcacagaatcacttataactcaaggggggtgagcaacttgatgattgtatttgatgatttatatatttctctaaccccatatgataaccatggggtagcaaatgaacccctgccatgactgtataggctagtatgaatgcccccaggcacaagggcatacattcttgctcatgggtgttggagagccaaccagcagagggattcttctattagcactcctagggc

SEQ ID NO: 1563159 - DNA, 4001 bp, Homo sapiens
tcattgttattttctgtggcagcctacaggccacaattgcagagttgagttgttgcaacagagactgcacagtccatgaagctgcccttccgtaaaggtaaccatctggccctttatggaaaaagtttgctgacccctggactggactaaaagtaaagacacatctatgattaggatctgccttttgccatcaccattttcctcctctcctaagattttgtctctgagaaacatcccagagagcctgtaaaaaaaaaaatcaaacaacataatttagcatattagaaaatatgcaaatgctagcatgaaatagaagtggttatctgcaaatggcctgttcacctgggttaccgataaactaaagaagtagaaatgaacattgtcaaacccagggctgggctaacaccatctaaaaaatcaaatgtcacttacatcttgtttccagtggaaagaacctttccagtggttagcatagaggggacatactggaagtcctcaagggcaaaaacgtcagagcaaaaggtcaatttcatttctgtgtagtcccagttgaattgtggacttttctaatggccatcaatttaattctcagttctaagcttctctcgagtcttggatgggaggaagaaggtaagatggcctgcacaaatctcagggttgcaaaaactggaaacactggcatgaattagaaatttcttaatgacagggccagcagctgatggttctacttgtctttctctaattaaatttagttcactgaaattagaacgacctccggagatagattagaccttgaagatactgctcacatttatagatggtccgctctctgctagttactgttctaagccttttatttatattatctcatttaattcttacaacaacctaaggactatgttaccatcattattcccatatttcagatgaagaaactgaggcacagaacttaagtaacttgccaagagcacacaccaattaagtggcagagttaggatttgaagccaggctttaggttctagaatttagactcataaccactatatgtatttcataacatttcatgataaaccaatccaaacctctaactttacaaatgagcaaagcagctgcagtggcataatgggatctgggacatcagggtcatgttcccctctttccaccaccaagccctttcattatgagacatacccttataataatgaaagccagacagtgtttaaaaattcagaggcttaaagtttcctcttttgtaaaagacagcacaagcacatccgatgtattattagccttatttaatatccaaactgttcccctaaacccatatttatcacagccacagcaactaaaatgttgcacccatattcaagaagttaagagggaaagataaaccactttaccctttcagacttcaaaacagcctgtgcccgaatcttttacagaaattagctcaattatgctgttctgttaatcatgacacaatcctttcctgcttgagtttgctcatttcaagctgccacatcattaatctaaaaataaggttctcataaatccatattgacacagacagtttttagctgtcacacatctcagacactgatcattccagttttcttcctaaatcacaagatggatgtgaaagaatcacaaaactttatcacaattattttctgaaaaagtagtgtaagtatagatatttatattgcttacccataaattataatcagccgcgtctttgctgtcctctctaatctaactgaactaagcttgcagtaggaagttgagtctgttttaaaaaaattatttttttggtaaaaaatgcatcctgaaatggcagatcatattgaatgtctgagaaatggcccagctggcatagctgtgactcccacgataccttttgttgccagagacctccgctactgtgaatcttgggaccaaaaatatgcaatcttttcatcggatcattgagaagttcctgtcctttcagaacagaggcaggctgtgtccctgagtaagtgcacaaatgagtgagtgcgtgtgtttgtatgcgtgtgtgcctgtgtgtgtgtgtgtgtgtgtgtgtgtgtgtgtgtgtgtgagagagagagagagagagagagggtgagagagagagagagttggggaggaggaaagaggggagggaagggacaaaaagaatgagagtattttgaagaaatatactcgagttagaaaaggattcctctaaaaaaaatcctcttttccacagggatctacaaacggtaattggattgtaactgtgcaaactgtccttattaggaatcaaccaaagaatgttggaagccactggtgaaacccctgagagcaagataaagcacataggatgccttctttgtttaggacaaattctcagttcttaaattatattttaaaactactgactccatttttctaacactagccacacacactaaaaagcaaaagttttcattctctttcacactgaagcataacacatgctctgtattttatcctctttgtgggacagcagtccttgagaagttgttcatttcctgaacagagggtgtggaggtcagagtgaatatacccacatggccatatctaagagggttcaggttggggtgggggttgggggtggcatccatgaagagcagagagaaaagggaagattaattccaatcgcgaattaccttgatctccatgcattccacatggcactgaaccaaatacaactcgaaaagacatctttgtttcccagtcaataggaagttatagttctctcatgggtctcaagtgaattccaacaaaagaatcactgtgattataatttacaaaccgggaaatgatttcatggaagatcttactgattcaaaattaaggactcggtatgcttttactaggattctgtgaaactaatcatgtaagccacacatagcctctgctgctgctgctgctaaggaaggaattttaaagcagtaaaatattccaggtggttttctttactagaatgattaaacttaaacagagattcagagtaaaatctacctgttactgcacatacctccaccaccactatcctaaaaactgatgttgaaaatacgcattattccagtagacagtcaacatggctcatactggatactcatcaatggaagttacatcctcatttaaagatatctaatatcttaatatcaatatatctaatatcttaatatattatttcacatgaaattgataaatatgtaattcattttttattattaggcaaatgatcctttagtttataaatagatgacagcaacatgtagttctgactgagcacttactaagtgtcaggcattgttttaggcattttatgggcactgacttatctaaccatcaaaataattcttagcagtaggttacattattatcctcatattacagatgaggaaacagaagcgcagaggagttaagtgacttgctcaaagattcacagctcataagtaatgcggctgtcatcccaaccactatgagcttacaaattaactggaagacaaaaccacagttcagagtcagtactagtaggagccatgttataagtatctaataaggaagagacagtgatgaaataagaatgtttacctaacactagagtggtctgttaaatcaattatttgatggagacatacactgtcaggtcaataaatgtttcgtaagaaggtgactaagtgaataatctcaaataatcccgagagacaacatcttgtgaaattcctagtctgttttaagagtggaagcaaggcaggccttaagaggaagtgcagaaataatggagaaggtgtgtatatttggtattctttggaaaatgcattcaaaccagaaaaacaaaacataaagataaggaatcctttttaagatttaaataacaactctttaagtaaaaccaataagagaccaaagagtcactgaaagagccttggaaataaatatcaggaagcaactaaaaggttccatctgtg

SEQ ID NO: 1563160 - DNA, 4001 bp, Homo sapiens
ttactaccaatcttgattagcagagcaaaaaaacgatgacaacagggaaggcacccggggtaggcttacttccacttggagggttgcacatcctttcaggaagtcattgatgttgttgatgcagtcagcttcagtttggggatccagacaaaactagaggaacacagtgaaatgtcacttggagattgtcatcccatgccaagcaaagtatactcatcatttgctgataactagagaaagcaggcctcttaaggtgtggggcaacactgctgtcaatccaggaagagaaataaccactgaaggaagtgatgcaaaaatctaaacggtcgatctttgtttcaaatgtcaccaaacctttagtggcaagccatgtctacttacaagctttctctcatgccttctgttccagtgtgctgatggcaaattagggagaccaagacagttttttgagcttagttcttgctttcaagaaaggaagcaatccctggtacctctctctcctccttccccctgataatttaataaaattctatttcccctctacatttgaccacacttctttacattttatcactatttaatcactctttctcaagtttaagaaattataagtaaatttatttgctcaataaaaatacaaactggctcatgaaggcaaaagtgctatgctcacagtccatgatgaccttaagaaagtaaatgtaaaattgtacctttaagcttacttaaagtgcctactttagaaattatctattctcgtgatcgtggatttccagctattaaaaatcttgaattgttttaaagagagtaaagttagtttcactttgaacgcacattgcattcgaaacatatatctggtttctattgcttttacaaactttatgtgacattttgaattatttttttcctagttgctatatagtctctccttcaatggatttttctaaaaggaaatctacactgattttaatcaaactgccaataaacaccaccaagatctgttataaatcattctatttttccacagactcataagtaccccaagttcaaaacatgtcctcggtacacaaggagatgtaacatgcatctccatgatagagcaagcttgtgatatgagtgttctccttgtcccttgttgccagtggtgtcacaggttttccctatactacaatttgggggccaattactaaagaataacgtttcattttcttacattttcaaactacaaaaacagtaagaaagaatgtctaactcttagaaaaatattaaagtaggagattcccatggcctgggaaatagaaaaatctcaagagttacatgattgctgctctctggtgataagcaatcccaaagagactgcaaatttcccttaccttttccacagagccaggcatgagtctgttgatcagtttgcacagaactaccccatttttcagcgaggactttaaaaactcctccggatcacagatggtctttttaggggactctaaaactcccaaagatataagccatgtcacgatttgttcttctggattcattactgaggacggtacactccaaacagcactctggggcagctgcaaggactaagccacatccgcgattgcatctgctgttgtcttcctttttatgagttctcttcgggtgcttgcagagcaaaggtttaaagcaacttttcttaaacaacagcggaacccactcaaaatatgggattttaaaaccacagagatcacggtccaagatgtggaaacagataagaattaatttaacaatcctggataacgctggtttttccttttcaaaacctgcaaaacaaattcgttaggataaaaaaaaagaagaaacgcacatgcacacacgcatacacacacacgcacacagagtgcaagaagttataagggaagaaagtgaaaaggatgctggggagggaggagagacaagcaagcaagtgctttgggaaacagaggtgagccagcacttcaggggaccttggaaatgagacactcatgggccagtctgggaaaacactgtcaataaatagtctagccccagtgaaaatctggcttctgttaggaggacgatgccaactggctcttaggtcagacagatctgagcctcatggggagatgtgctggcacaacagggctcaaagaaggtagacagaaaattcttccaagaaatagccggatgtcctcatagtatctcccagagatggtgtgtcacgatcattccttgcaaaacacgttgagttgcatggtgacaacgtgccaagcaaacgaagattatgcctgctgtcagccatcactgtgtataagcagaagctagaagaatggcattttactttgcagccaaaaagctatgtttagggaaataggctaaggataacatctgacatcctgtttacttgcattctttagcaattctttttctggacctggttccactacataatccagctgcagtacccttagcaaaggctcagactcagtcacataagtgggtaaaatacacttgaaaaaatagaatgtttgagaacaaaagagcacttgtcctctgtctacactacaatatggaagattcttattttcccaacaacaacaacaacaaaaaaacactttgcacttaaaatactgctctgaaaaaaaaactgtctataacaagagatcttcatcattctcaaacattttcagaaccacttgaaataggcatactattgggaaatttatgataaggccaactttaatagtataaccctatgttggcaaatgtgtggcacttaccatgattacctctcctcgtgcatgggagacatcagatcatgtatagctctttcctactaagcctcagaattcttttcaacacagcttcaggcatctactaccaaagaatcagcttagataaccctactaaacattttcaaagctgccctttcttgctctgtcaggacacttgtcacactttactattatcacttgttgatctgatgatctgactcctccacaagaatgtaaacttcctaaactcggggtcttgtttttttttatttaacactgtgttaccagcagactgccaggtatacacagtagatgttaaaaaatgctgaatgaataaatgaatgtattcagatggtgtccctgatatagacagtaactgattatagcaaggattttttgtttgttggttggtttaaatggcttaaaacaaacattttttcttgttaatgatttttaccattttattaagctgtaattgacacataaggaactgcatatatatgatttaatgaattttgacatatacatacatctttgatacaatcacacaaatgcaatccagataagcctttccatcacccccaaaattgtcctcgtgccctttcaattctttctttcctctttgcctccaaatgccaggcaaccaccaatctattttcagtgtctatagattagtttgcattttcaagaatcttatataaatggaagtacacagtatggtactatcttttttctggcttcttaactcaacatcatcattttcatactcattcatgttattgtgtctgtccatagttctataacaaggtttgcttgatgtacttgtgacttaagcaaaataagtataatcaatcaaaagttttcattgacgttgacccatggccaaatctatgtaatggaaataaaaacagaatacatttgttgataaataaaattcccaaatctgacgaacttaaacacatttttatatgtcatctgaacagttttcacaactgctcatcaaaattttactctacagacaaacaaaatctggcagtattattgaggtatcacttacatcttctgatgaagaacaaagcctgagtaagttttgtgaacccagcctcctccaaaacagtcttgagttcaccaaggtcatctggataaaactctgcctcattttggacactcactatagcaaatattactatgagtaataaagtatatcagaatggcaaggccactgcc

SEQ ID NO: 1563161 - DNA, 4001 bp, Homo sapiens
cgcccggctttcaggtaaatttaatggcactagatcatcctgaagaaagtcctttcccaagatcatgactatgttcctttcttcccctctcagcaccatttgagcaaatgattggtggagcagtggggaaggactgtggcagtcaggagactcaagtgctagactcagctttgcctccaaggagtttgtggtcctgggcaagtctctcccactctctggatcccagctttcctggctggacagcaaggactctaaggtctttacctgctctaatcttttctggttctacaaacatttgatgcagctttaatgggacctcagggaagtagggaggtctgggaagaagggtcttttgaagccccagcacataggcatatgaaccggatgcccttaagaaccactgaaacagagatctaacaaaactctgaggaagggaagaggacagcccctctgaatatagtcctagcccacaccagattccctcttcccctccacaatgaaagcaaaaatggagttaaatatcagtttttgcccaaccacttcaggctactttccttcatctgcgggttatgggtggcagcgtagaagtgtgggctattgccatcagtgcctgctgacccaacctaactgccttctaaggcccttttgcttatgcctcccagctgaggacaaagtcatgggggcctcccactccccagaggccctaaccaggcttaagctgctcctggctaagtcagagaggcatcaaaatgcagccaccacttcctctctgcaaaaggaagtcattccaaggtctccaggtggagaagggaacaccatggcataaaatgaactgttggaggattatactaaacacacacacaagcacacactccttgggagggagagaagagctctgttaactgactgtggcccaagcccatttccagaatgtgggtttctgcagctgtctctccttgacaaagccccaagtgtggacagggtgaccccagcccggacaaggaagggctttagggctccctcaggcagcttcctgagagagagagagtggctctctggccctcatgctctggggctgaccagggaaaggagttgcagaaaatctagttgggggcaggggggagtcatgcagctctcccataaggccccctccacaattccaggctttgtgaccgtcccctccccccacaaccccgtgccagcttgtcagcctcctgcgagcttcactgcttccagagaagccctctgccatcccccttccctctctggcctcccaagtgacccctgggatgttcctgggcacataatctggcccccacccctattccaccttaatctcagagggagatagaaaagtggagggggatggtaggggggtttcctgggcaggcaggctagcagggactcctaaaatggccacagcaagctcactggtgtctcaaggacggcggctagggcggtgggcagaggccagggtgctcactgccttgtggctcgttggaggaactggaggtggggctgggggactgagaggctcaagcaagggaagccaaggttacatgcactcaccattcccgatccgccccttatccactgcatggtgcttgcgaagtccggcttctctgaggccccgtagctggcgcgagttgtcgcgggctgactagaagggctgggctgaagcaagcgagagccccagcgccccctccgccgcccctcctccacagccctacaacccaatcccctccgccccggacctcgccttcagtcagtttgttccatgccaaccggcaggctctgtctctccgccctgctgctcctagaggtcttggcagggagaggtgcgagtgtgggggggtcctaatgggctgcttttgtcccccaccaaggcttgagaactgtgggggtggggtgcagggagaggatgggggcgaatagcctccgcccgcccaggagaaggcagctgctacctctgcctgcctcccgctgcgctggagttagatgctgtttattgtggggcttcccaattgtgtcgagtcagcggaaagtcctttccaaagttaccagaggtgttgtgccaatctccagaataataagatcctgccccagtggagccaagccagcactctcatgcctccctcccccaccctccctctgcatactcccctagggtcttctctctttgtgtactatctgagagctttcatctgcattactttcacttctcagaacaaccctgtagaggcagccattagtatctccaagttatagataaataaatggaggtttggaagagggaaggggcataaggtcacattaaagaaaaaaaaaagataaatcctcgactttaccctctgcggctttccaagcctctttcggctatctctccctttctatctcacacacaccactccaggcttctccttcatgcccttaggaacatgaaaggtagcttgttgatggacgaattttccatttgcttattttgctgagaatgagttgaatgcacatcagcgaaacaggcaaacggagaaaccacccacctctttatgattcccccaactctggggaacacaacacaggctggtacctttgcttaggctaaaaattgactttgtcagtcacactaacatctgttattatcccttataatcctcacagtaactctatgagatggacacaacaaggattcttaattgcccaccattacagacttgaacactgaagcccagagattgaaagacttctgcttaaagtagcacagccaaacaagacaagaatccaaggctcctgactagaagagcaggtcaggcaaagacagaattgcaaaaacagaggttgcaaccaaagtaaaaggagttacagtatgatattagaaagaagttcctggagataattgacatgaagacatcactggcctgttacacgtactttatttgtcctcttctttttagcacaacttctgcacttcatccaacctgttgttttgtccatgcagagctgggcaaagatagaagcagtaccttaatgagcaccccatcatgggaggtgtacaagcagaagctgaatgaccctttggcaagggattcctgaatcaaatgggaggttgccctggatgacctttcaacttccctcccaagtctggtaacccaggcatcagtgattccacaatgttctctcactttcccatctctgggccttctttcatgctcagtatcttggatgcacctcccctgccaaccagcccattcaaactgtcatgactgttcaagatctggcaccaggcacaccacctttagaaagctttccaggaatacctccaggccctgattttgtcatctttcatttgattcctatagcactacgatttcactgtctcgattaaaaatgatctttttatttcctggatgttacgggctgaattgttttcccccaaaatttatatgttgaagtccttccagtacctcagaatctgatgactcggagaagacagtcatctaaacagcaagccaaggagagaggcctcagaagacccaaccccactgataccttgttctcagacttctggcctccaggattataagaaactcaatttctgttgtttaagccacagagtctgtggtattttgttatggcacagccctagcgaactaacacaatggtcatatgaacattttactgtcccctttcacttaaatggcattatgtgtttttgaagcagtggcaatgaattactaatttctgcatcttctacaacagtgactggcacatagtaaatacccaataaaaacttggaattttttgatggatgcattcattcaacattatcatttagcccctgtgtgccaggcattgtgacagatgctcaggatacaagacaaagttcctcatggaccttacaatctacttacagaagagagatagacaataaataagtaaacaaacaaaaatatttagagattgtaatatgtgctctgaaggatataaaccaatttatgtgatgt

SEQ ID NO: 1563162 - DNA, 4001 bp, Homo sapiens
agaaaccaccaccaccatctgatacagacaagcagtcatatctcaaactggaatgttgcttccagctcatgttttccatgctctcatccctttccttctagacgtttttgggttttggtggtcaaatttagcaccaaaatttgataactcttaatttagcacattacagactttcagtttgttatgggaatgtttcaattacagagacctctgatcttaaagtaacaaacgggagcaaacaatagcatcaccactttctcatcagccttatcaagttacatttaaaatgtagttcaagaacatcattgcaaacgagattatcccaaaggagccatatccaaatactattattcccaaggtggataaagagctgttttttctttcttgtggggtttttttttttttttgatgagacaaacaaaatccccaaactcaaatccaggggtacaatctttgggaaagggagcccaaatagctcctgtcaaagtcctctcttgccagttcaaaaaatcagagaatgctttcacatactatttcatgattccaaggaaattgacattttaaatatcttaaagctttaaggttcaagaagtgttttaaatgtggcttctttcaaaattgaaaattgtgaaccctggagagcaaattgagattcaaaggacacagtcaccaactgccagcacaacacacccgtgtcacttcccaaattcttgcttctccttagacactaaagaagcattttccctaaatccattccttgcatcgattattttccctctaaatatccactgcaaagactgtctttcctatgatgtcaaatattcatcatgctcttccacaaacccttttcccctcaaacaaacccaaatgcactcctgatggcaagagagaaattttgactaaaattccctgatggagtttaaaggtagtcttcaaggaaatgagttaagacaccacagacagcaaagccactgtttaaggacgcagagcttgctccatgaacgccacatagattaaaaatgcacacacgcatgcacacttaaatagaaagcatttcttcatcaacaatttcactcaagcaataggcaactatacgcgcaggcattcttaaaagacaagacacgacaaaagatttagggagagataatataccaacgtcatacatatcacagcgaggccatgttgaagctcaaaacgttttcccccctgagtaagaaagcttgttctttctctctctttccctgtctctgtctgtgattttttttttttctcggtggctctcgggatgaaatcaaagcgagagttcgcgacagctcaggtggctggactccattcagcgcgttcccaggaaaaacatgagtatgacattgacaagcaggaggactacaatcacggcaaaaacgactacagtttgcacatccagggtcatggtgcaatgcagaacactgtagtgttccaggtggggggccggcagattgggagatgtcagtctctgttctgtcagactgtccatacagccaccatgctagaaaggagaggaggaagtagggtggttagagaagggctgggtttggcgcccgagtttagtcgggggaggggagggggatggggacggggtgcttggttccccccttctcaggattgggctgatcgtttgtccctagctgagaaatcttagcttgcgctgaagtcggcagagtccagcattctctctcgggcgccacgggaaaggcaaaatcctagctttcaaagggaaaggcggggggaacctgtgagtggttctccggcgcctgctcagtctgtccgggcgtgcgtccgtccgcctgcctggctaccggtcagtctcagtctcccctactccctttacttcgctcgttttcctaagcttgctcgctctcttcgctgggctcccggctgccagacactcgttcgatccctgccttgctggccctatccctcttctctccccatcccccgctcagcccataggctgcctttttattcaccgagcgactgcgggcgcttgcgtgaggcgcggccagagccactgacatacccgccgaccaataacagatgccgcagtagcacgttcgctgcccaggggcgggacttgcgctggcgtgctagccgcgaccgccaatcagagcctcaaggctcccaagcaagctcgctctccccagaccggcgagagtcaccagccaccagttctggtttgggggtggggagcttcttgggggcggatagagggggtatataaggagatggggaggaaaaggactgggaaagagggagggaagggacccaataggatgcaaggggaggagatcacgtgaagagggagaaaaagaagaaaagacgaggaggaaggagaagagagggaagataatgaagaaagagaattgtggggaaaggcagaaaaaaggatggtgaggagaaagaaggaatgggggaaaaacggataggtagctgtggagaatgcatgtgcctagcagccactttgtttggagcctgggccaaggaggaagcaaaggtgcttttggccactgcctaagaatttacaggcaacccacaattagctataaaaagccaacaaaccagtgttgtggacagaatcacagggacacacgacagaatttccaaaatccaattctatttggctttccctgataccactgcccttacctggtcagatttcctttcttgattatagattcttcagactaggacagttagcttgcaattttccagcattctgggtactatgaagggaagccagcatagggttaaacattcgccatggaaaatcctctacagaacttgcaatctgcttctaatcattgccctgctctgtgacctggtatctagagctaaggagggaaaagccatggagtggagaccagaaggtttcaaatttactctcagccctacctcaaacttgctgtatgacttttgggcaattcccttttcctctcaggggtctgtcttctgtctccctcctgtcaatgaggacttagacttatctgagaattcagttaaacctcagaacactcacctcagaaaaaaacaatttcagtggttccctgggccttcaaaccaaggattcccttatacaggagatctctcagagcctttttgctcttatattataggattatatgactgaacagataggtatatacctaagaaaaatgaaaacatgccaacacaaaaacttatacatgaatgcttataacagcattattcacaatagccagaagatggaaacaattcaaatgtccaacaactgatgaatgggtaaacaaaatgtggtatatacatacaatgaagtattatttaaccataaaaaggaatgaactactgatacatgctacaacatagatgagctttgaaaacatgctaagtgaaagacgtgagaaaaaggcttttgtaagattccatttatagaaaatgttcatatagttagcgtaaatactgtttcatgatgcttttgtttcagttatatataaatataaatgtactggcctgtaatgtgaaatgtgtttcttatagcaagtaatagtcaaaacggtttgaaaactactcttctagattatgttgagacagatactggtgatcaggacagtaccataatataaacaactacagtctttctcctagtctttgaaagttcagtcttatcctgtctctatttcctcattatcttttgacccctcaacccactgcatcctggctttaccctcattgtcctatagaaaactgaaacctcttgtgaataggaaaaaaaacaaccaacttgttactaaatctcatggccaactttcaatctttacctttcgtaacttttctcccatttgactccactgatgccttcctcaatcctgaaatgctccttttccttgggaacaccatccacatgacctgtatgtttatgctgtcttcacttcctgcatgggttcttcttcatccagtcattaatgccatgatttctgagttcttctgat

SEQ ID NO: 1563163 - DNA, 4001 bp, Homo sapiens
gctgcaatagaaactcataaatgaaaaaattatctcctgaccatttttgagagaatgagagacatattctgctcagtgtaaaagtggttattaaagttattttgaaaaatttcatttaaaaaaaaaaaaatgtcatagaaggaggaactggttattctcaactgcagcgacaagttctgtgctaatgagtaactttcttcaaaatggggtgatttcttagtatagcagactacacagacataatcagatgtgacctatcccttcagccatagttcatccttgttaagaatatgtttattcaaccttgcggaggttgggatgatgcctaagagaagaaccaacttaggcttctagacggacctatcgggagacctgttccaagtaccaataatgtctcttcttcaaagatgtgggcattggtgacccactattagagattttatacaagttttggggctatcagggaccttagagatcgtctagtctggattcaaacattaatccaggtatcccatcctcaaagattgccagggagctgcataagcttcccaggtgatgtcaatgcgcagctggatttggaagtgaatgcctaagtaaaaaggataatttaggcaatcacttcaaggttcatccttggaaagtggattgtttctactttttggctgttatgaataatgctgctataaacatttgtatataagtttttgtgtggatatgttttcttttctcttgggtatatacctaggagtattactgctgggttatataataaatctatatttaacctcttgaagaactgccagactgttttgcaaagtggctacaacatcttacattcccaccagtaatgcttgttttttgtttacagctatcctagtgggtgtgaggtaggtatttcattgtggtttcaatttacattttcctaatgactaattatggttgacccttgaacaacatgggtttgaactgcatgagtctacttataccaggctttttttttttcaaccaaatgaggatatttgtgaatgtgaaacccacgtatatgcagggctaacttttcatatacatgggtttcgcagtgccaactgcaggatttgagaatgcacagattttggtatatgagggggttcaggaacccatttcccccgagtttactgagggacgactgtatgttgaagcccaaaattggaggaagccctggttgggttagcaaagtacttcagttaatgcttcgatgggctttgcttagctatctgatgagcacagtttatgtgccagcttatcaatggataatttatcagggttctgcagagtcatccagtcatttactgttctggagagttgccattccaaaatactaacatttcatagcatttcttatagcacagctcagaccctaggagatcattaggtttcccataaggacctcctggagaatggctctggcttatgccagacaaaaaagaaactttatatatggcctgtgatcaaaaccagccttactccagttttgcacatgaagctgatatgaccaggagcctgaaacatcagagcctaattgtctgggttccttgatagccatctcccttggagaagaggccagtaaccgcttcatgtctgtttcctaataattggcagagccttctaacttgatgtcaggctctctgtgtttgtcagtgccaccaagaagtgtcaaattggcatcacacaagttcttcctttataaggaagggtaggtatgaaaacccaactgggaaaatgattgaattagggattgctggactgatcctttatttctagtgcctcttctgggtagcctgaagtgaaatcacctcaactaaacctaccatttccaaatttcttatctgtaaaatgaagatagtgacatattttgcttaccatgaggtggttatttatctgataagttgattctttttggatggaagacataagatatgcagagtaataggaagacgcattgagctttctagccttcttgtcagattaacacagcttaggttgtccatttataaaagctatggcaatgtcctaataatggttgtcacggtactgacatgtctgtggcaaccactacctggttcatagcaaccaaactcatatctccttaccttgtatgattatagataattactaaaggaactttaagtcatcatagtttttattcattttacaaaatatttatatagaatttactttgtgccagggctcattaaagcactttatacacattaattcatttaatccttactacagcatgacaaagtaggggctatcattcctacttttcagagatgaagttgttcacaaaggggttacataacttgccaaaggttacctagctaataaatggtaaagccagaattcaaacctaggcattctggcttcagggtctgtattaggtcaaaggtcttgcagacctcagataccagagaaactgcctctgctctgcgtatctctatctcttctagccaaactgtatcatacttagtgaactttttataaaatgctttatttttcagaatggttttagatatacagaaaaattgctaagacagtacagtgagtaaccatccctaacacccaatttccctcattgttaacatcttacgatgctgtatttgttacaattaatgaaccagtattaatacattgttattaactaaagtccatacttcattcagatttccttagtttttaacttaagcttctcagattttgttttgttttgttttttggagacaaggtctggctctgtggcccaggctggagtgcagtagtgtgatcatggctaactgcagcctcaaactcctgggctcaagcaatcctcctgcttcagcctcccaagtacctaggactgcaggcatgcaccaccatccttggctaatttattttttattctttttagagaagggtcttgctatattgcccaggctggtcttgaagcctggcctcaagtgatcctcccactgtggcctcccaaaggggtggaattataggcatgagataccacatccagccactctatttgtctttgatgaccttgacaggagtgttcatcaggtattttgtagaatacccctcacttgttgtttatctgatgtttttctcatgattagactgaagttatgtgttcttgggaggaaggccacagaggtaacgtgccatcctcatcacatcatatcaaggatacatgctgtcaacatgacttatcactgatgatgttaaccttgatcacctggccgaggcagtgtttatcagatttctccactgtaaagatactccccctactttctatcctgtactctttagaaggaaatcagtatgcattggccatacttatagaatggggagttatcctccacctccttgaggtggagtatctacaaaagttgtttggaattcttctgtatggggggggggtctgtctattcttacacatttgtttattaaatcattcatttatacagtatgggctcacatatatttattttatcctctgattataatcaatacctctttattttcttgctcaagtcgttccaactttggcctggggagctctttcagttgactcctccctctgacatactctcatcattgtaggtttttaaaaatttttattattcttattttgagacagagtcttgctctgtcacccaggctggagtgcagtggcacgatctcagaccactgcaacctctacctcccaggttcaagcaattctactgtctcagactcccaaatagctgggactacaggcgcacaccaccatgcccggctaattattgtatttttagtagagatagggtttcaccatgttggccaggctggttttgaactcctacctcaggtgatccacccaccttggcctcccaagtgcttggattacaggtattagccaccgcatccggcccacatacttactcttaattctaaattttgaattggatcacagaccaggccttcagctagggtgactt

SEQ ID NO: 1563164 - DNA, 4001 bp, Homo sapiens
agtggcgccctcacatgcacccacagaggtccaggcagttttttttccttctctttcttgcttccaagtgcactgcttcgtgcaaacctgcagaccaagggcgcggggagaggggtactgagagctctgggtacatatagatctcacccgggacggggcacacatccctcttctgaattcctagccctttacaactgccttgcccaatgtttcccgccttcggttaccctcctctcctcacagagctgcggctttggaattcattatctccctccctcttcctccttcgatgattcctctaaccctccattccacctccacccctactcccatcattggcatcctccgaagatgtcgccacacattttcatcgttaacattttccttgtaacaaaatgaagtgagaatatctaaaagccgtactggcgtgaaatgcctaaaggtctccaactccgcccttgcctccgccaactcctccatctcaaatgtaccaggacaccgccgccccccccccccaccccgtgtcattataccaactacctctgctccggagcaatttcttacctccctcacctcggtttccgcttccactaaaccttcaagactgacaaacttcagaagtgagtgcttggtcgacggaccaacaccaaggaccctgtaccccaaacagtaatttggagtaacgtcctcccaacccctggactctcttgacgcccaccccttctcagctattttcttccctgtcttgtacttgcagaacaatttcttttgcaagctccgaaatggtgtagataagagggaaggagggggatatggaaggggtccacgggcccattcgagttgcagtcgccaccatgctccacccccaaataatgccatcacccttattatgacctacttggttcttgacaactttgcgtttcttcctgctccaagggttggactggcctccggccccaagatctgcagacacaggcaacaaggcagaaactgaaggctcagcggacagaaaagcacttcggggagtcccaatatccacttctcctaattcagggtcctggctgtcaatggattttacctttttgtttctcaccctaccctcacttctctggactccgctgacaccagccctgtcgcttggtagtgttcccctacccccgtccccgcccccggccctcactccctcccgcagccccagcggtcggccattttcccagcaaaaccacacccctttcaaaccactggaagcggggcggggcgaggggggatatggaaaatccgaggagaaaaacaaaaccaaccgatctcttctattcctctccccaacgcaccctacccgcaatcacaagcacttttcctgcagccactgttacatcctcttttactgaagaaaaaaaaaatggcaggaagattgcttgagagtcggtaaagggcccaagttaaggcaaggacctcagtcatcccagtccttctgggcgccgcgggacagctccagctttacactgacctgcagggattccaggcagactattcctttgttcccaaatggcacagcgtcctactgaaagaaaaggggtatgactgtcagacgcacagccccaagattctggcttggtagatgggccagcacacaggacatgaatccgaatatccgccctccctgattcaaggccctggatgttaaaggtcccacgacgcccgagtctggggtcgcccctggaatccggccccaaggtctaccatttttgttctagaaagggcaagggatactgcaagggtttggagaaagtgaactgtgctcccccttcggcctccacggttcactgcccgcgccgcagggatcccctggcaacgcccatccacacacaaacctgctgggatccaggcagaacctcgtcctccttcccccaggccacaggccctctcgccctctgggctataggaagagtgcaaccggaccaaacgaagactaggattagaaggacgtctgcacgcgtcggctccagctcacgtgagggccacgtcaaccatgagatcaggaccccaattaccactcccatcagcagcgccgcagaagccggccctccccttccttccctgacacatcaggtcctgtcactcattttcctctttgccaaccccggagactagaagtagcttctctttgtggtgaatttgcctttctttggtttacagggagaggctgtatctgctcccgtgtccgttggccttttcttcctcttcgaggaataattttttatcttctctagtcccagtccaactgtctctctctatacctccccccatcacaagtcatgaatgtcctatttcttctgcacccctgtaaaatgtggagcaagatgttagaaaaggagatagatcgtgggagtgtcttatttaaacttttctgctcatttgtttttaaatcagtaacgcattacttttatattgagaaaataaaatgatgctattttcctttgagtggagagtttaaacgggagagaaaacccaaaaggcctcattaatttcgttattttatttgtaacagtaggaaaatatttctactggttacagccaattagtagcttttaaaacaaaataactcattttaaaattgaaaagtgggctgaggtgggtggattgctggagcccaggagtttaaggctgcagtgagctatgatgtcaccactgcactccagcctgggtgacagagagcaagcctctatctcttaaaaaaaatggattttttttacatgatctatgaattactccacaaagagacgaccagttgtctaatcttggccattttacacaaataattccttactttttctatttttgaatcaacttgcaatttgataagttaaagcaacacaaccctgtcttattaaattaaagaaaagcatgtatttaacgtcccaaagtcttgaccgactgttatatgaacctcttgtgatttgatggctactctgatcacctgcctctgaattgaattccagtctaccaaggctgaggcacctgagggtgtgagggatgcagcgatgttctaatccttcctgccctgtcaagagcggaagaaggtgctgccctcccacccttccacattccatagcctctcatcccctgtattcaggcacccatctattgttcactccaaaaatatatatagatgagtgaccaaggtggtaaatgccacgtttactcaggtgaccaatcagagtaaatacctttggctccttcccttccttccccaaattcccacagaggtaacagcaatgcatcgaagggctttctgttcctacctacccctctgcccttattcatggtgcctgagtgagcattgctcctaatactgtgtgctgccaccacctgacctgagaggtgcagcccgctgggcttcttgcctctggcttccttaaaaagagaacctaatcttgttgcagagttactgcctgccagtccatatccaccttggtgcccgctcagccaaatgtatgcctaaggaacaatccccatggattaacccagagtaggcattctcacacggacaaccttgtggaccacctgcaattgtggtcatacgtatattcattttcgtggagaaaggagccatagctttcatcagattctcacaggcatgtatgacttttaaaaaataactaagaactattaatactttcctgaaaaaaagctatatatcccctcaatagaaaatctactccttcccagcactgtgggaggctgaagctggcagatcacttgaggtcaggagttcgagaccagcctggccagcatggtaaaacgccatctttattaaaaatacaaaaattagccgggaatggtggcacgaacctgtagtcccagctacttgggaggctgaggaaggagaattgcttgaacccaggaggcataggttgcagtgagttgagattgtgccattgcactccagcctgggcaacagagcaagactccatctcaaaaaaaaaaagaaaaagaaaaag

SEQ ID NO: 1563165 - DNA, 4001 bp, Homo sapiens
caaccttagcctgctctgccaatgcctacaacttccagcatctaaatggaaggacgagaggcagtacagacatgggtaaagctggtagagagctggaaaaacagtagagatctcagattctgctatgatgccccaccccctacccccaaggcccctacatggtgctcatgcacataccaacctgggatcaagagcagtttgcttttttccactgtagctgcagttgcacagagcccaaaaggaagacagacctgaggacagatcagaaagggcgtttttgagccattggtggacgaattctggttcttttcctgatttgggcccctgtgggtcaaaggttttcccccctcagggatcctcttttcctcttcagcctctcctcccccaaatattaactaaggcagatgccacgcccctttctctgcaccaaaaagaaagggcctggggcaagggtgtctttgaaattaaaagagagaagatgcaggaggagcctctggtcccatactctactcttgtctctgccacacccacaccagggggccccagacaattccaaccccagcactgaccctccaaagattcaaggctgtttctccttacttcagttcagttagagcttcatcctaaggacagactgaagagcagaaatatagactgtcgacgttagacaatgaaagcctggtggatggatcagcatccaggacaagggtctcagtaactgccttttcgtgtttgcacatcagaatgtcaaatgattctacctctcaattccttcaactcttctcaccccacccctcccacctcaatcctcctcctgcgcaggctccccaggcactcaatccctccttccgctttgccccgcccccgtccgccatttctccaggacacaccgccacaccccttctcctgcaacgaagcgggaggggagcggggcgagggtgcagcaaaagctggatgggacgcggtatgggggactcctgccaaacaattcagtgttcccctcccaggatcacccatctttcgctccccagcccctaggcctagcgttagcctgcagaagaggggcctcaacgtctgccttttcgggttcagggtcgagattttccacgatttctctgctatgggctctacctcccacttcccacaaatccccccaacaaccgccatttctcccgcctgcatacccgaattccttttccaggactgaaaagacggggggtgaacggctgtgtgggccggaggtgtctggaaagcagtctgcgagttaacaaggcggtttaataccagattctctcagggtccgccccctcccccccacctcccgtgaagcccagacagcgccaaacccgccacctctccaacagcagctggtacacccatttcccagcactcccaaatcacagagggtcggctgggggatgggagggtgccggggcggtggtggggaaagtcagggtgggagtgtgccgcccagattgttaccaaattgcatgccccacccccgcctcctggttaccctttcccaacctccctgctggccttctatgcgctgccacgtttatttctcttccctcctcctctcaaaacaggacggaatgtggggtgcgggcctgaatattataaacaaaaccaaaaaacactggctggaaaggaagtaagcggattcttcgtaaagtctatcaaaagtcttttcgtttccccctccccctttccccaccgcccaccaaaatgagccgcgtttgagcacctcaggtctggaaagccggccaggagtgggggagaccgaggcacccgcggcctccgactcccgcatccctagattacccctattcaggggtcccagactgtgcccaccctcacacccacctgcccgaatctgggggaattttctcctcctcctcctcgcctgggttaaacgcacggcagcgagctgcgcaatagagttggtacccagaggaggacggagaacgacggtcagggctttaagtacctttgcccacgtcagctcctggtcacgtgagggctgcatcgccagtaagcttgggtccccaatttccactcccaccaagagtacgagccccctcctttacttccattcccatctcaccccaccacatcaggtcctgtcactcatttttttgtctttgtagtcctggaggcctaaagtagccccttctccctgctttcacaatttgcctttctctggttacctgggaggggctgcatcttctcggagggctactgaaaatttttacttttttgttggggaattgtttcatcctttcctgggctactggacactcttccatctctccacctctagttcctcagcccctagtccccaggattttccttgcagttgactccctgttccagtatagttaaggggcagagtgtcagaaaggagacaaggagtgggagtggggtctgtacttctcaaatacttctgttttgttttcaaaactatcatcatgctttatttttatagtaagaaaattcagtaaaacaagaattcaatgtgggaagtagcaacaaaaaaagggtgggcatgttttgtaaagaaaaaaggtttcctgcgtccattggaaagcaccattaattttggttaatttttaccgaatagaacatgaattcttttggtcacataggaaatagtttttaaaatatgctaaggtatttgaacatctaaaatggaatatttctcaataagataagcatatttccatgtgatctgtaaattgatccacagagagatgttcagttcttcaatcttgtttattttggacaaataatacgctacttttttctccttctgggacagcttttaagttgcataaataaatgatcctgtcttgtcctgttagagaaacacatttatttaatattcccaaaccattgctgactgctgtgtgtgaacctcctgtaatttgatggctgtaaccatgacagttttaaacacctgtcttcggattaggttccagttaatgattcaactctgggcaaaaggaagagctgtgaggccaaggaaactgagtgtggtgggtgcagagtggtcaaatcctccctgccctgtcaggaggaggagggagatgctgtctctctactccctcccatatgccagagccgctcatctcctgcattcaggtacctggctcagttgctcacacccaaaatatatccagacaagtgaccaagatgcagacctggttaaatgtctttggctctttccgtccctcccccaagttcccagaggaaacccattgatgcatagaaaggattgctgttcttacctgaccctgcagctgacgatttgtgaaacctgtgatttcacaaaaaggtttttgtgatcacacaaaaagtgattgttgggggaagttcccaggcctgactgctgtctgtccttattcgtggttaccagtgaaccttgctccaaacactgtctgctactaccacttggcctaagagatgcatcctcctgggcctctcacttctgcctccttagctccaggggacctaggaagagtctagccttcctgcaaggttactgcctgccagtacacatccaccttggtgccctctcaaccaaatgtatgcccagggaacaatccccactgatgaacccagagtaggtgttctcacccggtcaactctgtagaccacctgaaattgcattcacctgcaaagctttgtttgggattatatgtgtggttaaatgcatttttttcaggaacagagatcactgacctcatcagtttctcaaggggtctgtaacccccgccctgcaaaaaattaagagctaatacaatggccaagagggtctgtgttatatatatataatagtccagattaggaatcttgtattttgttctggtaatacaagtattatatattagtggttaaaaatattcaaaacaataaggaaatatataaagtatacagggaaagaaacttttgttatcttttccactcccagccactgtcaacagtttccaactttcttt

SEQ ID NO: 1563166 - DNA, 4001 bp, Homo sapiens
ccccagcatcatccacatccccagatccaccctcagccattttttccttgttctgttttcttcccctagtcagtctataaatgcaatagcaggcgccagccccaatcaccaggcctgcggtcacccagcctactttcctggcgtagcccatgcaatcgtccccgacaatagcagggaccaaggaatagagtagtcactcaggctgggggaggaaggctgtgggactgggctcaagcctgtggagggtgatcgtcttcagccacttcaaggccacaagagctgattctgggggttgacctaggagtggaagaagaaaattgggtttgagtttctcttctgcttgtgttgccccatgcagggagctgcacagagggacaagataataataattgaatgctaggtaggaaatgtagattgttgacgaaatctctatgcctctcatttcagcctttccctccccatcccaggtcaccccgcccaaagcctagataatgtcaatggaatccacagactctgctggggtctcagtcaccacaacctcagatgtccctagggacctgactagaacccttgcactaacctcctcaagacaagcagttcgccccttcttcttttccctagtggtgtgccactcccaacaatctttccaatctgcagagagaccagagccagtgagaatggagcacttgatgggttgactgttgattcgttgctttcctgattcaccattccggttatcaggtttgtttttaacctctttatgctatcccagacatgcacaggtctgccccctccctagcctgaaatgggagggaggtaaggaaaataaagcaggattggaagagcctgtccaaagtgccggcgatttctaacccctcccccattccaggcagcccccacgcccacaccgacctctactgatcggaggaaacttcctccctcgcttcaagcggagccacctgctacagcagacctgcaggatgacagatcgaaaacatggagagtaagtgctgttgagagaggaggattacgaacaaactatccgataggtttccctgctgtcatttcccccacttccccccaaccacagacacacaaagcacgccatttcgccacagtccggggagtgcaagaaacacattcggactcagacatgtacctagattattaccttctctgccttctccccacccccgccgccacccccgtccctcctagggtccccagatggtcttaccctcaaatcgacctccaccgattaggattaaattccttcctcttcttttgcctggcgttgtgccgcaacctacagaaagactggccacccgggagaggcttggacccactagacacagagccatggtcagtaagacacagccacaggcagaaagacgggaaactgccgccactgagcgcttggtggacggactagtccccagaacacaaaactcttttctaattcggaggcctggttgtcagaggtttcccacccctattacctctcttggggttctgctgacatatcgcgttgcatctcaccacccccgcccccatatccagccattcccctccggcactgtcctggtggactaggggccaacacccaggccacagctccctttccggattgcggccctaggctcccagcagattcccatttcccagtctctgagctcttccccaaacaccccgcagctcaccgtttcgcagcatcgaaatgggctgcaagcgggacatatgtcttggaaagcgggcggcgagtgggagagacgacggaggcgcctcagtacccgcgacggtctcggccctacgccctcaagcaccccgactttatggaatcttccaggtactgacctgcagggattcgggacaatttccttctcctcttcctttttccctccgccgcaggccggcccgccctcagggcagtggggagctggtactcagacgggaacaacgaccaggacaagaaggacttctgcacacgtcagctcttggtcacgtgagggctacgtcatccaccaactcgggtccccaatttcccctcccaccagcagtgcggcagaagagggcccgcccccctcctttccctcccccacaccaggccttattactctttcttcttcgataatctcatcaccttgtagttgtgtttcccttccaccgattaccagaaagggacggcatcttcccctggggctatgggccacttgtacttttatgaaaaattgcctcttccttccctaggctcctgggacagcagcctctccctccacctcccctcccccgagctatgaaagtctaccatttcctctgaaatctagtcccagatctgaaaggaacaagcgatcagaaaagaaaatctggaatgagagtgtggtttttactttcttaatactttgttatttttgttccgtcctcccccacccccagcctgcattctttttatgagaaaaaaaaatactataaagctatttccattttagaaaaaaatgagtggaggctgaagaatgatgttgggtgatggcctccaaaagtcccacattttctcacttggtggagagtgttacacacttcactcaaagcaatcttaatgtcttctggggcctagcacacagcacagccctgagtgagctaatcagtgtgtctggcaatacgtaagtcttctgactagaccagtcttctgaatagaagagctacagactttcacctgcacccattagcaaggaggaggcattaaacccacaaaagccagaacgcagaaaaaaaaaaaactgaggagaaaacataagtgcacagtaggtatctgtgagataaagcatgcacactgaaaaaatgagtgtgcataaaaagaacattacaaaatatgcttgggcaaaatagagaatatcatctataaatgaaataagtattagaggaacacagaccaagacaaaattggctgaaactgggacctagcaattagtatgaaactattttacttactggtttgataaactgaataattcacccatcatcaatgatttaccttttttaaagtaggaaaaggaataaaataattacatcccctcattatttaagttaaccagatttgatttcagttgcttgcaaccaaaccaccttaactaaagcacaacacaaaaacaggtaacaatacaaaaagtaatatagcttttcagaacatagggtcttcagtgagatattcactaatagtttgaataaaaggttattatttgagtataacttttaaaatacacagacaatatgggagtaaatcaagagactgaggaagttgagaacaggcaaacccccaggaaaattcatatctgtgtaacttctgggaggcagtactagaatgtgattgaaatttatttagtaaacagaaaccaaatcaactatatgatcctgtgtttagagaaagatcatgtgtagcaaaggggcttattcaagcataggaatatatgaaaaggacagtcagaagaaagtgttggtatttcccacccaagcactgcctggaggagaaaaagtgttggctaaggagaatggaacatttcactttctctggcagagtcatgcccatgatgtgtaatagtacttcatgcgtcctcagctgaaacccccttcttaaaatgaacaaatacccttgctctgattgcaggctcaccaaacaaccttctaaggttgtggtttcccaagtagtagcttgtctacagggaaagaataggcaggtaagactgacggaaacctccagtaccccctgacaattgtatttctgagggcaaattattcagttgtcactcctgttgaaacagcttcccttgtggtctacttatggggagagaatgcagagatccctaggtttgagcattcagatctgtttatatataagtctctatgaatgggagtctttccttgaggcatccagaggcaattcttctcagcatacaaacaaaatcaggatttggtcatgcaatactgaggaagagaccctgaactgtaga

SEQ ID NO: 1563167 - DNA, 4001 bp, Homo sapiens
aaagaaccttttgtagctcttgaggggacaaaacggtatcatctgaattgggggaagcccgtttctggacagcccgacgtgcccgggtagccctggcccttgccctggccctagctctggttccagcttcagtcccaatccgagcccaaggtgggtaccatactatactcttgctctcattgctgtcatcatcatcatcagaccagtcattatacctggccccagaacagtccccagcatcatccacatccccagatccaccctcagccattttttccttgttctgttttcttcccctagtcagtctataaatgcaatagcaggcgccagccccaatcaccaggcctgcggtcacccagcctactttcctggcgtagcccatgcaatcgtccccgacaatagcagggaccaaggaatagagtagtcactcaggctgggggaggaaggctgtgggactgggctcaagcctgtggagggtgatcgtcttcagccacttcaaggccacaagagctgattctgggggttgacctaggagtggaagaagaaaattgggtttgagtttctcttctgcttgtgttgccccatgcagggagctgcacagagggacaagataataataattgaatgctaggtaggaaatgtagattgttgacgaaatctctatgcctctcatttcagcctttccctccccatcccaggtcaccccgcccaaagcctagataatgtcaatggaatccacagactctgctggggtctcagtcaccacaacctcagatgtccctagggacctgactagaacccttgcactaacctcctcaagacaagcagttcgccccttcttcttttccctagtggtgtgccactcccaacaatctttccaatctgcagagagaccagagccagtgagaatggagcacttgatgggttgactgttgattcgttgctttcctgattcaccattccggttatcaggtttgtttttaacctctttatgctatcccagacatgcacaggtctgccccctccctagcctgaaatgggagggaggtaaggaaaataaagcaggattggaagagcctgtccaaagtgccggcgatttctaacccctcccccattccaggcagcccccacgcccacaccgacctctactgatcggaggaaacttcctccctcgcttcaagcggagccacctgctacagcagacctgcaggatgacagatcgaaaacatggagagtaagtgctgttgagagaggaggattacgaacaaactatccgataggtttccctgctgtcatttcccccacttccccccaaccacagacacacaaagcacgccatttcgccacagtccggggagtgcaagaaacacattcggactcagacatgtacctagattattaccttctctgccttctccccacccccgccgccacccccgtccctcctagggtccccagatggtcttaccctcaaatcgacctccaccgattaggattaaattccttcctcttcttttgcctggcgttgtgccgcaacctacagaaagactggccacccgggagaggcttggacccactagacacagagccatggtcagtaagacacagccacaggcagaaagacgggaaactgccgccactgagcgcttggtggacggactagtccccagaacacaaaactcttttctaattcggaggcctggttgtcagaggtttcccacccctattacctctcttggggttctgctgacatatcgcgttgcatctcaccacccccgcccccatatccagccattcccctccggcactgtcctggtggactaggggccaacacccaggccacagctccctttccggattgcggccctaggctcccagcagattcccatttcccagtctctgagctcttccccaaacaccccgcagctcaccgtttcgcagcatcgaaatgggctgcaagcgggacatatgtcttggaaagcgggcggcgagtgggagagacgacggaggcgcctcagtacccgcgacggtctcggccctacgccctcaagcaccccgactttatggaatcttccaggtactgacctgcagggattcgggacaatttccttctcctcttcctttttccctccgccgcaggccggcccgccctcagggcagtggggagctggtactcagacgggaacaacgaccaggacaagaaggacttctgcacacgtcagctcttggtcacgtgagggctacgtcatccaccaactcgggtccccaatttcccctcccaccagcagtgcggcagaagagggcccgcccccctcctttccctcccccacaccaggccttattactctttcttcttcgataatctcatcaccttgtagttgtgtttcccttccaccgattaccagaaagggacggcatcttcccctggggctatgggccacttgtacttttatgaaaaattgcctcttccttccctaggctcctgggacagcagcctctccctccacctcccctcccccgagctatgaaagtctaccatttcctctgaaatctagtcccagatctgaaaggaacaagcgatcagaaaagaaaatctggaatgagagtgtggtttttactttcttaatactttgttatttttgttccgtcctcccccacccccagcctgcattctttttatgagaaaaaaaaatactataaagctatttccattttagaaaaaaatgagtggaggctgaagaatgatgttgggtgatggcctccaaaagtcccacattttctcacttggtggagagtgttacacacttcactcaaagcaatcttaatgtcttctggggcctagcacacagcacagccctgagtgagctaatcagtgtgtctggcaatacgtaagtcttctgactagaccagtcttctgaatagaagagctacagactttcacctgcacccattagcaaggaggaggcattaaacccacaaaagccagaacgcagaaaaaaaaaaaactgaggagaaaacataagtgcacagtaggtatctgtgagataaagcatgcacactgaaaaaatgagtgtgcataaaaagaacattacaaaatatgcttgggcaaaatagagaatatcatctataaatgaaataagtattagaggaacacagaccaagacaaaattggctgaaactgggacctagcaattagtatgaaactattttacttactggtttgataaactgaataattcacccatcatcaatgatttaccttttttaaagtaggaaaaggaataaaataattacatcccctcattatttaagttaaccagatttgatttcagttgcttgcaaccaaaccaccttaactaaagcacaacacaaaaacaggtaacaatacaaaaagtaatatagcttttcagaacatagggtcttcagtgagatattcactaatagtttgaataaaaggttattatttgagtataacttttaaaatacacagacaatatgggagtaaatcaagagactgaggaagttgagaacaggcaaacccccaggaaaattcatatctgtgtaacttctgggaggcagtactagaatgtgattgaaatttatttagtaaacagaaaccaaatcaactatatgatcctgtgtttagagaaagatcatgtgtagcaaaggggcttattcaagcataggaatatatgaaaaggacagtcagaagaaagtgttggtatttcccacccaagcactgcctggaggagaaaaagtgttggctaaggagaatggaacatttcactttctctggcagagtcatgcccatgatgtgtaatagtacttcatgcgtcctcagctgaaacccccttcttaaaatgaacaaatacccttgctctgattgcaggctcaccaaacaaccttctaaggttgtggtttcccaagtagtagcttgtctacagggaaagaataggcaggtaagactgacggaaacctccagtaccccctgacaattgtat

SEQ ID NO: 1563168 - DNA, 4001 bp, Homo sapiens
caaggtatcagcctgaacactggccacaagctgaggctgtgtacaggacaacatgtctgtcccatcccccaccttagccataacattgggattgcctctgctcttatccctggcatcaggcaaggcctcaacctgggaattggccctcaagtttgccttggcccctgctttagtcatggcattgggattgcctctgttcttaaccttagcatcagacatggcctcagcgtgagtactggcaacagcttgaggctgagcagcagctctcatgtcagctccagttattgccttagatatgacattggtatttcccctaccatcaaccctggcaccagacgtcacctcagcctgtttcttggccacagtctgaggttgtatacaagctctcacatctgcccctgcccccaccttacacatggcattggtgttacccccggcatcaatctttgccccaggaatggcctcagtctgggttttggcaaaaatttgaggctgagcagaagccctcgtgtctgccccagactctgccctagacatggttttacaattccccatgtcctcaaccccagtaccaggcatgtcatcaccctggatcttggtcacagcctgagactgtgcacaggacttcatgtccactccagccacctccctggacatgccattgggatttcccctagcatcaactgtggcaccaggcctggcctcagactgagtcttagccacactcacagtctcttccagagctcttgtcttggtttcatccacaattccagtcttgttcgtggcccccatcttggccacttccctgggtactgccaaggtctcactctgtgtaaccattactctgttaatctctgtctctttttcagccaatatatgagtttcagctttggtctgggtcattgcttctctcttggcctctgtcttggcaaccagcgcccaagctttagccttggtctgtgtcactgcttctttcttaactattttgccagcctcagcatcagtttgggtcactgcttctttcatggccacttccctggctttggccttgacctcagtcagagtcactgcctctgtcatgaccagtgttccagccaccactttggactcagattgagtctctggctctgccccaaccattgccttggcctgagagttggctctgtgtatggctatagcagtggccttggtctctacttcagccctaggcccacttcttgctccagtttctgctccaatctcgacttggggtttagtcttaatctctgcttcatttatggccaaggtctggctctgtaccccaaccacagtctccatcttaactgtggatccatttctggcaagagtcctcacactctgggctcttcccttggtaaatttgtaaatgtagtagcaggtgccagcccagatcaccagtcctgcagtcacccagcccacttcctgaatgcggcccatgtaatcacccctgctaaaagcacgaacaaggtatggtagagcgcactcgggctggggtaaagagagtggtagttgtgggtgtaggcctgtgagggtgctggtcttcagccactcaaaggccactacagctgcctctggaggtggacctagaagtggaggaaggaaatggactaaaatttctcttctgattttgttgcatcatacagatagatacacagaggaacagaaaatggtagaaccatgtgcttggtggaagagaggatgattagcagcctctccattcctcttatttcatcttctctccaccttccccaatgcccaataattttcttccaagatacttctatacacatttctatacaccaaatgaacagtggaaaggatggtaggaggtctgacgataaatgggagcaaccaagaagtcccagactttgatttctactggacctactctggtcacctgtctacagggccccaccctcataccaacctgtaatgatccgaggcagttccctcctctcctcttgcttctcttggcagtacaccctaaagtagatacataaattcatgagatctctggacctagagacagacagacagatggagggacagatgggagtagagagtttgttcttgatgggacagacatattattagcaaactacctttctacgtttctcagtccaccccactccctaagacactgtcacactcttttccctgtaccagaattaaggtgagggtatggagtaaatgacagggatggtgggaaaggtggctggaaaaggagagactgaggatcctcatcctccagactggtcactggtccttactggatgcacactggtctccaccaacccactctagaggtctacccaggcagtccccacactcttaccagtctatactgatcaggagcaatctcctctttgtttctttgcttccagtgatcttaagccctgcagcagacatgcaggcagatctatggacaagtaaacaaacagtaggtaatggaaaccgagtccctggtagaacagacaagcaacctgatccctgaccccaatgtctgcctcgccagagcccaggttctatatactaatgtgtaccatctcatggtccccccatcaagtcttcccccagtcatactccagcccacccttacccccatattcctatcatttcctgcactgaaatccacaggaggcatggcagcactgtggcaatccagcactccactgagaccctcttaaatctcacccacctcctatgcccaccctctcttgtcatccccagagactacccccacttcacaccaacctccatgcttctagattgatctcctcctctttcccttgcttccaatggtaaacagccctactgcaggcctatgggaagaccttggaacagatggagaaaaagaagagagtggatgttaagtacttgtgacacttaccatctaagacataggtccctgtacctgcctgcctggatttagagacccatttgctggcagaaaaaaaaaaaaaaaaaagcctggggcttccccagcactgaaatgggaaggatggaaaagggaggcaggaaaagtaaaaggcaacagacagaggcacgttattttattttattttattttattttatttattttattttttatttattttgagacagagccccactctgtcacccaggctggattgcagtggcaagatcatggctcaccacagtctcgacctcccaggctcaaaagatcctcccacctcagcctcccaagtagcaggaactacagactgtgccaccatacccagctaatttttaaattatatgtagagatgaagtctcgctatgttgcccaggctggtcttgaacacctgagctcaagcaatcctcttgcttgggtctctcaaagtgctgggattacaggcaagagctactaggcccaacaaggcaaattattttaaaaccacctgtagggttctagggatttccccaaaagcccaccatttccttcaccaagatggtcaggtaggtagagggatctggaaaactgaaggatggcaggagagatgggagaccccagatcccatactctagaaccacaacctactgctgtccacgtccctttcaacctatctctaggagtctccagcagaagagaaaagctataggggaagccttttgcttctacaaaatcactatccttccccaccaaaggctatctaaaaaataataataataataatattctttaatataatttatctttttctcaatattatctgaaatgcaaataaaagcatctgtagaaaagtttgctgtcttcattggtcttcaacatacaatttaaaagtcctaagcttggtaagtaaaatgcagtttagggaaagtccccaagctagccccaccccacatcccattcagacagccgcacctaagttcctgtcatagaattcatatggaactccaatggtttagatagtgtctgtactcacactaacctccttgatccagtgcagttttctcctctccttcctttctcctcgccgc

SEQ ID NO: 1563169 - DNA, 4001 bp, Homo sapiens
tggtgacaagccctacagcagatctacaggcagacctatggacaaataaacaaacaggagaatgtggaaactgatctcctggtgacagaccttggtcccttgcccttattcttgcctttccagattttgtctagtgtttccctcctcctatcccctctcccccactgctttgtttcagggctactcctcctcctccttcctattgcccaccatcttcctcttcagtgattgccctagaatgtccctcgttcagattagactaggttcaagcgtgagagcaggacaagcagtggagagtgggaaaggcagcttagcattctgtacccccacaacttaccaagactcccaactaaatcagcagcagcagggggtggggcagatgggaataattggtaaaatgacaaaacagaagagatggaattctctagtcgaagttgcccccctgtccctgtacctttacaccaaccttaacagatacagggcaattttctcttcttcgtaatttcctagttttaagttgggtgaccattttacaaaacttcacaactgacagttccacagacctggggacagatctacctacagggattcacaaaaacagagaccaataaatgaagacacaggagacagttgaggctgtttttggtagagaccagcacctagggcacagtttctttctggatataagtacctgtttggcaaacattttctatctcccctttttctcccactcctaaatctccaagcccctctgctctattctcaaagtctgacaattcctatacagagacaactcaaacatccctacaaggtagtagtagtggtgttagtagggacgaaatgcctagacaaaccacggaggctggggaaaaaatgaaaagtatttatttccatatttcatctgggttcctatgtttccttcctctctcccaaagcctatcattttctgcaacataatgcgggtaagggaggacatgttaggaaagctggcagagagttctggaggctcccttacactcctgcctactctaatcttagccatctaccacctccaagtactgcctcccaagtactgcccactctgtacaaaccaggccaattttcttttccttctcctctccccttgaggtctgctgtcccctacagatctttacagaaacatggagtgctgcaaacttaggaacagatttacacataaaaacgcgtgatacacacccaaagaacaaatgaaaagacagagagagagacgtggttattaatggtcagaccagtaaccaagacatgagacccttttcaaatccagagccttgattatcaaacatttacaacctctttttacattctctccctctcagggctccccagacaactgtcctcgcctgtggaagtagccctctcttcctcatctagtctgccttttccctgctagaagctgcaacctttttcttcccaagcatggtctgaggtgaaccgagtgtatggaaatcaagctagcaaaaggtagatcatttttttttaattgttgtgtgccattccaattacccatctctctctccttctcaccgcccgcctcccatgaccaggtcgcgtatccagtgttcacctctgatacccacatccacccccaagcgatgcgcaccttctcactgaccttctctgcttggatcagaggcagttttcttatttccttgcctcgaggtgctgtgtcatacagcagcaggaacagacagtcagacacaaggactcgaggcaatggcggcggctgtgtatggggattgactcggcacctgggactcaagacgagataaccgctttatcagattaaagactgcgattggcaaactgttgtcacttttggtattcttttctccttcctgttcccagggctcctcagaacctcgcgcgtagttaccatttaacatctaccttttcctccgcagacgaggttcttccacgtccgcgttacccacaacggcagtgggaggagctagagcgtagtttatggggatccggcttatggaagcggagtgatatcaggctttgtttagcgccgcgactcttttctgtcggagggctccctgtcctgtaccctgtggccgcttcaggtattggaatgcgcagggacgaattccggatatagggaaaacggcgctggaacaagagaggcagacaaataccagagtgtttctgtattagttccccttttgcgggagctccccccaccaagcctaccattctttcctgaactgaaatgcacatgggtttccagctgtggtgtcaggaaatctcttctggcctgacaggcggaagtgttccagtctttcgaagttcgttctccaaacacagaggcccactgaaatgggcggtctcggggtggggcccagggtaggaaagtcagcaaagagagtcaagactgagataggaggatacatactaatcgattccacaaactttgtgttccttcgagtcctccctcccagcccttaattttcattttcttttttttttttttaagttctaggatacatgtgcaggatgtgcgtgtttgttaaataggcaaacgtgtgccgtggtggcttgctgcaccaatcaacctatgacctaggtattaagcctggcatgcattagctatttttcctaaggctttccctcaccgccccccacaacccctgacaggtcccagtgcgtgtttttcccctccctgtgtacatgtgttctcattgttcagcttccacttataagggagaacatgcagtatttgttttctgttgctgcattagtttgctgaggataatggcttccagctcgatccatgtccctacaaaggacatgatctcattctttattatggctgcatggtatttcatggtgtatatgcaccacattttcttaatgttatcactgatgggcatttgggttgatgccacgtctttgctattgtgaatagtgcggcaatgaatatacgtgtgcgtgtatctttgtaatagaatgatttatattcctttgggtatatacccagtaatgggattgctgggtcaaatggtatttctggttctagatatttgaggaattgccacaccgtcttccacaatggttgaactaatttacattcccaccaatgtaaaagcgttcccatttctctgcaactttgccagcatctcttgtttcttaactttgtattaattgccgttatgactggtgtgagatggtatctcattgtgattttgatttgcatttctctaatgatcagtgatgttgagcttttttccatgtgtttgttggccacataaatgtcttcttttgagaagtgtctgttcatgtcctttgcccactttttaatggggttgtttgtttttttctcgtaaatgtaagttccttgtagattctggatattagacctttgtcagatagatagactgcaaaaattttctcttctgtaggttacctgttcactcggatgatagtttctttttctgtgcagaagctctttagtttaattagatcccatttgtcaaattttgcttttgttgcaattgcttttggcaatttgcctgtgcctgtgtcctgaatggtattgcctaaattttcttccagggtttttatagttttgagtttgacatttaagtctttaatccatcttgagttaaattttgtataaggtgtaagcaaggggtcaagtttcagttttctacatatggctagccagttttcccagcaccatttattaaataggtaatcctttccccattgcttgtttttgtcaggtttgtcgaagatcaaatagctgtatatgtgcagtcttatttctgagttctctattctgttcgactggtctatgtgtctgtttttgtaccagaaccatgctgttctacaaggttactgtagccttgtagtatagtttgaagtcaggtagtgtgatgcctccagctttgttctttttacttaggattgtcttggctatacgagctcttttttggctctgcgtgaattttaaaatagtt

SEQ ID NO: 1563170 - DNA, 4001 bp, Homo sapiens
aacttaccaagactcccaactaaatcagcagcagcagggggtggggcagatgggaataattggtaaaatgacaaaacagaagagatggaattctctagtcgaagttgcccccctgtccctgtacctttacaccaaccttaacagatacagggcaattttctcttcttcgtaatttcctagttttaagttgggtgaccattttacaaaacttcacaactgacagttccacagacctggggacagatctacctacagggattcacaaaaacagagaccaataaatgaagacacaggagacagttgaggctgtttttggtagagaccagcacctagggcacagtttctttctggatataagtacctgtttggcaaacattttctatctcccctttttctcccactcctaaatctccaagcccctctgctctattctcaaagtctgacaattcctatacagagacaactcaaacatccctacaaggtagtagtagtggtgttagtagggacgaaatgcctagacaaaccacggaggctggggaaaaaatgaaaagtatttatttccatatttcatctgggttcctatgtttccttcctctctcccaaagcctatcattttctgcaacataatgcgggtaagggaggacatgttaggaaagctggcagagagttctggaggctcccttacactcctgcctactctaatcttagccatctaccacctccaagtactgcctcccaagtactgcccactctgtacaaaccaggccaattttcttttccttctcctctccccttgaggtctgctgtcccctacagatctttacagaaacatggagtgctgcaaacttaggaacagatttacacataaaaacgcgtgatacacacccaaagaacaaatgaaaagacagagagagagacgtggttattaatggtcagaccagtaaccaagacatgagacccttttcaaatccagagccttgattatcaaacatttacaacctctttttacattctctccctctcagggctccccagacaactgtcctcgcctgtggaagtagccctctcttcctcatctagtctgccttttccctgctagaagctgcaacctttttcttcccaagcatggtctgaggtgaaccgagtgtatggaaatcaagctagcaaaaggtagatcatttttttttaattgttgtgtgccattccaattacccatctctctctccttctcaccgcccgcctcccatgaccaggtcgcgtatccagtgttcacctctgatacccacatccacccccaagcgatgcgcaccttctcactgaccttctctgcttggatcagaggcagttttcttatttccttgcctcgaggtgctgtgtcatacagcagcaggaacagacagtcagacacaaggactcgaggcaatggcggcggctgtgtatggggattgactcggcacctgggactcaagacgagataaccgctttatcagattaaagactgcgattggcaaactgttgtcacttttggtattcttttctccttcctgttcccagggctcctcagaacctcgcgcgtagttaccatttaacatctaccttttcctccgcagacgaggttcttccacgtccgcgttacccacaacggcagtgggaggagctagagcgtagtttatggggatccggcttatggaagcggagtgatatcaggctttgtttagcgccgcgactcttttctgtcggagggctccctgtcctgtaccctgtggccgcttcaggtattggaatgcgcagggacgaattccggatatagggaaaacggcgctggaacaagagaggcagacaaataccagagtgtttctgtattagttccccttttgcgggagctccccccaccaagcctaccattctttcctgaactgaaatgcacatgggtttccagctgtggtgtcaggaaatctcttctggcctgacaggcggaagtgttccagtctttcgaagttcgttctccaaacacagaggcccactgaaatgggcggtctcggggtggggcccagggtaggaaagtcagcaaagagagtcaagactgagataggaggatacatactaatcgattccacaaactttgtgttccttcgagtcctccctcccagcccttaattttcattttcttttttttttttttaagttctaggatacatgtgcaggatgtgcgtgtttgttaaataggcaaacgtgtgccgtggtggcttgctgcaccaatcaacctatgacctaggtattaagcctggcatgcattagctatttttcctaaggctttccctcaccgccccccacaacccctgacaggtcccagtgcgtgtttttcccctccctgtgtacatgtgttctcattgttcagcttccacttataagggagaacatgcagtatttgttttctgttgctgcattagtttgctgaggataatggcttccagctcgatccatgtccctacaaaggacatgatctcattctttattatggctgcatggtatttcatggtgtatatgcaccacattttcttaatgttatcactgatgggcatttgggttgatgccacgtctttgctattgtgaatagtgcggcaatgaatatacgtgtgcgtgtatctttgtaatagaatgatttatattcctttgggtatatacccagtaatgggattgctgggtcaaatggtatttctggttctagatatttgaggaattgccacaccgtcttccacaatggttgaactaatttacattcccaccaatgtaaaagcgttcccatttctctgcaactttgccagcatctcttgtttcttaactttgtattaattgccgttatgactggtgtgagatggtatctcattgtgattttgatttgcatttctctaatgatcagtgatgttgagcttttttccatgtgtttgttggccacataaatgtcttcttttgagaagtgtctgttcatgtcctttgcccactttttaatggggttgtttgtttttttctcgtaaatgtaagttccttgtagattctggatattagacctttgtcagatagatagactgcaaaaattttctcttctgtaggttacctgttcactcggatgatagtttctttttctgtgcagaagctctttagtttaattagatcccatttgtcaaattttgcttttgttgcaattgcttttggcaatttgcctgtgcctgtgtcctgaatggtattgcctaaattttcttccagggtttttatagttttgagtttgacatttaagtctttaatccatcttgagttaaattttgtataaggtgtaagcaaggggtcaagtttcagttttctacatatggctagccagttttcccagcaccatttattaaataggtaatcctttccccattgcttgtttttgtcaggtttgtcgaagatcaaatagctgtatatgtgcagtcttatttctgagttctctattctgttcgactggtctatgtgtctgtttttgtaccagaaccatgctgttctacaaggttactgtagccttgtagtatagtttgaagtcaggtagtgtgatgcctccagctttgttctttttacttaggattgtcttggctatacgagctcttttttggctctgcgtgaattttaaaatagtttcttctaattcggtgagaaatgtcaatggtagtttgatgggaatagcattgaatctataaattactttgggcagtatggccattttcacgatattgattcttcctatccatgagcatggaatgtttttctatctgcttgtttcctctttgatttccttgagcagtggtttgtagttccccttgagtaatgatcttactgctaaagtatgtctatcaactgataaaattttaaaatcatcattcattttcataataactgctgttttatgacttatgtaattatcttaggaacatttcagacatttgaaagatccaaagcagaaaaggtat

SEQ ID NO: 1563171 - DNA, 4001 bp, Homo sapiens
tcccctctcccccactgctttgtttcagggctactcctcctcctccttcctattgcccaccatcttcctcttcagtgattgccctagaatgtccctcgttcagattagactaggttcaagcgtgagagcaggacaagcagtggagagtgggaaaggcagcttagcattctgtacccccacaacttaccaagactcccaactaaatcagcagcagcagggggtggggcagatgggaataattggtaaaatgacaaaacagaagagatggaattctctagtcgaagttgcccccctgtccctgtacctttacaccaaccttaacagatacagggcaattttctcttcttcgtaatttcctagttttaagttgggtgaccattttacaaaacttcacaactgacagttccacagacctggggacagatctacctacagggattcacaaaaacagagaccaataaatgaagacacaggagacagttgaggctgtttttggtagagaccagcacctagggcacagtttctttctggatataagtacctgtttggcaaacattttctatctcccctttttctcccactcctaaatctccaagcccctctgctctattctcaaagtctgacaattcctatacagagacaactcaaacatccctacaaggtagtagtagtggtgttagtagggacgaaatgcctagacaaaccacggaggctggggaaaaaatgaaaagtatttatttccatatttcatctgggttcctatgtttccttcctctctcccaaagcctatcattttctgcaacataatgcgggtaagggaggacatgttaggaaagctggcagagagttctggaggctcccttacactcctgcctactctaatcttagccatctaccacctccaagtactgcctcccaagtactgcccactctgtacaaaccaggccaattttcttttccttctcctctccccttgaggtctgctgtcccctacagatctttacagaaacatggagtgctgcaaacttaggaacagatttacacataaaaacgcgtgatacacacccaaagaacaaatgaaaagacagagagagagacgtggttattaatggtcagaccagtaaccaagacatgagacccttttcaaatccagagccttgattatcaaacatttacaacctctttttacattctctccctctcagggctccccagacaactgtcctcgcctgtggaagtagccctctcttcctcatctagtctgccttttccctgctagaagctgcaacctttttcttcccaagcatggtctgaggtgaaccgagtgtatggaaatcaagctagcaaaaggtagatcatttttttttaattgttgtgtgccattccaattacccatctctctctccttctcaccgcccgcctcccatgaccaggtcgcgtatccagtgttcacctctgatacccacatccacccccaagcgatgcgcaccttctcactgaccttctctgcttggatcagaggcagttttcttatttccttgcctcgaggtgctgtgtcatacagcagcaggaacagacagtcagacacaaggactcgaggcaatggcggcggctgtgtatggggattgactcggcacctgggactcaagacgagataaccgctttatcagattaaagactgcgattggcaaactgttgtcacttttggtattcttttctccttcctgttcccagggctcctcagaacctcgcgcgtagttaccatttaacatctaccttttcctccgcagacgaggttcttccacgtccgcgttacccacaacggcagtgggaggagctagagcgtagtttatggggatccggcttatggaagcggagtgatatcaggctttgtttagcgccgcgactcttttctgtcggagggctccctgtcctgtaccctgtggccgcttcaggtattggaatgcgcagggacgaattccggatatagggaaaacggcgctggaacaagagaggcagacaaataccagagtgtttctgtattagttccccttttgcgggagctccccccaccaagcctaccattctttcctgaactgaaatgcacatgggtttccagctgtggtgtcaggaaatctcttctggcctgacaggcggaagtgttccagtctttcgaagttcgttctccaaacacagaggcccactgaaatgggcggtctcggggtggggcccagggtaggaaagtcagcaaagagagtcaagactgagataggaggatacatactaatcgattccacaaactttgtgttccttcgagtcctccctcccagcccttaattttcattttcttttttttttttttaagttctaggatacatgtgcaggatgtgcgtgtttgttaaataggcaaacgtgtgccgtggtggcttgctgcaccaatcaacctatgacctaggtattaagcctggcatgcattagctatttttcctaaggctttccctcaccgccccccacaacccctgacaggtcccagtgcgtgtttttcccctccctgtgtacatgtgttctcattgttcagcttccacttataagggagaacatgcagtatttgttttctgttgctgcattagtttgctgaggataatggcttccagctcgatccatgtccctacaaaggacatgatctcattctttattatggctgcatggtatttcatggtgtatatgcaccacattttcttaatgttatcactgatgggcatttgggttgatgccacgtctttgctattgtgaatagtgcggcaatgaatatacgtgtgcgtgtatctttgtaatagaatgatttatattcctttgggtatatacccagtaatgggattgctgggtcaaatggtatttctggttctagatatttgaggaattgccacaccgtcttccacaatggttgaactaatttacattcccaccaatgtaaaagcgttcccatttctctgcaactttgccagcatctcttgtttcttaactttgtattaattgccgttatgactggtgtgagatggtatctcattgtgattttgatttgcatttctctaatgatcagtgatgttgagcttttttccatgtgtttgttggccacataaatgtcttcttttgagaagtgtctgttcatgtcctttgcccactttttaatggggttgtttgtttttttctcgtaaatgtaagttccttgtagattctggatattagacctttgtcagatagatagactgcaaaaattttctcttctgtaggttacctgttcactcggatgatagtttctttttctgtgcagaagctctttagtttaattagatcccatttgtcaaattttgcttttgttgcaattgcttttggcaatttgcctgtgcctgtgtcctgaatggtattgcctaaattttcttccagggtttttatagttttgagtttgacatttaagtctttaatccatcttgagttaaattttgtataaggtgtaagcaaggggtcaagtttcagttttctacatatggctagccagttttcccagcaccatttattaaataggtaatcctttccccattgcttgtttttgtcaggtttgtcgaagatcaaatagctgtatatgtgcagtcttatttctgagttctctattctgttcgactggtctatgtgtctgtttttgtaccagaaccatgctgttctacaaggttactgtagccttgtagtatagtttgaagtcaggtagtgtgatgcctccagctttgttctttttacttaggattgtcttggctatacgagctcttttttggctctgcgtgaattttaaaatagtttcttctaattcggtgagaaatgtcaatggtagtttgatgggaatagcattgaatctataaattactttgggcagtatggccattttcacgatattgattcttcctatccatgagcatggaatgtttttctatctgcttgtttcctctttg

SEQ ID NO: 1563172 - DNA, 4001 bp, Homo sapiens
acacagtctcccgacacacttcattgatgtacatcttaatctggccctgactttcaatactcgcatttaagttatccggggcacacaaagcctctctaacagtggggtctggagtggggctcgtgtttctagccattgagaggctggccaaatggctattgatatcctggctaaatggaaagcccgcatccttgggctcggcaaacaacagttttccctgaatgaaaagacacttggagaggtccagaacacaactgccatttttacaattttgagcactccaagtatttttatgttcataggggaatggccgctgttttattgggtgtgctcggttggccttgcctccccctgagggcctgtcctcagtgccacctggggccccaggttcagtccaatccccatcctcagtccagggccgagccatagtttcaaaatcaaaccaaatatcaggctcctcctcatccagctcctggtcatcgtcccactcctcttccccctcctcctccagcttctcactgtcatctcttcctatggtcagtttgtaaacgcagtagcaggcaccagccccaatcatcagtcctgccgccatccaacccacttcccgagcccggcccatgctcaagtctgtgccagccttggggcaggacaggagagggccttgctccacctgattgaagaggtctctcaggtccagggtgagtaaggatggagggtagcagtcttcagcttcttccaggctcttgtagctctcttgtgatgaatctgtgggtgaaacagagtattagggctcgggactatgtttggctttgtgcctcacagacagggtggatttcgagttggtgataaaggcagattaacaggatacaatttctttgttcttttcttttctgtcttcctctatcgacctcaggagcccccatttctcttcctgggtccacagggaagggcaggagatgggtctctgctatgatagctaggagggtgacagtgtgagtacctctcaggtagtctcctacaccagacctccacccccaaagattaagggcagtttctctcattaacctctaccaaagtcagataaattccttcgttttcccttgtcttctgttgtcagtggtccctccacggtgatagaggatagagtctggcagaaggacaaatgcaaagacaggtaggcggcaatggagaaatgaaagtgtagtggatgaactgaggacacaggtcccaatttctgtttttgtgaattttagacacttgagtttaaaatatttctcatactctactgactttccggacgcaggcctcctccgccccacttgtcgtccgccatttccccagcaaaggccgccacacccctttccctgcactgaaatgggagtgggtgtggagaaagaaggggccaggagagggcgactcggacctggccctctcatatcccagcccccctcctccgccacccccacccatggtcctgggctaatcccaccttcacactgacctgcaaggttccaaccaaggcagttttctccttctctcgctgaaacttgtgccgaaacctacaggccaacagacctacaaacctgcaaacagacaagggaccgaggggacggagtgcttggtggacggaccagcacccgggacactagaacctttcttttctcggagtctctggaaacgccattcactcccctcacccccacccgaaacccgccacttctctctactaaaatgagcacggggtggggtgggggtgggtagcagtatttagaaagtaggcgagaaagggacccagctgtgatcggcctgaactcggatctgtggcgttcttggccctcttccacccatacctcctctcaagcagcgcccaccctcgcaccgacctgcacggtccgagctagtttccttctttcttcacacgcctgcagagtaatagggggctggtacccagacggaggcgactagcaggacttgtgctctaggcggctcttggtcacgtgacggccacgtcaccagtgcgctctggcccccaatttccactcccacaagcagtgcggcaggcgccagcctgccttgtatctccccctcaacccccacagtgggccctgtcacttttttcctctgtaacaataccagaaaccagaagtggccctgtctttctggtgtttgaatttatgtttctctaattccaggaaggggcagcatctttaggaaggggcagcatcttttcctgagtctacccttcatttacacttcttggggaattgtctcatcctttccttggctctgaaacttctgcagcccctttcttaaatttctacacttttccgtgttcagtctctacaccaacattgggtgagggggcagaaacggaagtccaggcagtggtgagattttaattagtattttgataacatttaagttatattttgtcctttcttttttattgacttgaactacactattttgtaatcggaaaaaaacaataaagcttttcccacttggagaagaaataattcaaatctttttttttttttacagatatatatatatataacataagcaagatttcccagttaataggaggcctcattgatttgatgaagttagtttgtatcaagttgaacatattttcttcggactgcacaggaaatagcagctttcaaacaacatattaaaatgtaaaaacacacccttagaaacaaaaccagttgtgctttcaacatgatttataaattgatggataaatgaatctataccgagaaggtcagtgttctaattttgaccattttaagtaagtgaactattgtccctttctttctcctggctgaactcatagtattaggtgtcagatgactgagatcttcatagaagattgctgggtgactttcactctggcttcaaaggacagattttatgcagaccccaacttcagatgaatcttacatcttcagatgaactttacagattagtgactccacagattagcctgcctttcattcacagggctttatttacaatctattctgaagtttgtggtgcaacctataaatcttccagaaattagagaatttcctgttatcctattgatgaaaatgagacttgatagaggtaattttctttccatcatgacactgttggcgatctctctgttgtctgccattcatgtattttatgctaccctagcagtggtgagtgttcagcattttccagtggagatggtggtgagggtctgtgggtgactgggaatcagtgcaacacccctgatgtctgtgtcattttttcccctcacaagtggaagggcaatgcacaggatctcaagcagttgccagaaaaaaagaggacttttcatttcctgccttctattacaacttcattgagccaccagtacaagcccctcagaataatcccaaaactcagggaccaagtatgcagaagttagtcctcatgcatccacctgtccctgctgaggagtcatactctaaatatagacactccaggcaacctcttagaacattgaaatatgacaccccagagggaggggctccccagtgaggggctcctgtgtggaggaggccctttcaggaggcaagccagggagtcctagtgccttgctggtgaatattcagaagtcaatatgtcacaactttctggtcttccccttttatagtccaaactcaccaatatcacatcttatctctctaaatctttacctcatttttttttcatgaccctttattaacttcccctagacaagtgaattatacttatgaaggcttactaacagaactctcagattcaacagtccatcattcagtgtttggctgctaggtagttgtataagtggcttttgtttgttttgaatatatacattagaaaaaactaaggagtatgtaaagcttaataaagacagatgacttggtgtcacagacatggctttacaataagaactcactttcacaacacttagccaggcttcaaggacaaaaactttactccta

SEQ ID NO: 1563173 - DNA, 4001 bp, Homo sapiens
gcttcgtttacagctcctcattaacaattagaaaatttggccacactgggctggaattcccagttgtcagcctccaccagagaaggcattcgcagttcctgccactttctggttttgttgtactctggtgcaatccactcatcgggttacctgtctgaaacatacaaagaccaacaaggatttccacttacactttcgacattttaagtactcaggatcaaccaggacaacaccgtctgtggagagaaggacagacagcactttggtcaggaaaaactctcagactatgaaacagaggatgatccctgaaatggttcttcctattcttccctttaatttgcctccttttctgcacggtctttcctggactttcttttactccctagtttccattcctctttccccaggcttcccttttttggactcactgaccaatgggttccaccgtgtccacatggtccacgaagtcccgtttccccaggtagatggagagctgttgtggaacaacttcccatgttattctcacaatcatttttgaatggattcccctgaaacccccaacccagacccctgagaccttgaaggatgtacccacctatcccttttgccctctcatttgcccagctgggccaggttctctcaccttcccattggagctggtcttcttaaacaccctatgaggagaaaaccagaaagaggatggagagggggattggaagtgcagggaagaggaaataagggaattggggagaaaaagaaatattcttaggattaggagaagaggctccaggagcataggatggggcaaaggtagggataattggggtagaatccaaggacacaagttagggagaaattggaaatccccctaccccaaagggaaatacttggattggggtagggagcaattcacaggttcagaggattagaaggaattcttacttggacatgttggctatatagttgatgttgagccttttctgggaaaagggaaagaagaaaggctcaatcatttcatttctattcttctcaccccactccagcataccatccatatacacctagtgtgatgtaacctttcctccttagacagacacctcacccacatcaagtacctcctattctcccttctgccaagggtacttcttcagccatattcttgcccatcttgggcaagaggggaaaaaaaccttcctattttgtacaaatcattgactaaccatactatgtattctccagaaagggccaaacttcctagaatggctggggaactcttgagaaccctgagagagaaggaacttctctggaaagaggctggacagaggcttccatccagaaaagtgtgagaaaaatgtgtttcttggtctgtatgaggctagacatcccctggcacacactaggtgccaagacatgtttgttggatacatgaatgaatgaatgaatgaatgaatgaatggacaaatcaatggattctgtctccttctgctcctgcaatggatcctgaacctgagttcacctcatgatgcccttgactctcaacaaagaagggagaaaagtgtgagagagaaggggttggtgccttcatgctctcagtttttggtgacagaagtctctatggaggttgaaagtcctccttgaaccaactcatccctctcattgcctttcctagattttcccatccttatccccatccaggtccccaggggctaggcctttggatgggaatccttagagagagggagatgtctctctagtgctttcctttgatgcttactgagcctggcccagggggtgagcttaggggagcttccagaggtctttggagggtctctaggcctgaatgtctataggctatgtcaggaagggtgtccctcaactgctgcctgatatattaagagggatgctaagagcaagggatatagggcttagtatgggctagaagtagagggctttggaatattacctggggagagagatgaagttcacatcagtctccagctctggttgctatgcctgcctccccagcctcttatacccacagtcctctgagtgttttgattggtgggggtcatgggaaaagaatagggttcttggtgggggggcataaaacactgctataaatagttcaggtgccaagagtttggaaagcagattagtgcctaaaagattagtggctaaaagattagcaggctattgctgctgggacagagtgggggtaggaggttgattctgatgatgttaaaggcaagggagtttgagaagggtaacttcaggattttggccttgtgaggccttgaacctgagaactgggatcaaagtggagttggaggtcttaaaggtgaagcatggtgggggattgaaatgggagggctcaaagtataggcctttgtgtttttgaaaggaatacctcgtgtcccactccaatctctatatcagcggctccaggccacacaaaagccaagggtatgggaaagagtacctcgtccccagccccccaccactttgggacattggacttttgaagctgatgtttagaaaccctgattatcccagcttatgtgcacagcaggagtcaatctcctgtaggtagtgggggcaggagtggtggagggggatctgagtgcattgagctgtgtatgcacatgtctgtgagccttgaacttctcttctcattggagaggaaggtaatataagattcccagcccagggacaggttcttctggcaggacatgcatgtggagggaataggcggttgacatctgtgtcacccctaccgagggtaaacctcctcaccccagctcttgactctgtccaatccctgaaactaactaagtccatgctctaagcagcttctcttgcctcgtatgaccgctcatggaattagagatatttctgtctcttcagctgccaggacccccacaacagcaacaacaaagtaatcttcctttcttgactgtccttcccacagggcctaggctcaggcttcacgggcatagaaaatgtagagacagaatctataagctctggggtttcaggactctgacctccttcacctccccttacagcagtctggacattagtagttatctatagacacagccctcaaccccaacccccacaatggggtgtccattcctcagaggatggctatggctatggctcagagggctgggcagggccttccctaactcctgcccctcactgagggccctggacagctgtcccatattctctttgcacagttcacagtgtcagcccctgccattcctagccaatatgcatctcagggcctggttgtttagttactataactctctccttctcaggggctttcagatagtgcaagaagcccagattctgcaggtaccacagtgggataggaactgatgctggacatacaggaaagatttgtatacatgccaaggttggtgtctgcgaggaaggcgaaaagtcagaatgaatctacttttcatgccagacatggcaatattcaatggcaggaaaggaaggcctctcttcttgtatgcttattttcatcattcaggaaacctttcccagatctctagaatgactagtggtcagcctgtttttgtctttagacccacactcgaggctcctacctcccttttaggtactcaatcccgcttatcttctctttctactcagatccatgggcctctcggtaggaaaagagtagatctgctaggtctttaattcattattatgatggaatgtaaatcattactcttttccagaagtttgtgcatttcttgactgaggtaaaattcacaaatcttaactgcagctcaatgaatttttacctactgtggcaagctgaattatgcccccaaagatgtcaggtcttaatcctgggaaccgatgaacattaccttatatgaaaaagagactttgcagatgtgaataaattaaggatgttgaaatagggagatcattctggattatccaggtgggccctaatgtaatcaccagtctctttatga

SEQ ID NO: 1563174 - DNA, 4001 bp, Homo sapiens
cagcctcctgagtagctgggatcacaggtgcctgccaccacgcccggctaatttttttgtaattttagtagaggcccggcctaatttttgtatttttagtagagacgggatttcaccatattggccatgctggtctcaaactcctgacctcaggtgatccacccgtctcggcctcccaaagtgctgggattacaggcatgagccacctcgcctggcgggaaaatcctaactttccatgcctaagtaacaaaaggaccgaaggcttccctttgaccttttctattgggtagatagtagactggctgtctgcaaccaatcggactgatttcgggtctagtcttcgtgtgcaactttgtgacttcaccctagtctctgattagttgggttttgcaaccaatcagatgtttgcacaggagtgtgacctttgtaacttcaccctttggttggctgctgcctgcaaccaatcagactgatcgcgggccaccacttcagttacatgaggtgagcatgaagtggccaatgggaaacttctagggggtatttggacccaagaagattatgtacccgggcccttgagccgctgcttggtcggctcccacactgtgacgtgtccttttgttttcaataaatccctgctttccttcttttgttgcttcattctttctttgctgggcgttttgtccaattctttgttcaaaacgccaagaacctggacaacttgcagtcacgaccctctaccggtggcactggggcgcaaatgaagctgggaatgcaggacccggcgcatctgaggaagtgcagcggggcatggcggtgctagagggtggggacatggaggcggcacaaggccaaggcgccgggggatggccagagggaagtaacggccgcgcttgtggtggagatggggacgggacagagaagtcttggggggtgaccggggtaggcacggcggtgctggggggagggcgcccaatgaagcccacgggggggaaaggggcgtgtcttaccgagcgtgttgggggagtcacagccgtgcttgggaggatggggtctgggggaaggacggggcgcgtcttagtgggatgagggggagggcacagccgtgctgggaaggcaaagggccggggggcgggatggagcatgtcatggtggggccgaagaggcggggggcgggaaggggccttcttagaaatcgggagggcgtcacagctgtgctcgggaggacggggcgttggggagggacagggagcgtcttagtggacccggggaacacggccgtgctggaaggcatcgagctggggggttgggggcgggacggggtgcctcttaggaagtggggcgggcaaggctacgcttcgggggatggagccttggggcgggacggggcgcgtcttagtggggcagagcggggggcgcggttcggggcgggtcttagggagcctttgaaggccgaatccgggcagcggtgtagctgggcgtggaaggcggaggacccagcagggcgtgaccggcccagtttccgctccctccgggtcccggccagccttcctccgccctcccttcccttcctcctttgttctctttccctgcccttccgccttcccttcagttcggtctcctccacccgcccttcgtcccctcagtcgccccccatccctgggctctgctgtctggcgtctttcccgggcacagaacgcgcctccagctacattttggagactacaaggcgccggacacaaccacgccctttacaggggcccaggctcgcccggggcgcccctcgccgtgctcgcgaccccctccccaggcccccaccctaggccttagtatgggccgcgtcccggggtcccaggcacctggcggcgggcgcggcgcgtcccctccgcgcggcggatcgcatggccgagcgctggcccagagcgcaggaccttgccctgcgcactccgcgcccgggcgccgctagtgccaaggcttccgccctctcagctgcgggatctgggccgggcgcccgcccctccttcatccgcgtcatctcctggctctcgggacctccgggacctgcgcgtggaaacaggttttcccaggtcgtcacacgggaaggcctgggctaaggagctgattaaacccagttacgattgaccgggcgcggtggctcccgcctggaatcccagcagtttgggaggccaagacgagtgggtcacctgaggtcaggagttcgagaccagcctggccaacctggtgaaaccccgtctctactaaaaatacaaaaattagctgggtgtggtagttcacgtctgtagtcccagctattcgggaggctgaagcaggagagttgcttgaacccgggaggtggaggttgcagtgagctgagatcgcgccactgcaactccagcctgggcgacagagtgacactccgtctcaaaaaataaataaataaaaataaaaaataaacccagttaggcttgagcacagggagccccttttctttttgtcaggaagggtcttaggacctacccagagcaatcaagttgcgatttcagtttctcaaagcttggtgtttgaaatgtctgttccggatgctggacttgtactctaagtctgggacggggaatgctagatgggccctttttttttgcttttattactattattattattattttgagatagggactcactctgtcgcccaggctggagtgcagtggtgcgatctcggctcagtgcaacctccgtctcctgggttcaagcgattctcctgcctcagcctcccgagtagctgggactacaggcgcgtgccaccacgcccggctaattccaattgctatttttatctttgtttctttcatcagactgctgttgaaattactccttttgattaatcactgtgccctggacccctccccatcttttctgtgactcatccttttgtttttgaatgatgctattttgctcattaccctctcacgtaatgctttttttgtatctttggctctccctttgttgtttgtttgttttgtttttaactcttttgacctctagaaagatcaaggctgagagttgaggctgcagtgagcctttgtttttgtctaactctcttgacctccagtcgctgattctctcaagccccttcatgtcttacctcatcccctcacatcccctcacaatgcaagatctggtcaaagtataaattcatattttgtaggaaatgctagcttacaaaacaatatcacatccctacctccagcccaggtgacccactttccctcaaagggggttgcttaggtcctcttccactggtcagggacaaaatgattccatagtcttcaagattaacagtactttctttttccaaggctgaggctgtcaagggtgaggctgtcaccgcctcccaaggaagtggaactaccggtgtgcaccaccacccctgacacatttttgttaatttatttttttgctagagactaggtcccactatgttgcctaagctggtctcaaactcttgcctcaagcagtcctcctgctttggcctcccaaagtactgggattacaggtgagccactgtgcctgaccagccacaagactctatgttgggtgtgtaggtgggaagcatatccaggtcctcctcaccattattctgcctccaacatttatgccatttttttttcctttgcaactcagttctctatgcttaccaaatggaatcagtaaggtaggggaggcggggtggaagtttgtgttgaaaacatagattcagaagcccctccttaaattcactgagttaggattttcataaatgagggagctgccccacactcccctgggatgagatgatgggggtgcttgttcaagacaatacagtcaggagccctactccctaaatttattcaattggaatctcccaaaatggtgctgggaattctatttagaaaaaagaccattcacttttaattggcaaatttagttcatttacatttattacgctggccatctgtctggagcta

SEQ ID NO: 1563175 - DNA, 4001 bp, Homo sapiens
gcactgagagcctagaagtggccgtggtgtctgtccaggtgaaacctgaccaaggatagacacagctggtgtgggagcggggagggcagagaggaggggtgggcaaggtccgcagggctgcgaaaccccagggtgtgagtgggagagaagcgattggttgagggatttcccctcaacgccttttcggggatgctgggaggggtgtttgctcctagcaggattcaggcacaaaaccagtcttctgagaaagacaatgagctttgtgaaaggaaaataaatctcaaggcccgcaagtcaataagctaaagggaaaagtcaagcggggaactgcttagggcctctgcctcccattctagtcaaagtcccccctttgctcactgagatagatgcgtatctgattgcctcctttggaaaggctcatcagaaactcaaaagaaggcaactgttcctctctcacctatctgtgacctggaagccccctccctgcttacagtcttcctgcctttgcttcaagttttccggcctttccagaccgaatcaatgcacttcttacattattgatggatgtctaacactgaattgctacatctccaataattttctgtctgtcgaagagaaaaagaccttagatatcatttgtgctttgtttagaacacagaaggaagggataaggtgtacgccgtgctcgtgaggtttttttgtttatttgttcgtttgttttaccctagagagcacacacaattctcatattctaaaagtaatagcaaaagacgcaattacgtttcaccaacctaatagcatcttcaccgggaaagagattgatttaaaattgtacatggagagaaaaccaaaatgagcattttaataccctcagcattgctttctgacctacaatgacatgctgccaatggtcagaaaacggaataaaagcaaaatactgtacaaatgtaatgagaaaaccccaaaccaccacaaactaggggaagatggtttttgcagcaatcctgcccagcagtggtttatctctgggtgtggagatttaggaaaagtgctctttttctaatttttcttttcttttcctttttttttttttttttttttttttgagatagggtctggctgtttcacccaggctggagagcaatggtgcgaccatagttcactgcagcctcaaattcttgggctcaagcgatcctcctacctcagcctcccaagtagctgaaactacaggcacatgccactatgcctggctattgatttttttttttttaagtagaggtggggtttcctcttttgctcaggctggtctcaaactcctgggctcaagcaatccacccgcctcgacctcccaaagtgctgggattacagacgtgagccaccgtgcccgacctaatttttctttctcccgcaatgttatgtatttataagtaaaaatatgaatattttttcttggagaaaaacgttaaataaataaagagatggtgataacagccttgaatgagtttaattttggaaactgtgacattgaggtgacccagagcatggggcctgcccaaggcctctcctgcagattagaaaacagatcccccttctccaggaaagagctgcattcctaggcctgtaagtcacgggtacgtttctgctttatcaaaacaaactgggcaattattcagagacagaaaagggaacggggagctctttgttcaccacgctattcatgcctggtcacggagcccaaatccagcacaaatgaacattcacaggactcacctctgctcctgggctccttcctgaatccccgatcaagaagaggaaggttctctcccaaaggaagcaagcgtgaaggcagagagcacttgcacaaggctttgagctgggaatgattaacttcgagtttgtttttcccaagtcagaagatcagagagagttaggacagacagagcagactccccccacatcgcagcatgggggaatctcaaagccacgcccacgtctaccaaaccagtggtcagtttccttaggtttttattttgttttattttttgtagagacggggttttgccatgtggcctaggctggtctcaaagtcctgagctccagtgatctgccctccttggcctcccgaagtgctgggattacagatgtgagtcaccgtattctgccagtgtccttaggtttttaagtgattgcctgtgctgttacacagggtgctggctataatatgatcatatccaacctggcatggtggctcatgcctgtaatcccagcgctttgggaggacgaggcaggaagattgcttgaggccaggagtttcagagcagcctgggcagcaaagtgagatgctgtctcttcaaaaataaaaaatattaggctgggcagtgtggcttatgcccataatcctagcacttggggaggttgaggcaggaagatcgcttgagcccaggacttcgagaccagcccgggcatcatagcaagaccctgtctctataaataataaaacaattagccaggcatggtggcatgtgtctctactgccagctactcaggaggctgaggtggaaagattgtttgagcctgggaggttgaagctgcagtttcactccagcctgagtgacagagcaagaccctgcctcaaaaaaaaatgttttaaagaagttatttgttgagtggtaaatgaagtaaataagaaataataaagataagataaaaataaaaaagaaaacatttcttaaagtaaataaacaaacaaacaaaagaagtaaaaaggccaggcgcagtggctcatgcctgtaattccagcactttgggaggacgaggtgggccgatcacttgaacccaagagctcgagactagcctggccaacatggtgaaaccctgtctctgctaaaaatagaaaaattagccaggcatggtgtcacatgcctgtaatcccagctactcgggaggctgaggcaagaaaattgcttgaaccccggagtcggaggttacagtgaggcaagatcgcagcattgtactccagcctcagcaacggagagagactctgtctcaaaaattatagtaataataataataaacataagataaaaagaaaaaaaataagcaaaaaaaaaagtaaaaaaaggattattttcaagcaatgcttggtttaaaaacatagaaaagacgggctgggcacggtggctcacgcctgtaatcccagcgctttgggaggctgaggtgggctgatcacctgaggtcaggtgtttgagactagcctggccaacatggcaaaaccccgtctgtactaaaaatacaaaaattagctggatgtggtggcgtgcacctgtaatcccagctacttgggaggctgagataggagaatcgcttgaacccgggagacggagcttgcagtgagccgagactgtgccgctgcactccagcctgggcggcagagtgagactccgtctcaaaaaagaaaagacaagacaagaccaagagggcaggaagcagtttctgaggcactgcatgatcattgctgggaagttactctgtagaatggaaccctacgcaatggtccctattattcaaccatccttgacctacaaggacggggtttcatagagttccacctgctgtctcttcgcaacttcatatgcagccacatgctgggtctgtgagaagtcacatagcctacctgatctcacttcctccttatgtgggggtggaaaccaccctacttctgggatgaggagctgacacgctggcacactccagcctgactcatttttacaagtggacggttttggtggcatgtctcaaaacgagtattaggaggggtgtcagaaatgttttcttttcctgccacaggtgtgtgccctaatggtaattgctttcactttgtgatttttggcaacaaatcttaagtcatttcctcgtagggggcctaaaggaatattttcacctatattttaatttatatattcataattattatatataatatagtataacttttgtacatc
